United States Patent Application Publication US 2015/0052636 A1 - sequence listing, part 29

SEQ ID NO: 101726 - DNA, 1033 bp, Mimulus guttatus
  Intron number 1 from transcript mgv1a002375m (locus mgv1a0 02375m.g) derived from phytozome v7.0 (chr-ID scaffold_44; pos 1143679 to 1144711)
tccacgctggtatctaatttagtcctttgattgaggttagagctgttttccttgttccaaaatattgattattgttttgttttgacgccttctcattattaggccgatgttttgacaagaaaatttgtgcctattgtataaattatgtttttaagggtttatttgtttgtttctcttttttaattcatgttatttgccagaaaagtgaagagcggaagtagatgatttatgttttagaaatatgacgactgtagttgttgggatatgaaggtttatgttgctcgtttagcactaacagaaaagtaagaaatcttgttgacactttttccttattggttgccaatggataaaattatgaattaagtaaatgtgttgataattgtgtttgatatttgccgagcttggaagatagtgttaagctgcaacactgatgacctattttggattcttgagtttggttttatttaaggaatctgattggaagtatttggactactaaaaagagctgttggactctttgagttattatgctcaagtaatggagcactcttgttcatcatggtattgtgtatcatactcaattctcttcaggttcaaacatgcgaggttccaataattccttgcttttctcggcaattcttgtggcatgattaaataagataatatggcagtgttctaagtaatctcatataggagaagggtgagagtaacatacatcaagaaatccatccatatgatgtttcttgataagtatatatatatacacacaggtcccctcctaatgattcgaacccatgtccatctaggtcatagatgcaaagtgctacaaacaagctaccttgtcttgtcaatatgttattgataaatactatttttgttgttggaagttcaaatttcatgtatctttgtatcttcagtacttactttagttgaggcaacaaattctgtagtaatttttggacagtaaaaccacaatattaatcttaagtggtgtatctagaacgcatctgattgaacttgaatgattgccagc

SEQ ID NO: 101727 - DNA, 649 bp, Mimulus guttatus
  Intron number 2 from transcript mgv1a023477m (locus mgv1a0 23477m.g) derived from phytozome v7.0 (chr-ID scaffold_24; pos 340266 to 340914)
aacaggccgaagcaaaaagttcagcttttggaaaggtatcttcttttaattctacgttaatttagttacctctaacgaactatccgttgaaaaagtcagagaaactcatcattcatttgtggaatcatgaaccactcttagtgatcactctaacattagaaactagacttttagtagaacaatttttttggttaaagatcaaacacataatgagttcaaatgtgtggtggtgacagttaaggaatcttgatagatagtgtttggtcatgttctttatcttttcccagtgagcatagctttatacatcaggccctgtcataaagacatgaatttagatgggaataatataagtttctccggtatttgctattatctttttgctgcatgtttctctaagatcaattaatattctcgcacaaaactttcaagattgtaatccataggtggcctcttacttgtataccagcttattagacgtcagtatgtggtctcatgttaaagttaatgagccaatagctttctgatgctctttgtggtgtacggaggaagttccagcttgatttttttttttttgtttgatactattggtattgtcatttttatcttcattttttttttgtctttgtgattgcagtctgaagaggagaaa

SEQ ID NO: 101728 - DNA, 692 bp, Mimulus guttatus
  Intron number 1 from transcript mgv1a014620m (locus mgv1a0 14620m.g) derived from phytozome v7.0 (chr-ID scaffold_6; pos 268462 to 269153 reverse strand)
gctggtcactccagtaagctttttcacttcccattttacccctctccccttttttcattgttctttcctctttcagtattactatgtcttaaaaatgttgtctttaatgatgttttgagctgaaatcagctcataaccttaaaaaatcttttctattttaagggttttgaaaatgggttatggtagttactaataattaaaaaaaaaaattaaatcttggaaaagaaaaagaataaatataaaaagaataaaaatgttggctttaaagataagagctctcatttcttttgttcaatttaaaaatcttttctttgaggttttggaaaaatgggttatggtagttacaaataattttcagcaaaaaaaagtgaaatctttggaaatattattagatttttttttcaaaaaaaaaaagtgaaatctttccctttttaattgttttttcctctttcagtattaagtgataaaaatgttgtctttaatgatgttttgagctgtaatcagcttattaccttaaaaaatctttttttttaactaataatttaaaaaaaaaaatgaaatcttggaagataaaaaataaatataaaaagaataaaaatgttgtccgaaaaataattttcagagaaaagaaaaaggtgaaatctttggggaaaattaatagattttttttttcacgtgtttgtaggtgccac

SEQ ID NO: 101729 - DNA, 692 bp, Mimulus guttatus
  Intron number 1 from transcript mgv1a005335m (locus mgv1a0 05335m.g) derived from phytozome v7.0 (chr-ID scaffold_26; pos 1329823 to 1330514)
ttgttgcgttgggtcctattcagtttggcttcactgtaattatttcttcaattcttattcttattcttttttttttcgtgaattattccatcggtgttgcttgattgcaatttctggatatatgaatttgaatttgagaaaaataattaactgattgatgatctgtttgctgataagttgtaattgttcgaacttgagcaaggaatcgaaaactttataggctcgatttcgatggagttgggattcgggttagtgagaattattcaaggggtattgaattagggcatctgaaaactttagttcgattacgttgttgtagtgtttcggattgactttataggctcgagtttcgatggagttgcgattcggcttagtgagaattcacagggcaattgaattagggcatctgaataatgttgattccagtttctcgggtttcattttactgtataaaatggaggttttagtgtgcttatcattaaaaatgaaagtgaatgatgatctgatcttaatttgtgctggagtcttgttctttctgttttcgaaaccgtagaatgtatcttgatcctatgattatttgtttgattgtgttactaaatacgaattaaacgagcaaacacaagttatttattaattttcccgttttattgcttatagtgcggttacacttcaccgacacagtctgctattac

SEQ ID NO: 101730 - DNA, 419 bp, Mimulus guttatus
  Intron number 3 from transcript mgv1a020488m (locus mgv1a0 20488m.g) derived from phytozome v7.0 (chr-ID scaffold_36; pos 287406 to 287824)
ctttatttgtgagttttgttttactttaaataacgtaaattgtgctatgaatctgtcttcttcgatggccgttgcattatatttctggtttatctgtttgtctcgtttaattctccatcattggaatacacaaatatgatatttggttattggaagtatttgtataagaagtggtcttgaggaaaaagacggagaaaatactgtgcttcaataagaaaaatagaaaaaaaaagatatccacgtaaaacaaaacaatagtacgggatgatgggatgtcattgttgtctggcctcatatattctattttccgtttcccatttttgagttctatcgtctcaatatagtttacgatgataatatttttgtggactttgataagactaatttaccggggttgtgaatatttgtgcaggcctagc

SEQ ID NO: 101731 - DNA, 625 bp, Mimulus guttatus
  Intron number 2 from transcript mgv1a011607m (locus mgv1a0 11607m.g) derived from phytozome v7.0 (chr-ID scaffold_32; pos 231940 to 232564 reverse strand)
ccgacgactccccaaattgagaggaattgctggaggtaaattcaattcttcaattttaattttaatttattatttattttgaaattgcatttgccattatttggaagaaaattcaaaactgagattggttgttttgggtatttgctgtgattgaatttgttacttcttatagttagcgaaagaataaagaaaaattggtggagaaattctatttagaagcagaagaataatacttcgattttctgaattgcttgtttataatgtgtcgtcgtatgtcggatagaactactcgttggtattatgaaatgaaatttagcagtgcatcgattttacagtttaagcgatgatactgccgaacgtcatcttgtcgggaaattttaattcatatgcttattaggtaacatgggagaagtttaattgctcggttttaattccgttcaggtaatcccgtgtgctctttctcgtgatttggggcttcaatatattaatgcattactgattaggattagtcttgatagggaatcttcacacgaattacgtttttaaatgtgacgaatgtaaatatcgtaccactatgatgctgatacggttttttttttttttttttttttttgtaaataaaggc

SEQ ID NO: 101732 - DNA, 466 bp, Mimulus guttatus
  Intron number 1 from transcript mgv11b019917m (locus mgv11 b019917m.g) derived from phytozome v7.0 (chr-ID scaffold_1 21; pos 148656 to 149121)
tgttgataactggttctaccaaaggtcattttcgtctttttttttttttgtgctttattttctgcctcagaaaagaaactatgcttttctgcattaatgctgaactgaactcgtttgctttattttagttctaatcaatatattgccatcctaaatcaaatttttgatcttaatttttctttatttggaagaaggggtggggttaagattcaatgcctagactttgaccgtaataatcgaatcttgttacccattctccgaatgaggaccggtgaacaagatttcacaggagaccgtctctgagtttcgataattccgagtatttatcttagaatagttatttacatgggagcttatgccgattacagtttcgaggatttgagtctattttatttttcctgtgtagcaaaactacaactctttttcaaattttggagaacgtcttgtcattttacaggaatagggt

SEQ ID NO: 101733 - DNA, 522 bp, Mimulus guttatus
  Intron number 2 from transcript mgv11b019917m (locus mgv11 b019917m.g) derived from phytozome v7.0 (chr-ID scaffold_1 21; pos 149171 to 149692)
ctctagatcaggtacatagctcttatatatatatatatatatatatatatatatatatatatatatatatatatatagatatatatactgtcgtaagtttcaggcagttttgatatatatgctctgatttagtttatcgtatttcataatcggagagaaatacttttcaataattgctagtaatgctgcattatcataattccacagcagacaatttattctggccttttcttagttgcatgttctgaatggaaacatttacgaatggttttttttacataaaaactgagaatattggtctttgttttagccgcacccttatattactgctcgtcttcttttccaagaaaaaaaaaaaagaagagagcacaaataaatatctcaaaagttgctttagcagaagctgcttttttcgtttctcatttttcattctgtactacaaatgcagcatttatatatctcaaaagtttgcttatgaattttacagaggaacgagtgaaatcagctctcgaaagcttacgg

SEQ ID NO: 101734 - DNA, 753 bp, Mimulus guttatus
  Intron number 1 from transcript mgv1a001885m (locus mgv1a0 01885m.g) derived from phytozome v7.0 (chr-ID scaffold_102 ; pos 449778 to 450530)
atttcacatctcacccatttctctctcctcttcaggtattttttctctctctaaaagatacgtacatcgtttatatgtcggctttctttcatgttggtgaattatatttacatgcgattcgatgattttttatttttcttctgcgatcgaatttgatttatcgcaatttatttagttagggatcccaatatacagataatgttagatatttcagctaaatagaagaaattgaattgaaggatattggtttaggttttttttttcgcctgcttagctgagattctagtgatgattagggttcctctgttcagaattttattattttctgctggtttttatgtgggatttatttaatttctttgtgggtatttactgaaattctgcagtttactctagggttggtgttgaatttttagtttttcggatgattgattggaacacatgagctgtaagtaaatattttatttatcatgtatcgtttttcgccgtaattggttactttgagagtttgacgaacttagtggctaccactgtgtgtggtatgtgtttttgagtgtcaaagctcttgctgaatcagtaattttatatttgaacttgaatttattagcacaattaatgaccatgatcaaattttcgcttctttattcctctagtagtgaattttacgatctttagattgtgctcttactatcagttgaatctactatttgtgtgctagggggggcagattctgaattgtgatttaagtcgctg

SEQ ID NO: 101735 - DNA, 660 bp, Mimulus guttatus
  Intron number 1 from transcript mgv1a005932m (locus mgv1a0 05932m.g) derived from phytozome v7.0 (chr-ID scaffold_114 ; pos 601614 to 602273 reverse strand)
tggtgctcgtaggctgccttacatttccatcggaggtacgctgttgtctctttctgtgtgtgtgtttgtttgtttgatgtgcgtgtgtgtggagagagagagagagagagagagagaaagagagagagagagagagagattaaagttcaggttttgttcggattttataacttgtttttaagagagagagagagagattaaagttcaggttttgtttagattttataacttgttttgagagagagggagagagagattcaagttcaggttttgttcagattttataacttgttttctgtatttggttgattattgttggttcaagtaagtctactagtaattttgatgctctgtgttttgatctgtttgttactctatattttttcgccttttgtttcgtttagggtgtcaaaaacttggatctaaatcgatattctcgatttgcagagtgcaccaaatctaactttaccgttatttgaagataataatgtttcattaaaattcgacctcttgtgatatgagaaaacatagcttcaatcctcgtgttttcagtatcaaaagatcgattttttaaataccgattaagatgtacaactgacaactctgatatataaaccctcttcagtcgttttgcaggttctttcttgggggtcattagca

SEQ ID NO: 101736 - DNA, 1007 bp, Mimulus guttatus
  Intron number 1 from transcript mgv1a011897m (locus mgv1a0 11863m.g) derived from phytozome v7.0 (chr-ID scaffold_109 ; pos 566404 to 567410 reverse strand)
cacaagaagctgcaatctagtgagtctcggttctaccttagagtttttgtttcactacgttatttgtttgctgttttgtttgaatttaattgtttctgatcggagttatgggggttgtcgtcttttttattttcggatagtgctgaattagagagaatgttttactgattttacttgtctctattatgtttggaatttatatggatcataagtgatgcatgggcttttaattggtgtgcggattgtttgttttttgctgatgagatttgaatgtctttattttgacttgacatttgttgaatttatctgttggatgaagttcagatgttcaatgcatttattttacttttgggatgcaacaaaaaagctaaacaccatgattctttatttatttattgttttcttttttggattccttgttgaatttcagccagttgtcttgaaataagccaatttggaatgcaaattggtgagtgaaatagagctcaaaaattggtttgtttattttgatagttgagttcgttttcgacttcatgagttaaccatcatcgagctaggtttagtatggtgtagtgactcgagcttaaacaaatttccccactgtcgatttggagtagcttgggtcggtttgtagtcttatatttgagtggaaaaaatcttgaatcaactcattttctttatctaattagtagtcttccttttttaaatatgatatattatttgcttattggtgaatttgaatcgtcttctatacatgtgaactgccttatgttttccggaactaaagaattatgactgtttcgaacagtgttttcacgggtatacatatatgtatttgtgtgtgtgtgtgtgtatgcacgtctcttcaagtgatgtcatatttatggtagaaaaatctcgattctagactttgttattagatcagcaaaataactttgccgtttttgtgtttttttttgtttgccgatgcagctccagagatagttgaaaggcctggtgataactca

SEQ ID NO: 101737 - DNA, 723 bp, Mimulus guttatus
  Intron number 1 from transcript mgv1a022977m (locus mgv1a0 22977m.g) derived from phytozome v7.0 (chr-ID scaffold_209 ; pos 241549 to 242271 reverse strand)
ttacttctactactcttgactcgtaagagctctctttccttctctttgtgtgtgtggtttattagaaatcttcgatttatgctgattccgatcaaaacaattctgatttcggagtaatatttttcgattcgaatttcgagttcagatttttccaaaattatttccatcagaattggaatatatatgagattccgatcctatccaatttaatgttccggaaattccgaattttcgtgtgtgaatgttacacttaaaatacaatattattaagtactttatattttaggtcaccaaattaataaaaaaattccgaattccgtcaattacgattcgaaaatttccgattttggaacaagttttttcgttccaatttatgaaattccgaatctgattttttttccagttttgtttttggaacggaattgaaactagtttttcacttctaaaaaaaaatggaacttttatgaaaagagctaattacgatccgattagtccgattttccttccaatttcttattttctgctttttagattccctcattgtatagctcttcgttatgtgatttatacttaatcctttttttgtttttgagaaattattcctaaatgttattgatatagttttaattaaatctataaataattatttattatagcccttttttttgcattttttatatctaatctgattttgttttatatacataaaataaataaatgcag

SEQ ID NO: 101738 - DNA, 606 bp, Mimulus guttatus
  Intron number 1 from transcript mgv1a005131m (locus mgv1a0 05131m.g) derived from phytozome v7.0 (chr-ID scaffold_58; pos 502897 to 503502)
tcctaagcctactcctgatcctaaacagcgccgaggtacttctttttctttctatttttctttttttttctttttttttttttttttccctcaatgaggtctttgatgaataagatgtatgtgtttgttgagagcttcctgtttagctaaaacgatatgcatggaacaaaaaaacaaaattgatatcaaacacagaaaaataggcagttactcgtcttgattcacgaaccatgtcaacaaaagtatatacaattttaatgtggtcacttgtaagtatctttaatctcgtgcccaagtaccttaagatgaatattgattcttaatgtggtctttcttattcaatttatgagtacatcttgaactgtttgctgaatctctttttctgttttgaatgagatgaactatttttttcgaatgaagctacatgtataaaagtacataaggaaaaaagagggtaatgaaaaccactggttttagtagaattgcatgaatacaaagaggcatagtaaaaatgagagagaaaattactgcatcgagtacaattatatctttcttcttaatggttgctcaagtataaacttatgatctcattctcctcaggtgagt

SEQ ID NO: 101739 - DNA, 508 bp, Mimulus guttatus
  Intron number 1 from transcript mgv1a020167m (locus mgv1a0 20167m.g) derived from phytozome v7.0 (chr-ID scaffold_18; pos 624666 to 625173)
cgaaacgcgaatttcttcaacagttgctgcacttggttagcgccgttgcttctacaattaactgcgattttctccgtatagttttagaaaaaaaatgctgcatttagttacttgaaattgattatttccatggattttcggtgcatgtggccgaactcagttaatttcattggtggattttgagttcaaacttcaaatttgacatctgttattttctattttttttttctgagcattaattgattcctgaacgaaggtttggtgctaatcgtaattaggttcaaatgttgaagttgtttgtgtcttcaatttgctaatgcatgtttgtcagtattgatttcataaccctgaatttggggatgtttgttcttctactaattttaacttaacttgtaaaacttcattccaactttttttaagtaaaataattaattttaacgatgtctcgcatttttcctcatttttatatgcagattgccccttggatttgagcaggtctaatttcaca

SEQ ID NO: 101740 - DNA, 729 bp, Mimulus guttatus
  Intron number 1 from transcript mgv1a010401m (locus mgv1a0 10401m.g) derived from phytozome v7.0 (chr-ID scaffold_54; pos 1387027 to 1387755 reverse strand)
gaagagtcggaatttcgaattggcgaataaggtacatttgaattggggatttcttttttgattttggttaattcgtgtgatttctgtttacaatctgctgaagaattaacactgagacttagagcttttggtttcgaattttcgattcgaaaaatgtgtgcttgaatgggatatcatacattaggggtgttgatcggaacagaatttccgtattctaccaattcttcgatcaggatatttccgattttaggacaacatttttcattccgaaagttccgatttctgtttattccaactttctttagtaataaagccatgatcttgatgctgctacgagtggtaaaatgtcacgtaattaactcgatcttgtgtatcttttctcactaaaatatcacggttttcgactatcttaaaatggttctaaaagttcaagaaccagtaccatttattagtttagtgtctttaactcgatgattaatgaagtaacatgatctcgttgaaatataattagtaaagataaattccatactcgggactagtgagctgtaattgaacgaaatttcgtccgacgtgattagtaaagggttctccactcgagtgatattatacctcaattttctcgacctattgtaaattgttttcacgtttatatctatgttgtagtttcattaattttcttgtaaccattttgcagttcagtggtaaatcaatcggcatagtcggattggg

SEQ ID NO: 101741 - DNA, 351 bp, Mimulus guttatus
  Intron number 2 from transcript mgv1a008447m (locus mgv1a0 08447m.g) derived from phytozome v7.0 (chr-ID scaffold_8; pos 1843399 to 1843749 reverse strand)
gtgttggaattcttaacgacaccggagtgcagtttgtaagtcataatataacttaaggcaaattacgatcagctaagatcaaattacgaaaaaatccctcattttttggattgtaatgttttttcgtaaattgatcttaactcaggaagatgactgtaatttgccctataacttaattatcacgagtgtctatagactgcgactgcggctgcatctgaatttacctgatatttatccatacattttcaagaaaatgaatagtagaccaaaatatttaggtattaattgtgttggaggtaataaaaatgaaatgcaggtgaatataataggaatatctcaacaattgacaaa

SEQ ID NO: 101742 - DNA, 819 bp, Mimulus guttatus
  Intron number 4 from transcript mgv1a002823m (locus mgv1a0 02823m.g) derived from phytozome v7.0 (chr-ID scaffold_18; pos 726831 to 727649)
tactttgccctgaggtcagctacatttttttttagtattcttcctcacgaaaacatatcaccaactttggacgcttaataaattcttgcttatcagcttatgtattactggattgaaactgtttacccaccttgttttgcatttttcaagttgaaattaatattcaataaagaaaaattaatcaatgtatacacccttgggcttatgaaaattgctggaaatccatttgtaaaaaacacacttgaactgttcttgctctaaccagacagtcacttagatctaaaccttgtgaaggatcatgtcatctcgtttccagtatctggaaccgcaagacttttttatccactattcctgctagaaaagaaccagatacatataggtaaattatgtagctgacgaagaacaaaaagtacagagtagtcgaagtcaaaagacatgccagatactgcttcaaattcttcaaattttgatgttactgctcacacagagcttctagagcaaaatgaactttgggcatgacttaaggactccaggtgtaacattatatggtctttctttgagaggttttgatcttttccagaactcgtattacttgcataagatggcttatagaatgggtgaactttgatgtggtggttgcttccttttcccattctattcttcaagaaacaggacatactgggtaatttgaaatataatatactgatattcagctcatcctaccgagaagttatataactgataactgttttctaagactgtacattatatagcttccaactacttctgcagtttgttgaaaccgacttggcctccaag

SEQ ID NO: 101743 - DNA, 613 bp, Mimulus guttatus
  Intron number 1 from transcript mgv1a013173m (locus mgv1a0 13173m.g) derived from phytozome v7.0 (chr-ID scaffold_98; pos 964688 to 965300)
cgtaaggtacattatcggagcttcgttgtaaattaattactcaatttttaatcgaacgtgtgtattttgattgttgttttgtttggattttttaaattttttttaataatgtggaattgatgaaaaaattacactagagataatgatatttaattcaggcggcagttttctgaatttcggttccttcatcggcaatatcgaaaattatagtgatattcggtttgtggatatattatgtaatagttcgtcttggcggttcagtttgaggcgtttgattcggttgaaaattgttgcaagagtgctcgagttactctcggtttctatatggtcgccaatgccggtttgtattcaatatttgctttctattttggcagattttcgagaacaaaagcttatggcagccaactggcgatgcacatgtggattctatcggtcccgatttatcgtcctgcagaaatcagaccgttgaagttccaatcactaacgaaaatttgaagaacgaaaacggtttaactggagtagccgcagttaataatcaggtgaatgaacctataaatgtaaatttgtcgacggatcagacaaacgtcgtcggaagtgaaaacgcctctgtgtc

SEQ ID NO: 101744 - DNA, 443 bp, Mimulus guttatus
  Intron number 2 from transcript mgv1a013173m (locus mgv1a0 13173m.g) derived from phytozome v7.0 (chr-ID scaffold_98; pos 965603 to 966045)
aatccaaatccaaatccaaatccaattcaaaacccgttttcaagaaaaagccggaaaaagaagcaaccgtgaaaaaggcaccgagtaaatcattcctaagtaatgtcaagagtttaacaatgactggcatgctagacagggtgcccgttcgatatgtttcttcatcggggaaggtaagtaatttaatcttcaatttaatctttaattttcatttataaccctttgttttcttattttattcgctaattcggtctttttcttgcttgttttaaggaaactgatggaattatcaaaggctgtagctatctttgtggatgtccgaactgtaacttctctaaagtaaggcgtccgtctattttattcatcttccgtaataatacgaatatatttacggaatgatcgtaaaattgttttgattttttttttgtgtgtgtaggaagtga

SEQ ID NO: 101745 - DNA, 947 bp, Mimulus guttatus
  Intron number 1 from transcript mgv1a001575m (locus mgv1a0 01575m.g) derived from phytozome v7.0 (chr-ID scaffold_16; pos 1056435 to 1057381)
acccaggtttcttcactttcttacccttctgtctgtgtgtgtgtgtgtgtgtgtgtgtgtgtgtgtgtgtgtgtgtgtgtgtgagagagagagagagagagagagagagagagagagagagagagagagatgcatgctcatgaatattaaaaattgcaaattttggttcttgattgtgtaattgtgcttacattttgtgccaagaactgatgtttttatttccttatttcagacaataaggtgtatttgaactaacgtgtgtgtgtgtgtgtagatagatataaatatagtgactggtgaaatcatttctctttgcaattaggaagagcagttgttacttgttagtattacagcaccgttgctcgatttacgatataaataaaatgcccttttgtttgttgtatgcaacagaatccgaaagagtgagagttgctgtaagacttcgacctagaaattccgacgaccctccagatgccgattatgccgaatgtgtcgaaattcagcccgaggtaattttacactttctattttattatctcggtttttagccccgttttcttgattttcaatagattaatcaaaaaaacatccgctccattatatgcagctcaaaagattgaagctaagaaagaacaattggagttccgaggcatacagattcgacgaagtatttaccgaaacttcgtctcaaaaacgtgtttacgacgctgtagcaaagcctgttgttgaggtagattcgaaaacctattttacaggcaatatattcaattttttttttgtttaaattaaacaagaaaaaaaaagtgtttttgaaaatgtaatcgatattctttctgcagagtgttctggaaggttataacggcacggttatggcgtacggtcaaacgggtacaggcaagacttacacactcggcagaatcggtaaagaagatccatccgaaagagga

SEQ ID NO: 101746 - DNA, 523 bp, Mimulus guttatus
  Intron number 1 from transcript mgv1a012040m (locus mgv1a0 12040m.g) derived from phytozome v7.0 (chr-ID scaffold_273 ; pos 15768 to 16290)
gtgtttagaagacgcaccgcacccattgagattctgtaagtctcttaatcttggtttgtttatttgttaaatttgttagacgatgtggatacttacatagacgtatatgtattcgttcaataaacgaattccgaattccgatttccgaattccgattactttgctatatcaaacctctgccttttgcaattcattaactcagctaaatttgcatgttataaatttcttaattgaaaagaaaatttcttaatcgaatttcgggatttgttgttatagttaatgactattgatatgtggatttgttccaattatttagtttctagcttgtgcccctacaagaaattttgatgttgaattagttttaattgatggtgtaaggatgctgaattgatgttaatatatttataaatttgtgttgcagataattttcttaataagtttcagttcaacaagtcaagtcacttttattaataaattttcttaattttctttgttgttagttcgttgcagataattcattact

SEQ ID NO: 101747 - DNA, 655 bp, Mimulus guttatus
  Intron number 1 from transcript mgv1a007086m (locus mgv1a0 07086m.g) derived from phytozome v7.0 (chr-ID scaffold_36; pos 1177163 to 1177817)
agattgcccccttttcgtcagaccctcgttatctggtccgtaattctttccaacttttcatctgtgatttttttttcataattatattcaggtagtttaattcgttgtcgtcgataattagttgattacttttcagtttttgtttttaatttctctgttgcatttgagtttgaattttcaatgtttacaccgagggtttgttgaatttttttttttatttgttgatttcattttcgccgataacaattcggaagatggtcaacgatctaatgttattgagggattgtattttttgggggtttgaaaactaatttaggttacgaagtttgaatttaatccgtcttttctttgtccatcatgtgaaaatggtgtttatctgttgtaatgatggagttaggtattggaaattataatacacttctgtttgtatttggggctagggttaagtatttaagattgttgattcgagttaaatgaatatagtttactgtgcatttacgacaccgttgtacgtttgcacgttgtttagttttttcgtttattttctcgttgttccgttgattgtcgaagtacatataagtttgttctaacctgcttgtgttgttgtgtgcttcaaacaggaaagagggttgttgcaatctgattgcattagtcg

SEQ ID NO: 101748 - DNA, 931 bp, Mimulus guttatus
  Intron number 4 from transcript mgv1a016781m (locus mgv1a0 16786m.g) derived from phytozome v7.0 (chr-ID scaffold_63; pos 731307 to 732237 reverse strand)
ctcttccaactctcccgttgggctaaggctcaagggtaagctcgcttagctgtcatttaagaattatatatattgaatgtttttcgcaattatgttagtcttcgtttggttggtgacataagtcaacaagtcatggttaataaaataattggagcgttattttggcgtttggttagtttattaactttacgtctcggttcacaattatggtgaaaatgtgtagtttattgggaaactgtgcattagacctcctctattataatgctacggttgagttataacataagaaccaaaagaggcctatgttgtgttgaacactataatatatagggtaaattacagtcactcctgatgtaaggtcaaatacaaaaaaaaaaccctcttatttgggtaattacaacgacccatgaattatgaatcttcttacacgtctacccttatggtatcaaatttagtggaatcttctagattatgtggaatattctccagtttgtacccgttttattccattccagttccacatattgaaacaagatgatcataagatgtgtttcttggctcgtaaatatcaatataaactgtgttttttttcacaaaacgagtacaaactagagaacattccaggaatttggaaaattctgttgaatttgacaccatatgggtggacgtgtgaaaagtttcatagttgaggggtggccgtaatttaccctaatatatattactctcctcatatgtatcagtctttttatggagggtttctaattgatttttttgtgtttttgttttttttacaattcttcttcaaagaaatataaatatagtatcgctccttttataactatacccgtataaatgaaatcatggccgtccaactaatattcgttgatgttcgtcaggtacttgggagagaagaaagacgaagccttgtctc

SEQ ID NO: 101749 - DNA, 745 bp, Mimulus guttatus
  Intron number 1 from transcript mgv1a016781m (locus mgv1a0 16786m.g) derived from phytozome v7.0 (chr-ID scaffold_63; pos 732665 to 733409 reverse strand)
tccctctctcacacgctcggaaatcttccccaaaggtcagatcttttgcccccatcaacacatttatatacatgtgtgtgttgtatatatcttttgattttacagtgtgattgaattttgctttttatttttttttttaatttttttatttttaaaattcaaatcatgaattaagacagtcagtttttcatgggttgttcgagaatcaagaagtgatagtgaattagttttgtttgaatttaattgacgctattgatttctgaattaggggtttcaatttgggggtatactctctgaattgctgttcattttaattattattaaattctaaatttgctgaactttttgacgtgattagtagattaattgttattgatttctggattagtgttattcttccattgcaatcaaagtcaaactaaactactcgatattcgattcgaggatcggttggttaaagctcgtttgagttatgttctcgctcgagttcgactcgattgcttatcaaatatcgagatcgataaaattcaaacaagcttatgcaaccatttatgataaacattagaccattaattttttaccgataatctgatctttttgttgttaattgttatcaccatttcatttgtttgctatcattatcaagattctctttcatgtttcgtttttttttcaattaactttctacgattgtaaatccgatatattgccttattataggtctggtgaaattgccgacaacttt

SEQ ID NO: 101750 - DNA, 391 bp, Mimulus guttatus
  Intron number 2 from transcript mgv1a018944m (locus mgv1a0 18944m.g) derived from phytozome v7.0 (chr-ID scaffold_115 ; pos 222331 to 222721)
caaagaaatttaattttggtttgtccaaagatcaggttggcaagcttcttactctttttcattgacttcttctgggagatcaaaagagctgatattttttattctatcaatatttaggttcgcaggcttttgtctttgttcagttcaagaaagttggaaaacaagaggcctcctcatgtgctggccgaaccagtcgttagaggagctagtagggacaaaaaactggcaggtgatgacagatttgcattaagcaagagtggatacatggaaaggatggaacatggtgaatttaacccctttgtataccgacgtgaccatgggaactcattggctagagctaaagaagctgaagtttttatagatgatggggtcaacactgaacagaaagaac

SEQ ID NO: 101751 - DNA, 916 bp, Mimulus guttatus
  Intron number 1 from transcript mgv1a000474m (locus mgv1a0 00474m.g) derived from phytozome v7.0 (chr-ID scaffold_1; pos 2158083 to 2158998 reverse strand)
taatcctgaagatactgcagagcaagtccctagtaggcttcacctttctcggactatataattgttttaaaatgtttaggtgcagatgatatcactatatcttttgaactttttaactgctgtttgcctgtatacaaagaaacaattgaatcataccataactagcttcaacaaattggggtagtttatttgttgatttgcatacgactgagtagaattagaaaacttccaatccaatgtatacgtaacaagccaaagactagggggaagggaaatggaaggtgggagaatggggatttcactttacatggaaaggtgtatggttacacttttacactagggtttttatatatccaaattaaaggaaatcccaaatactcaatgttcgtcctacagccgagttaagtcatggactgctcacatttcatgtttaacaaccctgaatctagtgtactctctattttgacgatctttcatagctcacagattccaaaattatcttgcaattatttagtgtaaattggatagaaaaactatcattctctgactttttgtgaaaatgttctcttatcgatagaaatctactgtggagtgatggaagagattcaaatgtgatattgttagtagacataaacattttattttcattttgaagttctatagatctatcataacatgtaaacatataattgttttagatgtaagctactgagttgtctgtttcgagatagtcatattctgtaattgttgtaaaatgaacaacatatacaacttctcaaaatatgctaatccatttgcaaattgcaatgcatgtgcattattctggtggataaaagactaggcatctttaacgtcacctataaaaaaaattatttttctatgaactgatgtataaattgtcatatcaaacatatag

SEQ ID NO: 101752 - DNA, 633 bp, Mimulus guttatus
  Intron number 1 from transcript mgv1a017694m (locus mgv1a0 17694m.g) derived from phytozome v7.0 (chr-ID scaffold_17; pos 1464887 to 1465519 reverse strand)
ttcaacgagaaagaggtaagcaactgattttttttttcagtcgtataattacatgctcaattagctagtataaatcaacaagtcttctgaacaagaacataaagattgatatttatgctaacagatgcctaataaagaactctaactaagttgttgtttgattctttatctaatgcaatcaaaatctacataatcatgagccttaatgctggatattgcattcaaaaaattcatgtattaaaatggtcagatttcctttttcattattcccgcaaaaggaccaatgtagaaataaatttactccgtctatcagaagaaggttaatgttccttttagcaaaaggaagtcaaaacaactttacctcatctcctttttttcactactaacaaaacgacaatgtctattgtttttttaaaatgtccaatactaggagtagtccatatgaattgaacatcagtaaaacctattcggaattatgagattccttgtattagaccttatgcttaagcaatttagaggtttaaaggaaagagtttacaaataaaaccctcttcaaatttaatctaatcagaggaggaactaaaccaaaagcttctttttgccttaggtttataagctctcaattggagctgc

SEQ ID NO: 101753 - DNA, 626 bp, Mimulus guttatus
  Intron number 1 from transcript mgv1a026190m (locus mgv1a0 26190m.g) derived from phytozome v7.0 (chr-ID scaffold_138 ; pos 69083 to 69708 reverse strand)
gcgagtgaagtgcacggtgagctcttaaggaccttattggctttgactaatttttatagggggtatttgctaattgttttaacacaaggtctttttcaccaattcgagattacaccagagtggtttttgcaaaaaacccttaaactaatatatatatatatatatatatatatatatatatatatatatatatattagctagaaacatgagatagaacagtatcaaagtccatcccagcgaagggaacacaatcaatgaatgtttccagcgaagggaaacacaatatatcggtttattcctaatacgaaaagaaaaaaaaaaaaaaaaaaaaaaaaaaaaagagacggggtcaagttaggcgaatgggctaaggtcctttatctgacggggtttgagcctcagtatttcggcccacatgattgtatcaaaattgtttaatcaggtttttatacaacaagtgccgtctgttgaattttgcagccgtacttctcttctgtgcaacgaatttttaatttcattatgaagagaacgaaacagcacatcccaaagtgtagccgggatccttcatcgcacggtgactcaattgacagactcagcgagttgccggactcaatcctgactcaca

SEQ ID NO: 101754 - DNA, 443 bp, Mimulus guttatus
  Intron number 1 from transcript mgv1a013700m (locus mgv1a0 13700m.g) derived from phytozome v7.0 (chr-ID scaffold_13; pos 2125225 to 2125667 reverse strand)
agcagatcaagtgagttttcttctttttttttttattattttttttttttgtaattttttattttaatcctttggtttccggttcaagttaattagattagaaagaaatttagggtttgatcagaattagtaatattaaactggctatgtttatggagtgttcttgctcttggtgtttgataagttcaaaaatgtagtttgtgacgtggttaatgtttactgctagtgctatgtttattctattacaacttgcataagaattacagattgtgaagaaatggattttaactaaaattcaatgtataacagtataagatccgaagaatattgactcgtatcatccatagttctacttctcttcgtatgcgattatgacagtatatataacagttgtatgtattgatcttccctttggtttttcagtgtggagtactgtgtatcat

SEQ ID NO: 101755 - DNA, 871 bp, Mimulus guttatus
  Intron number 1 from transcript mgv1a003926m (locus mgv1a0 03926m.g) derived from phytozome v7.0 (chr-ID scaffold_27; pos 1540494 to 1541364)
ctgtgaaaaagaagagtgagatggtcaaacttttagtcaactttcctgattttgcgtggttgttgatttcttaattttaggtttcctattgaacttgtttatcggtatgattgtctttataaatgaataattcattcacaacaacgtacccttcatgtttttttcttatggaattcgaaattatgatgattgaacttggttcaaatgctttacgaagccaaatattgaagatcaatttagcttttttgttagatgggcttgagttatttgatgattattgatgtaattctaacatataggctgtttaattgctatgcttgatctctatatttaattattaatcatacagaaagtggtgccatcggcagggtgaaagcttatatttgatgttccttttttctgtgtataagtgtcgtgagccatcttttttgaaatttcgttgtatctatgacgcaatggttaaaatatagaattctcgacttttgaactcgatattttttgtttgatatttgacaatgtctttatgtgatgtaatttttaggatgcaacgttaataattactaattgaattattatcagcatcatatctagattctattcatcggcctccactaaatgcacgatgtattcagattgaacggttcttgtgtgtaactgagtattccgtgtttgtcatcacatttctctaaatatggcgttaaactattttctttatcatactaatatttatatggcatgaatgaatttttgatatcattttgctcattttttttacttttactccttatgctggtacgggttgtgctcataatcagacatgtaccactcaattgcagctttggatattaccagttcctcgagagagcaggtc

SEQ ID NO: 101756 - DNA, 819 bp, Mimulus guttatus
  Intron number 1 from transcript mgv1a009919m (locus mgv1a0 09919m.g) derived from phytozome v7.0 (chr-ID scaffold_51; pos 1412482 to 1413300)
ctgagaaattagttcagaattttgcgaatttgaaggtagagttcttgaatccctgttctttaatcatttggaattgagcttctgtgtgtgtgtgtgtgtgttatttatctcgattttactgttatgttgataagttttgaaagtggagttgaggggttttgaaaataaattgcagcttatttaactattttgaggtgatgtgtcaatgttagtgtaattcttatacattatgatggaattgcagtccaaatcttcttcgattttcttgtttttttcccttttcggctccgaatttaaggaatcttgtgatagacattgcaacttgttcgtgggttttaaggaatcaacggttatttccagaatctaatacgagatgtcgatgaacaataggagtgtatcggttaagtttgtcttaatttatggattttgtaattgcgaaaaaagaaaagcatagtctattgtctctttccactgcactctgtttgttttgtctttggtttttctttctgcttttcaagattgggatttgattccgtctgtccatactccatacatctccacatgtaaacaaggaaaaagcatcaaccgattcattttcaattctattttccatttccattatcgggtttttttttcctcgtttgcatcattgtgtttacattccttactgctgctaaccgtttgtttggcctaaaaaatgtaaaaaaccaacctgtcaattattacataatttccaagattagagccacagggtttcattaatgattgggaatggttgttgcaggataacgactttgtagctactaatttagtgacagt

SEQ ID NO: 101757 - DNA, 655 bp, Mimulus guttatus
  Intron number 3 from transcript mgv1a011797m (locus mgv1a0 11797m.g) derived from phytozome v7.0 (chr-ID scaffold_12; pos 1869995 to 1870649 reverse strand)
tcattcagaataaggtaattcagcaacttgaaactgctgccagtgccgaattgttgcttgtttttcgcttgatggtttgggatttaggttaacaaattttagtctgtttttcaattttattcacctttttcttttacatgtcgatttccctcgtcttgcctacttttgattttaacgagtattgagtccgtgacttcatatatggttatgatcagatgaaccctaggcagttgggctaggtattgaagattcttggtagaattatagggaggattttatttatgaacatgatgccatacttcatattctttctgcaattttcagcatgttatgagtcataatagcgtcctccatagtgttcccgttcaagttgtaggtacgaatgatgccataaatcggtgatatcttccacgaataaagtaaaggtttacgattttcatttcatttaggaatggtaaaatattttctccataagatgtgttgttagttgttacgactctaggatattgcgatcttctttcttgccgttatgattaagaattctctgccgattattcgtccacagtgtatgttcgttcatctctatgtataagccatttacatttgtacttgccatttaggatcggattattgctcggctccaacaaccttactc

SEQ ID NO: 101758 - DNA, 515 bp, Mimulus guttatus
  Intron number 2 from transcript mgv1a006916m (locus mgv1a0 06916m.g) derived from phytozome v7.0 (chr-ID scaffold_361 ; pos 51550 to 52064)
ctattgttttacgtattaagcatcttcaggtagtgttttttatttgattgttgtttgattgaatgattgattaaattcgtacatgttaacgcacaaattgcattttcggtgttgactaactttgacttggacacgtgttttgtgcattcttcaggctgcaatggtgaatcttgggtctgatagttccagggtatacgcatttgcaaagggcacagcctgttcttctggctcatcttcttttagcatatgttgagcaggttagtcgattccaacagtatataatttttttttttttggtgtcatagttgattcaaactgctaaatttagcctgtgtgtgaagggatgctcacatgttttcttctaatttgtgctcttgcttctcgatattttagacactagtaattattttggttctagcatatttactcccaagattgtttattcatattttgtatttttatgatcaacttcataaacactaactggttcaataaaatgttttagctcgagcgtg

SEQ ID NO: 101759 - DNA, 955 bp, Mimulus guttatus
  Intron number 1 from transcript mgv1a001520m (locus mgv1a0 01520m.g) derived from phytozome v7.0 (chr-ID scaffold_32; pos 1557238 to 1558192)
gatccgacccggaaatcaggtattaacaaaagaaaaaattaaattttatattttgaattttgttatttcaatttgtcattttgaattttttttgaaaatgtgattttgggggttttggcttttgtgcatggttgttctctacggtggaaatgttagatctgtggaagttattagtcttaatccgtgtttattttgttttgccttagattaggttggattaatcccctaccggtttcttctaaaaaaatcccctaccggttaactaattaactaattaattaataatatgtttggttctttagattaaggcctcgtttgcttagtgctatcagctctattaactaaatagtaggggttagtaagatgtttgtttgatgagattcgtatttagttaagcccgctattatacttaaagccctcaattaaattagtagcacccgtcccctgcgattaattttgtggggtgagtaaaagaggaaaagacaattttatccttaaaagactttttagacaattcacattcaacaccagaatttaacaaatttaatacaagatttaatataacgaatcaaacatcttactgttagtcagtgggatattaatccaatctcagctaatccaatgtaatccgatataggtaggcaaacaagaaagtcttttatttaacaaaaaataagttattgttttaaggataaaattgtaatttttcgttttagtcacccctacaaaattaatcgcagtggaagaggtgttactaatttcatgatgtagtagcacttaattgcgggctttaactttagtagcgagcttgagtaatattgaatcccaaccaaacatcttactaactcctactatttagtcagtccactggttgtttgtgaattagttagtcatattctgtttttcttttgactcctttgttctttcgattgtgataaaggttataacaggaagt

SEQ ID NO: 101760 - DNA, 643 bp, Mimulus guttatus
  Intron number 1 from transcript mgv1a004916m (locus mgv1a0 04925m.g) derived from phytozome v7.0 (chr-ID scaffold_81; pos 435576 to 436218 reverse strand)
ctcttgaagctcttctgaagtaacccaggttcgaaatatccaaaatctaaaatcttttatttcacagctttcttgattttagtgatttattcagccagcaattttgtgtaagtttcttgattttatttattttattatgtgtaaatagttttcaatcagggtttttcttgatcattttgcatatgttctcatcttctgtttttgatgtatcaaagatgtgatcttgaaggttttgagtgtgtgttgatgtagttgatttttagaactgtgtttttcaacacgtgtgtgtgtgtgtgattttatttaggtttagtgtgtgtttcttgaactcataattatataaaaatcatcttcagtagaacatcgataaattaatactcgataaattaataacctcgattaaataatagtttctctcgtcccgactcggtgaaaacatgttaaactattaactcgataatttaatgattcgctaaattaatagagtttcctagtcccgactacccgtattaatttatagaggattaacttgtatggagttttgattacatattttcagaatttaaaaaatacccattttacccccataaagattgcatctttaattcttgactatgttctttgacaggcaaatcttgaaaac

SEQ ID NO: 101761 - DNA, 744 bp, Mimulus guttatus
  Intron number 1 from transcript mgv1a006118m (locus mgv1a0 06118m.g) derived from phytozome v7.0 (chr-ID scaffold_1; pos 3875529 to 3876272)
caggtcgaggttccttctagagctccaagtgctaggtaaaaaatctaacctttttttgttttagcttaaaagttccgacttttaagcttgttcttgctccctttttttcttttgggctttttcaaatttattgacttatttgttttttttttttttttatctgttagtattttgtttagatctgatgcattatactttaattgctgtaattaaataaaatcttgaaaattaaaaaaaaaagaaatacacaaattaattgaggaatatataaaatacacaaattgaagaatctggggaggttaattttggtcttcaatggaggaagggatattcatatattccagagtttctcaataatttgaatattcttgacatgattatattattggtttatttattacacaataaaatctggaaattacattcagatttaatatagcatttacttcttaccaaatattaggaatttaataaattccatttttttttataacctggaaatgtataaataaagtaattaatggaagagcttccacaattacttcactttatttgaagttcaggttggccaaagttattactcattatatcggtagatataaccgaaaactttagtgcactagatgaaaagttgatgtgatatttaatggcttgagtagctatttttcttgattttaatacgttttatgacaagttcgtatctaattacgcagtgtgagtgtatttggtgtctcggccgaatcg

SEQ ID NO: 101762 - DNA, 528 bp, Mimulus guttatus
  Intron number 1 from transcript mgv1a009386m (locus mgv1a0 09386m.g) derived from phytozome v7.0 (chr-ID scaffold_17; pos 1695842 to 1696369)
cccttgaccccaaaaagatccaatcccatttcgaggtttcccctccaatttatttttacccattcaattcatctatattgtttttttttaatagattcattcatgtttgagaaggatgcgatttcggtttttttgttttattttccaattattttggagactggagctctggtagtttattcaattttgggtggttttactgttacttaattttaaaactattttaggtttagttcttgattcatttgctgtgtaatttgtggacaaacccacaaacatgtcaattcctttcatcgtattattttgacaaaggaagatctggtgtgggaactttagtaaagattaaagaagctgaaaagcatggaaagctaactaaaaaaaagaaacattagtttaagaataatcgagtatgtctttcgggcctcgtttagttaagtcgcatcctttatactgtttgatcgatttttttgtctgaaatcctgtatactcgttttttctgaatgttgtttgtcggaaaacaggatttct

SEQ ID NO: 101763 - DNA, 618 bp, Mimulus guttatus
  Intron number 1 from transcript mgv1a016199m (locus mgv1a0 16199m.g) derived from phytozome v7.0 (chr-ID scaffold_7; pos 1307973 to 1308590)
gcagcgtttgggctcagagctccgccttcccacaggtcagttctacgattttcccccctttttttctcgtccgatttgataaaaaaatgaggatctgtcgtttacttctgacctgattagatccgattcgcaattgcaattttttttttcgattgatttgattttatgcatttcccatttacaggacttaggatcaatttgatcataactttgctaagattgtaatgctgatgcatgttatatattactatcattttcactgaaatattttttttaatggattggtgtatgtttgattcgatgtaaatgtcaaatacggataaaatattggaaaccacacgagaaaatttgatctatcggtgttcgtatcgaacacgacgttgtctttagttttgaacagaatagttgtattttttcatttcaattgatttgccagttttatcgatctgtgggaatttctggcattttgcttacaagcattgtaaatttttgtatttgtttttggcttcttctgtataaataacaacgtcgttccgaattactactcgtatgtatgttgatgctcatttttattttttattatttgtatattttcatttgcagttcaataagcaagag

SEQ ID NO: 101764 - DNA, 677 bp, Mimulus guttatus
  Intron number 1 from transcript mgv1a013033m (locus mgv1a0 13033m.g) derived from phytozome v7.0 (chr-ID scaffold_123 ; pos 480121 to 480797)
tcaagctcagtgcatcggctgtttactcgctccaggttatcactctacattttgctttccttacattttctgtgcagaacatgtaaattggttgctgcgaactagttttgttggagatcgattaaactgtaaattcgagaaatttttacatgttttttttcgattttttcgcaatgttgtcggagtaatattcatatagtgagttggaaatgggattggggaatttccggatgtaattgatgaattaggttaagtatatcccccaatttttgccccaaggtcgaaggaacgaaaaaataaaaataaaaaaatcaaacatgttttcggaattttgagctgaagtagaaagcagagtcagcttatgcaatgcattttcatattttcaagaacatgtaggcatttattgcatccataaaatgctggttaacttgtattgttagtaaatacgatataatgttttttttaaacgagaattcgatttgacaaagaaacctaaatcatcttgaaaagtggttttctcgtttatctttgtataaacaaactcttcattttcctttgagtagtttctttaatgtgacgagcaaattttgtgctccgaaatatattcttcgcgttatttaaaagtccccttttcttctgaagaaccttccattacgccaaagaactcaaagctgcat

SEQ ID NO: 101765 - DNA, 557 bp, Mimulus guttatus
  Intron number 1 from transcript mgv1a002513m (locus mgv1a0 02513m.g) derived from phytozome v7.0 (chr-ID scaffold_117 ; pos 758250 to 758806 reverse strand)
tttctggtacattcttgattcgatctttgtttttcatatctgctgaagtaatttttttattttatttttgattgagtggattaattttgatctgttggttttccttactgaaaactgtttgatgtgagcatgtggttttatgcgtggcatgctaaaattatgtaaatattactttaagaaacctcagacattttctatacgaataatattctaggtcttaaataccttcgatgtgagaattgccattttttgaatcgtattgttcgtagtctttggttaggcatcaattaaattgttcagaagaaaatgtagtatcgtagataagactagacatattcagtttcattatggtgcagtttagatgattcaagcatcgtcttgtagtatttttttctattcaaacgtcaattactacgaagttttataaagaaattattatgatttattccccgcgtataatttgtaacaacaaacgagacgtaaataccaacaacgacacacaattgttgcgatatatgttgcttctgctcatgttacgttctccttccacaggtgaa

SEQ ID NO: 101766 - DNA, 532 bp, Mimulus guttatus
  Intron number 4 from transcript mgv1a004519m (locus mgv1a0 04519m.g) derived from phytozome v7.0 (chr-ID scaffold_206 ; pos 180465 to 180996 reverse strand)
ttcaatttttatttgaatccagctgatttgttctggtaatatctctaacttttgatttatccaatatgtagagtaaaagagtgtcgaaatgcaagcattcttatcaatttctaagacactgtgaacttctgctaggtggtattattgattgcttgtcactggaaacaagctttcttcatgttgtgaaaatttgacatttaatttctcatttatagttacacacagaaaacgtacttaatttttgacatcgatgtagtcaccgcataagaagcatataggggttgttacctcaattttcgaccagtcatggggtgtttaattattattatatattccatatcttgttcttcagcttattacagatttttcagtaatgctttaaacttttttacttggttgtagaagaacaaagctatcatagttttgtcagtttttgtctggtctagagaaatttggggagaactgtttctaatgcacaaatttactcctttgctcaggtactgggatccatattactacaggagacgaagag

SEQ ID NO: 101767 - DNA, 796 bp, Mimulus guttatus
  Intron number 1 from transcript mgv1a015613m (locus mgv1a0 15613m.g) derived from phytozome v7.0 (chr-ID scaffold_44; pos 1423322 to 1424117)
ctctctctctctctccctctagtttacaaatcaaggtacttcctctttccttttgttcttgattagtactttacctcgatatctccgtatgctgtttgttcttcatttttttcttttattaataaggcaagagttgatgagtttttttcttcgtgttttttgatttcttgttcttgataaaaaccggacctttggatcaactttcgaccctttttagatcagggctagatcttgcttttctgtgttctgggttttctttttctttaaaaaaaaataatatttatgtttgcttcttgcttttctattgtttctttttattacatgacctctgattttaaggtggctgatgctttggttttagtttgtctgaaatctgaaataattgatggagaaatatattatgctgtccttgtcttgtactttttatttgagatccatttgcaatttccctgcatatgatgaagttgattaagattggttgcttagcagaatcttgaatctttgggggtatttttgtccttttttatttgcgattgtattttcgttatgatttctttcttatggagcttcgagtgaagggcaattttgcttgcacttctcataatgctccgaatatttattcgcttcgttgctatttaaatcgatggccattgtgtttccatcattgtggccatttgcagcatgcacatatatttatatatatatcacatgtaatgctgtttttatagttacaccaccaaattaaacacgaaagtaacattagtcttcttttctattttttatataggagaagaaa

SEQ ID NO: 101768 - DNA, 672 bp, Mimulus guttatus
  Intron number 2 from transcript mgv1a014496m (locus mgv1a0 14496m.g) derived from phytozome v7.0 (chr-ID scaffold_37; pos 1277392 to 1278063 reverse strand)
ggaacaatcagcatctcgagtgtttactctcaagggttagtagtttcttacactcaaccaggggtggaaattgcaacgtgatttccgaattccgatccgtatatcccggttttttttttttttttttggaacagaattagaatatatacccattcgatttgaatttccaaaaattccaaaatacccctcccccgaaaattgcacttcaaatatcaatggtattatgtattttatattatagtagactaaaaaaatcggaaattccgaattccttggattccgatctgtaaatttccaattttcgaacaagctttcgcattccaatttccgaaattccggtttccaaattttcggatttttcctaaacaaaatcgggattagtttttcacttgtgaagaaaatggagtttttctacggttctgaattcagatctgatatgttcgatttccatccctacacgccgctcgtagaatcagccatgtttatacaactttcatccagctccgttgattgtcatgcacatcttttttattaagaaaaatgatgtatttcgtctcttctttatttcattcataaatcacttttgaaactatttttttaagtgtggatatgaattaattatgaaaataatgaccaggttattgaattcattaacacaagcactcgagagca

SEQ ID NO: 101769 - DNA, 1024 bp, Mimulus guttatus
  Intron number 1 from transcript mgv1a000121m (locus mgv1a0 00121m.g) derived from phytozome v7.0 (chr-ID scaffold_12; pos 1208039 to 1209062)
caagaaaagatgtaaaccttcttcttatttatgtgcatcatcaaatattctcatgtgacaattgttatatataaattatacctatctgttaggcgcatgttttaattcctatataacaaaaactatgaaaagaactatagtaaagcaacttcctgtggaaatgagtgcttaaagaagcaacgggtttctaatgtacttgtaacagcaggtttactactgtccctagtagtttctatgtgactgtaaaagaatttatgtttttgttttcatctaattctttgaaagtatgcataactaaatgttggaaagacggaaagttacatcagtaggatgtttgacttgtccgcttatgcttgacctgcaattcaccaacttttcatgattatttgacactatttgaggtatcaggtaatttgtatcgtagcttatggacaatcattttatctgcataatgggaaaaattagtcctctcaattgctgcattttggtggccaggtgtaataatagtcaatacctcgatcatgataaatttggatggatagaatcattgtaggcaaattaatttaagaagaccacctggtttataatgagtttccaaaaggtattgacgtctgagtctatttcttgtgttctcacttgtgttcatagatatgatatcctattctgtttttacatctaaaatgtttttaagcatttcgtttacgcatcatgatggctaatttcatgtcaattaggaataaagatatattggaatgtgcatatatcattctaaaattatgtaaattcatttaggttgaggaaatggatattgttcgaattttctaatattacatctctctattgctatttgtttgaatagtttttagcttctttcttctctacctttccttagtaaagattccattgttcatggattaattgtcagagaccatttcacaaacttgctactctatttgttgggattgcctacataatgaatatagcttacgttttagctttgctctgttgcagctggaattatttt

SEQ ID NO: 101770 - DNA, 578 bp, Mimulus guttatus
  Intron number 1 from transcript mgv1a006992m (locus mgv1a0 07000m.g) derived from phytozome v7.0 (chr-ID scaffold_63; pos 171496 to 172073 reverse strand)
tgtgcctaatttgacacagcattgataataataaagtaatttttatccaggattatattttaatttttcttttctctgaaggtgcgtctgttttttatttattgaaatttctgcatttagattatttttcatgtttatttcgatctgattgttggtgtggtgccgtttgttggcggcgggggtgaaaggggagaaaggtttgatttttatttttaatttaatttttttgttttggaaatttgaattgcgaatgtcgcgtggttgtggttttgcgtttttttgtggttgaatgctcagatctgcttttggttttcattttattttgacgcccggaatcttctagatgtatggttcttttggtatcttcgcccccatgtttgggttctgatttttatattgaaataatggtgtttgtttgtttgtgcagaggcaataagtaatcaaaaatcatgtgtttatgtttaattgctttgctgggcagataacttttgtgtatggtgttattcgtgtaccttaaaagcatatatctttacctgtataatttcttcgaattcgtttattttgtggcagggctgttc

SEQ ID NO: 101771 - DNA, 1019 bp, Mimulus guttatus
  Intron number 1 from transcript mgv1a023096m (locus mgv1a0 23096m.g) derived from phytozome v7.0 (chr-ID scaffold_212 ; pos 207231 to 208249)
ctcaggaagaagaacatcaatctaaacaaaatcaggtacctattttgacatattctagctgttcatgtatttttctctccatgtattagttaataaaaggtgtatttctttcgatccgtgattaaatatgtatttcaggtgaatgaatgatttaacttcaaaacagaagctatggttcctcatttgtaatctagttgcattaggttttgatgattcatgttttaccagctatcacttacgtcagtagacaaagatagatcgacgtgatgtttggagttatttttgggggatgcatatggttgttggtgattgtatcgtattgacggaactcgaatagtctaagagtcacttattgaggtagataaatatatagtttgttgtaatatgccctgattgtggctgttggatagaaaaatattgaaataggatcttacaagctgactattttaaccccttcttttaaattgattctaaaatgtttacttttggtcgggatcctttattatgtaagattaggtttaaatagttcagggggagaaaaaaatgctgttacagtattacgtgagctgacttataatgctacgtaaactctggtcgaaggttcctaaaacattcatttcaatatctttatatggggattgggagtcctgtcaaatgacttttatccatatttatctagggaaatgtggagtattgaactcttcaagttttatgaaaagagtatcatttttttttggttcgagagtcttggttaacttaccagttatagcattgacaatccccactgtaatctattgttgtagaaagattcttgttctttgtgtattgtgatattgttttgccaatatgtatcctcacagtttgatctaataatatagttaccagttccgtacctcatgactgctaaatgtggtgcttttctgaggcatcccagtctccatgcactcatctgctgtataaatgaatttagcgattgtactatgttgaatttcttacgaggctactcatacaggtaggat

SEQ ID NO: 101772 - DNA, 527 bp, Mimulus guttatus
  Intron number 2 from transcript mgv1a014714m (locus mgv1a0 14714m.g) derived from phytozome v7.0 (chr-ID scaffold_69; pos 834359 to 834885 reverse strand)
agaagaaagacgccgaagccaactggaaagctcaggttaaaattacgctgatttaatatcctaagttagatttgattcaactttatccatagtagctgaatctgaattgataaaataagatgaatgcattggctgtgtttaatttcagttaattgaactatactctgtttgccccccttttcagctttccgtttataaccttattaaaaaaattactacaactccaatcacccaaaacctatctctctagccggaatattttgcaagaagaagaatcccatctcttagaatacatagtcttctctttggtttctttttttaagttttgaattatagtttgggttttgattatgtctagaagctgctacaatctttgggtgggtttttgttgtttcggtcgcagtatctcgagttatctttattaattcagtccctctgttaaatttgtgatcgattcttggtttttttttttgtttcactgtttatacacgtagtcacgattatattgatttatgaaatcagaaagc

SEQ ID NO: 101773 - DNA, 835 bp, Mimulus guttatus
  Intron number 1 from transcript mgv1a011026m (locus mgv1a0 11026m.g) derived from phytozome v7.0 (chr-ID scaffold_36; pos 1463942 to 1464776 reverse strand)
cagcccactctctctttttcagtcgctcttctctggtacgttatacatcactctttatcatcttctcttttactcatttattttttcaatttttttttttttgcataattaaaatgtacgcgcggttaatgtgtgcgtgctcgcgtgtgtgtgtgtttttactctggttacgcatcgtaattgtttaatcatttgatgctagtttgattggtgtatttggtgaattctgttaacgaggcttgaaaaatcagtggttgaaacagttatttatttggatttgatttttttgcgaagtgattaattaatgtgcgtttatcgtgcagttactttttcttaatttgatcattaaaaatttgctgctggtgcgaatgtatgttggttttttctgtttttatgctatttttgattaattatgagctaattttgatttgtggaaatgaataatttggaatctgtagttacttttttttccggaattctaagtgaaatccgaacttttgcagatgatttcgcatctcgattgtaatttgaagaataggagaatccttatatcaaacagtgtttgtattgaattctacataaatgttttgttgcctatttctgtctgcagaattactgaaatgtcaattaaattacttattatgtatgtcggtttagcagaatcattttgtttgtctaaattgtattgcattacctatgtgtgtatgtgctacacatgccaattcattaatattcgtcttacttctgcatttgtggcctaacttttttttttttcctttttttccgtcacgttttgcgattgtgtcgtgtcgctggttgatgattattgactcag

SEQ ID NO: 101774 - DNA, 866 bp, Mimulus guttatus
  Intron number 1 from transcript mgv1a001812m (locus mgv1a0 01812m.g) derived from phytozome v7.0 (chr-ID scaffold_27; pos 198818 to 199683)
ctgccgctacatactgtacctggaaggattatcaggttcctctttaaactaaattcagcttaattactagtatacatgttgatttattgataaacagagttattttttcacttggtattttagatattcatgtgaaacttttagcttaatgagttacatcatctccaaatttaggttattttcttttttcttaatgaactaagtaattgaaacttgtttagctgagttttgtttttttattgaatgcaatcttaagcattgaaagtttgggggatggctcgactgagagtagatccatgattagagaggtgggtaaacagaacgaagcaattgtctcttcgctctctttagtatttcgtaggtaatggttttgaatgtaatgatgaagaaatgttaatgtgaaggattcattcatctaagtaggacaaccattctaatgtcaagtcaatgtaaatgaggttcgatttcttatgtaaaggatgacatatgatgccaaatagatgcattattggatagtatagtgaattttgttggtcgtagctaatattctcagaggagaacgctaaaaaaaaaaaaggcttagctcttatggagacatgaaagaaagggaaaaggctgaccatctaatgaaaataatcatagtgaagacctggctaagggaaccattaaatatcatctactactttcttttagcactccattagtccaataagcagcatcttaattaatttttttaccaagaagtcatgtctgttgtaagatggttaaattagacgatgctatattgttaatgcttccactttttattgattttcttgtttgctttctcaggttaacataattgatacaccgggccacgtcgattt

SEQ ID NO: 101775 - DNA, 830 bp, Mimulus guttatus
  Intron number 1 from transcript mgv1a022692m (locus mgv1a0 22692m.g) derived from phytozome v7.0 (chr-ID scaffold_221 ; pos 371128 to 371957)
aggattttttcgacgctcatatcactcccttgcaggtaattaattatttttaattaattaattaaaaggggtttgtttgatttaatattatatggtcttcatctttcatatgctttttggtgtctagttatattttagtagatttgtttctaggtgaaaatggttttcctaagttatatgttaattaaaccaagaggagaaatattgcgtattaaaataaagtaatgttctgtaaaatgtcatttaacgtaataatatgattaatttagttactatttgatcggtcacattttgcgtttattttgtgctgcatcggatgaaatacgagagtattaccgccgttgtgatcaccgtacattcacacacataaaaaaataaaaaaataatatatacatcaatatattaattatcaaatccaaaataaaattagggagtcctctttctcaagatttgtaattttttgataaatgtctttctaaataactttataatcacttcacttggcaagattctttgagtagtgaccatgcaattagcaaaaaaaaaaaaaaaaaacattttttaattttttttttaattaatttattattattactatttttaattcatttataattataacatataatagatttacacaaagcataactacagagattctccaaaacatgtgcctactttacatttttcagcttttcctaagtaatgcatgatgtataaacaagtattaaattcattactctttttattttatataagtactaaagaaaacattcaataaataaatatcttcaatactatatgcatatatatttgtatgtacagtcagg

SEQ ID NO: 101776 - DNA, 1032 bp, Mimulus guttatus
  Intron number 1 from transcript mgv1a026956m (locus mgv1a0 26956m.g) derived from phytozome v7.0 (chr-ID scaffold_179 ; pos 235878 to 236909)
tcagacgttataccttggcgacaactccttaagaggtatgtaaggcttattatgtatgcttccttttaacttgcatgttttttttttcattttttctttttggggtttctatggattaattagaaattccgtagccatttttaatttcatattgcttttgggttactcgtgttctatatttatttttttatgtgtgtatgtcaagtggcgcgagtcccgaaatttgttatatggtggacttaattttctgggggtttgagaacggcgtccacatttttttcttttttaagatttgttttgcataagatgggacaaaatcataaaataggaaaaagaagaaaaaataaagaacagaaacaatgtaggacttttttctgcatagggtaggacaaaatcagaaaaaatagaaaaataaaagttttttttttttttaggattctattgcattagtttgatttttgaatgagctacatactaaaaattgagtagctaaataaaaatatggatatgatatatatttcagggttggcttaaatctacgtactctagccatagggtggactcgctcccgtgtatgtatgttatataatctaccaatcacgaactagaagaaaacttgttaagaaacgaaatcaatcactcaattgaagcatcaacaccaaatgttaagcctagaatcactgcaaaaactaatcgtttttgtgtagtttatcatttttcaaaaaaaaaaaaaaaaaaaaaaaaggtgtaatttattacaaaaagtacccatgtgttcgtggaattgttaaaaatctaccctatattattttatttgcaaacaccccccctatgatttatattttatataaattagtactcgtgtttagaaaaaataattcactccatgtatatagtttagttatttgaattattaaaagttttgtaacaagaattccttccaattgtatagtgtaattggtaacatgatttttcaatggatattataatatttcaggtattattccagaagaaattcgtcatctaaataac

SEQ ID NO: 101777 - DNA, 724 bp, Mimulus guttatus
  Intron number 1 from transcript mgv1a000546m (locus mgv1a0 00546m.g) derived from phytozome v7.0 (chr-ID scaffold_15; pos 389041 to 389764 reverse strand)
tcgatcaattttgcgccttgagctcgatttcagaggtgattgttaacattcttctccccattcccccaattgatctgtgctatccattaatttatcatatccgctgcgttttcaaattgcaacaatttcgttttatgtattttcgcatattcatttgactcgtgtaggtaccaatttattttgatcttgttttttttttttttttttttttttttgggaaatttatttctcagcttcttctctagctgtaacgagtttcattggatgatgagttttgagctggcttagggatttttttttttcagtgttactatttatctttttagttgctttcctaaatctgcaatttagatttgaacagaaatttctgttgtgctttattggatgatgctttgtgaaggtttagttgaaattagatggatattagggttatggatgttctgtatatgcatgcattgagttttcgttttccttttgagatgggactaagtttctaatctggaaatggtgttcaagagaaagagattgtaatattactttcacaatgaatcagatgccctcttagtaggaaaaagaatcactcagtgatttttttgctactcaagaaacgtaaaaaggtttccgtatagtactgtttttgacccatcgatcgatgtagggcagctattatatgtatctatttggtgatttttaaactggtatcttctgtgattcacaggtcacg

SEQ ID NO: 101778 - DNA, 992 bp, Mimulus guttatus
  Intron number 2 from transcript mgv1a010985m (locus mgv1a0 10985m.g) derived from phytozome v7.0 (chr-ID scaffold_164 ; pos 274018 to 275009)
gatactggtgctgttgtaagttccttctttatttaccctccaattttagttaggccttgtttgggggaagactttttatgaaataaagttaaattagatttgtttggtagataacagtcaaatcatgtttgattcaaagtaggggtggtaaacgagctttactcgacaaaagctcaaattcgagcttcggtttttcgatctcgatctcgagctcgagcatgattatagttgttcgacggcttgcgagcgggctcacgagcttcttatttatttattttattttattttattttaatattatacaataaaataataataataataataataataataataataataattattattattattattattattattattattattattattattattattattattattattattattattattattattattattattattattattaaaaatagaattattttattaatgagctaattatttttaaacctcgaaccgagctcgagccagaaaatctcaactcgtcgagctcgagccttccaaaacaggcgagctcggcttgttcacacccctaattcaaagtgttgggaggatagtagtttggttgttttaaatacataacaaacactttcccaaaaacaagaagagtcgaaatcagttcaaaatctgtccaaaaaatagcacaaataatattgaatgaataagtaaataagttcttcaaaacaaaaactagtttctgagcccttcgatacaacacgaaagtatcgataacaattaaaaactaatatattgaatcactacaagagcatcgtcgttctaaagaacacggctaaacaaatgacactcgcaaggttataaaaactctttatgttattttaactagcaaaaagtcatgcttataagttactactttataaattaagtttctcgttcgaaataagattttttaattttttttaggtaagaggttttcttggtcaacctcaactggagaa

SEQ ID NO: 101779 - DNA, 529 bp, Mimulus guttatus
  Intron number 2 from transcript mgv1a021883m (locus mgv1a0 21883m.g) derived from phytozome v7.0 (chr-ID scaffold_48; pos 1408352 to 1408880)
cagttgcttcagttcctcttgacaaggtattatagtgttagacacgataaggataaaacaagaatgatgtttgatttgttttcagatatatttgcacatttttttttcattttttgactagagcttaaatcgggccacatgctcgtttagtacatgcatcttgatgagtgaaactgacgtttgcagtaggagggtttaatttaaccatgaattaaaagttaggctctgtttggttcatcgaaaacaatgtgtaaaaaaatgaaaaaattaggtagaatgtttgtcctgtttggttggaatgtagaataatgtgcaaagttatttagaggagaaagtgggaaaaaaattagacacaaggaaaatttgaaaccgaacatacttatgattttgaaattcttcgatttcatttccctttacacttttaattttcttcattttgaaatccacaatccaaacagagccttaatgaaccccacatgcaacctccaaccacatgaagtctaatataagttttgctcacaggtaactt

SEQ ID NO: 101780 - DNA, 804 bp, Mimulus guttatus
  Intron number 1 from transcript mgv1a001399m (locus mgv1a0 01399m.g) derived from phytozome v7.0 (chr-ID scaffold_29; pos 908497 to 909300 reverse strand)
ccggcggaattcactatcccagagctactccccaagtaacgtttctgctgctacaaaaattttctgtctacttcagtttttaattttgttttttgagaaatgtctgcttaattgttgacaatttgagtttttgctttcgatgtgtattttgctgtatttgttcttatttttagattgtaattgcacatgttatttgtttgtgtgtcttcttggtggaaaaaaatggtgcaattgtaaatgcaattgtaattcgtttgatgtttgtgcttttgattgtttgaaattgcgagttgaaactggaatgagttagtatttgttactattacattttcgaaattactgcattacttacttcagattggaatcggaaattcgttggttgttttgattggtttctctatagaacgcattttaaagaggagcatatcggtgtttcgggccttccataaaggaataaacataattatatgaaaactgataattttcatttttcatcacgatttggtaatgaaaaattggtgtttgtatagaaaaggctcgtattgacatgtacctcagactttacgaagtcgaaatctattcaatgagattttatgtcaaaaactctttttatgtaatctttcaatttctttttgctcaatatgttctgtgattattttctatatcattggcataaacagcagacatcctaaggaaatgtgtgattttatgtttctcgtgtttctgttaaatatctttgccttcgtctgatagttcaaaatgatgtcagacgtggcctgatttgatttccaagagcaaggaagg

SEQ ID NO: 101781 - DNA, 909 bp, Mimulus guttatus
  Intron number 2 from transcript mgv1a017602m (locus mgv1a0 17602m.g) derived from phytozome v7.0 (chr-ID scaffold_45; pos 485807 to 486715)
ttatcgtattctctacaagaaacgtacccgcagaagtaatactctctctctctcttaattttcttttcaatcttctggttaagtaaaatgtcactaaatttgctgttttaatcaagttttgtgaagtgaataagaaattgaataaaaaaataagtatattaaccatggtgaaatcatctgactatggtagtatagttttcgaagattttggctgtcgggattacgcggtggatccaatatttgatttataagtagttcttggcccaatttcaatattgtttaaacttacacggcgaagaaaataaatatcctcgttccaccatttcagtaagttgcgaaacgacactccttatctattttcctaatctattcgtattgcctaggaaaaaaagaaaaaaaaaaaaaggaatacttacgaatgttttcacattccctcgcgattcggtctacacagattgctcgtagacaagaacgctttcttgtgtttatcttttttgccttgagttgtattttgcagctcgtggggaaaataaaattgtaatggatgtcgaaatatatagttatcgttttcttttttcgtggggaggtgcaaacgaggttatgtaagtatgttttggtagtttaatcttgtggttgtacacgaggttttttcgtcttgcgtttcgttacttgtgggttttatataatccattcttcaatccgcttcgtgactcgatttcttcgcacaatggttagttgttctatataattgttaagaaaatggaaacacacagggttaagcaaccctcctattaatctggagccttaattcgctattatcttgataatcgtattattaattttttttttatgcatttaaaattaattgtgacatctgtttatcattatttattgatgcagttgtccaat

SEQ ID NO: 101782 - DNA, 862 bp, Mimulus guttatus
  Intron number 1 from transcript mgv1a026288m (locus mgv1a0 26288m.g) derived from phytozome v7.0 (chr-ID scaffold_24; pos 1014244 to 1015105 reverse strand)
ggttgatcttaccctttgagataatatttattaacgaaaaaattcctcattttttagaaattacattcaaccccttcaattttttgatttattacattaacatgtagggttgtgaaagaggcgagctcgacgagttgaaattttttggctcgagctcgcatgagccttgatgagctcgactcaagctttaaataataaaataatagtaataataataataataataattttaattttaataataataagaacaataagtatattgtataatatacataaataaaaagacgcgagttgtcgaacaaccatacttgggctcgagctcgtttcgagctcttgtcgagccaactcgtcgagttaatgagttggctaagctcgtttaccatccctagatggatgtaagaaatttacaaattgaagaagaggttgggtgtaatttctgaaatattagagattttttttgtaaagagactttacctcagggagctagttgtaatttactctctataatttgaaattatagaaattccaaacctctagtaatcatataaaaaagaaaaaagaaaataaattaattaaatacataaattcttgttacaagtttaacaagtttaaaaaacaagacatccgcattaccaggagaaaatataaatcccatttggtgcttcttcttctattcctttgatcattgtttttcaaatttttgttgtttgtgtaataattattttcttcttctttttcacctgtcagattgtaaatccataaatcatcatccatttatatattttcttttaataataataaaaaatccaatgccctaattcaagaacaccattcatatctcccccaaggtaaacaacgt

SEQ ID NO: 101783 - DNA, 234 bp, Mimulus guttatus
  Intron number 1 from transcript mgv1a005716m (locus mgv1a0 05716m.g) derived from phytozome v7.0 (chr-ID scaffold_90; pos 962452 to 962685)
ctcctctcgattccgccttcctcttcttcctctctgtaatttcttcatccgagatctgttctaatggcgcgcgccgcattccttcggattatatttttctatgtttttttttatacttgtttaatctcgtattttgtccttttttttttttttcattttgtttgtagcaattgacgttttgtgatggtaaatccgtttgtttttgcagtgataaaagatccaaaataaatcgcg

SEQ ID NO: 101784 - DNA, 784 bp, Mimulus guttatus
  Intron number 1 from transcript mgv1a006946m (locus mgv1a0 06946m.g) derived from phytozome v7.0 (chr-ID scaffold_449 ; pos 5592 to 6375 reverse strand)
gcctccaaattcataccaattttcaacccaagaaggtgagctttcgacaaagcttttgccttttcttttttttttttttttttttttttttaatttgatttttttcttacatcatgttatatgttatatgttatatatatcaaagatccaagctttatgtggtattgaatggcttttgtcgaaagattcaaggttttgttatcagtattgataggtttttgtccaaagattcaatctttatgagtggggagtcaaaatttataccaattttctgttcaaggctacagattggggattttttttcaatttttggctgatgctgccatgtgtgtgtatatatatatatcaaagatccaagctttatgtggtattgaatgatttttgttgaaagattcaaggttttgttatcagtattgaaaggtttttgtccaaagattcaatctttatgggtgggattataccaattttctgtttaaggctaaagattggggatttttttcattttttggctgatgctgctatacatatatatatcatgtgtgtgtgtgtgtgtgtgtgtgtgtgtgtgtgtgtgtgtgtgtgtgtgtgtgtgtgtgtgtgtgtgcctctggtataaagtgcctaactctgctggtagactaaatccctgatttaatttgctgatatgattatacaatttgcaagaagattgaagtttggtgggggtttatgtttttagatccaactaatatacgatttattatctcgtttgactgacagtgtggtgagacaagtattgtgggcg

SEQ ID NO: 101785 - DNA, 385 bp, Mimulus guttatus
  Intron number 1 from transcript mgv1a002468m (locus mgv1a0 02468m.g) derived from phytozome v7.0 (chr-ID scaffold_24; pos 423090 to 423474)
cccaaaagttagggcttcaggtattattttttaatcttttcttaatctctaataaatattaattaagagttcttaatcatacttagtgacggggatttgtacttatttttgaatctagtcataatatacattttcattttcattaattgcagatgaattaattcaagtaaatttaaaatccatgatttttcttgaatactattttgaattttcttgaacactattaatgtcgaatcttgatttagtttattcgacaatgaaatttttcgggaccattttttttcttctcgctgctattaaatacggttttttcgaaattcaatttgctcattggttgatcgtatctgcagtccgggggaggtggccattttggaggcaatattca

SEQ ID NO: 101786 - DNA, 686 bp, Mimulus guttatus
  Intron number 1 from transcript mgv1a008166m (locus mgv1a0 08166m.g) derived from phytozome v7.0 (chr-ID scaffold_90; pos 211630 to 212315 reverse strand)
aaacaaattcttcaaattctttcgcttttttcaaggtagataaattttcttctacttctccgattcagttgtttatctgattgtatcgtttgcgcttttgcttgtagtttgatattcctaattttgattagggttaggttatgcaattttattgacaacttggtgcttttttttctttttgtttttttgtggaattttgttgttcttttgtggtgatgattttttattctttttttggtgctgatgatttctgtttagttggatatcaataataagataatgcttaagaaatcaatctgagaattaagattgttctgatgtctgaatttatgaatcaaattgaccatcaccagacctttaatcaatgagaatctctgcacattgataatgaacgaaataatatgtcaaggtccgatctcttaatatgatcgttgtcaatggattaagcagaatctagtggaacgtgttcaatttaaattcaagtttcttttgggattttgggtattgagttatcatttgttgattaaaaatttatctgattgtgatgaaagtaaggtgttttgtcctttagaatgatataataggggatatagttctactttattttccttgttattgcttgttagctccttttatcgattcaattgctgatgtgtatgtattttgttttatttttcgaatatcag

SEQ ID NO: 101787 - DNA, 901 bp, Mimulus guttatus
  Intron number 1 from transcript mgv11b002387m (locus mgv11 b002387m.g) derived from phytozome v7.0 (chr-ID scaffold_1 6; pos 859489 to 860389 reverse strand)
aaaaactaagcctacattcaaaaaaagaggccccagtaagcaattattctgctttttttttttttaattgattattttgtagattcgtttgttatttttcttcaattgctgtatattgatgtgctggtagaaaaaagtaatcgacttgatgtttattaagaacttatcagcacactgttcatttaggcgtcgtttggtttgggggattatccattattaattaaataattgaactttgtttgatgtttggtatcctcaataacttgtcgggtcgacccgcaaatatgatgttatcatggtttattttgccttctagacaataatccaattaagtttcagtagattattcaatcttatcttgcctaatcttatcctgacaaccaaacgaagccttaaattaggttatctgatgcgtttcggaattgaaaatgggtaggaattagatgtttacatggcagatatgacatgagattgccgaattttgttacagacttgcagtattgtttatatgaaacatataacttaacggattttcgagtttcagttttctgtgagtgttgattttgcttttttttctttttggttcgcccgttagctcaagaagatgtaatgatttataatttcttttttttcctggtgcagaaaatggacaaaaggggattgaggaaaaagtggataagtcagccgtgatttctaatctattcaggattcgagcttcccgattgttggggaaagtgagactgcgaaaactctagaaggtagctttttcgatggataatctgaattgttgtgacccttttttttttacgtccctatcttgcgttgcattttttcaacttgtttaccatgactactattgttggattagcatcattaatttttttttttaatattcgtgcag

SEQ ID NO: 101788 - DNA, 429 bp, Mimulus guttatus
  Intron number 1 from transcript mgv1a021257m (locus mgv1a0 21257m.g) derived from phytozome v7.0 (chr-ID scaffold_274 ; pos 87291 to 87719 reverse strand)
ttgggagttacttcataaactagcatttaccggaggtcagtttctgccatccgacctcgaatactatttattgtatttgatatcttgcattattgcttatttttttgcattcatcgacatccctgttttcatcctactgttggaaacccttatattagaaacactagaaaatattttcagccaattttgatattagtagaagctacagcctacatgcttaaatttaagtcgaataaattttagttagttaacatcatttctgtcaaacgggggttcgtgtacttaatagaaatatgttattgaaagaaaacataatttgatagtcatatctactttttatttactaaatatttatcccgtatataactagttgtcttggtcttccatcatgcagagccgcctcaagctgaacaaaattcaggggaaacc

SEQ ID NO: 101789 - DNA, 585 bp, Mimulus guttatus
  Intron number 1 from transcript mgv1a005746m (locus mgv1a0 05746m.g) derived from phytozome v7.0 (chr-ID scaffold_11; pos 1823922 to 1824506 reverse strand)
aaattcctttccatttctagccaggttctctccaggtaatcttccttctttcaattcagctagatttgtatgattttagttgattgtctctattttctctgttacatctaattggggctttgtttaagtattatgttctttttgttacctaattggatgcctttatgatatgcttttggggatctgtttatgattgtcgatcctctgtaatttaactgatgaagcttcttcctcctgtgtgattgtttgatttttacctatgaatttgagaatctgtattcagagaatcacaattcttcccttatttgtgattttattcagtttcgtgtactacgcacttcacagaaatttgttcattttctaaaatttggctgcctttcggtgtatcatacagtttcgctattgcatctcgatgaacagattcaatgtttctgtatggtgtaacaaaatgctcgatggttctgcactttgtgtagggaaacccgtaatttatgttttaaataatatgagcgttggtttatgactttagcttggacctccttgaatgcagccttgtcttgaagatagaaaaaataaaaaaaggca

SEQ ID NO: 101790 - DNA, 999 bp, Mimulus guttatus
  Intron number 1 from transcript mgv1a013853m (locus mgv1a0 13853m.g) derived from phytozome v7.0 (chr-ID scaffold_4; pos 772003 to 773001 reverse strand)
ctgctactccgatctccgatcaaagcaataacaaggtacgcttcctctttcatttttaatcgccttaattttaatttactcttttgcaccaattgcctctgcgatttcgcttctattttttcccccttgtttatgtgcggatatttggttatccttttgtctttccgattcaataaatccatacgcggcaatcaatttaatcgttattttttcgttaaagtatattgggattgaggattttaggtttacccctttgctaaatatcgttgagttgggctgatttagctgttaattttgttttgaagttgggaaattgatgattttgacttttatttttgtaattgtcacttttctgttcctctgtattgatcggtctaagaagtttttctgtgcctggattcatatcgaggtggcgtggggctaggccaattgtttgaattgaaggatttggatttagtccatgagtattgtttagtttagattaatgtgggtcgatcggttacgttagagttttaagatgtgaagttggaaatttcataagacaactgtaaaattgtgaaaatttgcacgattcgatagggacggattaaatttcgtgctatcgcggattcaaaagctgctattttctgaattcttgtaatttgtgtttggaatgtcaaatttggtgttttgactgctttcttttgcatgcaatgacatgattgttatttctcaagcaattctatactcattagtttcgtcatacaccatataactgaaagatagagagctagtgaagaaaaatagaaatattttcatgttttgagtgtttccgtagtaatataatcgagtttgtggaatccatacaaaaccagcagctacttttattatattctttttgtgcatttctgatttttttttttaaatttaatgaacacgccaaaacgattctgtttcacatatctctttcctccctcatctttttccaaaatattgatgaagtttttgatttgaacgcag

SEQ ID NO: 101791 - DNA, 1036 bp, Mimulus guttatus
  Intron number 1 from transcript mgv1a011453m (locus mgv1a0 11453m.g) derived from phytozome v7.0 (chr-ID scaffold_19; pos 1590586 to 1591621)
cccttttctcaattttttgttcctgcacgccggtggtcagtattactgttctctttctttgttcacttaggtttcccttaccacttgttctttcaatttctagagaaatctaacattgttatcaaaatgtaaaattatttaaattctgattgcaattgtaatttatctgcttatttatttgtttagataatatatatttatgtatgtgatggactgcctgtttctgggatgggttgtttgtttgcagtgtctgctgtatcatgttgctatgaaacaattgattctcgtatcaatgacagctatggattttgaacatgattagtccattgagatgtataaactaactatagtatagtgacaaaatttgaattagtcattcacagacagatagctgcatttcattgcaagaatcggattttgtgcaaacatctctttgtcatctcttctaaatgtgcaaattcaagtgtttaatccctaattgcatttcattatgctaatatacaagagtttagccaatggcatcgaatgctcacttatttgattagagtgtggctgatcctgttaacttaaggaatgcatatggatgcagacaagtgatagagtatctaaacctctaagctctttaatggatgcagacaagtgatagattattaaatcaattttacggatgacgaaaaatccaaacatacgaataactgatgaggggtatattattcatggatttgggcatgaatcttaacaaagttgctgcatgatgtttcttttttttttttttttttttttgtgtgtctaaaggggctattttacttcttacctcaagaagggttgtcagacctaaaacgcaagatctgaaagtcagaccttatgtgagatgtttcaactagtatgactgacacgttaactaacttatgaggagaaagttgtatgaatctactgtttagtctcatttcaaattctgtttgaatggaataaaaaaagaatgtaagaaattctgtttgcaggtaaaagtagtggagtttgcatatcacaaggtggt

SEQ ID NO: 101792 - DNA, 747 bp, Mimulus guttatus
  Intron number 1 from transcript mgv1a015601m (locus mgv1a0 15601m.g) derived from phytozome v7.0 (chr-ID scaffold_7; pos 1883349 to 1884095 reverse strand)
gcttccattcttctcagctctattgctgggtatgtttatttgttttcgtttatttggtaatttgataattgttgcacttttgcgatttttcggacttagtgatctcgaatcttgctcgattccttttcgatgtttgtggaatttgctgttaagttgatcatggtttgtcgtaaggaagtccaattcagctgttaagttgatcgtggtttgtgttaaggaattataatttagctattatgcttcaagttaggtcaaaatgtaggaggttggtatgcatatgttgccttgtcgaagaggattcgtcgaaaagagatccgaaaaatcacgattgtgtgctttatgcaagggttgtttagggggttttgttgtcgacatccggaaaccaaaaaaaaagtagaaattcggagaaaaacgggagtattattgcccttcctgtattagtttgtacctttgtaggttcccgagtttcacgcgcaaaccttgattttgtggcatttagaattcttagtctgtcttttttttttttacgaattagaagaattgaatgaagggttttaatattattaattgtatttttttttgttcaactgtatgaaaaaaaattgcaggccgtctttactgtatgaatttttttaacgagcttggaccttgttatacaaattaccagaaaatccattactgacaatgtcgtttctttttatattgaatacagagctggttatttagtctatttagtcgaaagggcaa

SEQ ID NO: 101793 - DNA, 767 bp, Mimulus guttatus
  Intron number 2 from transcript mgv1a003300m (locus mgv1a0 03300m.g) derived from phytozome v7.0 (chr-ID scaffold_42; pos 175174 to 175940 reverse strand)
ggggaaattttggctcacggtaccataatacttttttatatttctttaaggatgttggagaaaatgcaaatcccactttgcattcttgaaatatactattttggcactttacaccatcaaaacaaattaacagcactttacaccctcgaaacacaatgaatcatgcataatgcaccccaaatgaatttttaagctaatgaaggtaatttaatattttaatggtatttttttaggacgacaactgtcaactgtcaaatcttttttttttttttttagttcatcaattactttgaaattataaagtgcaagaaaaaaaatgcatctcatcaacatatctgaaaaaaatatattttctatcacaaacaaaatattttacggaaaaaatcattcaactatttcgttatcaaattatctgaaaatcatatttattcaaatatttttacctaatatttccaccagttgcaataaaagatccatcaatcgaataatttagtgataaaattttattttattttgtaagaaaatataattgtttttaataattcggtgtgacttttagtttttcgcactttgtgcgctcgaaattaggttgggggttgaagaaaataacaatttaatttgtcattttgcattccggaaaaaaaaaaccaataaaaaatgaaattacctttattattcaattcatggtgcattgtgaattaagccgatattatatgaagtgttttgtttttaaatatctggtgtctgaaggtgttgggagtttacga

SEQ ID NO: 101794 - DNA, 399 bp, Mimulus guttatus
  Intron number 1 from transcript mgv1a001912m (locus mgv1a0 01912m.g) derived from phytozome v7.0 (chr-ID scaffold_29; pos 262269 to 262667)
gattttgcactcggctatctccggagagtactttagtaagaaaattcgttttcgcatagtttggattaatgtatatatatattgtgtttattgcttacttcagcactcatgtgtttactctaattgttaaaaaaatttcctcatttatacccataaaaccccacttttgagggggttgtgtgcaaaataaatgcattataagggttttttttgctaatattaataacatggggactttattttagcaattcaatatagtatagcgatattaaatgcaaaacctttttcttttttacacatttcctttgattatgacacatttttgtcacaattttcaaaagtgttttttttcttcttcttgcagggctagcctacaaaataatcggatattatccgaag

SEQ ID NO: 101795 - DNA, 995 bp, Mimulus guttatus
  Intron number 1 from transcript mgv11b014887m (locus mgv11 b014887m.g) derived from phytozome v7.0 (chr-ID scaffold_1 41; pos 183330 to 184324)
cgtcctcaggtgagaagaattatatgttataagtttagttctctcattttatgttttctttgttatcctctttatgtaaatataccacaaatggaccaaatatattaaatattggatatttaatattttgaattttaaaagttagatgtttagtctaaacctagtcacattcttttcactgggtggatcacctgctcccaggtctccaatcgacaaacttttctgtaggacagtcaagacctctctcaaactcccatctccagtgatgtttgattatacttaattattattgcctccattggtgtattgattgctatgcattatctcaatggcttaaattgcagatttccttgtagaatcatactttagcaagaaagtaatttggtaaggcaagatttatataaatagcatctctggaaagtaacaagacacgcagtggacatatttggtataaaaaaataatcctatagtagcaccaccaaaatatatcgtttcagcttgttctcctgtagaaattgagaggagactagagaaatgagagattaatggcacaaaagttcaaattttgtatcatgatgttttaccttgtatgctcactttttatagataaaatgaggatgactatttgcactgttcattttggtttaaagaattttataaccaaatcgttttatttaagtttggagaaacaactaatcgagagcttttgttctggtactgtatgtttcactgaatgcctgtatgacagattgctggggcatgatctaacttcagaaactgcaccctaattgtgaaaacaaccatcgatctggaaagcaatgatttacattaatttaaatttccccaactctcactaaactatgataatgttttgggtgttcgtatggtgtcgacaacgtatttgaatatacaaacattattgagtgtggccatttatttttctataatagaactgttatttacatatatttcatggattcaggctctgtcatcat

SEQ ID NO: 101796 - DNA, 635 bp, Mimulus guttatus
  Intron number 1 from transcript mgv1a002203m (locus mgv1a0 02203m.g) derived from phytozome v7.0 (chr-ID scaffold_3; pos 1988502 to 1989136)
cgtcactctgcacaacaaattcagcatcttgaaacgtactattgatttttacaactcctgcaattattgagatattttattctctgtcgaaacttgtttttttttttttcttcaatttggtttttctaagccttcatttgcacggccgatcagaccttttttgcatttacacgacgcatttgaaacaaatttctctgtttttgttattatttgtcatggagaatttcagtgatttcattctattatttacagagatggagattggtaaatattttgatgcacattgacaaaagaaagacatttttcatctttgatctattaacttaggatcgagaaggtttttgaaaattttccgcaactaaaaacttccagagtttcaaaaggaaatataggtttttgtcgtgataacttgttatagaaagtttaataaataaaattttgatcctgtaaattcggaccgtgatcatgtttctaatggatcacttttatgaacttcttggttgatgttttggaacacgtgtacgatttcttgaatttctactatcgtcgatctcataaatgtttattttttctcctctgattttctggttaatgattttttttgatttatgacactcttataggttttttaagga

SEQ ID NO: 101797 - DNA, 773 bp, Mimulus guttatus
  Intron number 1 from transcript mgv1a001565m (locus mgv1a0 01565m.g) derived from phytozome v7.0 (chr-ID scaffold_12; pos 1574303 to 1575075)
cactctcttccgcatttacactcattcatcgtccggtagccttttcatcctctgtgtttgttttcaaattttcgtgattttgtttttcagttttcgtcatcgttcatttacttctcgttttatctgtgtttggttttgtgagttcgattcattggtgaagtgagaaattaaccgaagatcggctccattttttcaatgaaacgtgtgttttgtgccttttggaaattgataataatttgaagaaaaaaaaatgggtatttagacggtctatttgacttcttctggttaagttagttgtcatcagcaaagagatggagaagaaaaaaatgtgaaagcacgctattttattttttattttccctttttttttggttagcaaattattatcctgatcaaatcaaatatttaagggttatggtgtttgagtgtttcttcttttttaccgattaaaaaattacaaatgtactttaatacttggagatgccttgctttgttaaggtttagggtgtatgattttaggtttagggtttagtgtgttgtgtgatttgatgtcttatgtcggtaatcatatcctcttaatattgaagatatttctgcgtagaaatgtgaattaattacctaaatacaaaaatgacagtcatgagaatgttctttgatgacattgtccgcttcctaatgaataaatacaagctttgtgtctgttattctttcttgtgaataactttgctattcctccatgttgactagtctggtgagagtgatacaacaaagag

SEQ ID NO: 101798 - DNA, 600 bp, Mimulus guttatus
  Intron number 1 from transcript mgv1a001563m (locus mgv1a0 01563m.g) derived from phytozome v7.0 (chr-ID scaffold_142 ; pos 126174 to 126773 reverse strand)
aggtcaccgctaatctcaccgccgtcattcacgaggtatgcgtgtgttattttggtgcaattgagttgggcaaatgatgcggtttgtgtgttgaacttattgttttgtgcatgtgcgtttttgttgaaggtaattggtcactgatgttggggaatttcaatttaccttgggataacttttttcttttggtgcatgcgggtttttgttgaagaaatcggtcactggtgtaggggaatttcaatttactttaggattgatttggtttatgttaattattagtgttttgaagttttttcacttctgcatgtggatttttattttgttttgttttgtttttgtgtcatatcttcaattttaattgacttccatttttttttatgggaaattctggagaattgaaacacatgtctttatgggttgagtggaggatttaccgagattgaaatgtttaagttaacaaaatgtggaaaatctaatcaaatggtttttgtctttacttttttcggtagatgtttttactaataatattgtatttgctgatggatattagcttaatacgtagttcaactttgattactatattgcaggcaggtgttgctg

SEQ ID NO: 101799 - DNA, 774 bp, Mimulus guttatus
  Intron number 1 from transcript mgv1a016272m (locus mgv1a0 16261m.g) derived from phytozome v7.0 (chr-ID scaffold_1; pos 4473773 to 4474546 reverse strand)
acatcggcgccggcgcggcgacgggaccggaaactgtaaatccttttcaattccattattacgtttgtgagtatttagaacattggctataagattttctgctgccctaaattgtttcgagttaggttttcctatttcgtaaatttgctactatcggttagtattgcagtcctcatccagtattcaccggtagggcagcaattggtttaattgaattcgatcatctccacgccgtaattattttcttctttctacgtaaatattatttttcttcaatcaaatcgatgaaacctgaagactaaaggaactccattttttttttctgcatttgaagtgtgctttgtgtattttatggctttgcattattaattaattatccttaaacttgtaatgttgatatctcatcgtgtctgttttgccatatccacgtgtccgtcgtacataaacaatagcgtaatttggggaatgattaaattgtatggatctataaagtttctagaatacaaaaatcactgctatatggactttacagtttgatgggatggtaagattcgattgtaatcttctagaattgataaataaaacggtcttcgtaactttaaatcataactgcatttttgtacagataatgatgtgtttgcctactaattatctttgtttctgtttatatctgcgtgttttgctggtattttccatattttgaactcatggatctaaataccgaatatttttttttgttacgaaatgaacagaaggaggtatcagttatcgacg

SEQ ID NO: 101800 - DNA, 494 bp, Mimulus guttatus
  Intron number 1 from transcript mgv1a011310m (locus mgv1a0 11310m.g) derived from phytozome v7.0 (chr-ID scaffold_17; pos 1526267 to 1526760 reverse strand)
cttgcagtggaggaaggaagaaacgacgccgttttgtaagaaaacattacccctctcctcttacaatatatttctgttcttttgttttttctggtgcgggcaataattaggccggttaatgctggcgtgtaatctactcatcaggcatattaatactaccataaagcaaaatgcagatgccggataatgttttaaatttttttttttaaatatatattttcgtttgctttttcgattaatttattgaaaaaaaaatgctttctttgatgttgtatcgatgaagggcaaatgttctttcttcagaaaatttgaagattttgatcagtggtgaaattagggttctaattgtcattattttcttcatatttatattttcttttcatagatctgctctgaatttatttttttatttactttttctttttttttgaggggttatgttttgttgtcaatttttaggaggaattccgggagcaaaaaatattgaatttaat

SEQ ID NO: 101801 - DNA, 421 bp, Mimulus guttatus
  Intron number 2 from transcript mgv1a024200m (locus mgv1a0 24200m.g) derived from phytozome v7.0 (chr-ID scaffold_14; pos 1296948 to 1297368)
aaaaccccctgtatttacgcaaaaaaatgaagaacactccatctatttgtaataattaaaatcccccgattaactgttggtcaagttctttaacagaaaatatgtacagtctattaattatgttaaataggtaagaaataaaagaaaatatctgaaattgtgtagagtctattccctggaataaaaaaatttattgaaaagtcatactataaccggttggtgtaagatggaaacaaacctcatcgaatttttggtaattaagaataggtggaggttgtttttgtaatttgatctaagtttatggggtttcgtaatataccctattctttatatagttatgttacaagtgagaaaaaaaagttatttctaataaatacataaatatgcttaaacttgtgcaggaaactaataatatatccta

SEQ ID NO: 101802 - DNA, 610 bp, Mimulus guttatus
  Intron number 2 from transcript mgv1a010626m (locus mgv1a0 10626m.g) derived from phytozome v7.0 (chr-ID scaffold_102 ; pos 304499 to 305108 reverse strand)
tcttcgagcgtggtatagctaaccctgaaaccaaggtatttttctttttttttttctttttttctgctaataccttcatattatgttatgaagaaacttgttcaaggctaagatttgaagctaagcatgcatagtatattaagccaatcgatcatatttaagggtcacgttggccgaattatgcgtctttactcgatctcatcgactgtgttctatttcaattttggcggaattgtcattgaaacttgtacgaacgtgaccgttatctatcgtatatagttgcggaatgccacgtgttgattgataaccggcgaaagattggagaaaagaaattaatttatggctttgaaaatattgatcaaccgttttacgcctataacttggaatgttcagaaatagaattaggaaaagacaaccgaattaaattcgacttctgaaattttgtcggtatctaatttagttgtatttagcagacttcttccttttttgcttttctttaatcaaatctcgagttcgacaacataaatatgtgacaaaattaactattttagttttagttactgatgccataaattaccgagcaggagatatcaagtttgagcgtcgaacc

SEQ ID NO: 101803 - DNA, 1046 bp, Mimulus guttatus
  Intron number 3 from transcript mgv11b012215m (locus mgv11 b012208m.g) derived from phytozome v7.0 (chr-ID scaffold_8 0; pos 824472 to 825517)
tcaggatattactctaccttttgcttgcaggcacggtattgttctattcattactattttttgctttttttgccctcatattgtttgtgtttggtagtgtgttctgacatcgagcaacttatttagaaagctaaatgaagatactatcttggattccctcacgatttccgaaaatgataactaagttcactttcttgataattaatctttaaaaaatgtgattaatctagtgaatataaagttgcatagacaatgtgataaccgcgagattatgatgatattattgcctatagtatgagctatcctcctttttaaagaaataaaaaaactcgaacttcttgccttttttgcaatattcgcatgaattcccacatatatattatactaccttagtttgtatatggttctcaaatacttgtaatttcttgtgagacggtttttgccggttatgaacatcgtctgttggtatacagtgttgaagttttgcacaagtgcgtaaattgaaaatcatcagtctcaaagaagtccatttgggtataaaggtcatggattttattgtctagaatatctaccttatgttttccgtgagtagcgattcatgattgagcacccgtagatcatagttctatgttcataatcgaagagaacgggaatctgctgatagtaaagtaacttaaagccagaaattccagtaacacgactcgagttggtatatcaatgcaccaatttatgtatgattgataccattattacagagttggttgaatatttacaggcagaaaatgtactctaattctaccacataattcaaactaaatattaaccagaaaactctattcattattgaagagacttggagacttttggatctataattttccaaattttagtactttacgaagaacatactgccaaatatatttaactgtaggattgatacgaaaactcgtcaatcttggtattttttccaaatattggaaagcatgttgaatgtggtgagttctgttgcagggtgttgtacaagctgtgctgttcgggttaagtct

SEQ ID NO: 101804 - DNA, 934 bp, Mimulus guttatus
  Intron number 1 from transcript mgv1a005947m (locus mgv1a0 05947m.g) derived from phytozome v7.0 (chr-ID scaffold_11; pos 1258620 to 1259553)
tgctcttcgcctacgtttctgactttgggacgaatgtcaccgcttacatatgtcctattatgtaaggctatttggtagattttaacagttatataatcgggcacgtatcacacatggtgtttgatatttgtgtttatttttgacaaaatatatgttactctttctttacatagccggcaagttcacatcaaattagcattattctttgatttatatctaaaaagttgaagctatacatacacatacatcaataaagaaatacaatcacataaaatcaagattccaattgaatttcaaatcctcacacacaattccaaaattcgatttagcagaatctcactcacaaaaaactcttattttatgctataattaaaaactctcaattgaatttcgaatcctctcacacctctcatcattaaatttcaaaattacgcaacattaaaaaaataataaaaaatcaataataataaattaagaaaaaaaaaaaaaaaatcgaaaaatcgaataggcgggcccactgaaggtttggagcatcctcacatggagtttgaaatgaaaagaagattcagacaacatctgccaactcaacctcgaccccgctttcccttccgccattaattttttctcttttcctctattctaaacaccaaaatctcactcttccgtttcacagttagagagagagagagagagagagagagataattccaagccattattattattattattttccttaaacaaataccattcaactctttctctctcttattcaactctctctctctctctctctctctctctctctctctctcttgtttcctttcacactggacgaacaatcttcctccgattaaactattccgctttacccattcaatatatacatacatatatagatacacacacacaacccccttttggactcatctca

SEQ ID NO: 101805 - DNA, 750 bp, Mimulus guttatus
  Intron number 1 from transcript mgv1a021198m (locus mgv1a0 21198m.g) derived from phytozome v7.0 (chr-ID scaffold_77; pos 1132282 to 1133031)
ctgcatactgcactcaccgagtacgttaaaactttgcaagttatgtctacatcttttagtacagaaacacaataattctgtgaagaaaagtacactgtaatctatttcaaaagttgcatgaataaaaaagaaaattaactcgattcagttcttttagattttaatttgagtccaactatgccttctttcattattatcaaaggcattagtctgctttattatatgttgttgctactggtatccttttggttttccccagtggcgaagccaggattttataactagagctgcagaatatacattaaaataaaagataatttaaagaaattaatgacaacaatgattataccaaggttgtcgacttaaatttcgggggttcagtccgaatttattttaggatttcttgtttttttttttttgacaaaacaagaagataggaaaataaaaatcttaggacttcttttgcactagttcgaactttgggtggactaaataataaaaattgagtggactaaataaatatatatgtataatctaatggattttttttttcaatggggggtgggcttgagtggactcatatattatttttatttttttttcaatttcaaattcttaaatttactttttatataaaacaaaattgttaaatattataggagcacactagaaaatacaaatgcaataagttatattattaggatttttcatctcctataatgtattttgcaggctacaattttcagtgtg

SEQ ID NO: 101806 - DNA, 768 bp, Mimulus guttatus
  Intron number 1 from transcript mgv1a002294m (locus mgv1a0 02294m.g) derived from phytozome v7.0 (chr-ID scaffold_1; pos 1967027 to 1967794 reverse strand)
ccgccaccgcctctttcatcagagctgtctctacggtatcctttttattccacttcattttattttttttcatttttttcttcatttcttccgccgtttggttttccccttttcgacttatttttttcctctttgggaattgagaatgaattttatgtggtttttgattcaaatggcaacaatgaaggaagtctgttgagctattttacttgttataaattttttaattctttttgggtttatgatttggaatgtaaggatggtttaagtgagagcttttaatctcagaaattggcttaattttgatggattgattactgaaactttcggaactggaaaatggagattttttttttttttttgatgaaatgcatgctaaactagaaaagatagctaatctattgtaaatcaaaagtactggcttgagacccaaaatacttgttgcttttcagcacattgatcataacagcaagatatttaatcgattataaccactttggtataatcgtaatagcgtgtgaactggtccctgtgtttcaactattacataatctatggttcttccacttcaactttttttcgatctatggttataagaagaagtgactaacatgctctgtttgtaatttattttcctttatttctttgcatgggataattgtgtcaaaatcaagttgagatgttttatatcgaactagtttatcaatttgatgattttcatgaatattcgcagcctgtgaaaccagatacctctgttgagccaaaacg

SEQ ID NO: 101807 - DNA, 518 bp, Mimulus guttatus
  Intron number 3 from transcript mgv1a011819m (locus mgv1a0 11819m.g) derived from phytozome v7.0 (chr-ID scaffold_27; pos 318718 to 319235)
tgggaattgaacaaattcaatataggaggtattttattaatattttattttttcaattttattgcatgggaattttttctaacatattcctatataattaaatcttacaaataaagtataaccacattttcaaaattttctttgccatataattgatttcgtaacgacgtttaagtagcttaattcttagcaatataattgattatttctcatattagttgtcgttttggttgttatgattaagaaaatcaataaatattcgtgaattatattacagcagagaaacgtagaaaattaaaaaaaataccatttttatatatgaattgcttttcaactatttttttttaaattaattagaattgatatgtgacaaaattgaaaaataatgcaatcaaagctttaatgttattctaaagtgactaaataatttgggattttttttttttaaataaataataattattgttattcttaattttttagagtgcactgcaactttggcggagtatccgtggcgt

SEQ ID NO: 101808 - DNA, 675 bp, Mimulus guttatus
  Intron number 1 from transcript mgv1a010292m (locus mgv1a0 10292m.g) derived from phytozome v7.0 (chr-ID scaffold_198 ; pos 69405 to 70079)
aagaaattcaccgcgaagctcttagttagtactcttcctttttctttttggcggtggtggtggttgttgttttgtattgtggctgcttctgcattgtgatgcgaacacttcatttttgttctgtgataaatcctgcttaaaaaaaatgagatattcagttggtgcatttcggttctattggactccgtaatcggagatcaaaagtccgcatttgcgggagcacgagattgaatactgtgaatcgtatttgtttttgttatttgctgcgttgttaggtatcgtttagtgatttcattacctgtggaaaccaaaattgcttgtttgagtgatgttaagtaaaatgtagagttttttggatgtttttgcgagtagcgtataaaaaagtttaggtgcaattgcagtatctgggagatagcaccaaattcggtcgctaattatttcatctatgcaaaggatgcatttcacccgattcacccgctatttgaattttagttatggttataaaaggaaattaggtaccgatccagaaagtttttgtaggattaatttttgctagtttgttattgctcaaagttcatgagatatttcagttgtaacttactctaattacagtactaattttaatggttattgttggcagtgtccttgaagccagagctctttgagggattgcgc

SEQ ID NO: 101809 - DNA, 806 bp, Mimulus guttatus
  Intron number 2 from transcript mgv1a013121m (locus mgv1a0 12351m.g) derived from phytozome v7.0 (chr-ID scaffold_18; pos 2109414 to 2110219)
tctggaagaaatctccagacaacccccttaaccaggtgggaagctgatttacattgcatatgattattacgcaagcttgcctttttggtcttaataataagatgcagaagattaagctcgattaaaatattttgtctactttttgtgtctctgagtttttgatatcttaacctcagttgaagtgggaagcctttttacgatagatcttgcatggacccattagttgttttttgaaaaacgtacttcctaaaccatgtttaaggtgaccactcgcactgattaaattattttttgttcatacagggatttaaaatcagttataacaacgagaggctttatatacatttgttaagggagaacaatgaagttattgctgcattgacatggtcttaaaatttatttagtaatggccaattttctgattgactttgatgcaactgtgatcgaagtttgaacagcgaactttacatccactcattgccttttttctgagaaactcttcagaacaaaaaagaaggatattatttctgtgtattatctagagtgcttaaaaacgctgccttcttctctaagtagctctttaggtgttacttcattttgttttttgatctcctttattgcgagccttctacaccttgaactttcagatgctgatccatgctcctttgacagtatacaaaacgttttggttgctttagttctctttgttgttatttgttatggagttatacttataacaccatccggtttcatcggaatttgaatatgcagattgcagataagtgagtgcatcttttcgtgagaag

SEQ ID NO: 101810 - DNA, 613 bp, Mimulus guttatus
  Intron number 1 from transcript mgv1a005862m (locus mgv1a0 05862m.g) derived from phytozome v7.0 (chr-ID scaffold_32; pos 953711 to 954323 reverse strand)
ttgaatttctcccgcgaccattaccaacttataaggtaccataaaaaactgtttgttttcatttcatgagaagtgagggtatgcagactaactgtttgatgtggggactgactgaaatgaaatcaaactttcactatctaaaatattttttttccagcttgtagagggtacttctgtttgtaccttagtcttgatatatgcagttattttcttgcaaatctgccatttgtgtccagttctaagaagtaactagtgttttggttcgttttcttcaaattccgaatgcgtatttgtttaaatagtaagaattgttgtttaatattgaaaccgagcctctgttgtgcagacacttctcgcggaaagacataatggtaattgctgggcccggatgtccaagcacagacaggaaagttgtcaactctggaaaacggctaagggctcacttaggaatcgacgaaggaaatgtacgttttaatggcaccatttgactcgggaaagtagtttaatgctaatagtagtctatgataagataatctgaatctattctagtaggtttgcagctcttgcattttgagaggcgattgtgatagagcttacgtgaaggcacgtgtgg

SEQ ID NO: 101811 - DNA, 658 bp, Mimulus guttatus
  Intron number 2 from transcript mgv1a021126m (locus mgv1a0 21126m.g) derived from phytozome v7.0 (chr-ID scaffold_168 ; pos 273642 to 274299 reverse strand)
ctcaagctgctgcgcctactcatcatcatctctgggtaattccgtactatcatcattcatccatccttctcttttatttgctaaactctagtagactagatcccattcaatcttattttcaagaatgcttaaacaatttctaggtttaattaattacctcccaatcatacgtggtaatattaatatatatgggataaaatattataagtgattatattgttgcaaattaaatatttattttgattactactccgatccgtattaacttatttcttgttagtgctaatattgtaaattatggtttcaaaattgaagacagctcagtattagtgagtattgagacaaaccgacttaattaatcatctaattaataattgtgtggctaaaataaaaaccttagagattagggcaaatggaaaattaaatagtgacggcagagttgagttgaggaggggcaataatcactttaatgaggaaagcttcctctttcagcaaaagtaaataattttgtcccaagtgggccccaatttttaattttatcaaggagtaggtagaatgctgtacacagcttttatatgtttttatttttgtcaataagcagaaaagtgtgattgatctatttagtaatttttaatttttgtttttcagggaagtatat

SEQ ID NO: 101812 - DNA, 656 bp, Mimulus guttatus
  Intron number 1 from transcript mgv1a004138m (locus mgv1a0 04138m.g) derived from phytozome v7.0 (chr-ID scaffold_242 ; pos 91616 to 92271)
gcttcttcatcatcctctccagttacctctgatcggttagttcctctatttccactctatttctttcttcttcaaagctttcggtttttggtcattttttttaaccctaaccccttgattcaagcttaaatcaaaaaaaaaaaaagagaattcctgagggtttttgcttatttcacctcagatctcaatccagaagtctcttttcaatttctactagtgtaaccaaagcccaaaaaaaaaaaggatattcctcgcaacatccctatgaagtttaggtgtgaagtgagggtttcggaaggtttggagtgagccgagggaggtgtagtgtgattcttttccctatattctgatcagaaagtttgtgagttttgggatttcatcaaagatatctggaaggagactattgaattctatcactgtggatgaaaatgctctaagtaggatggggcaaagacgaggccttttgtttgtttcctttgatttagagctcgaatggttaattatcttgactcaatgtttttgccagtatcgttctagggagaggagtgcatattgttattgtgaaagctgcatttcattcagttatggttattattgttcttttggtggaaagttatatgtctttgtgttgattgcaggggaagcctcaaatctcc

SEQ ID NO: 101813 - DNA, 421 bp, Mimulus guttatus
  Intron number 2 from transcript mgv1a015700m (locus mgv1a0 15700m.g) derived from phytozome v7.0 (chr-ID scaffold_245 ; pos 15291 to 15711 reverse strand)
cctaagaagcctcccacagctttcttctactttctgtatatgccttctgctcttcacttttgtttattcatcggttcaaattttacttttcttaatcgaaagttttcgtttcgattcacattgttagttcctgttgaatatttagcaagttactgttaaacacttaaacttaagatttttcacccaatttaaacatcatgattttccttgattatttttttgaattcctaataattgtgattgcgtttcaatttcaacggtaaaagtgcgtgagtcagagcagaatgattacttttttcggcttttgctaagtttaaatttccagaggactagttaactgttgatacacatgaataactgtactctttgatttcaaaattttgcagggaagattttcgtaaggaatatcaagagcagaatc

SEQ ID NO: 101814 - DNA, 626 bp, Mimulus guttatus
  Intron number 2 from transcript mgv11b023304m (locus mgv11 b023304m.g) derived from phytozome v7.0 (chr-ID scaffold_5 2; pos 458395 to 459020)
tgttgaattgccggaccgtttttccggtctttatagtgcgctcgagataaaaaatgtagtagtatggcccatgctagctcgatctcagtttctgttttatttatttttattttactaggcaggtgcacgtgcattgcacgtgtcgtaataattttactgtatatttattatttttacaatatgcttgatacatattaagaaaagaatatcttattgtatatatttaatttgtctaaattatgttttgagacgagttaaagtttttcattatatataatagaacatgtgttatttatgttaacaattttgcaatattcttaaatcattgtttttcatcttcatagtttaatttgttgtttttaacagtcaaattatgtttgaaggaaataaactcttttcaaatgtttggggttttgttttgaaaagcttaacttgatatgttttgagtgagagttggaagaaaatgagagaaccaaacattgtgtgacaatgaagatcagtctctaccataaattaatcacatatgtttttttaaataagtacaataaactgctattatcactttttatttagttatgtaatttgattatcatgatacaatggtcattcttttacagtgagctcgt

SEQ ID NO: 101815 - DNA, 616 bp, Mimulus guttatus
  Intron number 1 from transcript mgv1a004963m (locus mgv1a0 04963m.g) derived from phytozome v7.0 (chr-ID scaffold_3; pos 3587325 to 3587940 reverse strand)
tcaaggctgtgctattggtaaaatttataaaccacatatttaagtttgttcgtcgttgacttttcttatcgaaattatatttttgaagatgggtgaaaatcggatggatagaattagaattagaactttcggaaaaaaaaaagtcaatttttttcagaagtaaaaaactaatttcaattgcgttccaagaatattcaaaaattggataaaaaatttgttccaaaattggaaattttactgactggaatcagcataatcggaaattccaattttcagtctcttataatgtaaaatacattttgtcaaaaaaaaaataatgtaaaatacataataatattgatattattaatgtacctttcggaaaaataattgaattttttggaaatattttcgaaaattaaaatcggaatctacacttgtagatgattggtcgaaaacaaaaaaaattcggatcagagtcatcggaatttgaaattttgttctagtttccaccctatttttgacaattagaataagtatacatagaggtgtcgaattgaaaaaaaaatccgggatttttaggccgaatgcgaaaaatcctaaaaaaaactctgttttcttctttttaatacaggat

SEQ ID NO: 101816 - DNA, 463 bp, Mimulus guttatus
  Intron number 1 from transcript mgv1a022978m (locus mgv1a0 22978m.g) derived from phytozome v7.0 (chr-ID scaffold_73; pos 582343 to 582805)
gttaccccggatccagaacgtcacttcacactcacgttgaatgtgaaaagaggaaatgttgttttttttcggattatattttcttccttgccaatttaatatgttatttaattctcgagaattatagatcgtgagctaacatggttttaagtgcttatttctagaattatgaaatattatcatgcaaatttgtgggtattgttaacacttttctagctgccatggtttatatagtaattgcaccacagagtaacttcattggttcattcgacatcgggaaatatttttagttacaggcttttggtttgaaagtaatagcgtttgccaattattaagtagtttgataagtgcagagtcaaaattcgtgatgtttcttagtttgttgctacatattaaatctgactacttattttccatctatcatacaggagtgcctactgcttttgcaagtaaatacatacat

SEQ ID NO: 101817 - DNA, 861 bp, Mimulus guttatus
  Intron number 1 from transcript mgv1a000242m (locus mgv1a0 00242m.g) derived from phytozome v7.0 (chr-ID scaffold_125 ; pos 670433 to 671293)
gacttctagagatctgcgagagggtttgtacgctctctctctctctaatttttttttttttttttatgaatttctctctctaaatttgatttacatcgttttactcagaaattacagtatatccctatacatgttgttggcttcgtgctgaatgaaaaaaaaaacggattgaattttttttgttcgtattgcaatttaatgattgttaaaaaaaatttgtattggttgttgcatagtcgaattagatgagcaagtgttgaatgcgagttgttaactagttgggtgaatagtcactgatgcctattgcatagagtagggcaaccctgtgatctagagtttagtgtgtaaagttgatgaaaaatggaaaatcgcgtttcacgttcgataattggcagattagaaatcatgcgtaaactagcatttaggagaactaatacttgtgctaaagtatcatttgttcctgtcattcttcgccacatgcatatatagtaataagttttgacatgtgtgtatcatggtccggtttctcgtttactcacttgtagtggtaatgttgtattttgacgtatgcattttctttcgttagaatatagcttattagtgaaacattaatgtgaactgcaaaattctggtttaacttaattctggatgtattgatcgtgaaaaatcttatttggtggagcagttagatacttagattagggcagaaaaatatatttcaatttcaatttgtgcttccacattaagtgataacggttttgaaattggtttttaaattaaacttgcagcctaacaattgcattctgcacattctttgtttctacagtgttcgactgttgttttacgaccgacgctttgggt

SEQ ID NO: 101818 - DNA, 989 bp, Mimulus guttatus
  Intron number 1 from transcript mgv1a003824m (locus mgv1a0 03824m.g) derived from phytozome v7.0 (chr-ID scaffold_89; pos 816808 to 817796)
aagtttccatcttcgctgaaattttgctgcgtcaggtaatttcaactactcgtttatccaatttgcagcttattatttttttaattttttgctgaaaatggattttgtgtggattctgtgctctaatgtgtgtatctgtctgaaatagtagaattttaccagaaatgtttctatttatgggtatttcttttcacatgctgtctcactcactgagtttggtttcatggaaagtactaatttaatctggtttgttggtggctcggtgattattcactcacagactgccttcaaagtgtttgattaattgcctcctccattttttttttctgttttactgttctttttgttgaaataaaagaaaataacacggcatatttggtttctgaatgccttatctttatgtttttaatctcatgaattatgtcataagattcagacaaggggtttgactttaggttttttctgtttagttatctctggtctggtaaaatattcagatctcatgtttcattgttgagcttcttgtattaagactggattgatgaatacagtacaagttcgaactttaatctaattacctcatgtaagaactgaatcttggatcctgaatcttagttatttcgttgggcggattggaaaagtatgcgatcgaagttccgtgtatcgacctcagattataagtggcttgctatggaaccaaatagaagttaaatttcacatgaatatgagcaaacacgagtgtttatttgtttaaaggtctgctttcgaattaattgtacgtcggttcttccaatcagactttcttctcccgtttattactgtcgtagaatcttcttactctgtagcaaatagttcgaccgtttttttttgttaacgtatgcacatgtaaatgtgggattcgtttattcttcttccctatttgatttcaagatctaatttattcttttcttgcaggtgactcgaaataaatccgtactccgtggctgaat

SEQ ID NO: 101819 - DNA, 641 bp, Mimulus guttatus
  Intron number 1 from transcript mgv1a008527m (locus mgv1a0 08527m.g) derived from phytozome v7.0 (chr-ID scaffold_4; pos 1220822 to 1221462)
aaggccgctgtcatcagaattggcactcgggggaggtaaagtttcttcttccgccgctccatttttttccgattgctcattaaccggtcacagattgtttctcgagcttgatttctgaagataattgaattttttgaattctgataatttcattgtgagattcatttgctaatcagattttggcgtagggatggtaatgtactactgtttcaattttgtttcggtttacatcttctcttatctatttcaatttaaatagcattagcttcaattatgttattgtagattgatttggtatttgtgctgaacattgtatttgtgaacagagttttgaataataaataaatttgatcgaaatatcaacttgtttactttcaacaaactgttaccaaattaactgtaatgtgttgtgagtatgagagtttgtaaaatgaagtattatttactgaaagcttaacttacaataagatgaagatctcatatttatacagctagagagagaaggttctagaaccctaatacttagttagttgaagccggttacaaggaatctatagtctaatagatatgatataattaaatgttgatgaattaatcttaccgttctatgtaggacagtccactggcccttgcccaagctt

SEQ ID NO: 101820 - DNA, 927 bp, Mimulus guttatus
  Intron number 1 from transcript mgv1a012579m (locus mgv1a0 12579m.g) derived from phytozome v7.0 (chr-ID scaffold_126 ; pos 686825 to 687751 reverse strand)
ttcgaagtcgaaaaggctattcttgatctccaaaggtatggtgttgtctactttttccctcatgaaagtacaaaaatgttttactatttacataaaaaaaaaggataaatttcggtcattcccctaagataaggttaaattgcaaaaaaacccctcatgtttagaaaattacaacctccccttaactaagaatcttcttacacgtccacccttgcggagtcaaatttagtagaatcttctagattatgtggaatattttttagtttgtatccgttttaccctattcgagctccacattttgaaacatgatgaccataagatgggtctattagctcgtaaatatcaaattgtgatgcatcagaaactgcatttttggacaaaacgagtacaaactagagaacattctacggaatctagaagcttttgttgaatctgacacaaaaaatgtggatgtttaagaagattcataattgagaggttaatattataattacctaaacatgaggggttttgttttgtaaattgaccttacataaggagatagttgtaatttaccctaaaaaatgtttcattatgtagaaaatgaggtgataaaaatgtttaaaactaaagaaactccttttttctgtcaaattgattcatatcgaactctctcttttttcttgtatgttatattatgatctctagcaacctagatttggatatgtacaatggcagagccagaattttgtgttcgcgaggaccaatactccgtaaaaatcaattctatatatcgaatgacaatactaaaccattctaaagataaaaaaaatctaaataaaatcgtaggttcttgaaaaataatgtggggcccgtaaacttaactacaattataatgttgtttggttgtcgctgacatggcgattgtacgatgaaatgcttaggtta

SEQ ID NO: 101821 - DNA, 351 bp, Mimulus guttatus
  Intron number 1 from transcript mgv1a017980m (locus mgv1a0 17980m.g) derived from phytozome v7.0 (chr-ID scaffold_8; pos 1303210 to 1303560 reverse strand)
ttgcagattcccgccgccatcatcagcccgtatcggtatatatacattcgtcttctttagcctatttcgttttttttttttttcgattatgttatatataggtgctaaatattgtttcaattttattagtgttgtttggacttcaaatgtgattttgaacttctcattttttatttgaatttggtaaaacaccaaaatgatagtcctttggattgttttattttttaatcgaccttgaatcagctagattgaatgtcgggtgagacggatatgcatcagtccgaatgtttttgataatatctatatgcggcacttatcgatgttttttgcaggctcttgatcgctgtccga

SEQ ID NO: 101822 - DNA, 1053 bp, Mimulus guttatus
  Intron number 2 from transcript mgv1a014629m (locus mgv1a0 14629m.g) derived from phytozome v7.0 (chr-ID scaffold_6; pos 3947050 to 3948102 reverse strand)
ttgaggagcttgtctacaagaatattcgatttgaggtactgcttttcgatttgtgtgtgtgtgtgtgtgtgttcttatactgttatacatacaggatatatcaattccacctctgttttgaatacctaattaataagcaaatatgttgaaatgattagttatttcctccaacaaagggtaattaagtgaagttttcgattatttttgtgatgggtagaagtgacggagtggaacgatgaatctttcagtttatttgcaatgcttgatgtttcatttatcacaccctgccgtaaaatcgaagagtttctccataaatagattttgatgttgtggaaactgagattagatatatctttagtttttggattgtcgggttgattttttttattcttagttcgcaactgatatgaaattgttggaaattcatcgagagttggacgttgtgaaagaaagcagataaattctgttttatcggcacatctcattagggcgatcatgaatccgtgcgtgtatatttttcattttaaaattaccttacatgagtatgttcttgatattggatagacctgcttgtataattgcttacggtagagtgaaacccgaaagtggaatcgattaagaattttttttgcagcaagtacgatgatggttgtctgttaattatcggcataaggtaatacatattcacatcttcagttggtatatatgttaagttcaagaagttatgacgtacgaggtgaaaaatgaattcgaatcgggctgtgtttaacgattcatagtcatgatttttctagcacctatatctcactagggagtcgttagatgcaaaatactaatttccatatgtttgggttttcgaaactttatagtagctttatctcagtgtaacattgttagttttgttttcttgaactataccatactcgattctagtttctataagtataatgtaatccgtattttcctttttcttttttttttggcccgatttaactcgaacatgttctgttattacaaggtgtgggatctaggtgggcaagacaggctaagaac

SEQ ID NO: 101823 - DNA, 368 bp, Mimulus guttatus
  Intron number 2 from transcript mgv1a007063m (locus mgv1a0 07063m.g) derived from phytozome v7.0 (chr-ID scaffold_4; pos 687405 to 687772)
tgaaagatagagtagcagtcaagatcattgaagaggtaaaattcatctttagcttgcaactccaattgtgtaccgattgcagtgaatgaaggaattattctttattttgattttatttcattttttagcatattccgtttgcagttatctaaaaattagggttaacagttgattattgaagaacaaaaagttttgacagggaaattgtcagtgctggatgttaatgctaattaatgtggtcgtctcatttgattatttccatgctgtttttctccgaatcggtttctttcctttcagttcctactctcatatagtgttacagcaatatgaaattgtttggtttgcgtgattgttttgcaggcccttga

SEQ ID NO: 101824 - DNA, 680 bp, Mimulus guttatus
  Intron number 2 from transcript mgv1a004341m (locus mgv1a0 04341m.g) derived from phytozome v7.0 (chr-ID scaffold_24; pos 962827 to 963506 reverse strand)
cagcccggaaagtatttctccgaacaagctgtcaagtatgtttttttcttttctttcttgatttgatggttttttaatattctcgtttgtgtatcttcaaatcgagctatatgggtatttgcggatttaattgaaagagaataatgaagtaggcatagtccaaactcgttcgatattatgtatcactatttaaatattcctatgcctcattgattacttttttccagttttgcccttgttgctcgtaaattctatcaaacattagttccgatatggatagagtagttcatagacaacgaattacttcatccgtttcttttgaagtgatgtttgaggtgagatgcacacaatttaagaaagctactaactagtcttaatttttcgggcacaaattgttatttgacataattaccctttgtggcttttttgttttatcttctatttctcacttcattaacgagtcattattgtcggtgaagtcggacgataattttattttttcttcaccgaaaatgtagaacaaaacgcaatacaaaatcccttgttttcttcctaaaaaaatcactttaaaagaaaaacggaacgagtatcggaagggtactttagtcatattacataatttttctctctctaaaaagtcaattatatgcaggttttacgtagctgaggtccttcttgca

SEQ ID NO: 101825 - DNA, 757 bp, Mimulus guttatus
  Intron number 1 from transcript mgv1a026182m (locus mgv1a0 26182m.g) derived from phytozome v7.0 (chr-ID scaffold_7; pos 3679342 to 3680098 reverse strand)
agggagctttcaatcaatccgctgtcgctctaaaggttacattttttttttgttaaatgagtttctcttacgtatatatcctaggaattagaagccacaattaggtataattacacctacatccgcatagtgttcgaaaaatttcccacacctccctcgagatttgattttcgcaagaaaacaaaaataaaaaatgacaagactctgtttggttcatggactttgattttaaggaaaatgaaaaaaatatatctttttttttttttttgaaaatctctagtatcttttgtttggtttctaaggaaaatggtcatgaaatcgatttttttgtggaaaatcatttttttttaatctaagtagacatttttgttgtgactatgccatggaagtaaactactccgacaattgcatgtcttctaaggcgaatgggaattgaaattgaaaaaagaaaaaaaaaaccccgaaaacttattgccatatagttttcctcacttcgtttttgtagcaaaatgtattgttcttgtttccgtcgcaaaatactttcgcatctgtcccccaatcattttacttagtattttacctctgtgatccaaacaaacctaattaatgttctaaccgagccaagatcggggtaattttcaaactttacggggtcacagcgtaattagacgtaacctcaaggagcacattgtaaataacactagatttagtgtaatatgaaccaaatgtgtactaaattttcttgaaatgaatgcag

SEQ ID NO: 101826 - DNA, 673 bp, Mimulus guttatus
  Intron number 1 from transcript mgv1a021677m (locus mgv1a0 21677m.g) derived from phytozome v7.0 (chr-ID scaffold_7; pos 3025158 to 3025830 reverse strand)
tgaagaagagttagaagaggttgaaaatattgaaggtgttatgggtttcgaccaatcaaacgagacgtcgaaacgggccccgttacatagtttacggaagaggaaacaacattgtcctgttagtttagtcattcctgtaggaatctatcaaagttgattattgacaggctgtacttagtttatgtaacaaaaaaacatatggaaatctcatttatatattgattattttttccttacattgttgtcgattttcgttctaatttacgattcttggattatttatttgcgattacttgagaatataaactcctgtttacttttagtgtaagagtgttatatgtaatcaatcctctgtttgcttttagcatcagatataacaatgattaactactttgccattgctaatctcctcaaggaagttatcctatctaggctccacaaacaatttaaatacgaaaatatccaattgtacgcgtgtatatattcgatacacatttttacatatgaaatttaacgtgtttacgtatgtgtttgtgtgtaaatcgacgatgatatattaagttaaccagatgtagcatatagaaaaagctagaaaaacaaaatgaggagttggggtttgggtgaaattcctattaaagccaacatagagggccaaaattacaattttctggag

SEQ ID NO: 101827 - DNA, 746 bp, Mimulus guttatus
  Intron number 2 from transcript mgv1a019990m (locus mgv1a0 19990m.g) derived from phytozome v7.0 (chr-ID scaffold_3; pos 567913 to 568658)
gctacagtaattatttatttactttatttattgcaattaattagtgcatgtgtcaccggtagaaaaattattttttactgcaacaattaaccgcagtaaaaactaaaaagcatcaaattcgtagtaaaaacttttttgctacgtatttgctacaattttaccccgtaacaacatatacgggcatgacaagaactttgctacgctaaatggttgtagcaaatacttatttaatacggtaaatcctagcatactacgactccaagattaccgtagcaaaaaaaaaatcgtagtaaaaagtcattttttactggtgtgttatattgaattgctgataaaaccaccccatgttattctattgtcaaaactcttatttgatttgattctttttagcaattattagtacccgtgattaggtgttgtttgctagaaaaaaaaaaaaaagtcaaaggaatcttgccaataaaaaaacagaattacaaaaaatattcaataacttctttttttaatatgaaatatttgtatggtataggaatatttgttatgccaggtagcgttttctgggttttagcgaaagatcatcattccaacaataatattcgttaccacgctatactaatttagcaccccactaacaataacaatagttaatttgcaatattaaataagtatttggttaataaagccaaattaattaattaatgttgcatgcagggaagattcagtgaaacaaaagtggacacattcaa

SEQ ID NO: 101828 - DNA, 478 bp, Mimulus guttatus
  Intron number 2 from transcript mgv1a014082m (locus mgv1a0 14082m.g) derived from phytozome v7.0 (chr-ID scaffold_54; pos 1410203 to 1410680 reverse strand)
aagtatctcgaaaccgtacaattcctattatttgggtacccctttttctattcttgctcaactcaccaccgaatcttgaaaagaagtaatttttactgataaatcctatagaaaatagaacccaccagaaataaaacagcaaattctacgaaattttgtatttatccattaagattttgctgcaaattcactaatcttgaattcctatctaaattgaagtaaaagttaatatacatatgttttgatgttatagagtatgtgattatcatgtataatcaaagcataatcgggccttctacgaatttacgaagcttgattttcgttttcttgatgaagtttagtgagagaaaaaaaacccttaatttagtaatgtagaactttttttttagttgcctttgaagttttgagcttgcgatgaataattatatacgattgtgagtgtgagaaaagaagttggtttcgtaggttgttcgagagc

SEQ ID NO: 101829 - DNA, 841 bp, Mimulus guttatus
  Intron number 1 from transcript mgv1a003060m (locus mgv1a0 03060m.g) derived from phytozome v7.0 (chr-ID scaffold_64; pos 92769 to 93609 reverse strand)
ttttacttccccctaaggtcgacccaccctttattcttttctttttcttattattccttttaaattgcttctcattttatcttcacctctttcatcactgctgtgctgactatatatgtctactgtaagtaccgtgtttgtgtgtttgtgtgtttgtgcgtgggctgagctgatgaaatatcaattgaagaattattccctacaaatcatttcttttctcataaattattttcagggatatatatttggttttttgtacaaatgttggctcctttaccatataagatttgaccaagtccctttaattcttcaaaaccagtcgctgaatcaactcagtgagccattttatcactttgaatcaaacttgcagagccccgtggctgtcagactgcagagttaactaatagatgtgctcgactagagaatcagtgcaacagtgcttaatttaaaaaaaaaatagagagcaaggatgggataaaacattaaacccctacttttaaccataattactgtattcatactagtaaatacctgaaagtataatagggaattcattcattagagtatccgaatactcataccatagagaattccccgtcattgtccatattcaatctctagaatttttcttcctctgaatgaatcacactatgctcagttatcagcccaacctgaactggtctcggctaggctagtctgagctactctgagcaaaattttccaatagatcagggatattttgattttacctatatcaatatttgcagactgtctcgtttttttgacacgattaattatattttcaggcagaaataaccatattcaagtatccaaaccgaat

SEQ ID NO: 101830 - DNA, 585 bp, Mimulus guttatus
  Intron number 1 from transcript mgv1a010183m (locus mgv1a0 10183m.g) derived from phytozome v7.0 (chr-ID scaffold_3; pos 3620465 to 3621049 reverse strand)
tcgatttcaccactctcgaatccgccatagctaaggtaccttacttctttttcccgaacaaattcttcaggtttaaaaaatataattcattggggtaatttgttgttcgatatttgaataataatgcacgctacctgtttgttaaattgtttgctccagatttgaaggacttcccccaattaaatcaataattaatataaaaaaatcagagataatgaattaggtttataatgcacatcaaattctcttacgagtaatgctaatttcgctacgaattctgggaattcgtgatgtgcttactccaattggcaattgcttgaattgctttacattcagaattttagttgttgaatatttgagtaatggagataaggattttttttttttcggatttgaaatgatgaaggaaatgatccccgtttacttaaaagactaaatggagtcgaaacgacgtagatttcaaacaatttagctgctaacatttgatgcctaaaaaggatttgaagaaataagatgtatgtatactcataccattacttacgactctgtgtgtgtatctgtatggttcaatgcagaaagatagtg

SEQ ID NO: 101831 - DNA, 528 bp, Mimulus guttatus
  Intron number 1 from transcript mgv1a023249m (locus mgv1a0 23249m.g) derived from phytozome v7.0 (chr-ID scaffold_38; pos 1269407 to 1269934)
ttacagtgggcaattggtacttctttttttgttttttttttcttacacatctctctctctctctctctctctctctctctctctctctctctctcttctcaatgagtcaattcattcaattactgctgcctgctttcatacgttatttatttgtgaaattcgttctggaaatattatatctatttaaaattgatagtactaggttgaggttctccattgaactcatcatcaatatgtttctggttattgactttctttttttctatttcttgagattcaataattgttacctaatacatatataagaatgaatggcttattttgaatttatccaagaataattaaatcatgtgtgaataattaattactgtggttccagttaaagttgccaaataactaagttcgaaatttaacgtatcggagatgtgaaacaagcattcttttagtctatactataattcggtttcgtttgtattatcgttgattgatgtaggtcattcagatccagcaaagttaaaagaaactaca

SEQ ID NO: 101832 - DNA, 713 bp, Mimulus guttatus
  Intron number 3 from transcript mgv1a023249m (locus mgv1a0 23249m.g) derived from phytozome v7.0 (chr-ID scaffold_38; pos 1270341 to 1271053)
caagtatgtgtaagttacagccgtcaggcaattatttattatttgaaccctttccactacaaataccatcaaacaacttgaaaattttgtcaatttcttagtttgataaaactttcgttgttagtctttggaatattatttgaacctatcgaagatgtgcttgcttgatgaaaatcaataaatttattgctgaaagtttgtttatcggaagaatgtactccttccattctaaagttatttatcctatttgctatggcaagtagctttaggtgagagttaaggaaaaaaatagtggttgggagttagtcttgttacactgaaaatagtggtcgggaaattagtggtgttgcatcaatacttgaatgtggatggaaaatctgggggaataaggttttattgaggaattagattctttatcttttatgtttataagaaaatagcagcaaaagagtttgggccagagggagtgttaaaaagctggtttataataaagaaaaacatgtatgttatataagttcatcttttgatggtgttcagatgctacagagtgaataatagcaaatgttttcacttgttttgttatgatattttttcagcagtaaaagaatgttatatatatatatatatatatatatatatatatatatatatatatatgattgttgttgtattgtccagatttgcacaaacttggagggctcactgcagtgata

SEQ ID NO: 101833 - DNA, 572 bp, Mimulus guttatus
  Intron number 2 from transcript mgv1a013352m (locus mgv1a0 13352m.g) derived from phytozome v7.0 (chr-ID scaffold_335 ; pos 140788 to 141359)
ctggtatatatttatgtccttttcacatcaatttactttgtaattattttataataataatcttatatataaaagaaagaaacgctgggcaaccctaaaaaatcctaatgatatttttgtaattatttatttttaatattttatctctactaatttctaactataatttttaacaattatcaaaattaaaactaacccgtgaagaatcctaccttaatggtacatctgtaattatttatttttaatattttttctctactaattttgtaactatttttttatctactaattattcttaatctatatatttggattataaatcttaatatgtaagatgtcaaaaaactaatgttatataaaatatgaataatattgtattattaaattttactatattagtgtaatatattttcttattatttattaaattgattatttctttttttacttttgaaataatatcccgtgcatcgcacggggaaaaatactagtaataataataataataataataataataataataataataataataataataataaagctgtttgtctcaggtacgaacc

SEQ ID NO: 101834 - DNA, 731 bp, Mimulus guttatus
  Intron number 3 from transcript mgv1a014868m (locus mgv1a0 14868m.g) derived from phytozome v7.0 (chr-ID scaffold_44; pos 1231479 to 1232209 reverse strand)
gcccggtacgaaactataattccgtagttatacaatcattaatgtcgaaaaaatacgtgtagtttgcattggttacgattattgtataatcaggcaagaaagactatcggaagtgctatttgtgcaaattttggctttcttggtatttcacactggtttgattgtggtttcttttgtcgagcaacggtataggatgaaccacttaaaacttatttcatcgtttcatttgtctctatattgaggtatgtatgccgtgtgaagttcgatttttcagttgcatggaacttgaatttgaattgaagtatgtacattacacatcaaatcatgatattgtcaaatggttggagccaatattgtctacgctatagttgcttaaaggtgatgctgcttgaagaattacttagtaattgtctcattgggtggtattagttgatggtaatcttatagaagttctcaagttcatcatggttttgcaacttaacatatgattgattagctttatgtccactctttgaccgccaatcatcaattgaactgaataacccgaatcagctcatttcttcatgttgagttcccaaaatcatattaaagttgttcaattgatctctgttttatttgttgggccaagatactaatcaggtttatagtaacgtattcattatgctcatgttgttctaaacgtgatatgattgcatcttctttgactaaactgtcaactttcgcagattcct

SEQ ID NO: 101835 - DNA, 1002 bp, Mimulus guttatus
  Intron number 2 from transcript mgv1a001111m (locus mgv1a0 01111m.g) derived from phytozome v7.0 (chr-ID scaffold_270 ; pos 173384 to 174385)
gatagcttccattttggaaatccttttgtaaagcaagtgtcgtgtgcatttgttatttcgagctgtatgatttagttgtatgttacttcaaatactgattagtatgcttatttgatagttcattttgaccaaggtgattcttagctatcatgacttcggtttgtatgccaacgcaacttgttggattgccttcttttttcttcataactatatttgatgtttagtcttccattggctatcaccagtttgatattatatttgtttaggaggatcttaaagtctttccagtttgttctagttcactttacattaagcagcctattctatgactttgcatccaacatgagcccaagagaagccatctactttcgatccggatgattttcagcttatacttcgtaccccattcctacctgatttatctaatgtgattatattactcagttttttattagcatttaggatctgtttagatgccttttctgccattcctttattctttctggtccatcttcattgtttgcataattcgtccacatttattgttatcttaatttgagttcattcatgtcttctcacttgatgagtaataaatgaaggtattttcatttatcccggtgtcatcttaattttgtttctttcatttcttctcacttgatgagtgataaatgaaggtattgtcatttatcctgatatcaccatcacattttttttcccatatttcaattgatttcctccagtgtcttgtcttctgagttctgactaagaaatcgattggtctcatctctttcagcaatatgtaaaaaaagaaaaaaagaaatattggcagtccaaatttaggtctattaaaattattcattacaaatagttcccaatctatttttctttcataatatttcatttatccttcgatgttcttctttgtctaagtttgagtggtccagtgatttgcaatgtgttgctgcaggggtgcttctatttgtgttggagagcttcatcctg

SEQ ID NO: 101836 - DNA, 1034 bp, Mimulus guttatus
  Intron number 3 from transcript mgv1a002952m (locus mgv1a0 02952m.g) derived from phytozome v7.0 (chr-ID scaffold_151 ; pos 260091 to 261124)
ccaccattcctccattgtaaccgaaccaatcacatgtaagtatttcatttcatatttggtaaattacggccaacctcctgagataaggtcaaattaccaaaaaaaccctcatgtttgggtaattacaaccacccctcaactgtgaatcttcctacaagtccatccttgcgtgtcaaatttagttaaattttctagattatgtggagtattactccaatttgtacccgttttaccccatttaagctccacagtttgaaacaaggtgatcataagatgtgtctcttggcttgtaaatatcagatttgtggtgcatcagaaactattttttttgcacaaaatgggtacaaattagagaacattctacggaatctaaaagattatgttgaatttgacaccataagaatgacatgtaagaagaattatagttgaggggtgtggttgcaattacccaacacatgagttttttttcataatttgacctcacctcaaggaggtagccataatttatcctttcatatattatattcctttattatacaattaaaactttataatttactacagtcagtagtaagtactaacaaaattctattaatttaacgaaatgttaaattatcgaactgataacttaatacgtttcaggccgaatcgagacaaaagaaaaaatttttatttaaacgaggttattaacttatcgagattctgatgtattatcaaaacaaaattgaaaattaatattgtaattagatgaactccaataatatatttgtagtgtgggggcggtggcccccaccccattttaaaaataaaaaaatgaaattaaaataggagtaatttaactgtgaataaatttataaattgtttatttgattttttgaaatttcaaagatctagaaattatttttacagaaatataataaataaataaataaataaaaattaattgaacctaattttgggctaagtaaataaaaatatactgtgtgttatatttggcagctgtgattcatccattcggggagcacatagcgtac

SEQ ID NO: 101837 - DNA, 560 bp, Mimulus guttatus
  Intron number 2 from transcript mgv1a011436m (locus mgv1a0 11436m.g) derived from phytozome v7.0 (chr-ID scaffold_13; pos 1014334 to 1014893)
gaggatttgtgtggagtgcgcttggatcaatacaggtactttcttcagccaattatgtttatttttgcatttttaatatttttaattttaccggatgatatccatatttttttatagatccgctgtttctaaatttgatgatatttcattgtatcgttttgtttatttgtagtgtattgacttttatatgctcatcttgtaaacttcggtcaaacttattggggtcaggatatgaaacaatggaatcagatgaatatatatatcgtgtttgagtatttatgtagcttgataatgttttatatgttttgtttctttatgtaattatatttgcatttgtgtcctgagctaacgtatgatgaaaatgaagaaggatgtgtcaacgagtctaaatggtgcaaatgaatgtagttatccaacatagaatattaagtaccgtgtgtgtgcaatattgtgtcaaatttgttgcctcttaccagttataattttaccatgcctgttgcatatttataactgacaaatttcgattttgcagctcttctcttcagttgtttttgttgtag

SEQ ID NO: 101838 - DNA, 707 bp, Mimulus guttatus
  Intron number 3 from transcript mgv1a011436m (locus mgv1a0 11436m.g) derived from phytozome v7.0 (chr-ID scaffold_13; pos 1015335 to 1016041)
tcgctacctgtaagtttttaatatgatctctcttgacaaccttcttttcagtgtgtgttcattattgtacaagatctactgtgtgaaatagatcgtatttagtaacatcgtctgctggatttttgtcaggctagttataatagtgtactgacatttgtttagttggcataactggaattacagtgacgctatttgatcatgtaaattccgggaaagtaggctttcatcttctgccttcaatcttgagaggtatgtgtatttgtgtgtgagaggtccggagcaaaaccatgtgcctcttaagagatttttctggatatataaaaatttgataactaaagttataacttaacattaaataatgagaggttatgtgcttacatgtaaactattttttctctgtttctccaacttgtgagaaattcagttttgacgagtcaaggcactagaaactttcatctggattgtgctggctgtaacagctttgtctatcttttgagcttttgaagtgtcacttttactagtgagattactgttcctccttgcttaccttcatcgcccctcttagtatagtaggtggtgaatcattgcattctcaattagactgtttctcaatgcatggatattcattatgtaaaggtctgaaactataatgttaacaataccactcttttctgctcgttgctattgtctctcagattctttcagcc

SEQ ID NO: 101839 - DNA, 501 bp, Mimulus guttatus
  Intron number 1 from transcript mgv1a009770m (locus mgv1a0 09770m.g) derived from phytozome v7.0 (chr-ID scaffold_83; pos 462206 to 462706 reverse strand)
caaagcaaattcttacgaaaataattcaggtaaaggtaattaattactcccccacaatttttgcagatctttctttcccccttttcagctgatataaaacttatgatacgcatcaatttggattttttttttcttgtcaaatttgattaagatcagagttttgacttttgagtttagtcgtcagtttttcagattccgtgttcgattttttgtcaaatttggtagaattcccaatttttataaatgggttcacgctgatttctccaaaaaaaaaaaaatcgattttctttttcaatttaatttatagggttctgatgtaactgcatatttctgtgtctagttttgatagaaatcattcaggaaatgggcttaattgagttttaattagagaaaatgtatctatctgttttgaatttacttatgatggagttatataactttgggtttattgttaatctttttgcaggggattattgtgcaggttttagttttaataagtac

SEQ ID NO: 101840 - DNA, 777 bp, Mimulus guttatus
  Intron number 2 from transcript mgv1a009304m (locus mgv1a0 07228m.g) derived from phytozome v7.0 (chr-ID scaffold_18; pos 1520701 to 1521477)
ctgtgagttatttttttgtgtttcgagtttttaattgatcctttccctttttttttttttttttttttttttttctgtaacgcaatatttgcgattaggttcccgctctcagtgatagtcctagattctgtctcagaaatgacaaattatctgtcagtgcatgcaatagttgaacctggtggtatgcgatgacatctacataatttttggggcaattaactgaagtctaaattctttaagatggaacggggaatacttgctctcaattttgatcttatttccatcggaagccaattttatgagaccaattctacggatctgtgctagacttttgcatgccttataccaaatggtatgacgatgatcgtgtgatattgctcgtgtaaaagcaacctgtgacagatttgttgtgattttgcttgctcttcccttatcattttccagctgacagctgcaccttcgacttaaaagattattctaatcaataacgagataagtggaacaaacaatcggaataataatatgtaaaactgataatgaaacttgaggtgtcaatatgtggattattgactttcgactaagccggctataaaattgtacacttcaatattttggttatcgtcatccaaataagtttgtctgctagcaaaccccatatatagttctacttatattgtaatgtatgatcaggaaatttacatatttgagttctgttgtcatatacattttacaagttgaaaataacctttgcgcacatctgtctcgaatttcacaggt

SEQ ID NO: 101841 - DNA, 682 bp, Mimulus guttatus
  Intron number 1 from transcript mgv1a007175m (locus mgv1a0 07175m.g) derived from phytozome v7.0 (chr-ID scaffold_24; pos 405644 to 406325 reverse strand)
actatctcaacacctgcttctaccataccggcgaggtttaattcttttttttttttttttgttttaatttatagataagcgtttggtgaaacactgtttggaaatgttgttgattgtgtttattttaccatgatagggaatttttaatgcccgtacagttcagatatctgaggatctgtaattattctgtagttcgggtgactaatattttcctgaagtatatgttttatgggggtttctgattggtggtggtggtgtggggggggggatttcttgtgcgtaattttttcttcctgataaattatatagttgcatacatttatattcaattttgatagttaccctttttttttgttttttttgttttgatatacggctaagtgttttgctgctgccctttttctgtttttctcattcttgattttgcttgaccaagataggggttttgttagggcttgtatagtcatatatatctaaatatctgtactaaaattttcatgatatatatgttttatgggggtttctgataggtgggggagattggcttgtacgtaatttttacttccttctaaattagatagttgagaaattcacttttttattcataaatgtacgctcaattattgactatatatgttatgtttcagcttgtatccgctaaggtcatccgtaacaagcaatc

SEQ ID NO: 101842 - DNA, 722 bp, Mimulus guttatus
  Intron number 2 from transcript mgv1a003450m (locus mgv1a0 03450m.g) derived from phytozome v7.0 (chr-ID scaffold_8; pos 2682488 to 2683209)
attggtaattgtcgttcgttcttaaacttcgtttattgtctttgattatttcagttggcacgttcgttcctatgaaggaaagctttttgaactacttatgaaaattaacttgaaaattttatttgaagtcttcttgtgttcaatctcacggaatgctcattttctctactgtgataatgaaaaactaatgtattgcatttgaccggacgaacattataaataagtagccttctgtagatgtcagttatagtgcacttatgtttttatgcatggttttgtgggagttgtttgtttgccggctcctcaaattccttatgtcactaggacatactcgcacacgattggacagtctggcttatggttgttaacataacccgatattttcaatttcaatatgctgtccaaagaggcaacttgccctttgtattctctgctggcgtattagagatgattttgcattggactattgtttcagaatagaattcaattgtatgattatatcaaatttgtattgtgctgctctcagatacatgttaggtctcagacttggttttttttttttctcttttttcattttcatttcaagttttatggttatctaattgaaaatgtggttctccgacttcacagctgaccattccatctctatctatctttagaatctcatgtatttttgtttgttttcaggcttttaactccccctggcactcctctttttcctt

SEQ ID NO: 101843 - DNA, 716 bp, Mimulus guttatus
  Intron number 1 from transcript mgv1a009568m (locus mgv1a0 09568m.g) derived from phytozome v7.0 (chr-ID scaffold_59; pos 1170852 to 1171567 reverse strand)
gcgccccctccttggatcccattaatttcaggtcttgttttattcttttcgtcttaattctaactcattttaatgtattaattattatacattctcgtttcttgagggtaataatttggagatttattaatgtgttgttggcatttgcttaaatattagtattgtgtgagaaattcacagttgctctgtttataatgtgaatggatgtccactgtgcagcatttgtcggaatttaataaagaaaggatttttaggtactgaaagacggggcttaatagaattccatttccacctaccccgtttcggtgtttaagttaatacgagagtagctctgtcatgcagaggtgttgattgataaagactcgaacttttggtttcttgacctttgtttccaatgaaatgacctgaattccgtctccttttcacgttgcactgtttttttttttttcattttttatattcgtttaagtttttagttataactagcgatatgccctcattcgtcatttgctcaaagctgtaggcacgtttttttggttaacccttcagctttctcgtccctttttatggctttgttgtatccgtacctctttagccgaatcaagaaaatcttaataagggataattgcgtacgtaatctctttctctaggttttgttgttgtaatgtaatatttttcgtgatgtttcatcttataggcaacaacaggtttcatct

SEQ ID NO: 101844 - DNA, 775 bp, Mimulus guttatus
  Intron number 2 from transcript mgv1a006430m (locus mgv1a0 06430m.g) derived from phytozome v7.0 (chr-ID scaffold_39; pos 299051 to 299825 reverse strand)
gcctcgaggcagcttggaaaatcagctctttcgaagtaagttgattatttcttcattttctttttttaattactttctaattttaatttatatatattgctttatctatatatgtatatatatgtagctgtaactcactaattttaatttgaatttaattggatcaacatggtacgaaaaaagtttagtgtgtatataatatgaaaaagtatttgaggaaaaagccagttggttcttggtggtgtgtgtgtttgggttggaagttgacatttactgttgtatatatatatatatatatataatatatatatatacacttaactgaaagtcaattaaattttgttcaacacattcacacagagatggaaattgccattgaatttcattgcacaagtgcttcgtgtaatgattcttacattttgttagtcatacaatatttccagttaaaaaaaaatatttaaaaaataaataaatatataaatagatatatggtttatttagtatatatgaccttttctatgattagctcagtctcagtgcttcattaaaacttcagaaacatgactttgaatttcatgcaattactcagtcaaatatgtgtaaaattaattggaaaaatgtgctacaccttttcattaaaattatgttcttaaaagttatgacatttgaaaatttgtaagaaatttattttggcaacaataattatttaattaatttatgaaattataagaaattatatttgtttcttgcacacaggattttcagtttcactacc

SEQ ID NO: 101845 - DNA, 538 bp, Mimulus guttatus
  Intron number 1 from transcript mgv1a009546m (locus mgv1a0 09546m.g) derived from phytozome v7.0 (chr-ID scaffold_37; pos 898201 to 898738 reverse strand)
tcaaaaccggtttttcttcgctgctgctgtacagagtgagtaccaaatagcatcccttttgcatgcaaattacaaaatttcatttattgtatatttcaattattagaattcaaaacaatgtcttccggtttttgtttttctctctctagggggtggggcgtgattttgatgttgttttgttatttttgggttttgttgtgtactagtatgattctgcgttttgattcttctgaacaattattaagattataccaattcaatcgttgcagaaaattgggatattttggagtaattaacatttaattatttaattttgttgaattagaaactcgtcggcgctgtaatttattttagggaactgagctatctgattagaattggattcatagtgttggggagattctcctagggctaaactcattctgtagtagtaattcgattaatgcgattttcgtcggaagttttgtttaccacttgaatccgtaacatttgatttactgcagtcggaacgcaacaattttaagtgatcagggtagca

SEQ ID NO: 101846 - DNA, 792 bp, Mimulus guttatus
  Intron number 1 from transcript mgv1a003244m (locus mgv1a0 03244m.g) derived from phytozome v7.0 (chr-ID scaffold_89; pos 595985 to 596776 reverse strand)
ctcaggggttacactgtcaaggttagtttttaatatactaatttaaaatgttcaccattgtattatattactaatttttcttcctcgtaatttgtgtaatactctttgggaatgcaaattggaatggaattttcgatttccgcctattctgatccgaactctttcgattttggaatacaaaattcaaaaaattgatttccgattttccgaaatttggattggaattcgaatatatatgacattccgatttccggtatttccgaaaacaattttgagaattacacttaaaatatcacaattattatggtttacattttaggttacttaaaaaattggaattaacgtcgatttcaatccaaaattttcccattctggaacaagttttttcattccaatttccaaattttgtttttccaaatttctcttcccgtaattggaattagtttttcacctatgaaaaaaatcggctgtaagtgcttatttcaatacaatccgtccaatttccacagcctacttatcacaatattttcacatagtggtataaacaaatcgagctgaatcaaaccccatgattgtttaaactcgtttgatttattatcgaattttaaaaagtgtgttcgaacttgaatttgattatgagttgaatcaagcttgaacaagatttaatcgagctgtatgaaaataagtgttcaaataccttcttcaagaatttctattattatacatggtataatttaggtccgatttaaaaaaaaaaaatattcacttcgtattcgcaggcattagtgagaa

SEQ ID NO: 101847 - DNA, 416 bp, Mimulus guttatus
  Intron number 1 from transcript mgv1a002730m (locus mgv1a0 02730m.g) derived from phytozome v7.0 (chr-ID scaffold_96; pos 931191 to 931606)
cgttcactccttctgctgtagtggtacttttcgcaaattcaattcactaatcgcaatttgtaaccactcccttttgatttaagcttgcaattttgtatacattatcaaaattcatggtcgctactaaattttttgggcattgattaatcgtcttggaacccaagaaacaacgcatgatgaaaaattttagtagaagaaaacaacttgggcagctgttttttaggcgccctaaaaattatctctgttcttgattactgcatgaaagattagggtgttgctgggggtttgtttatactccaattttttttttttaaattcagtgttttctgctggtggaatttgcttcaagatctagtttcagatttttttattctgataaattttatatgatctttgagtttgcaggagttggagag

SEQ ID NO: 101848 - DNA, 1007 bp, Mimulus guttatus
  Intron number 1 from transcript mgv1a014994m (locus mgv1a0 14994m.g) derived from phytozome v7.0 (chr-ID scaffold_1; pos 1750551 to 1751557 reverse strand)
atcaaattccttggtgtgattctgacatcgtcatcgtaagtattttcattttaatttttgttttttgtgcacttcgtttttatagctatgaatgtagcaaagaattacggggataattttgatgttgctagggtttaagaggtatttctcgaagcaagatcctctctgtagtagctatgtattgcaatttcatgaagaggtaattataatcgttgctagggtttaagaggtatttctcgaagaaaaatcatatctgcagtagctatgcattgcagtaggtaattatgatgttgctagctagggtttattgcaatatattttaagaggtaattatgaatctgctagggtttattgcaatttctaatgaaaagtaactgtatctgttttcttacggtaaggagaaatgtttaatcacagtagcccctttcttgtgctccgttaccagaacggcgatttcctaatacaatttgtattccgtacttttttgtagtctcctggttggatggagctttcgtttttattagatgattgcgaactttgtctttctggttattgcaatttctaccaaagataaatatttcttacttctgtacttgtgccccgtcgaattatgtttgtgtattcgtaaatttgctgcccgtgattagtaactaggtcttgttttgtagaaagttacatattaggagattgttcttgtgaaatctaattttccgttatatgcgactgtgatttctttgcacacttcattttccaccatgtatattttgtaattctggagcataaacttaaaaaatggatggtcctaaaaatgaattggaagaagtggctaagatgtaatgtcgcgtgtttctaatctgtgtttctgcccagaaatgtttgtacacgtgcagaaagtgtttacgtatatatacgagttctctctcttgccatttgattaagcctattactgagcactacacacacatcttatagggctgtgagcgcgaggttgcggaagctgagaaagg

SEQ ID NO: 101849 - DNA, 722 bp, Mimulus guttatus
  Intron number 2 from transcript mgv1a002224m (locus mgv1a0 02224m.g) derived from phytozome v7.0 (chr-ID scaffold_12; pos 1880369 to 1881090)
gacgtcttgttagcttgtaagcttctactttattttccatacaagtttgtagtataaaacattaatttatactttttatattccattatatgctgttaactttgttatccctttaacaattacgtcttgctgaaagtggttctcagaataaattttcataattgaagtaattccttctacattgcaagaggttctaattggtcattttattgcctaatttaaactggggtttgatttaaaattctgttggcactcaaaaaggattatgaacttccaaattttctatacacaaatgaagatctggatatttcacgagaatccaatttagacaggtttttttctacaagttgatggaatatgcatatgcaattatgcatctatcggaataataagcgaaaaataattcatgcttcgataaagattgagatgaaaatattggcttgcattgtcattatttgctagccatcttgttcaataacgtcaagatttagttctctccaactgaaggagaatatactgtttatttctctttgaaattgtccaaacagtctttttcttattcgaggttcaggtaccttttccctcttctgtgataacaagtaaacatgatctctagctgtttttttgtcagaacactgagaatggttgacctcacccaacataactatttaccaaactgtcttgcagcttgagagaaagagctcaagttaaacaactcattc

SEQ ID NO: 101850 - DNA, 559 bp, Mimulus guttatus
  Intron number 1 from transcript mgv1a006301m (locus mgv1a0 06301m.g) derived from phytozome v7.0 (chr-ID scaffold_2; pos 1560095 to 1560653 reverse strand)
tttagtccgaccatttctcgtatctgtatcccgaggtgaatttaatttctgttacttgtttaatcctgctaatttcctctcatttgtgtttaattttgctaaataattcatttattcgttggattggaaaacctgcggtttcattttattgcccacctacttgtgtgtgtgtgtgtgtgtgtgctgtttcttccgaatggattttagctatggtgatccatatagctggttctagatgatgggtattttgcaggattaattttatgtttacttcaaaaaggaataattattccaaatattttgttgattgatctctgtgtatgtgaatttatcattattgatggagttgttgtagtagcttggtctgcattttcgtgatttgatcgtcggatggtgtctgtgtgcagaattccgttactactttcattgtaaatgaatcaaataattccgatgaaattaatcagaatttccttactgctttcttctgaattgaacgaaattattctgatttaatttgaacaaacccattgtgatctcaacagttcgttaagcattcacc

SEQ ID NO: 101851 - DNA, 988 bp, Mimulus guttatus
  Intron number 1 from transcript mgv1a007508m (locus mgv1a0 07497m.g) derived from phytozome v7.0 (chr-ID scaffold_4; pos 582257 to 583244)
gttctccgacaggcttcaatcccataattctctgtactgtaccaactctcgagcactctgctttcttcatttgctgaaaagtgttatctttatttgtttggattttagcctcaccttcatcggtaaaaaaaaaataaaaaaatctccttttgattttgcaagagccccaattattattattattattattattattatttttccttttttaattttaccaacttttctctgctatcttagattttctctgctgcttttttttctggttgatatcccttttttacttttcatttttgtgatgtgaggaaagggtaaaggtgggtgctttattggtatgtatgtggtgaaatcttgattttgtacagttggtggttgtttttttttgggtttatttttaggaatttgatgttactgtttttagagttgaaaatttcaatggggttttgaagatctggtgaaggaatcacatccattcatttctgctggtttgattgatgagttttacctgttactcactaattttgttgccttagtttcgaattgtagtaaggttttcatgtgtggtgatttattacaagttttaatgtttcttgtacttggggattaacactggttttcaactgtgttttcatctttgttccactgtatgaactttagttaatccactacttctgtgtcctatgtggtacttagatccgttcctcgtcagctgatttcggatctccgttcggatattccgatatttgttttaagggttttacattttgaaagtgctagtatattttcgtgggtacaatttgcggaaagagtgggtaactatgatctatcttgtaaattagttggagtgatttacggaaatcgaatggttttgtagtgttcgcttatgtttccgcaaaatgtacgagatagctaatgtgaagtatcgtaaattttcttaatatctgtatgttaacttcttttacaggttaattatatttcgatcatactc

SEQ ID NO: 101852 - DNA, 372 bp, Mimulus guttatus
  Intron number 3 from transcript mgv1a013913m (locus mgv1a0 13913m.g) derived from phytozome v7.0 (chr-ID scaffold_242 ; pos 39933 to 40304 reverse strand)
atcagatcaccaaagggaagacagacgccttcaaggtttgttttttttttcttttacgaacgcgcttatttcttgagttatctttatttctaggcaggcagacctttatcttctcaattgaaatatcttcatatccagttgctacaccaccgaacccgggaatttaaatgcccgtaaaaactacaattttgacatttataaaattttgccctatagtcataacattgccaccaaagttaaacaaaaaatcttcaagcatttgaattttcatctagcagcttattttccgaaagatctcattgcatcagcttgtatatttcacgtcttaatggattgaattaggtattattttattttatttggatgcagggt

SEQ ID NO: 101853 - DNA, 585 bp, Mimulus guttatus
  Intron number 1 from transcript mgv1a011946m (locus mgv1a0 11904m.g) derived from phytozome v7.0 (chr-ID scaffold_7; pos 482158 to 482742 reverse strand)
aattggtggtaaagtggagagcctcgaagatttaggtaaacaaaattttttttccagctgtcttaagaacaaatttccttgttttattgtgtgtacagtttttgtaatagctaagatggggaagtgatatgttacaccgggtatttgttaaccgcagatgaggttaaataactgaccactaaacacacatacatatgggtgtgtgggattatgtgcagatctacgcgggttaacagtcacctgatgttaataaccgggtgtaaattatagaattttcccgataagatgtagacggaaatctagatagatctgtagaatcttggaatagtttccattatgaaaaagctaatccagattggagtagattttcattttaggaatgtaatttgtaatgtttgtttatgttttggtggaataatttttctagtaccagtcaaatcatgtttgaaattttcaattttccgaatcaaaagctaaccaaacattaaaaaagaatcactcttttccgattcttcactttcgagctaatgaatctacgttttttcgttagtttcggtgaagcctgctgcatcagcttctacaacg

SEQ ID NO: 101854 - DNA, 954 bp, Mimulus guttatus
  Intron number 1 from transcript mgv1a006122m (locus mgv1a0 06122m.g) derived from phytozome v7.0 (chr-ID scaffold_4; pos 2334180 to 2335133)
cttcttctttgtgagtatttatttatatatagctccttttcttttaaaataattttttttttcattgggtcatggtgctctggttctttgcaatcttaaaaatgcttgatttctcaagaatcttactgggtttttgtttgtgattaataattagggttttttaagggtaaaattccctctttttttttttttttttttttttttttgaagattagaattttggaatgctgttgtcctaaaggcttgagttgaatttatgttttaactttagtttatttggtgtgtggattctgcgttaattactgcattggctgtcttaaatcttaaattgcaatcaaatcttaacaatttacttacagataatataattttacataggttctttcggcgtgcttatagcccgagttttacggattgggattgtgtcgatttctgctaggataagaacactttagggttttgaattggggatttcgttaatgactcttctttttagtctcgagggttatctaattatcttgacatttcatatactaatcgataatttaatttaattgcattggctgatgttgcattgcttatatcttttaaccatttctgccttcatcatgaagatagataatcattcagttacagtcctctgacaatcgacttaatttatagcaatcgagtgtacgtatgaagacttctataattccgttaaaacttttttatttgcattttggtctttgcaacgaatatttcgacaatttaaattagaataacacgatttccggctcgaaccaatggtagccaataaaatcatccctttttttttttgtcgttatacaacaattttaaggaatgaaaatgccaactaattccggtgaattctccttttttttttttgaattaattcatttatgtcggatacttgctatatttacaggtacgcacaaatcattttgcgtctca

SEQ ID NO: 101855 - DNA, 863 bp, Mimulus guttatus
  Intron number 1 from transcript mgv1a014992m (locus mgv1a0 14992m.g) derived from phytozome v7.0 (chr-ID scaffold_126 ; pos 389899 to 390761)
gataatttccccgacgaccagctccgtttccaagggtatttattaactctctttcgtcaattcagtacatcgctgtaccattttagttcatttccataagaattttggtaagaatttgtgtctgtctgataggaatttgtgttaatttcaaatataaattttttttgggcaaattaggtttgaataactgtgtgtaatgtaaattgattatcttctcatgtaatttatagatgtgaggttttattaagcaagcaaatcggtgcttggcatttaagccaataaacgtgtaaagagaaccttcaattttagcctttagatattagctttcttgaatccagtcttgtaaatatattagaattttagcgctagcccttcgttatattgttacatacttctgtaatagtttgcgtgattgattgtccttgcattggtagtatggtacgactcttacgtacgtacggaaaaaaatggagttatgaatgatttgatcttttacttaccttaatctgataaatatcaatattttgcgtttctcagtcaacttttgaagtaaaactaataactgttacacctactgatactgttattccctttacgcgaattgtttcacagcttaattttgagttgtactaggttgatttggaggcaattcttgcaacgggctagcaagattgaagtattgcactttcattacttgctctatgtgtacaaattattggttttattttagtttatgtatgttgaggaagtttattatttacaagttcaggaactgctgaacctgccttttattgtttatagaagcgattaattccaacctttgttcggttcttacagatttgataatacagggttcaaagtga

SEQ ID NO: 101856 - DNA, 962 bp, Mimulus guttatus
  Intron number 2 from transcript mgv1a010543m (locus mgv1a0 10309m.g) derived from phytozome v7.0 (chr-ID scaffold_26; pos 330974 to 331935)
ttctccttcgtcttcgtcgtcatcgacttcttcaggtactctactccatttcaaattaattgttctaacactgaatcaaattgttaatggagagaggttagtgtattgcatagaagtcgtcggattgggaagattaaacatgaataactaagtaactgaactttcttcgatgtttggtatccttaataacttgttggatcgtcccgtaaatattatgttacttgccttcgaaagaactcttttgttggacgtcacataatctaattaaatatttgtgttttcgttagattatttaatgttatatcggctaattttaagttagacaaccaaacgaggcctatatgtattctttattagcttttttaatacatggatggagaaaccagatgtaacatgcattagactagtttaaattgcttatgagatgaattagtataatattattggggcaaattacggtcaccctatgatataaggtcaaattacgaaaaactcttttatattttggtaattacaatcactctattcaactatgtattttcttacacgttcatctttgcagtcaaatgtacttatttaaagagaggttttttttaaagacaatatacagttgaacgatgcatgtaattatccaaacaagagagattttttttctcgtaatttgacctgatcttagccagtgggcggccgtaatttgtccatattattgagacctgtgaacttagatttgtgatatcattaaataatctggggaagctaaataaataggagatgttttacatttgtatattttcaatatttcgacacttaaaacaagattatttgtcttagctttagatttggtggtccttaatctcaggatttattgatgatctaaaaattaaatattaaatgtaagtttgtgtgttttgatttaattaattatagggtcagggtcaaatacaggaaagacagtggctata

SEQ ID NO: 101857 - DNA, 1024 bp, Mimulus guttatus
  Intron number 1 from transcript mgv1a006974m (locus mgv1a0 06974m.g) derived from phytozome v7.0 (chr-ID scaffold_54; pos 1194250 to 1195273)
ggtcttcttctcggtgatattcaggttcttcgattcccccccttttttttattggttttaattttgtatggtttctgtttttgttcttttttctgttccaattgagtttttgtgcaaggaattagtattttttgatgtttctgacctaatgggttctgattaaacggtgtcgttttttctgttttctttttgatactttcccacattttatgagttctacctatgttaaattaatggctttatttttgttacaaatgagttttgttagttcacatttcctctaaggaatttgttgtctagttacctcttaggtctaatttcagttgtgcttcggaaagtgggttctcgaagagaaattctggttgagtttattcagagatgaggaatttatgaagaccatgccatatagcaatttttttagggttctgattttttatgcaggtttcgtgaaatttaaagagaatcttgaactagcctcataaagtctttaatttcgacgttgctcatacggactcatatgttaattaccttaactttattacggttcgtggtttagaatttcataaatttggtcctatgaacttatgttccgaaacgtttaggaaactcgtagatttcgtcgttcaattttgaagcattaagggcttcatatattgaagttccgaaaggcaacggactcaagaatggcgatggatttatttactgcaaagtaattaatgatttttatgtcggctctctttgttgttttttgctacatgtattagctatagcaatgatgaaaacatgtaattatagttattctgttattgccaagtgttggtgaacggggcgtccttcatattaataatctagttcgaatatttatatccacttaattgtgattgcgtgttttctttacttttctttatagcttggggtgtcgttcaaatatacatgcagtttcgtccattttgttactgaaattatatgcacttgaataaaattaaattaccctgctttctgtttcagatttcgaaaaacggtc

SEQ ID NO: 101858 - DNA, 909 bp, Mimulus guttatus
  Intron number 1 from transcript mgv1a021775m (locus mgv1a0 21775m.g) derived from phytozome v7.0 (chr-ID scaffold_164 ; pos 468083 to 468991)
gcgtctcgtggagaaaggcttcgtaccttttaaaggtaaatatacggcttttgagatcctacacctgataaaatataaaattaactactatttaattaatcgaaatacaaaataatgactttaaatttacttaaaatgtatcaataagtgaaggaaaaattatacaaaacaagtcaataaaaatgatttgggaaaaaaatgataatcgtaataattaaatattgaggtattagtattactaatttttgggcttcttgttattttttagaatttttgttgcatttttctcaaagaaaaagaaattgttgttgcattattgaatcttggacaaattacagccacctctgaggtaagtttaaattacgaaaaaaaaaaacccctctgtttagataattacaatcacccttgtcaactatgtattgtcttacacgtctactataaaatttatcgactgaaggaatgagtttttcgtaagaaaaatacttatttaaggaatgttgtaattatcaatatgaggggattttcgtaattgatcttacctcaggggcggtcgtaatttgctcttaaatcttttgttacaaaacgaaaacacatataaagaatatctaggggtggaaataggaaatgaagtctcaaatttcgtcgtttccgatctaaattttcaattttcttagaaacaaaattagaatcattttttcacttccaaatatttttgacttttgtcttctgaaaatgttaattcagatccgacccatccaaaacaacccctagggatacttgtttttttattttatttagaaatatcaaacccctataatttatttttatcatcattaaaaattttttttttctttattgaatgttattaaaaagttattattttttatatttttttatattattatgtag

SEQ ID NO: 101859 - DNA, 579 bp, Mimulus guttatus
  Intron number 2 from transcript mgv1a008341m (locus mgv1a0 08341m.g) derived from phytozome v7.0 (chr-ID scaffold_11; pos 1414098 to 1414676)
gtggaggcgagggcagacagcaaatttcctcctaggttagttttttttaatagatttggattttaatattttgtttaatttttgttttctcttatgtctgaatttgttccgtgtttctgccagtgatgtttcttcaagattcgtaatctgtgtaagactaacgaggcaatttaggggtgtaataattcttgtttttgcgtatattaggtgttcttttagacggtagaaataacttataaggcgacgtagtgatccattttcgaggtggtatacaatataactgcgaaacttgcttttcgactcaaagaggtagtgatcttaggcgtcacctctccaagcaatttgctagctagttctttcatgccactgggggccataaccccctttccacgtctcaacattctaatattttatgtaaaagttcatcatttttcgagtagtgtgctgaggtagatgtatattcacttggcaatgctaatttaagttctagttcaatttcttggaatatgatttgttacatgtaaaattgtttattacgggctttataggaataaatcttgtttttccatttgatttcag

SEQ ID NO: 101860 - DNA, 900 bp, Mimulus guttatus
  Intron number 3 from transcript mgv1a006413m (locus mgv1a0 06413m.g) derived from phytozome v7.0 (chr-ID scaffold_102 ; pos 487091 to 487990)
agtacccggaacgcaccggccaacctgtctgtcaggtacacagttggatgttacttggggttgattaaaaggaaacatgatattccgagattgtgctaactgactattaatttgtcgtcttcttgtatttatctttatgctttatgcggttttccattatgacaaagtattgatgtttatgctgaatgcaagaatctttcaaccaactcttgatctgggtgaagtctatctcttacatcttggcatcttgctatttaactaacttgtcttattagtttctatttaaggaagctgactttgatctatgggggtaaattgcggaagtttgtattaattgtctatttcccgtttttctttgaataccgagcatttcttaacgatctgcagtgcctcgctgcttattgtctgacattgtcctcatatttcagttggattcagtgttaaggatcactagttgaactcgtgttatcttctagcttactatttaaaacccgaattgtttcgtcaactgtatgatgaaataatgagaaatcttgttcgagtagttgaggtcagaatgtagaacctgtgcatgttggagctgtaaaactccacaagttgccttttttctaaaataaacaacttctattttgttgatcatccatttgtcttttctattacttctttccttagtatgttaaggtagtgttttgggtttgcaacgacattcatgaatgtaatcttctctacatattacatgtcgcatgcttttcaatgttaccataaattggtcgtccactctatttgtcatcgctttatgtttttcctttttagtttagaattacacaatcatttagttatacaaatcatgttttccccccatgcatttcatgctctttgaactgaattttgtagtactac

SEQ ID NO: 101861 - DNA, 715 bp, Mimulus guttatus
  Intron number 1 from transcript mgv1a007368m (locus mgv1a0 07368m.g) derived from phytozome v7.0 (chr-ID scaffold_46; pos 5216 to 5930)
tcaaagccattgacgctcagcactgccccggtaattgcctccccacccccattttttttttttttttttttgtgtccggcaggtgtttgttgtaattcctcactgacattttatcagttacttggtgttccgtttgttgcattatgattttcaatgtaggcttcttactttctggttgtctgttagtgttttttaattcagcaatgccattcttattctttggtgctagattgaatgaattgtattggtttgtctctattttttcggcataagaaaattggaagcagaattcgaatacatgaactctgttggcttagcatagtttcagctataacaattctccattgttgaaaggttcagatctacgtctttactttctggttttgagtggcaatgttaatccgagggctggagaaatgattgtcagcagtttgattctgttgtatatgtataatgtattgacgagctagtgtcaagatattcattcatgtatagtagccaaaatctgtatcgagcatagagtcaaagaacatttcttacgagttgtgcaactatcctttgtatactgccttccacttgtcattacaatattataattcttatatttcatacaaattatatttatccactacgtaagttttattatcttgcttctagtatcttcttgaaaccttatttcttctcctttttcatcgatcatcaaacaggttctgtt

SEQ ID NO: 101862 - DNA, 722 bp, Mimulus guttatus
  Intron number 2 from transcript mgv1a013842m (locus mgv1a0 13842m.g) derived from phytozome v7.0 (chr-ID scaffold_346 ; pos 42668 to 43389)
ttgctccgagaaggcgtgcagttgtttcttctgcggttcgtatttttctctcatttttcattaatcgctattttggatttttttttttttttttttttcatattatctcaaacaatgtgtatttcatgttgaatcatcaaattatgttgaaaaaaaatcacttttaacctatgtagcactgacatggaaacaaacacggcgatacagggaaatgacatgtctctaaaattataaatatgctatataaacatttaagattttatttaaatataagttctttttaacatttctatacaaatattcaaaatatatattattatcaaactatcagttcgcaattgatcattaaatcatgtaaataattagggaagtaaaaaaactatttggaaattcggtagtcaagcatgtttctaacttttcagaaattgcaaaatggtccataaagtgtccggcaggtgtcctcgagtgttggaaacgaaacgcggatacgttaggaagttgaagtttccgtgctacatagcttttaacctttttgaatgtcagtgaagaaaatttccggaaatgcttttgcaattggatggaaacttatggtctgaggcaacaattttattgccttttctccggatttgaagcttataaaaccgcatccttaaaatgcaagaactaactagttttcgcgttttgcagctcggaaagggagttaagaaacggacaatcattcc

SEQ ID NO: 101863 - DNA, 694 bp, Mimulus guttatus
  Intron number 1 from transcript mgv1a020051m (locus mgv1a0 20051m.g) derived from phytozome v7.0 (chr-ID scaffold_16; pos 1326481 to 1327174)
acttcttctggaactgtaagtcatttcttcttctcttttgtttctttatttattatttatttaatttttatttattttttttttattttttttttatttttaaatatatacatatatagtataatctctgttactttattgtttcggatgaatctcaacatttgaaattatatttacagaaatttcatttgttcaatctccaatattttaatggttttacttcattttaattttccaattaatttattttaggatctgtcacacgatgaaacctcttattttttttttaattatttatttaatttatttttatgtttttagaaaatttgagatgcattattacttggaaattaatagtatataaagatttatgaagaattagatttttttggcacaaaagtaatttacatatattctcatatatcgatctactatacttgcatctgcttcatcatctgtatgtatcaattagggttttgatttaaaaaaaaataaaaaattaaatcatcattatattcatcacacaccacagcataaaagttcgaattcaattaattagtagctgataaattgtttggtcgcaaaaaccgaaaccgaaaccgaaaccgaaactattttgctttaatatatatttattgttcaatcttacatttatatttacatataattaatgcagttttgatttgcagaaaat

SEQ ID NO: 101864 - DNA, 595 bp, Mimulus guttatus
  Intron number 1 from transcript mgv1a025974m (locus mgv1a0 25974m.g) derived from phytozome v7.0 (chr-ID scaffold_247 ; pos 89234 to 89828)
attcagaggtcttcgtctctcacagatcgcgaaaggcaaggattttatcggcccttcttttaatcgtttttcgtttgttttgtcgaatgtgatttgctgtcgtctttgaatttggttcgagtttgtctgtgtgagtgtttttagaataaaaaatggttcgcattatcgcatatgaggtgtttgatttaatgactgactggagtgtcgcatcttcgtggagttttgttgtttcaagcaatcccgttcggctgattcgtagatgattttgtattgaaaggttttattgttatgttttgtgagtggtggatgatgattctcggttacgatgtgaatcgctacaccggttccgtttttaacttttgcatcgagatgcagctttggatgatgaaacaattcatttctaaagctttcttgctcccttctttattttcttgttctacgaggtttttgttatgtctaggctctagggacggacgagttgaactaaattagaaatggttcgatattacgcgaaacggtaaatttttcgataattatgaatattttttccatgctggcagatatttggctgatctattggcagagagacaaacgc

SEQ ID NO: 101865 - DNA, 313 bp, Mimulus guttatus
  Intron number 1 from transcript mgv1a022200m (locus mgv1a0 22200m.g) derived from phytozome v7.0 (chr-ID scaffold_32; pos 150720 to 151032 reverse strand)
tccgtgatttggccccatgttctcacacgtcaccatcactgcccctttttttctctctcctctctctttctctctcctctctctcatttttttttttaaatttccatcctactataaattcccaattcccgcagaaataaacccatcatcgcacaattcgcttttttcttctctctaaaactattttgattcactgtaacggcacactttttttggtgggaacaattgtattgttttttaattctataataataatggaagatttgaaggttacgaagagggggcgaggtgactcggacgagtccgagttgga

SEQ ID NO: 101866 - DNA, 607 bp, Mimulus guttatus
  Intron number 1 from transcript mgv1a007559m (locus mgv1a0 07559m.g) derived from phytozome v7.0 (chr-ID scaffold_3; pos 1966291 to 1966897)
ctcgccatattttctctccaattcgttgattcaaggtaagaaaccccttccaaattctcgttattcttcgattaattgcttcctgggtttttattcaattgaacagtacgcacaattacaaccaaattattgtttgatgttcaattgaacagtacgcacaattaaccttttgctatatattaactaataaaaagcaaaaaaaaaaaaaaacttttgtatcatgaactcgaatttttgagctttagcatggaattaggggctagttaagttttaggctttatgtattttttatgggttttttttttaattagtctgaagcgttttgttaattttgaggattttgaatgagaattaatggggaaagtttcacaatttgaatttttaaacaatttctatggacttttttttttttttttgaaatagttttagtaaatgtcttttgacctgaatctgtaccgaatgaggtttctttttatttaattttttttttaaatttatgtaggtaaatatatatttttgtttcccagtcttaattttcggtttttagtttgtattcgagatttcagatgatcgactgttcatttgttttgggtcagggtaccggttg

SEQ ID NO: 101867 - DNA, 1034 bp, Mimulus guttatus
  Intron number 2 from transcript mgv1a007559m (locus mgv1a0 07559m.g) derived from phytozome v7.0 (chr-ID scaffold_3; pos 1967161 to 1968194)
ttttgaagcaccccgattctccttacatcagagcggtaagtagagttcgtgtcgaaacatttttttacttagcgcgactttgaaaaatactatgtattgtgaggattaaaaaatttggtgcttttgcgacttttgtggttccgtatttaatcatttataagctatgttacatagacacgggaacagggatacggcgacacgcagacacggaaagtaggacacgggaacgtggggggggatacgtgtaaatattaaaaaagttttttttttgcttttttacaagattaaaatttacacacacacacacacacacacacatatatatatatatatatatatattattattagttttcgtccaacgtaggcagaatagttggaaagagaagaataatactgcagtagggcacaacagaagtagaataggtttgggctttttcagaaaaaaacctttttttccttctttgacacgcgtgtcaattttggatacccgtgtccaagtatttaaatattacagataaaacgtatctgacacggggaaacttgtccctttagccgtatctgtgtaacagagtttataaggtgttgagttagaactgtaaacagttatagaactattacgtgaaaatactatgaagtgtggactccgtgattgtgaatagtaagtcgaataagcttagattgcattgtggtggaaggaattggatttttttaagcgaagaatttgaaataacttataaacttaattggaaacgcgccataataatttaaaaatagctgaagttaggatttcggagatttaaaatttcattgtattatgagatcttcagaaaaaaagttcactagattgttattatgcatttgatccttggcctcataaactttataaatgtaacaattttttttttattttttttttaatatatttcttttccatttgctgttgtataacctatgttttttggcatgagaatgacgattatgtacttgtctttttcagattggatttctctacttaaggtacgttgcagatcc

SEQ ID NO: 101868 - DNA, 617 bp, Mimulus guttatus
  Intron number 1 from transcript mgv1a022061m (locus mgv1a0 22061m.g) derived from phytozome v7.0 (chr-ID scaffold_84; pos 169044 to 169660 reverse strand)
cttcagcttttgcaccattctcaggcaacctgttcgtacgtagtctataaatgttttttattaagcaaattgccatttattttgattttcatgatccgttgcatttgatcttgaactatacttacaaaaatcattcttgaaatctgatctctgtataacgaaatcattcttgaaaaaaaatatatattatgtatacaaaaattggatttacgtacgcggtgatgatactttgtttgtacagtaaatttggaagtttctgtggctttcggactcaaaatgttgataggctctgataaaattgaggaaccatcaaggacatgtaagtttatatatatattgcacttgtatgtatgtatcattattttagtttaattttaccagttctactatcagcatgatgaatatatattcgtaatatgatttcccaatatttaatttaatttggatggaagaattctgagttgaaaaagatttaaatctataataataaattcattgcttatttcgaacggattcgatcggcacaacaataaatttcatgtgtaaccctaaacttttttctttcttttacaaacattacagtgaagccaatatacaacttgagcaattcaagatca

SEQ ID NO: 101869 - DNA, 665 bp, Mimulus guttatus
  Intron number 2 from transcript mgv1a000379m (locus mgv1a0 00379m.g) derived from phytozome v7.0 (chr-ID scaffold_103 ; pos 427026 to 427690 reverse strand)
ctgacctggagcttctctctcaagtttgtcctcaggtaattcatttcattatataattagaaactatgctgccatctcataatcctcgggttttgtggtgcatttgaatcgaagatgattacccatcctcttctcttattgtttgatatttgattgtcatagttctaataagttcttaaaagaactatgtcgcggtattactgaatatgaggtgtgggtggtctgtcttaattctaaatgctatttttgtaaactacacctattttccttgaagtcggtttttaataaacctagacaattacaacaacgcccccttaagtttcgataccagctaacatttaaccccttctggccgtggacttattggaaatcccatttaccttaaccaaatactggatagttacattcccatccccgagtttaggtctcattgcatatatgtattcactcatgtttggttaatctttcccaataatgtccgatttcagcaaaaaatacaccacaaatatctcattattttttccgatatcatgttaagaatatatgtggaggagtgtccgcggtgctgaccgtttagtagttgattaatttatcagtaattgacagtgcatcatgccaaaatccacttagttttatctatattctattttctatcagaatttcaa

SEQ ID NO: 101870 - DNA, 522 bp, Mimulus guttatus
  Intron number 2 from transcript mgv11b020465m (locus mgv11 b020465m.g) derived from phytozome v7.0 (chr-ID scaffold_5 ; pos 2982375 to 2982896)
taatcagatttttggccattacctttattcgccaggtatagattattttttatgggaaaagtacagtttgcaccgtcatgtttgcaccgattttgtattttggtccctcgtgcacaaaaatacacatttgattcctcatatttaaaaaaataaacacttttagtcatttccgtcaattttccgttagtactaacggaatcaagtgtgtgccactaaaagtgttaagctattgaaacttgatggaccaaatgtgttttttatgaacatgatggaccaaatgtgaaatcggtgcaaacaagagggatgaaaattgtaatttccccttatcttgatctttctttttgtttcttctttttttatttttcgtgttaattagtttgatttagtcctatagagtagtttctttaaattgtcaaggactactttttttttttttttataatattatttggcaggaataacaagacgtttccaaacaatgaaattttaatggggcctttcaaaatttatttcgaaggaaat

SEQ ID NO: 101871 - DNA, 717 bp, Mimulus guttatus
  Intron number 1 from transcript mgv1a021971m (locus mgv1a0 21971m.g) derived from phytozome v7.0 (chr-ID scaffold_124 ; pos 403981 to 404697)
ccaccactgcaaaggaaccctaaaggtttgatttttcttcatttttttatttctatttttgatatttgcaaaaaaaattatgtttttttttaagccattttgttgtatgtaagtatgtctatgtagcacagaaacttcaatttcttaacgtttccgcttttcgaacacatttcgtgtcggaaactcgaaaacacctgctgcacaccttatgggccattttgcaatttctaaaaatttagaaactttgagaataacaaattttcaaatatttttattgtttccctaattatttacatgatttaatgaccaattgcaaattgacatttaatagtaattaaatttattttgaatatgtttgtatgaaattataaaaaaaaaattatatagaaataaaaacttatatatgtttatacagtatatttataaatatatgtccttatacttttaatatttacacgtttccccaagttcctctatcctccttttcggggcgtgccgtttcccttttccccgtttctccgtatcaccgttcgtgtcagtgctacataaatatatgtatgtatgtatgtatgtatgtatgtatgtaagtacgtacgaacgaataaatttgtaacaattcttacacaaggctgtgatcctttactttcttttataatatactgaccttaattgaattgcatcatcaaaatttattgcagctgagtaactactcttcat

SEQ ID NO: 101872 - DNA, 954 bp, Mimulus guttatus
  Intron number 4 from transcript mgv1a015079m (locus mgv1a0 12800m.g) derived from phytozome v7.0 (chr-ID scaffold_48; pos 464687 to 465640 reverse strand)
tcagcctgtgcctcttcctaatccctgaaagagtggtatcctactatatctttttttaatcttaacgataattgcttttaattttttgcctttcgtgaatcgaatctattagcaagcatgtttttttggattacacaggaatatgttgtaaaaaactgcttcattttctcttgttgtaaagtatcatgcagcaatatgttgtaatgtttggaagtgaagacatgagcactttaccgaatagtcaatggtaaatataaatgggaaaatgctgtaattattgttacagcttggattgggaactaggaaataaattttcataatcgaaatggtatttcacgatttccactttgaaccttactgattgtattcttccaaaacattatttgtgattatttggttggtgtttagagatttagtatgttcccgtgtctgactgtgcccgtgactgataatactcttgaaacatatatttcttcttgccttgatatagatgaagccttggtcaattactattgccatgtactgtcaaacacggttcatttctagactgttcccttttcagagaaatttcaagtgttgaccctctcagagtgctagataatcttttttatttatgaaccaggaacctaggtattctgctgtagattgatcatgcacatgttttgactgtggatgaataactaaggggcttatgattatgattcagatattatgtactttgtaaatgaagggcatgtcttcttttgctggcagaagatacgcatgtggttagataattttttttaccctacatctattattcctcgcaccattaacgtagacgtgcactttctcgagtttaggtcaccaatgttgtgagattttcatgtcatttttaggtttctttgctgacagtttagacttcttaaatattcttattgctaatcacttctctatcattgcaaccatcagcaa

SEQ ID NO: 101873 - DNA, 651 bp, Mimulus guttatus
  Intron number 1 from transcript mgv1a010607m (locus mgv1a0 10607m.g) derived from phytozome v7.0 (chr-ID scaffold_45; pos 1618171 to 1618821)
cgatttgtacaaattcgacgcttgggatcttccaagtaattattatttattactcttacttatttatctattattagcgtatatactacaatcactccctgagatttggtcaaattacgaaaaaaccccttatgtttgggtaattacaaaactcatctcaactttaaatgtttttacacttccactcttgcggtgtcaaatttagtagaatcttctagatcacatggaatattctcaattttgttctcggtttatcccattcgagttccacattttgaagcaagatgatcataagacgtgcctctttgcttttaaatatcagattgtggtgcataataaattattttttttacacaaaacgcgtacaaactagagtacatttcaagaaatcgagaagattttgttaaatttgacaccataagtgtgcacgtgtaacaagattcatagttgaagggtaagtcgtaattattcaaatataataattttttttcgtaatttgaccgtacatcagggtgcatgtaatttaccttttattattattcatattattattattattattattattccaattaaattgtttgattttttttttatattttattaatcatttaataaatttgcaggcaaggctttgtttggggaaaaaga

SEQ ID NO: 101874 - DNA, 603 bp, Mimulus guttatus
  Intron number 1 from transcript mgv1a004010m (locus mgv1a0 04010m.g) derived from phytozome v7.0 (chr-ID scaffold_4; pos 3811000 to 3811602)
agaagacccctgttttgggcttccacgaggttagtctctctctctctctctctctctctctctctcgttatggtaataaaaaaatcttaatggctggatatagtatctttctgggttatggcaattcaatgaactgacatgattttctagaagtccttgaattagggtttctttcttgatttccgtactcattgatgctgatgaattaggagactttcttaaatccattataggaatctgcgataagattatgaatacgagttttaggaccgtgtcatcattttgttgtagttggacttaagtcttttgcttcatttgatatgttagtttcatattatgtataaatagtggtcaatttaatatgatgttcctctcttatgtagtacataataagtgtaccttaatagatccgaaaagcgaaattaggattgtgtaatcatagacgaaatattcttcgtatgcaaatattcgaccaagtttgattatattgtatgtcaaacttaatcgtaattcccaaacaaggccttagttgatttttttttttgtttatcatatggtttatttttaagagtcaatgatgcattgtggtgcgtgaatttacag

SEQ ID NO: 101875 - DNA, 955 bp, Mimulus guttatus
  Intron number 1 from transcript mgv1a024384m (locus mgv1a0 24384m.g) derived from phytozome v7.0 (chr-ID scaffold_29; pos 1251255 to 1252209 reverse strand)
taattctgctgctggaataattctggtggagcaaggtgagaatctcaccttgctccaccagaagccgcttccattctagcagaagtaattctcacctttcttctttccgaggtaattgcatcttcattttttcaattctttgaattctaacttgattttcttactgttagtagattcaattttttcatgttagatagaacataattgatttcggcatgtcagtgcctttagcgttctctagtgttgtatccttcaatttagggtaaattacggccacccttgaggtaaggtcaaattacgaaaaaaacccctcatgtttaggtaattacaaccaccgctgaactatgaattttcttacgcgttcacccttgcgatgtcaaatttagtggaatcttataaattatgtgaaatgttctccaatttgtacccattttgccctattcgagctccacattgataatcataaaatgtgtctcttggcctgtaaatatcagattgtggtgcatcaaaaactgcatttttgcacaaaacgagtacaaactagagaacattccacgctatctagaaaattctattgaatttgacacacaagagttgacgtgtaagaagattcatagttgaggcctgaggggtggttgtaattacccaagcaagagaggtttattcgtaatttgatcttactggtgtggccgtaatttacccttcaatttatacagaatgcagtgcgattttgttagtgtagtggttatttttcaagaattaaatcgaatttaataatgaggatattcattgcatcattcttcaatatggttacaattcttaccttttgcttaagaatttgtgtatttatcttcgtataagccagatgtatgaatgacaaatttaatgctattctattaatatttttaatttgtgttcagaaataaatttcggaggtcgcattatatatagtaga

SEQ ID NO: 101876 - DNA, 452 bp, Mimulus guttatus
  Intron number 1 from transcript mgv1a009410m (locus mgv1a0 09410m.g) derived from phytozome v7.0 (chr-ID scaffold_39; pos 1093600 to 1094051 reverse strand)
tcttcgattctctcgagaaggagcaaattaatcaggttcggattctctactcacagtcaagatcacaattttgttttttctttaatcgcgtttttaaattcaattaaggtagaacaattagtgagggcttttcattttttcttttttttacatctgtcttgattcttcaattcaagttttttctcttccgggtatgtatgaatacgatggcgctattaatcgttttcttttcatttcatttttttacatttatatatttatttatttttaattatgttgatctaattgccttgcaacatatatatgttcacaagattgtgttagtgtatgtatctataatgaagaaagagtatgtattattatgatgcattgtcttatctacaaaaataatttcaatatattcgacagattaactaaatcattttgaatcccttatcagaaaatctcgtaaa

SEQ ID NO: 101877 - DNA, 505 bp, Mimulus guttatus
  Intron number 1 from transcript mgv1a008978m (locus mgv1a0 08978m.g) derived from phytozome v7.0 (chr-ID scaffold_37; pos 781307 to 781811 reverse strand)
tgcttcaaggtatatatattttcagaattcagatcgtctttgtttcgattatttactactcgagaacgaatttgatcagatcttcatcttctacctattgttaatttctgatttgattgctttgataaatcagtttttttttttttttttttttttgaatctgtgttttcacacgttgttttctaattgaataaatatcatgaatccaaaaacttgaattccatgatcgcataaaagttttgatgcttttatcttcaccatgaataaatgaatttattcgcgcctcttttgctagagttgacagcaatatgaaattaaagtaattaggaatttcggtcaaaccttatctattaataatgctcgccaacaatttatacgtgctttagtgatttcagttgtttccattccatgatttcattgctcactgcatcatggtggcacaattctttcaaatcgatgcacacaagttgtttgatgaattgattttttgaaattgttataggca

SEQ ID NO: 101878 - DNA, 1040 bp, Mimulus guttatus
  Intron number 2 from transcript mgv1a015722m (locus mgv1a0 15722m.g) derived from phytozome v7.0 (chr-ID scaffold_8; pos 730638 to 731677)
tcttcagaaggatcccccaacctcttgcagcgctggtatattaactaattttcaccaattttttttaaataaataaataatgttgttgtgttagataattgttacgaaaatccaaatccgaaaaaaaaaattaaaaaaaatcaaatgtgtttgtgttagataattgtttctgggcaatttctgttgaaacaatattgagttatgtaatctgagcttttcttatttccgaagttgcgatgaatgttggctttgacatggataattcattagatacaagtacaaacccgaaacttcatctcggtttttgccgttattatgttcggtgtgttgtatatgtttctttccttttcgtgattttgtgcgagcgatactgaattgcagtagcttttgcgatgattattgggatctattgtcttcgtaaggtgttgaaataaggtctgggtcgtaggtttagaaggattttctttttgtaatggcccacagttttggtatctcgtttttgtaaattgacggggtctggcttgtactgtagccaatgttgatttggagtttgtatggaatcaagtatgtatatttccataagcatataagatattgagttctgaacgaggttttgatacgattatttacttctcatggaatcccgttttgattttattagagttgcgtgtagaatccctttattactaagttgaaatatcgtttgttgcaatcttaaaaccactggaaaactctacccatatcttgaaaatttcatgtatgatctgcctataacatttcgtattattttcttccatttgtcgtgtggatgatttgtataaccaaacgatatatataaatacgtttcttgcatatttatttatttatttatttgtttgtctaactccaagcccggtctaatttcggttagcaatttgttcgacaactttaccttttgagtttacgtttttatgagaatgaatcagtgatgattcttgatattgttatgctaatcacttgcttgcgctgtgtgcatatttccaggccccgtcgcggaggac

SEQ ID NO: 101879 - DNA, 990 bp, Mimulus guttatus
  Intron number 1 from transcript mgv1a002964m (locus mgv1a0 02964m.g) derived from phytozome v7.0 (chr-ID scaffold_56; pos 1028423 to 1029412)
tcctccagttcaatcaggtctgatttgatctttttttttttttgaggatttgtttatgcggtatctcgattgctgtttcaaattgtttggagcggcggtgtgtaatcaccctcgatgctgttatttattccttctgtggggtgtatgaagttcaaaaaatatattagatctccaaaatgaaaaatgatcaaattcaattgttcttgcttcagttgtaccttctgctatgagggttgtacttctgttctattggagtgagtgacatgtttaaatcatgaagggccgatttagatgcacttagtttgtacatttgactatgcgcacacaaacggtatgatgcaatatagaagaattgaaacatgaagttatgatgcaacaatgtagtttctggcatttgacattcaaattgaaagcaaagtataattctatgagatatacagtgtatctgttatatgttctgtggctgtatatctttaatttgactttgtatgtatcaaagctgcgcatatagcaaatttcgggttttaggatcatggcttctttctattgcttatatatatacagaaagtaattcactcatttctcagtggcaaattagtatggaactgaaaactgattgattgtctttatcgatactggaaactagccagttttgctcatgctttattagtatttttgcatgattaaataatggcattgatttcatgtgattgctttttatcttctgattgttcgaaccttaaatgaacttgtggttttagttggtctgagttttgacatattccccatatattgtgaaaagggaatgaaccttttatgtaagcgtcattgccccttttatcgaaccgtttagatatcaattcatgtgtagagtcagatagatagtaagagaaaaagaaaagaaaaatagaaaataatatatttacttcattcctccgactttaaaattacatgtaatctgtgttgctaatcaagatagtttttttgcag

SEQ ID NO: 101880 - DNA, 698 bp, Mimulus guttatus
  Intron number 1 from transcript mgv1a014550m (locus mgv1a0 14550m.g) derived from phytozome v7.0 (chr-ID scaffold_1; pos 2189615 to 2190312 reverse strand)
ccagcaattgccgacttcaatcgccaccgattaaggtaattcgttaacaattcaaacataaatcacgtctttcttcttcgtttgaaaatttgtgcctcaatttcggagaacctgcgaataagtggtgatcgagcctaaattttgtccggcgaagtacggttaagaaattccatctgttttttccatgggcggattctgaattggaattctcatgttcgtagctctacagatttcttaattatgatctctatattgatttatctggcaatttttttgttttttaatctgttgttttgttcaatgtttgggattattcgtcatgaagaattaaaaatttcgatttgattcgattggtgatcactttcagtttttatataataccttgatttcaaatctgttttagctgagtttctaaatcataattggatactgtgaaatcttgcttgtgtgttggattcttctagtttgtattaccatgagtttaaaaatggctgaatccaacaatatggagtgaaatgcaaaaccttatgaatgttgattcatggttgaatcgcatcacaatttatcgtactcgacgactgtttctgcgtgttttttttagctctctatgttgttgcgtatatgttctataattacatcgatttgattggtgctctatttcttttgatcagcagcagatcaatccgaaaaaagaaagt

SEQ ID NO: 101881 - DNA, 693 bp, Mimulus guttatus
  Intron number 2 from transcript mgv1a003540m (locus mgv1a0 03540m.g) derived from phytozome v7.0 (chr-ID scaffold_55; pos 981104 to 981796)
agacattgggattcgcctcaattgcgtccttatttgtaagtattaaaaactatactcccttgtttatacctttatcactcttaattaattaccagataattggggagaaacaagtaatgaatgacaagggtattttagtcatattctatgtttttgttctttctctctaaaatatatgcatatttattagttttctcagtacccgtgcaccaacaaaaaaacgacactcgttataaaatagatggagcagtgctagggatctaatcttcaaatcttataagttgtttggtgggcttcaattaattgggttattaagccaagaaaattgtgaaatacacatgtatatcgtacgtcgtttatatgtacatatacattcatatcggtgtgtgcggatgaattatgagtagtacaatatgatacctaaccaaatatatcgagaatacgaccagttatgttagatgctacacaaaatgaaatattatagataatactacacacatgaattacagttcttatatgatctggtgtgtacttcatcgagtgtagcattatacttgaccaaaaagatcaatagcaagtgtggtactgaaattggcttgaataaggccacaaaaatcatgatcaagatttgaatccttttgttttcttttgtgtgaagggattgttggcaatcgcattaacagcagttttcaa

SEQ ID NO: 101882 - DNA, 722 bp, Mimulus guttatus
  Intron number 2 from transcript mgv1a004974m (locus mgv1a0 04981m.g) derived from phytozome v7.0 (chr-ID scaffold_109 ; pos 787157 to 787878 reverse strand)
agagtgttggtaagatgctggactaaatgctataatatgtttcttcgtctctttgtattcatgcaaaattgatagacatttggggacttcattcatcgtgttgttgaacttgacatgcaaaagttagatgtatgatcctgtattgaagttgaaatcagtgttgaaacctcttaccaattcttatttcatgagcatttagtgggcgccttgagatgttagaaaacctgctggcttctcatgttctttggtaagaaacactttttagtcctaggagaaaagcttgcatgtttgtttgtttttattataagcaccagaaagattatacaatgtttctattgattttcaaaacattgaaatctctttgtcaaatttattgtctacatttaaagagtttaaattttttatcttacttccactcagtaaaattgatctatttctagtatgcataagtaaacagtttctatggcttcatgctggtgtaaagttctacacttttctatatggtggatccaggaattatatgcaccttagcaattatcttcatcacttgcaacttacctttgtttccccccacccccccagtctctctctctgatgaatttttggattaagttctcgttcttatttgctcatcaaatatattattaatttgatctattacctctaagtttgtttggtatgattcagcggaacttttaaccacaaacaagttatcagagtta

SEQ ID NO: 101883 - DNA, 817 bp, Mimulus guttatus
  Intron number 1 from transcript mgv11b022747m (locus mgv11 b022747m.g) derived from phytozome v7.0 (chr-ID scaffold_6 2; pos 517936 to 518752 reverse strand)
gaccactaccagcgccgcccgtgctctccacccacgttcgtatgatttaagactttaatcgttttttaatgttgtttttgaagaatatttgtttgggttgtttttcaattcggctattgttgggtctgttgctttgaacaatatttgttttgagttttttttttccaatcttctgctactgtgtcggtggcagtgaaggactattttttttttctcaaaaaagtctgaaaattcccgaaaaaaatcagaatcggaatcgattcttgaattcctaaaaatttggaattggaatcggcattttggacttccgaaaaaataacggaatttttccgaaacacccaaatctgatccgatccgtccgatctccacccctacacgtgatcatcttctaagaactcgttgcaatttcctttttgtatctgtattttattttgtcgattgcttaaaagtcgtgaaaaccgattctttcctttgatcatttgctgtcattcatgaattttcggtaaataattgcagaaacttgcagaaatttgttgaaatcaattgtcctttgatgaagttttaggctagatggcttttataaactgattgcttaagccaattagtaagtgagtgataacaatttggagagaatatttcatacatatactcttggaattttgttatgtaggcgattattgtgaatttatgtgaattaatattgtgaaaactggaaaatacgaagattaagtttctaactacgcacactggtgtattctgattgtgtggttttataaatttgatctgattagtttttatggtggttttgcaggacggg

SEQ ID NO: 101884 - DNA, 820 bp, Mimulus guttatus
  Intron number 1 from transcript mgv1a017590m (locus mgv1a0 17590m.g) derived from phytozome v7.0 (chr-ID scaffold_235 ; pos 48669 to 49488 reverse strand)
cctcgaatttcacggctgtggaaagctattaaaaagtatggaatctacgctccattaaatcagtattgagatttatacctgtcttttcttcaatctaattttgctaaaattaggattttcaattaagaattagaaaagtaacaatactatctatctttttaagaaagtcaataagagcatatatctaggagttatttttgttttagtgcttttctttactgataaatcaactcaaaatgcatttggtttgcatcactagattgttaaagattctattttggtgtaaaaccacgcctttctgtgggggattttgtaatgacgcctagttgtttatttgtttcattaattaagtacataagggtcatggaaagtatcaagtgaagaattgctaaagaattatatttattgcaggcttgacaatcttcttatcttcttttgatggtttacctttgattgtttgttttcttagaatgggttgattttcaaaaaaatcaaatttaaactagggaatattaccccttgttcttgcaagcctaagtcttgctatattggtaaattcatccacaaaatgttttatcttttatgttttctttctcacgaaacaattatatgttgtgtatcaaatatatgtttctccttttcccttttgtttagttactaaattatcatattcttgaatctttggtttcttcagtaaattgcaacaattacataatataaaagctcatgcttggttattatgttttaaaaatatatcgaggcaaaaaaaatgaatataataacatgaaattctgattttcagcagattttaaactatatc

SEQ ID NO: 101885 - DNA, 1007 bp, Mimulus guttatus
  Intron number 2 from transcript mgv11b019145m (locus mgv11 b019145m.g) derived from phytozome v7.0 (chr-ID scaffold_3 ; pos 2800797 to 2801803)
aatcggtgctctactctttcagtgttaaggtatgttctgttcttaatttttgtgaagttacgcttttaccccttgaataatatatattatatactagcatctaataatcgcctcataaaaaaaaaaaaaaattatatattttggatagagaacaaatttttatgtgtcacacatgacataataaacattaaaaagggaatcttttcgtcataacttgcattattgtattgtatttttagatcatatatatatatatccagctatttatcaaacaaaaagaaaaaaaaatcaaaaattataattttcgattcggtttttataatacaaactaaagccgttttttttttattttggaacaacgattttggtaatgtattttaaaaaatatgattttcgatccggttttaatttaaaaaaaaatggaagttaaatttcgccagatttcgattaaaaaaattctaaaatttgaaactagttttctcattccaatttccaaaatcctaattttcgattttatcgaaagttttttaacattcagagcttaattaattttagtacttatcacttaaagaattcattacaatgtgatgtactccatccgttcgataatatctgttcttttgaaaaattttcttgttccatattatctgtcacttgtcaattccaacaccgtattaattacatatttttcaattatatatttattaactcttcaaacactctttctgcatttattagtaaacaaacgcattctggtctatcaatatttattcttttaaaatcaatacatatttattcagatttttaagggttctatcaaggtgaaaaacgacacttatgcatttcagcaacgaaattcatatttagaacctacaaaagttatcctaaaatgttataacaaatagtactattgaatgatcaaatattggtttagatatttaactttactattatttatttatttatttacttatttatttatttatttaattaattataggttgagg

SEQ ID NO: 101886 - DNA, 721 bp, Mimulus guttatus
  Intron number 2 from transcript mgv1a002433m (locus mgv1a0 02433m.g) derived from phytozome v7.0 (chr-ID scaffold_233 ; pos 241538 to 242258)
tcaacagtatctctctcggtggccgtggaggatccgtaagttcaatagcttatctctctgttgcttttactttttccttttctgattcgaaccctaaccctagttattactgtgggttgtgatgtttgcgttagaatagcttatttgtgctccttttttaaccccgggtagtcttcaatttatgcttgttttttagggttttgagaggattattttctcgcagatttcaatttgctattgcacgatttaagaatttggttctgtgtttattatgtactgttttagggttaggtgcaggttagggtttctttttggttcaaatgcttcaggcttttaagctaaatgtgaggagtgaaatcgaaggattttaagctgaagaatcagaactgttggtggacttgatatttctgcaaatgtttgtcaaggtttcaaggggcttgtgtctaatgctgaacttctagtttttttttttaattcttttttaaagaaataaattagagaaaggaaagatgattaaaaattacgtgttccgtgttgattcctgatgctgctttacttaggggtttgactcgtgagaattttttatttaggacgccttcatcctggaatgatagattgttgaccctgagggtctcaaagtatttagtcttttgtttatttgaattgttctgtgctgcaacttgtagaatccagggcaacttaaagttcattctggtgggat

SEQ ID NO: 101887 - DNA, 193 bp, Mimulus guttatus
  Intron number 2 from transcript mgv1a016663m (locus mgv1a0 15949m.g) derived from phytozome v7.0 (chr-ID scaffold_70; pos 1234595 to 1234787)
acaagaaactacaacaaatccctgtcatcagtaagtaattattaatcaaatactatatatatattctttattttctttcttctgacaagaaaacgaagattgtgatacgatcgatcgtgttttttcgttttgattaagtaataacgacgcaagaccaggtgtcgataacgataaagggggtgagcctcggagc

SEQ ID NO: 101888 - DNA, 554 bp, Mimulus guttatus
  Intron number 1 from transcript mgv1a000585m (locus mgv1a0 00585m.g) derived from phytozome v7.0 (chr-ID scaffold_54; pos 321984 to 322537)
ctgtgtttcatatccattcaccaaccagtacaaaggttagtgctgatttcatcttttgcttgtgagtctccctacttttgtatgctccattgactgttgtttatgtctctagttttcattgtgtagctgttttttattgttaaaaagttgatcaaacttagacgaagtggggagtggtcgaaaagctcttgaaaactgagggaatcggacactatctttgtttttgctgggaccaacttcctggcctctcctagatggaaaagtaaaaagaaaaaaaaactaaatgtgaatgtgttaaggggtttgagtttagtaattatttttcctggataattggaatgatttatattttatcaacatattgttatctagtagaattgttatcatttgtttcatctcataccatttttttatagatggttcttcactgctaggttcctttctgtactgaacagtttgcgtttatggtccagcactgtaatttttgcattcttaacataatggaattttcatctctaggattctgaaggtgatttgctgccagttgttctgga

SEQ ID NO: 101889 - DNA, 527 bp, Mimulus guttatus
  Intron number 2 from transcript mgv1a009021m (locus mgv1a0 09021m.g) derived from phytozome v7.0 (chr-ID scaffold_215 ; pos 276521 to 277047 reverse strand)
accgtgcgaaaggtaaaatcacacgaattattttggtgcacgtttttctcgttttttagcacttaattgataagttcatagatactgcatgccgttactgaatttaatttgaattcgaagcaaaactgttaaggagaggttcgatttgttacatacatatagaagcagccggcaatcagtttcgatacatattaatatcttggtaattttctttggcatgtttaactaaaactacttgagcctgcaaataattgttgtgatgttactggttccaggttcctgcaatagaatttaagacgctgtttctgtaactcgattattgtccgtttggtttcgaataacctctttcaacctattcgatgagttctgtttgcagtgtatcttttctattgatatcgtatttgaagataagattagaaagtccccacaatactttctgtggtactagaggttctaacgtttgaaggtacttctctggttttcaaaaagcagatattatttttggcgaggaaggttcaatttccgtg

SEQ ID NO: 101890 - DNA, 524 bp, Mimulus guttatus
  Intron number 2 from transcript mgv1a009861m (locus mgv1a0 09861m.g) derived from phytozome v7.0 (chr-ID scaffold_39; pos 847323 to 847846)
tcaaaatcactacacccacaccctttgctgagcaggtaatctctacatctgtcttgccttttcgaataactgaatgctttgagatgcttcaattaaacaaccaccgtttattccgaaaattgagataactatataaccgataaagacacgtgcatgtcgtttactgaaattttctttggagggttttgtctattagctagccttgttttgattttgaatgtggtggtggtgcaacttggagctacagaacaaaaaatcaatttggacaatagtaatcaagatgatgatgatgtgaaaattgtaaggaaactgacaaatactgacaagaacaacaataataatgaaacacgcagatattttcgtctccgaactagtagtatacggtgccaattcagtcaacacgataaccatcactatcaccagaaaataaattaaaaacatgtatagtatatacttggccaatgctatattgtttaaattcttactttttttaatcatgtgtaaaatgacaggatttcttgaat

SEQ ID NO: 101891 - DNA, 877 bp, Mimulus guttatus
  Intron number 2 from transcript mgv1a011962m (locus mgv1a0 11962m.g) derived from phytozome v7.0 (chr-ID scaffold_75; pos 1136681 to 1137557 reverse strand)
actttctctattttgtggaatccccaaactattgtgtaagttctatattttaacccacttataattgtttttatagcttcttaacccccattctgaatttatttccgggtccttttctttttggttttattgcattcaacacccttatctttatgtttattgtatttgctagccaactttacatattattgtttagcaaataatactttcatactcaaaatagtcgttatcccgaaataaaatgtaaatttaccccgaatacaacgtttaagggtttgtgtcctaaatcgagtattctatccgctcgaaataacacatgatttttcttaattattattcattactccatatgttatataagaactttctttttaaaaatatttttgttctatatttatctgtcgttttagattttcaatgtcgcatttaatgcattttttccagttttaactttattaattcaactctaagtatgaactctctcttattatatcattaaatgatcaaggttatttaaatctttttaatgtgttttttttttctaaaatgataattaatacttctgcattgctgaaaaacgacaagaatactaaatggggttttttggcgaacattattttttattttagagttaatggcattttgcccctcgaactttgacatgttttccacattgtccctagactaaaaaaattgtacaatgcccaccaaactctattatttggagcaccgatcacgaaatcggtcatttccgggcaaaacttcaccggacatgcgagtatgccaatcacacgtgatttttcaggggtaaattttattgtttgtatctctctctaaaataggttttcggtggacaacacgccaataagagaattca

SEQ ID NO: 101892 - DNA, 851 bp, Mimulus guttatus
  Intron number 2 from transcript mgv1a016174m (locus mgv1a0 16155m.g) derived from phytozome v7.0 (chr-ID scaffold_16; pos 919396 to 920246)
ggagctctaggacttggccatctacttcaaggaaggttagatgtttgaaattatattatcttttgagaaatttgtatttttattcctctccgcttcggatatagggcaaattacagccaccccgaggtatggccaaattacgaaaaaaatccttcttgcttggataattacaaccacccctcaactacgtatcttcttacgaaaaaacccctcatttagtaggtgaatttgacaccgtaagcgtggacgggtaatacatagttgaggggcggttgtaattacccaaatatgaggggtttttttgtaatttggccttaccttagggggcaccgtaatttgccctttaattgggctttgtttctttgcatattatgagctgtttaaagattgtatctgtgcagacacagacgaacatggtacatcccagaagtccgtttctatttttttttccgtttctttttcatcagaagattattgagacatcattctttgactttgtttgtacccatgaatcaagtgctccaaattgcagcatgtaggaaatatggttgcatcacccttattttctagtttgcattttgtggagtcttgatttttaccaggttgttcgactcgttttcatgggtgacgatcatgtaaattgttttcaatgattgctcctcctcaaccataagctttaactcatgttatttttagttctgttcttaagacgtaataaaatgggattgaattaccgtctacatacgaaaatgtcggaagatattttattttcatggttttttctttattctatcgtaatctgatggaacgaattttttcgaatcttagcaaggatattgcaaaagtgaagg

SEQ ID NO: 101893 - DNA, 598 bp, Mimulus guttatus
  Intron number 3 from transcript mgv1a011069m (locus mgv1a0 11069m.g) derived from phytozome v7.0 (chr-ID scaffold_17; pos 1414265 to 1414862 reverse strand)
cagaagctgaggaaaaacttggctgtatgttccacttaccattcaaattccaacttcaactaaataatgttcagcttgcttagtgaatggctttcctggattttttatatgtagtttttatcaatgttgtaacaagttcaattgaagatcgcaagtctggaaaaaacataagttagaacaggcgttgctattgtcgcactggttgttttcgttatatacttatagaaaaagagtgctattgtgaaattttcaggttcatgcatcaaatttaatctttgtaccatgtctaagttgcaagtcttttgatgtttgttttgccttatttcatctgcagtttttaggttgctgtgatctgcgtttattgaatatagtcgtaaattgcttagccttctcattttacctttactgctattttatgaacccaaatgtgtgtttctgttaagctagaattttgacatttaagcttctgaagtgaagtttttgaagatattgtttagttacacttattcttgctgcaaaagaaatgacgacggttgaattttttttcttgatcatttacacagtaaagtcatcggagtttggtctcgatattgaagac

SEQ ID NO: 101894 - DNA, 282 bp, Mimulus guttatus
  Intron number 1 from transcript mgv1a015604m (locus mgv1a0 15604m.g) derived from phytozome v7.0 (chr-ID scaffold_132 ; pos 496317 to 496598 reverse strand)
tctcttctgccggaagaaattaatcgaaaataaaggtgagcacccgctgtagattttttcttacttgtgtttggtttttgaattgcgattaggtttttttttttaaatagaaaattgcgattagggttgaagataatgaaagacttcgcctttgcattgcattgccgtgttaaataaatttcttaggttttccgttcaattaatttaattaatttcttaggttttccgttcaattaatcggaatatccagaagaagaaaaaaaaaaatcggaaaaaatcgga

SEQ ID NO: 101895 - DNA, 358 bp, Mimulus guttatus
  Intron number 1 from transcript mgv1a011217m (locus mgv1a0 11217m.g) derived from phytozome v7.0 (chr-ID scaffold_327 ; pos 79113 to 79470)
ctggcaccaaggttcgatctcttattacctaccccttttgcgctaatcgaaatttctctcagttgtgcgtattttaggttggattttggggataattggaccctattattgagtacaataacaattagggtttgttaaattggaatttgtttttcttgaaaatgctgaagaagaaaaaattagggttttgttaaattttctttggcaggaaaattgaaaataaatgaaaaaatgtcccttattttgatttttttttcctaggagagagggtttagagaaaattgtatatagttgttaatggagatcttttgttttatgtgcagaaagtttggttggataagagcacgggcaagacttg

SEQ ID NO: 101896 - DNA, 757 bp, Mimulus guttatus
  Intron number 2 from transcript mgv1a011217m (locus mgv1a0 11217m.g) derived from phytozome v7.0 (chr-ID scaffold_327 ; pos 79520 to 80276)
agatattggagccgcattccaaccgaagaatcgaggtgaggatttcagactttcgatttctgttccttcaagaaaatcaagttgaggctgttttggttgtgttcgtgtgcatgttaataaattaggggctcaaaatacaactatttccaaaaaaagttcgaatagcgtttcttgtcattcaaattacggcatgttggcattatttttggccgatatttgcttctgtgagacattattatgaactcttagatatatacataaagggtttattgctgtatgcagaataaaaacttaaaatacctatataagctgctaaattttaagtttacctatttgatttcaatttacattgctaatctgtaaggccttacggccttagtgactgaaattccgcgaccctaaacggccgattcgagcctgaaaaatatgaattcttgaacccgacagcctgttttttaattcttccgtgtacttcatttgatgagaagtcgactaatagtattaataggttggaaggagaagcacacataaaaatgattcgatttaagatctggagaaagccctgccgactatacaaaatatctcttctaaaaccataatgaagttacattcaactttgtgtttagtcacttcctatgtgatctacctttttctacattgatcttcagttttcatttatcttacaaaatgcaaacattattttactaaattcggttctccggtgtaggttcaactccatcgcatatctccagcaaat

SEQ ID NO: 101897 - DNA, 605 bp, Mimulus guttatus
  Intron number 2 from transcript mgv1a012319m (locus mgv1a0 12319m.g) derived from phytozome v7.0 (chr-ID scaffold_98; pos 147495 to 148099)
aactggacgactttgaaccatacccagcattactggtaattatattctacattaaaaaaaaaatgttttaattatgtgaacttattttatgttcgtgattaatttttgttttaattttgttttgcgtggtcgaagtgatactgatttgtttatgtgctttctgtctgtatatcacttgtaatgtggttaggtggcaaagaaaattctccttctaggttgtttcatgtcaattaaacgatcattcaacgggttatttgaaggtgaaacttaaagggaatattaacattttagttacaggagatacttgagggttcttcagtgtaacaaaagtagtttgtttgcgatagataatttaacatcataatgctaattataagaagtgccctttttttttacttataacaccgattgacgttcttgatataaatcgacatgttttcttcacacataggatggtagggttttttaaggaaagagggggaccttggttgaattcgttaatggttcccctgaatcaagaaagcaaaaacttgtatgattattgctttccgattgcagctgtcgttgttgtcagttttgattgtttttttctgttagtgtaggta

SEQ ID NO: 101898 - DNA, 807 bp, Mimulus guttatus
  Intron number 3 from transcript mgv1a003801m (locus mgv1a0 03801m.g) derived from phytozome v7.0 (chr-ID scaffold_351 ; pos 27126 to 27932)
aggtaactgccataaattatgatttcgtttttttcttacaacattctaataggttaccatggtcactagtagttttgccttcgaaataaggtgttaggctaatgctacatttatgagtttaagaaaaaaaaaaaagagagagaggataataacggaaccgatgatacaaatttatgatttctttgcattttattgtatataaaattattgtggagctgggtttgaggttctgtgagaatcgacaatgagattttggtttgacctactgtaataagtgactgaacaagatttgaagaccacttgtattcataaagtcacatataattctccaattttatccacctatatttgtaaagtcatttatataatatttcccgtgaaccttgttggcgtaaagtaagcaatgcttaaaataatttgacttcacttcatcgacggcatgaaatgagattctacgaatcattttgtcatataatgatttttttttccctattttatgtatatgtttgctctgcaatgtagttagaatcccgattaaaatcctaaacccgtttacgattttactaccctataccttcttaaatcctagtagaatcccaatccaagcaaaatccttagagtttgtaagtaaaatctttaaaatctacgatttgaacgattttttcgttgggatccgattttacgataacgatttttcagccccctttcggttctacttaaaatcctcgattttgactaccttgttggtctgttgactacttttgtgaagcaggtgttcaagaggatcactcaaaaccaagaaattga

SEQ ID NO: 101899 - DNA, 578 bp, Mimulus guttatus
  Intron number 1 from transcript mgv1a016152m (locus mgv1a0 16152m.g) derived from phytozome v7.0 (chr-ID scaffold_151 ; pos 542045 to 542622 reverse strand)
tagctccgtacatccgccgtcacctgaatcaggtattttccgattcttcttcttcttctccgattttttactttccagaactttttttttggtacgatgagataagaaaatcgaaggaaatttgaatgtaaatgcatgtaacttcacggaatgggtataaactgaaattgccgttaaattgatcgtcaaaatgagacggaaaatttaggtaggttttcctttgtgagatttcgtttcgattcgattcgattctgatggaacattcgttcttttttcttctgtttttttctgtacgatttttttagcgtttcgattgcatttgaaattttgtgattttgtgatcatattcttcgaatctcgaaagaactggaacactcgccttctatccataatttgctttcttttctttttaattattaatttttttttcggcttctcggaaattgttggattgggaaattttacaacaggtaatttggtaatgattgtgttgttcttctgcgattttttgtataactaatcatcgactaattgggtatacagttttactcgactctgtttttggctacggcaagttc

SEQ ID NO: 101900 - DNA, 760 bp, Mimulus guttatus
  Intron number 1 from transcript mgv1a009444m (locus mgv1a0 06612m.g) derived from phytozome v7.0 (chr-ID scaffold_9; pos 3091046 to 3091805)
gccggacggtacgatttgtacaaaagagattcacttttttttatttttttcttttctttcattttttgttgtttctatgtttggtgtgagatacaaattttaggttaagtaatttagtattcaaagctcgaagctagcatttttttttgatctagaaattgatgagttgggatttttttgtctcgcacttagtttcttattgctgtttctgtttgatcatgccaaaaaaaaaaaaaaaatcatgcaaatagttattgtgtttctggatttgatcttggatgtgagttaatgtttttaagttcgtgcttatcgctatagaattatgtacttattaatgaatttaagaatgtcggtgacaatgaatttgggctaggtattgatgggttgcgcctatttttcttggatggagttattttcgagaacggtgtgtcgattagctgcattgccagtagtaataaatgctgcttttaagtaaatttgttgtatgagcattagcctggtttgtttgcatttgagttgttgacttatatagttgaataatcgaatgttcagttttgacgaatgtcgaaaatgtttccttttttttttttttccttccgcgtaacctctcgttatctattttacaatgtccctcttctcccattatgggaagttgaggattttacaatgtagaacgtttcatttttttttttgcgtaacctcataatttttgttttcccgaacaggttgaagctaaaagagctttatctagagaggagca

SEQ ID NO: 101901 - DNA, 254 bp, Mimulus guttatus
  Intron number 4 from transcript mgv1a021351m (locus mgv1a0 21351m.g) derived from phytozome v7.0 (chr-ID scaffold_24; pos 1426665 to 1426918)
aacgagtatgttcgaattgcaataattcttcttcttcttttttttttaatttaattatttgtagttcttatcaattcttgtgggattttggttttacaattgatagcaattaattaaactgaaaccgatcgaaaccgaaaccgaaactaatcaaactgacacataaaacaaattaatatatatttcgaaaaatatttaattttgttttcaaactgtttttatgctaattaatttgtttattcctaattattagg

SEQ ID NO: 101902 - DNA, 762 bp, Mimulus guttatus
  Intron number 2 from transcript mgv1a004810m (locus mgv1a0 04810m.g) derived from phytozome v7.0 (chr-ID scaffold_44; pos 1253592 to 1254353 reverse strand)
tattatttgtgccctcgttcttggaattttatacggtatatcctctataaaactttgtttctcatattacggcaatgtcgcggataaacggggtaaaatgtgataagtaagctctgggttacataagtttcttagtcttagttgggaagcctcagcttctctaagcccaacttgtcggttcttatgtgatgattaagttatttagcgcatctcaagcagattgttgtcaatgtcatgttattcattttatattcaacttatatgaacagatcatcattcaaatttatgtttgttgctaacatcttcatatctaagttcatttgattacttcaaaatttcattcttatctatccgcgataactgacattgttttcctcgcatcatcatgtatgcaatgtaattgttttcttttctattcatggttgttggatgatactacatctacaatttgctgacagttcctgcaaatttaacatgttaaaagaaaattgattccactgctaaacacggtgtgtacatttctgtgccatggaataaattggtggcatcagattactttttttctacataaatgtgtgccatcagtgtgattaaactttatatatacaagctccgtcgtgtatttttattttgtaaaaaatagaaaggatttttaggaataatatattattgagaaactaagattagtattcacttttgtgtaattttcggattgtctatgccctaggggttgtggggaaggtggacttcactgttaggcac

SEQ ID NO: 101903 - DNA, 987 bp, Mimulus guttatus
  Intron number 1 from transcript mgv1a026939m (locus mgv1a0 26939m.g) derived from phytozome v7.0 (chr-ID scaffold_4; pos 3520050 to 3521036 reverse strand)
agtgttaatcgtaaatctacacaaagtcagacacacacacatgtgtatgtatattcactaaatagttatttaaccccaaatggtttaataatcacatgatgtaaataatcatgtgtaacatctaactccccacgcatgtttccatatatcaaaatgaaccatccatcataatttaaatgcttgttctgattatttactatgtttgaaaaaagtaataaaaataatataaaatcatgaatatatatatatatctccttgtttttatttaatttatcgctctatttatttttctttcaaatattcctttttaccttatttcttaattctgccgacttccaaattgcatttccaatttccaacgattttggttcgattttttttcaaaattattcgtgtgatccaatttttaaaatttcaatttacgatttgtatttataaaaaaatggatcaaaatcaaatgtatatacgataattaaatgtacattatgattttttaaatatcctattgtagcatctaacttccctcaaatcaaaggatgtagagtgaaaaagaaatagagaggctataaaatatccacatgtgaactattggggtggaatccgattaaaacgggtcatccgtttataatttaatctcagatccattggtcataatgaaaattgtttgaccaataattaacacaattgtttaacacttgttgttaattaaaaaacaacagtacttataacttcttaattataaaatagcaataagttggagcttcgagcttataaatagatcacttcctccacaaccaaaaaccacacaagaacaaaagttcattcttttctcaatatatttcacatagactaatctcttttcttccattaattacttcttaatccccaaaaaaaaaaaaaaaagaggggaaaaaaagaaaaaaagaagaaatggaaaaccatgaaaagttaggtaggttttcgagttgcagaggtgtggctttcgaa

SEQ ID NO: 101904 - DNA, 865 bp, Mimulus guttatus
  Intron number 1 from transcript mgv1a004232m (locus mgv1a0 04232m.g) derived from phytozome v7.0 (chr-ID scaffold_18; pos 1884738 to 1885602 reverse strand)
ttaaggtgcgcaattcgctacagttttgctctctgttcttcaattattttttttttccttttcaaattttatgcattaataatgtatatatcattttttttttttgaaattgaatgaaatttggagcaggacttgttcacacttggtttattctggatattttatgttttccttgtacgttaattccttgttgattggttatctgtggcaggatggataagaattgtctaatattttctcaattgtcttcgttagtaagtgagataggtggattgtgtcaaatgtcgaattctaatttgatgcaatcggattggttggtatcgaaatcgataatagggttatttcaacttttagattatttcaagggtgcttaattgcttaatgttaatagctgaaattgaaaaacctacctatcttcatgaaaatgtattgctatatgagagtgatattgtggtgtataacttgttctaagaagaagaagttgaacattccccttttcacttagtttggaatgccatgtaatcaagaaaagttagcaggatgaatggactcaagctcgtgctttagactacttccgttttcagtgaaatacaattcttgtatctttctgttggtttccacactttacggagttacagttctcgagggagatgagttgtcttagttgggattgttaaactacagtttgcttccgcagcagtgttgttcctaatatccatttgtttgatatatatgtaagaattatttgtaatgtgtaatgaagttctaggttaggtggattgtggtaccaaacatgtgaaaaagattctgattctgtaactttttatcaggatcctgtcatccgtcctttgattcagcacgactc

SEQ ID NO: 101905 - DNA, 614 bp, Mimulus guttatus
  Intron number 5 from transcript mgv1a003701m (locus mgv1a0 03701m.g) derived from phytozome v7.0 (chr-ID scaffold_106 ; pos 586405 to 587018 reverse strand)
gagagcgtgtaagttcatgttttcttgctaagatgtttttcaggattgtcatacattatgttactttttgccactgaacttacatcactttgggtatagatacctttccatgtatggtagacatgaaacctctaaattttgatagatgaacaaggaaaaatactacttggatatttctttcctttcccggtcttgtaaataatgactttgaatataaccaaagcaggaaaagatgtttgttttagatttatttgattaatcttagaatgatcttagtgtctttatactactaaaggcatattcattgcaaaaacgatcctctatacaggactttgacagcggttatccatattatcagttaataagaccgtctgattgttgtatcatgttcctttttatttttgagatcttagaaatattccgaaaactaaaaccatagtttgaccctttcttttcatacataacctttcaactcttccaaaatcatcacttgaggttcccacagttgttcaaatacagtcatctaatgcttgctctaacatttgccatccaattcatactcttcctatttggtatcagataaacagcacagaggatagatccgttcttcacgt

SEQ ID NO: 101906 - DNA, 509 bp, Mimulus guttatus
  Intron number 1 from transcript mgv1a003701m (locus mgv1a0 03701m.g) derived from phytozome v7.0 (chr-ID scaffold_106 ; pos 587538 to 588046 reverse strand)
ccacacttagttgaaatctaattaccgatttctaggtattgttcttcgcgtttttcgtttaattttgcatctttttatttgagtatcttctgtaaattatgcgaaacattagttggaaaagtgaaaagatcattgcagattcatcgttagtggtggatgtattgaattgatgatttcgaatcgcctgattttagttgtattagctccatttgaggatcttctgtaaattatgtgaaatattagttggaaaagcaaaaaagattgttgcatatgattccgaatcacctgattatagttttattgtatttggctccactcatattaaatcacgaactttaaattaggatattcgagtgttcgaggaaacgtaaacctgaaagggaagcaattaaagtagtcgtcagttcgtcacgattttttttttttattacacgagctagtttgtgatttttcgtattgaatttaaaaaaatgggatgtgaactgtggatagtattggaatttatgcag

SEQ ID NO: 101907 - DNA, 791 bp, Mimulus guttatus
  Intron number 2 from transcript mgv1a003624m (locus mgv1a0 03624m.g) derived from phytozome v7.0 (chr-ID scaffold_9; pos 3134469 to 3135259 reverse strand)
agcaaaatcgttacaagcccttggtagatattcaggtactttaaaatgtctctcgcttatatacataatagcttatatacataatgtgtgtgtgtgtgtgtgtgtgtgtgtgtaatttagcattttttcgtgggggtggaaactgaaacagaaattctggattttgccgatttagataaaaaaaaattccaattttgaaacgagatttttctttccgcattccgagagttcctatttctgatttttttttttccgatttttatggaattggaatgcatgttaaatttcgattttcgatctgattttaatttccgaaaattctgtctgttttcaaaaaattaaacttataatatcaatattattatgcatttcgtattataggtgaccaaaaaattggaatttcctaattcctctgattgcggaacaaattttttcattccaatttccgaaagttctgattatcatttttttcaatatgttttggagctgaattagaatgcatgttagattctgatttccgatcggatattaatttttaaaaattccatctttttttccaaaagaaaagaaatggaatttcctaattccgtcaattgcggaacaagttttttcattccaatttccgaaagtttcgaaaaatggaatttcctaattccgtcaattgcgcaatttctccgaaagcgctaatttcaatcctatcagtttgattaccacccctactttcactatatatattatatataatatttatcaattttttcgattgtaatttttgcagaagcagctcaatc

SEQ ID NO: 101908 - DNA, 766 bp, Mimulus guttatus
  Intron number 1 from transcript mgv1a010433m (locus mgv1a0 10396m.g) derived from phytozome v7.0 (chr-ID scaffold_220 ; pos 259931 to 260696)
ctaatctcagaccccctacctcatctaataatcaggtatgcacataaaaaaattatggataatgtatattttatatgagtgtgttttcgtaagcttaaattgattagtttcctttttgttttatggtataataaagaagggatttttgtaagtagtagtgaaatgaagttgtataatcgaaattttctagtgtttggtgttattgtatgaggtcgaatgaacgatcattgtcgaattagggtgtaattttctggttctcagttgatttagtggagtggaattgagtgtacattaaaagaaggaaatggaacgatataaaacgatcagaagttactatgattaatgatgttttacatacgtctgaatgtatgtatatacatggtttatagaacaactagatttgtgactgagcatctttatgctggcattattgatgcgattatttaacttaaaagttttgataggtttattaaaaatcatctgaagttgcatctactaggtcgggctctttcgtttgattggtaggggggctagcaagatcgaatcatccctttgcctaattttacgttgcttagtgtttgtatatatagaatagcccatctcttaactttgaattatcagcatacagaagatgtatgatattttcttgaaccttgagttgtatgttttgtgctttcgtgtactttctttcgtcgaaaaggcgttctgacgcttacatcctgtttctccagccgtttgcttttgcaacttttgtggatcaacaatc

SEQ ID NO: 101909 - DNA, 950 bp, Mimulus guttatus; identical to SEQ ID NO: 101609
  Intron number 1 from transcript mgv1a007484m (locus mgv1a0 07484m.g) derived from phytozome v7.0 (chr-ID scaffold_18; pos 642370 to 643319 reverse strand)

SEQ ID NO: 101910 - DNA, 478 bp, Mimulus guttatus
  Intron number 3 from transcript mgv1a025446m (locus mgv1a0 25446m.g) derived from phytozome v7.0 (chr-ID scaffold_5; pos 3136672 to 3137149)
taatcagatttctggccattacctttattcgccaggtatatattattttttatgggaaaagcacagtttgcaccgtcatgtttgcaccgattttgtattttggttcctcgtgcacaaaaatacacatttgattcctcatatttaaaaaaaaataaacacgtttagtcatttccgtcaattttccgttagtactaacggaatcaagtgtgtgccactaaaattgttaagctattgaaacttgattgaccaaatgtgttttttatgaatatgatggaccaaatgtgaaatcggtgcaaacaagagggataaaaattgtaatttccccttatctttatctttctttttgtttcttctttgtttatttttcgtgttaattagtttcttttagtcctatagagtagtttctttaaattgtcaaggactactttttttttatttataatattatttggcaggaataacaagacgtttccaaaca

SEQ ID NO: 101911 - DNA, 746 bp, Mimulus guttatus
  Intron number 1 from transcript mgv1a012988m (locus mgv1a0 12988m.g) derived from phytozome v7.0 (chr-ID scaffold_224 ; pos 120308 to 121053 reverse strand)
ccaccattggcgtcttcactcttgttattcttgctgtaagttttttctttttcccttttttgccccttcttgttctcttttatgcccatttgaccctttattgcactctttatttcgttttacttttgcctgtagattcattgtttgatttatttatttatttgcaatttatgtaccttccccttttcttgaaattcttgaattcttgaaattatttgattcgtttaggtgggccttttttttctttctgaaagaatcactagtggcattgaaaaagtcgttcagaagtatgtggactgatttacgagtagtagttaatcgtatagttatgaatttgattagctgattctcatagatgcaaaacttgtgaatttcgttcgaaatcaaactcgcgctatacgtgtagtagttaatcgtatcgtaaccaaaaaaaaaaaaaatcgatctgcattcgttagttgtcatgatattcgatactaacaaatgcgatagggtaaagtacaatgacgatcacttccgtaaaaagggtcgtaattgttcgacatttggctaaattagcgtaacatcaagcaatttatcgagcgaggtcccattaagatcgtcttgccttagatggatttttcttgggtcgtattttgtttatgatttttttttctttcccgtatttcgtgcaagcaaatattttacgacattagtccatgtaattttcttccccgtctcgtttttttcatgtaataatgacagct

SEQ ID NO: 101912 - DNA, 821 bp, Mimulus guttatus
  Intron number 1 from transcript mgv1a002007m (locus mgv1a0 02007m.g) derived from phytozome v7.0 (chr-ID scaffold_24; pos 975193 to 976013)
ccgtcgccgcctggctgttggctcaaactactcaggtacgctcttttttgtatggattcgatttatatttattaaatcatatttttctatttccttcaaatctgaaatttattaaaaaaaaaaataaaaaaactattttttattctttctattatatgatttttaacagccattgttgggtgaagagaattgagtttaagattttgttttgtgaaatatacatttttaatccctcaagtttgcactaatttcatatttgatccaccatgttcacaaaaaaacgtatttggtcccttatgttttgaaaattaaccacttttagttcttccgttagtttctggttagaactaatgaaatcaagtcactgtcttaattgatgaactaacgataaattgacggaaatgaccacaattgttcaattattgaaatatgcgggaccaatatgaaattggtgcaaattttctcaattttttttgataatacaattttaaaaatatcaaatatgtaatttgtttaaaatatatttaaagatttttttattttttgaaacatctaggatgggtcaatttgctataaagattacgaactatttaaatcaaatatatacgggtgcgctgtgtgtgtttgttctgttgtaagtataagaaaacagtgtgcttttattatactcagtttcgaatgttaaatatttatttaaatgaatacttgtggatcttaataaataaataaaaaaaaataaaaaaaaaataaaaaaaaaagaagaaaaatgtgctaatttgtttgatgagattaaataattaattaattttttataaatatag

SEQ ID NO: 101913 - DNA, 139 bp, Mimulus guttatus
  Intron number 2 from transcript mgv1a017257m (locus mgv1a0 17257m.g) derived from phytozome v7.0 (chr-ID scaffold_14; pos 442219 to 442357 reverse strand)
agcgcctcgtacaatccccaaattctttcttcgtatttatattcttccattttcaatttatttaattatatatgatttatttatttttatttatgttttatgtttgattcgttgtttgtgtcattgttgtattcgcagg

SEQ ID NO: 101914 - DNA, 853 bp, Mimulus guttatus
  Intron number 1 from transcript mgv1a004623m (locus mgv1a0 04623m.g) derived from phytozome v7.0 (chr-ID scaffold_69; pos 556877 to 557729)
ataacatcaaagctgtcatttatgtaagttgtttgttatacacttcaattacaattttgcttgtgaattcgtcaccaaaagggtttatttcattttccacccttatattgtttttttaattgttaaaaaacccctcaagttattttatttgtaaaaagacccctcatgattcaattttttttcacacaaactcctcaatggtgaggtttaacggggttgctaaaaaatattgatattttttttttttgcttataaatttatcaagaaaaaggtttactgcattcgtcgccgtctatgccactgtattttttcatgttattttattggggaatacccccttatgatcaattacttttagcaaaatccccctaaatctcattatttaggggattgtgctgaaaatggggaatattatggtttttaaccctcaaatttgcactaattacacatttggtccctcgtgtttaaaaaaacatatttggtccatcatattttaataattgaacacttttggtcattttcgtcatattactgttactaacaaaaatgactaaaaatgctgaatttttgaaatttgagggaccaaatgtgtttttagtgaagattgggggccaaatgtaaaattggtgcaaatttgagggatcaaaactgtattttcccgaaaagatgcataataagggggttattattaaaataaaatagtatatgtggttgtttagcaatttgatataaaataggagtacgaaatgtaataaactcaaattgtcaagaaattgaaccgaatgaatatcatgttgttttttttctttttggtgtaggatatatttgcagcaggaacagagacatcgtcgac

SEQ ID NO: 101915 - DNA, 974 bp, Mimulus guttatus
  Intron number 1 from transcript mgv1a020082m (locus mgv1a0 20082m.g) derived from phytozome v7.0 (chr-ID scaffold_224 ; pos 305406 to 306379 reverse strand)
acctactaagataccaatattacccctggccctgggtacgtatactatttctttttacttcaatcaattatgcaatatcatttcttgttttttccgtggtttttctaataaacaagaatcaaaatattggtgaaattagagtatgcaattccaggggcgcacccatgtggagaatggggggctcccaccactgcataattttttttttcttattttttttttacctattttctattactttttatttattctagtttggtaattatgtattaatttatagactttgtcccccctccaagatttaaattttgtatacttttagccgataaaaaatatttttttttccttctcttaattcacgttcatattttagccccaccaaaaagcccctaggtccgctcctgtgcaattcgcattccatgtgactgcgatatttgaagaatagatataattgtatgagtatgatagtatggatatattaagagatcattcccgaacatacgttgaaaggttttgaaattttgcgcccccttttggaacgttggtgttagcttcttaacgtgtgtccgcggtggcttattcaatgaatctgattactcttaacatatatagatatttacttgtcaactggaggtgatagacacgattgcctgatggacaatttctcacactaaaatcaaatagactttaatggatttgacttgaatatgatactagttattcaaattttagttttgagaaaattcacctcgtaaaacttatgtaagctaatctcatatacatgaaagcaacaatatttcaagtatataataacttcataaataattttgtatattacatataaattttataattaaaagtgtctatatatgtaccaggtgctgtacttggtgtaattgccttgactatacttggtgtattctgctactttaaaagacgacgatcactaggaaaccctaagcaggtaagggacg

SEQ ID NO: 101916 - DNA, 651 bp, Mimulus guttatus
  Intron number 1 from transcript mgv1a013569m (locus mgv1a0 13569m.g) derived from phytozome v7.0 (chr-ID scaffold_113 ; pos 787915 to 788565 reverse strand)
ttctacttattcgaggcgctatcaatcacgatcaggtttgtttgcctgtaaaccctaatttggttgtcggtaaaaaaggtgtatttttttttattaattttttttccgtggagaaattgcgaacaatttttaatattttccgagaaattaagcggagttgtgattttctgatgaagcttcttccttcgcccaggtaaaatgaaggaatgatagcaattgaagctttcccaatttccatttttttttttttgctttctgtcatgtttttagctgcttcaggttttgaaaatgaaaattgtttgcggattcctccttatctggtttaaaatttcgaagtttggggatttttacatttggtttctgaaaattgggaaatttgagtttgattttgctaatttaaagatgggatttttggttggtggttttcggttaatgtttaggtggaaatgcaccgcagcagtatgatgttcttaattgtgaagtgaataagggaaaattggtcacttttctcattttctgttctagtttttcgaattaggcttcttgttagctgtggatttcgggagaaaaaagttgcacttcattttcttttagacttctttaatcccatgtgaacttattgaaattatgtgtttttggaatatgctacag

SEQ ID NO: 101917 - DNA, 1045 bp, Mimulus guttatus
  Intron number 2 from transcript mgv1a011597m (locus mgv1a0 11597m.g) derived from phytozome v7.0 (chr-ID scaffold_233 ; pos 256546 to 257590)
agttcacactcacaacctgctcaccgactggagttgtaagtatattttgtggtgtttttcacggatctgatttccccccctatccattgttgtttttctggtttatagtttggaaattttatgatttttttattattttttgagctgaatatgcatgtacatcaatcggtttattttacggtattgaggaagcatggaaattgttctaattttcctgtgttatttgtaactgtgttttctctcgattgatttgttggcacatattgtggtatacgataaatctggattttgtaccttctatagttaattttgcatttattgtgttcgaatgtttgattatctgtattatattacattcaattgtggtgctgatatagtgacgagtattttgatcttctgttgcgattgttccgttcgttgagttgctaagtcatcttatcgtttattaagttgcttttcatttagtgtgccttccttttcattgatatatcggctggctcacatttattaaaatggttcttatgtatatgttagttcagtgtcttaatttgtgtagcttctagtgcaatctcaagataaaacctctaatgtgaaataatagatcatgtagcttagatttgatgatgtagctgcatctaatgatatttatgttggatccttgattttggtgagaagagtactaacatgtgtcttggttctaagaatgagatggaaattttccgagaataattaaaattgatgttcatgaataattatttctatttcatctcatttttgtatttgatagaagttcttcaattcatgctcattcccacaaaattagtatattgaaaacaaaaattcgtcggcaactcatgcacaattgaactaggcagtatttttaaccagtacgaaaattcatggttcttgttaccttatgtgagcatgcgtgcctttatatatgtttctcttggattcttgaatttacttgctatatccgtatgtatattaattctctccttttgttgcagacactcacttcaacaggaacaaagaaaggtgacct

SEQ ID NO: 101918 - DNA, 438 bp, Mimulus guttatus
  Intron number 3 from transcript mgv1a002680m (locus mgv1a0 02680m.g) derived from phytozome v7.0 (chr-ID scaffold_60; pos 56394 to 56831 reverse strand)
tcgtgcgaataccacctgcggtatagttgacttttttcttttgctgcaattttttgttgattttgaattattttcttcatcgttgataatgtgtaaaatttgtttgtaattgtagttatgcacaaaatcaaacagcaatcagtcggctgctttttactatgatatggagtactgcgtcgaatattcgacatttcgtaccttggttccaggttagtaataatcggccgcatttacgtaagcccgaatactctgttttgttcagaaattttacgtataatcggcaaatactttggcttggatgaagttttgcttctatttgctaacgtcagctgtcaataatatttcagagacttctacagagagccaatcaatatcgttgaacacgaagcactcggacgaggagccaattactttttcgcccttggacatttttcccaa

SEQ ID NO: 101919 - DNA, 598 bp, Mimulus guttatus
  Intron number 2 from transcript mgv1a016175m (locus mgv1a0 16175m.g) derived from phytozome v7.0 (chr-ID scaffold_165 ; pos 328318 to 328915)
acgggtgggcgtgctcacccaaggtcgcggataaagtaagatttactaattgtaccgtatgcaaacataaacttactcatttttctccctaatttaaatcatgggtaagttacaaccaccccatgaggtatggtcaatttacgaaaaaaaatccttattgtgtcaaattcaacataatcatcaatatttcgtggaatgtgctctagatcgtactcgttttgtgaaaaaatacagtttctaatgcaccacaatctgatatttataagtcaaaaaacacataatgaccatcttgcttcaaaatgtaggattcgaatgggataaaacgggtacaaaagtgataatattccatataatctcgaagattccactaaatttgaaaccgcaagggtggacgtgtaagaagatttatagttgaggggtggttgtaattacccaaataggagggggattttcataatttgaccatacatcagggctggttgtaattttcccatgaataattgcatatgtttcgttcatgtttaatattgtgatctttcgtgttaattattatacttttgcagacgattgcaaaggctattgcggactggtactttga

SEQ ID NO: 101920 - DNA, 345 bp, Mimulus guttatus
  Intron number 1 from transcript mgv1a021988m (locus mgv1a0 21988m.g) derived from phytozome v7.0 (chr-ID scaffold_128 ; pos 707413 to 707757)
aagttgccgaggtagtttcccccgaatgataactaactgcttctatttatatcaattggcggctcatagttttaggctacctacctgtctttggttttttttttcccgaacccctttgaatagttttttatagattgtgaaattttttgtctgtttgatggtactaaaacgacaacttaggcagaagggtgatgaggattgttccgatcctgctaaacgccgtcgttttgtttcagagtacttgatttcttttgctcttcttcttcttttttcttttttttctgtttttaaatttaaatagtaattattaaaactaattttgttcattggatttttgtgcagtat

SEQ ID NO: 101921 - DNA, 956 bp, Mimulus guttatus
  Intron number 1 from transcript mgv1a013372m (locus mgv1a0 13388m.g) derived from phytozome v7.0 (chr-ID scaffold_232 ; pos 204749 to 205704 reverse strand)
ctcgttctcgccttacactcccttcttcaatcaaagtatttcttcagtttccacctattttattccgcattctctctctctctctctctctctctctctctctctctctctgattttgctgaattttaaatgtttcaattagggtttcttttctttttttatctgttatgcgacaatttgaagtatgatgcaattgtttgtaccatgattcctcagaatgtatttcatcagtaatcggattgtcaatttgttttcctctccttttacataaacattgaatttaattcaacaaaatttatctaatagatgattccttgtggaaataataactgaattgggatatcttaatcttaacagagtatgttctgaaaatttctacactcactgaactgaatctatttagaaatatatgtctgaagatcctttttctttgaatattttaactaatttcttgtaataattgcaaagcagtcttgttggtatattggtaatcagctccgctataggttcctctcttgttattcaaattatagacattcacatatttatcgagaagaatcattttaaaatattttcttctggttgatgactataacccacttctgtctgtgcatgtcgtttttataccaattctttcaaattcggatatcgccattgattagaatccatatatagtgtgttatggcatcaaggttaacttcaacataagtttgaaggtattgttctgcactaaatggagattgaagcaacttatgcatctttttttcctcagaatatactcctaatatatatccctcttttccccccctctctctctctctctctctaacaatcacatgttatatacagaacttcatttagaaactgtcacggaagcgtttatttatttatttagtgaattctatgtttcctgacaaataggttaaagagttgagaaaattgattggagggacaag

SEQ ID NO: 101922 - DNA, 744 bp, Mimulus guttatus
  Intron number 3 from transcript mgv1a001347m (locus mgv1a0 01347m.g) derived from phytozome v7.0 (chr-ID scaffold_4; pos 1396072 to 1396815)
gaacgctggtatgttctcttttacccccaacccccaattggaggtttcttcatctatttttccatgatctatagttttattgtttctcagactctaactaatctggagagtagccacttattgtaaattgatatattagtcaacgatggtccatgaaaacatgaatctcaggatagtattgacatggaaatcaagtagagaaatgtgtgtggggggatgggttccatcatctaaacaactcatttcctttttatgaataaattttttgtatctctgtcaaagttcaacccaaatatgtcaatcatgaaattcagttgaattgaatccctttgatcaaaatgtaatgaattcagagcacaatttatgtatccggaggtctttgcagtgttagacagcgaagaattagcatattttgcacttaaaattgctacatcaaatagaaaaaaattgtgatacgctattgactcatagaaacgcaaaggcgcctaaaataatttatcatccgcattttcatattcttaagcgtttggaagtggtttttcatttgaccctacaaatatgttctgatttgtcttttcatatgacagaagtccaatgaaataatttttggctttatgatatgtatagttggactcttggtagtttttaatgatatttctatgttttgttcatattggtgagaagctctccgtacttcaattaagattcttctactattgtaggttggtttattaaatctggaag

SEQ ID NO: 101923 - DNA, 835 bp, Mimulus guttatus
  Intron number 1 from transcript mgv1a011355m (locus mgv1a0 11355m.g) derived from phytozome v7.0 (chr-ID scaffold_139 ; pos 611341 to 612175 reverse strand)
ctacgtttacgtaataatttcattccagccccatttgatttattcaaattgatttttttttaattggggttttggagatttctgtactcgaacagtttggatttcggattaacttgaatttgtttattttttcacttttctttactgatgataagttatttgaatagttattgcagatacagaaattttgatgggcgtttattttgattatgaatttgcattaacatgtttttaattttccaggtgaacttttaagcttatttaaatgtggggtttcaacattttatttggcaaaaaaaaaaagaacactgcgaattatttagaaattctcggtaaattatatcccttagaatcgagaataccattacattgaaactaaaaaagccccaatttcagggaaaaaaataagggtttcgaacaatcgccatctttaaaaataatctagctatcgagtgctagaaaatgttttagtacataaagaatcacaaacttggtttggttgtaactagcttataagctgtccagaagcggtttagaatagtattagaaatgatacggtttgataaaaaataagtttatacatcgtttctatgaaatattgaaatgctgtatatgccacataggcgttcgacgtgttcacattttctgtaataataataataattgaatcgagaagaacaggataatcagccccgtatggattagcctaaatcaagtcaatctttgtttgacgttttttatattttgctttttaggtcagtttgttataaacctaataattcgaataattgatcttacagattcctccacggaaaaccgcagcttcttacaggta

SEQ ID NO: 101924 - DNA, 883 bp, Mimulus guttatus
  Intron number 2 from transcript mgv1a012620m (locus mgv1a0 12620m.g) derived from phytozome v7.0 (chr-ID scaffold_351 ; pos 33062 to 33944)
aatcctgccaacgtaagcctttttttctactttttgaaaactttattagatagataatcttgtcgttccgttatttatggttctgttacccttttatttgattatcggtcttcattgaacatataaacgacaaggaatataaatattcttcttacctaagagtaaaggtaatagctttaacatttgtccctttaatatatccatgcagtcctaatatagacttaatcggatctaatagcgcaactacaactcagatgccagctattaatatcttggtagttgtggacgagtgtccagctacctagactgattatctgtttttcctgtaatctcgttgtacaagtgtatattcctcaatggttgttctctgagcgagtatgaaactcgtattcattattttttgcttcctttttttgccttttcctagtcaaatttttttggttccattttctccaaacacaaatcacttggcatagtctttaatccattacatactctttctattttaaagttatcactcccgagaagaactctgttgagtgatttttgatccatgatggtgtacaccttcaagagctgggtttgaacagatgattctgatatctatttgagttgttgttcttcttcttcaagcttttggtccaagtattttaaagtcataataaagtttcatataaccacgtcttaaagattatcgcttcacgaaccctaatggttctgtacgatattagatgttttgtccttatggcaacttatgttatgttgtaaagatacaaatctatttctggagtataattgtgtgttgtgcctgaagaagtttgtgcttaaacttttacgtgtgtgtgcaggcatttgggtgggcttacataaacaataagcacaa

SEQ ID NO: 101925 - DNA, 592 bp, Mimulus guttatus
  Intron number 1 from transcript mgv1a012383m (locus mgv1a0 12383m.g) derived from phytozome v7.0 (chr-ID scaffold_104 ; pos 468583 to 469174 reverse strand)
gttctctccggcggcaccctaatagatacactcaggtatatatatctacagtcgtttactgtttctctctctctctctcctttttttaaagttattttggggattttttttgaagttgttttattgaatgagtttcgattattttagcgtttgaattcagtatttggaagagaaaaaaatgaatcgtttaagttgaagtgagcgagagcttaatcactgcatttccttcacatacaaaataactattgattatcaaaatctgcagattagcacatgggccgattgtttatatatacatacaggcggattttcttcgtgttgtcgtttaatttgccctttgttgtgttctgaatttcaagcatttcccatgctttaccagaaatgaaaattaattttgctgagttatgtaggatgtgaatttaatcacgacaaaaggcgaccgatcgtacactctatacatatgcattaacaactgtttgatagcgaaacttccttgtgctttgatttaatatccttaatttttttgtgctgtaattgtgacttttacaatgatgtaggaaactagtagagtttccatacaaggattctgtgg

SEQ ID NO: 101926 - DNA, 621 bp, Mimulus guttatus
  Intron number 2 from transcript mgv1a006860m (locus mgv1a0 06860m.g) derived from phytozome v7.0 (chr-ID scaffold_16; pos 2473767 to 2474387 reverse strand)
gcttacaggtttgaaattttgatcattcaacatatatccgcattttaattttttttttaaatatttcgaaaatcgtttctcgtaacgtgtgttttggtcagtcggtcggtcggtcaactccaggacaaatgaggtgctaattgaaccaaacttgtttgacttttgcagaatactgttaaaatgtttcatacattttcttgtttttaatttggacttatggttagctattgtgacgtcgatgcatcgtttggaaaaaaattaaaattaaaaaaaataataagaaacagtcgttgacgtaagagaagagatcatcggtgttgaaatatgctatctctctcaaagaatttacgacaatggatgtttcgggaagaaaatgaagttgtgacgtttgatttttttcagaacggcatttctaattacgagcataattacgtaaagggtatatatactttgatgtgaaattctttcaagaatgccgttggttggtgataacatttcgagtggttattgttttttcctttttcttgctaaatattgaaggccgatttttatcgaaaatataattaaaataattttttttgggcagcataaacggggaaaatatacattacggaacaccaa

SEQ ID NO: 101927 - DNA, 546 bp, Mimulus guttatus
  Intron number 2 from transcript mgv1a021274m (locus mgv1a0 21274m.g) derived from phytozome v7.0 (chr-ID scaffold_247 ; pos 132738 to 133283 reverse strand)
gatactatctactagcaagaagtataaaaaaggaagtcagcactttgaaacacttgcattcatcgtagtatttgattctctttttttatccccttcgcatttttttctaagtggatcaggagatccgatttatcgttgaatcaatttcattttctctgtttacaacatgtatgtatgcaacgttatttaaaaattatcggcttttctcgccatatggatataaaatttatttagaaattcccaaggattgcttgctgataattactaaagagtaatcatccgagtcacactttctttatttgagacaataattattattactttttttttttcagttttttagatcttgcgcgagacgggaataactagataggaacacaatgcatcctcatttgacgatccacaggcatccaatgtgtgctgaagtgagtttcgccacatatatcgactaatatttcacttgaaaggaaatttatttctgtaaattattggtgcatattggtacttatgcaactcttctctgtagattatcgagcagttccagaa

SEQ ID NO: 101928 - DNA, 786 bp, Mimulus guttatus
  Intron number 1 from transcript mgv1a004202m (locus mgv1a0 04202m.g) derived from phytozome v7.0 (chr-ID scaffold_3; pos 4250728 to 4251513)
caccgatttcggcctatccgtattctacaaaccaggtcattttctattttcagtgtttttttgcgatatgtatttcgattagttgcttgtatatgcgtgttagtggtgttttgggtgtttttcggtattttcttgatttttcttgggttgtacaatgtggtcgttatctttatttgttttatatcaatgattgtgatgttactatggaaacagaggcttcatttgttgatgaatgcagtatgttgttttagaaatcggaatttgacgtattatttttatttgcttcggtatggtaggtggcttgattgccctgttattcttcctgccattagtgcttttgaacttttagtgtatgctttttctaccattaattgtgcacctaacgagtttttgttgatattgttgtttctttctttaatatgttggacaaggaacattgttcttgttcattactttattttttttaattttttttcttctgattaatatacttagtatatcttatcagcctctgaaaatgcatagttttgaacctaatttatgtattttaccttatcatgtttagctatttgtgcaaggggaatgttttcttcacatgcccttgcttttgttgtgttttagagcatgtgtttcttattcttaagttgttgtttcacgtttttgcttttaacaagtaagtgaacatgcaagtttatttaatctcgcatagcacacacgtttgtacttgttaatcttttttatttctaatttggaattgcttcgtattttcagacgaaagtttctcgg

SEQ ID NO: 101929 - DNA, 957 bp, Mimulus guttatus
  Intron number 1 from transcript mgv1a024009m (locus mgv1a0 24009m.g) derived from phytozome v7.0 (chr-ID scaffold_3; pos 3059261 to 3060217 reverse strand)
ccagctggcgatcccttcccaaacttgctggtaatatatatatatatatatgtatctgtgtatgtatatgcatgtgtgtgtgaagctgatcatcttttcatggtatgtgtgtgtgtgaaatatttgatcttttcgtcgtttttattaatgtgtgtccccagtggcggatccaggatttttgccaaaggggttcgaaattgtagaataaaaaatttaaatatcactttataaaaaatagtggaccaaaaatttataatttacaaattttaggtgaattgtgtaaatatttaaacacaaaaaaggtgaaaaatgttaagatttataaaaatagtggaccaaaaatttataatttacaaattttaggtgaattgtgtaaatatttaaagacaaaaaaggtgaaaaatgttaagatttcaaaaaaatttataattgtgaagatggggtgtagaaccggggacctattagttaaaacgcatacctttaccacctcaaccaactgcagcttcttttaatttatgtataaccgtactatttattcacaatcaagggtgtgcaactgcacaccctagaccatagctagatccgccactgtgtgtccctccgtatcaaatgaataaaaaaaattattcgatattatctgtcacttaactatttgcatattcaaatatatattagcttttttttcttctatttgctcggcattattagtcatacgacatttcaaagattaattcttacgggccaaaaaaaaatcctccgggagtaattaatggtactcggacgacattttcgtcgtattatgtgagttttcttaatgcatgtaatgaaaccagaaacgatacttattttgaaacggaatgggtaattaaattacatatatgattaatatacttagttaaaaactaacatttttgcatcgtttttttcgccatttaatttgattaaaggtttaaaccg

SEQ ID NO: 101930 - DNA, 888 bp, Mimulus guttatus
  Intron number 3 from transcript mgv1a008683m (locus mgv1a0 08683m.g) derived from phytozome v7.0 (chr-ID scaffold_151 ; pos 98174 to 99061)
gttgcagaggtaatttaaggagtttactcactactgtatttagctgtatccctgtgatacatcgaattgctaaaaaatattattgtgttatatatattagtgaaaaaaaaacaaaaaattcaggaggtagtttgctaataaaattgaatcatatggtaggatattttgttaatatttataattcaaagagtttttttaataattagagtaaatacagggtgttgaatgcaattaacccataatttaattaggggtaaattacagccacaccctgatgtaaggtcaaattacgaaaaaacctctcttgtttggataattaaaaccaccccttaactatgactcttcgtacatgtctaccattgcagtgtcaaaattagtggatcttcaagattatgtagaatattttccaatttgtatccgatccgttttatcacattccagctccacatttagaaacaagatgatcatatggtgcgtatattcgctcgtaaatatcagattattgtggtgcacctgaaactgcatttttgcacaaaacaagtgcaaactagaaaaattcacggaatcgagaagattatgttgaatttgacaccataagggttcacgtgtaagaaaattcatagttgaggggtggttgtaattacccaaacatgaggggttttttcataatttgaccttacattaggggtggccgtaatttaccctttaattagttgctccctttaatttattatattgagtgcgataaatgataaatttgaaaaaattcaattaatgcttcattggaattataaagtgtcaaataatatgagacgacaaaaataaacatttcaaaataaacttttaaatataggggcttttgaaggaggaggatttgcactcgtttaa

SEQ ID NO: 101931 - DNA, 724 bp, Mimulus guttatus
  Intron number 1 from transcript mgv1a022718m (locus mgv1a0 22718m.g) derived from phytozome v7.0 (chr-ID scaffold_118 ; pos 95239 to 95962)
gatattactaatattccggtaatttttcccttttcttcatattcagtaccctaggccatgtggtttttaaggcttatacacaaattcactagtttctaacccttgcaattgcaccgaatgatttacttcataataatcaaattaattgtaaaaattgtcagttgattgtaattaggaaatcgccgatatgtataataaaaagtgggctggtgtatttgttcaattatggaaactgagattatggttttatgatgtgggaattcaattttgggtcagagaatgacagatttgaaggagcaagaaaatatggttattaggatatcagtgccgttttttggatttagttcatctccaaagtgcctgtttcaaatgattaatcaaatcatttttagtcaattagcctgtaatttcccgcactctactcttttggcatggttatgtcaattactaaaatcaagaacgggaatacattatgaagaaattgccaccttgttcatcaaccactaaagaatagattctgaagaaattgccaccttgttcatcaaccactaaattagttctgctatcacttgttttattaatttcatgaattatttgctagtcgttaacaattactcttagcatcatgaactcatttcttatcctattttttggaactcttttctctatctatttcctttttctaatgatttgtaattgattcagtttccaagtgggatctttg

SEQ ID NO: 101932 - DNA, 432 bp, Mimulus guttatus
  Intron number 1 from transcript mgv1a021780m (locus mgv1a0 21780m.g) derived from phytozome v7.0 (chr-ID scaffold_8; pos 2406299 to 2406730 reverse strand)
tgtgctgaagcctggttcaatattaagggtaacaagtaagtcaacccaaaaaaagtcaaactttttgtttcattttttagtgtaatttgtgggattatagatgttaattattgaggtaaataaataaaaaataaagatgaaagcaataggaatcatttggcagccgactaaattttgttttctattgtgagcatctatttatccattccattttattaaaatatatttatctttatccataaaaaatattatattatttattcttccattttaaaatgtttatctttattaacatcacataatttcaagttaacgtaatatgaaaaaatgtctattgtgagttacatatttttatatatgtcctaattaatttgatgtatatattaatatatatgctatgatgatttggattttggatagaacctgtgagat

SEQ ID NO: 101933 - DNA, 842 bp, Mimulus guttatus
  Intron number 1 from transcript mgv1a007616m (locus mgv1a0 07616m.g) derived from phytozome v7.0 (chr-ID scaffold_216 ; pos 339465 to 340306 reverse strand)
gacccggaacgaagttgaataagctcaaactcaaggttggaggtgtgacgcatacaattcacagaagatccagttccgatggttcttcgatagctgccccagataccgcttgtcctcctcgtatgctgagttttcaggtatctatttccgctcgaatgattattcaagtgattatggctttcaaagctagtggtttaggcttttttctttattctaattttttttttctaaatcgaaaaatttaaacccatggcgactcattctaaataccagacaattggactactagttgccaagtgagagagagttgacaggtttcgtattatggttaaacaagttgtagttcttaccctgtttttgtcgtctatagcattggacttcattttttaagacaaatttgcagcttcctatctgctttagaaacgcctctgataattgaccgattattcaggcagttatattttctgtcttttagcaggataatcctaatcttcgtttgacgggcaagaaagggggcctcagtggtgtgccatggagagacttttccaaaactggttttagtctccggaaagtggattctttcggggtggatatacctgaagaatctgtaaagcaagctgtgaaacatatcgggcggtcatctaaaagcaaatctgtgatgaagaaatattcgtctgatgacgtatacggtgaggaagatgatgacgacgatgatgacgagattcgatacctacaaaagctcagaacttccaaaattgcatcggacgataatatagactatgacgatgaaagcagaggcaagaaattgcgaaagttatctcgggtattgaatagaaatagtg

SEQ ID NO: 101934 - DNA, 864 bp, Mimulus guttatus
  Intron number 1 from transcript mgv1a012897m (locus mgv1a0 12897m.g) derived from phytozome v7.0 (chr-ID scaffold_107 ; pos 778147 to 779010)
ctggcaaaattgccttctttcagtaagattttattttagaacgctcaattttttgtttgtgtgtttagtttagttatccctcgtttggtaatcttgatgggattgataacatagcctcgtttatccatgatttattttcaccacaaaaaatatataaaatacccctcgaatttctaatgcaccacccttatttatattcgcttaatcctcatgtgttctaagttatttctatttttttttcaaaaaattatttattacaagatttaaacttccatattagatgagctgcaacctgcagcaaattatgtaaaaaaaaaaaattgtttgaggaaacgaaattatattaagcaaaactggagcttccatacaagcactcttaatttatttttcaaagaacgtgaattcctgtttttttgacctttggagatgtttttctctgacggaggtattgttcacttaatgccgaagtatttttataaatattttaattagtttagtggtggaaggtttatgaaattgtacataatatatgttgtaagaagaagaaagtggcaaaatagaaaatatatttaatttggtggtgaattaagatattatgagggtggaaatagcacatccataatttaatatggacttaccttacatttggggtttgtgagtaatgtgatatctttgatagttttgtgcaataatagcagctatttgagaaatcttgattatattgtttatcaaccttaatcataactcccaaacaaggccttagtggttggttaatgagcccttgattttcaagtgctaattgtgatattaaatcatcattatattacaggctatttgactacatccagggcaaaaacgacaaca

SEQ ID NO: 101935 - DNA, 489 bp, Mimulus guttatus
  Intron number 1 from transcript mgv1a016615m (locus mgv1a0 16615m.g) derived from phytozome v7.0 (chr-ID scaffold_1; pos 324658 to 325146 reverse strand)
gaagtgggttcaaattaattgtcctgtatttcaaggtgaagtgttgggaattttctattggctcttttctttttccaattttttgtgttttttaatttatttataattttgttgttttcatatgcattttcctgcaattaattaggtgctgattggatagtgttaatagaattagaaacaagttttgacctttgattggttgtaataaaaatttgatcttgattatgatatgatatagaattagtgtttcatcttcaaactgtcttcatttttccattttccagataatttgaagaagaaaaaatatagaaatatgtatctatatattgtatctatatgagtggcaaagacgtaattatgaaaagaaaagaagggatgattagtgctaacagtcacttcaattatttgtaattttcttgatcaagatttgatttttttttttgcagaggttttaataactttctatgtgggaagaccgaaaaaggggcg

SEQ ID NO: 101936 - DNA, 319 bp, Mimulus guttatus
  Intron number 1 from transcript mgv1a000435m (locus mgv1a0 00435m.g) derived from phytozome v7.0 (chr-ID scaffold_109 ; pos 16185 to 16503)
atatccttgacaccattgttgaaactctttccaaggttacaattcttctcggattaagctctaggcacattttttttcttctttcgaatcgatttctaaaggttgtgattaggtcaagtgatgtatacaattttgttgttttctcttactgaattatgcctaaatgcctaaattcaggttctctctgtttttacctttgatctagaaggatctcggttaatacttaagtgactgtgaaatttgagggtttgagtttgatagagttagatttaattggttggagttatatatatgtataggataatcgacggaagtttat

SEQ ID NO: 101937 - DNA, 556 bp, Mimulus guttatus
  Intron number 2 from transcript mgv1a000435m (locus mgv1a0 00435m.g) derived from phytozome v7.0 (chr-ID scaffold_109 ; pos 16632 to 17187)
aggtaatgtaatgttaattcctgttcagtgtagaaagatctttgtgcttttatacgaataattcgcggatctctatccgcgattacgtctgtatattaaatgtcacgtaattacgtttggcctatatctgtttatgcattttcggaatttcaattttcattgttacacaccctatcattaatctgcacgattccctctaaaaaatcacttgcatttcgagcaccacttattcgcctaaaactctttttcaacttctgatttcagcaccacttttcaaatactaccaactactgattctctcctgattttcacttctattagaataaagtacttctctaaaagcttaagctcttgcaagcactcccttattcccatggaatacatttatgaatgtttcagagactgtttaagttacgcgtatagaaaaaatgtcttctctcatctgtataacggttaatgttttgattcacccatgtagattggtccaatcttacttattattttgttttctctttctacaggctaattcgcattattttgccatcattgaacaggt

SEQ ID NO: 101938 - DNA, 672 bp, Mimulus guttatus
  Intron number 3 from transcript mgv1a002281m (locus mgv1a0 02281m.g) derived from phytozome v7.0 (chr-ID scaffold_17; pos 1410142 to 1410813 reverse strand)
gagaagtatgtcataattgcttattcgtcatgtactgatggttgagccagatccttcaaaatgtgttataattcaatttactgtcatggcttaattcttgtgattgaaggtttattacagctatttgattataaaatgtgaatccatgcttgctgtacattttttattgcatgtccttgttatttcttcacacttctttattttgttttgcctcatatcatgaatattcactttatagcaagtgcttcaaacatgtggcactacatatatagtagggatcttgctttatttcattgtctatggccctgaaacctcttgcatgtgtgtcttactgatcaatggctgcttgcctatttttccttccttaatgcaagtatgttccttggggcaaaaagaagcgacttagtttttttttcttctttttttgtcagtttgctggtggagcaaatctgtcagcataacatgcacatttatgttctagcgatgcattaaaaatttggatgttaagaattaatattcaatcctgataatgaaatattttaaggcactgataacttcagccagcttttgttgaactttgtgaactatgagatttgttgatatgggacgagagttactttcctgtaatgatttcatttaatgtcaataaatatgcccaaccacaggtacttg

SEQ ID NO: 101939 - DNA, 599 bp, Mimulus guttatus
  Intron number 1 from transcript mgv1a002281m (locus mgv1a0 02281m.g) derived from phytozome v7.0 (chr-ID scaffold_17; pos 1411222 to 1411820 reverse strand)
tcacgagtcacaactcgggaaactgaaccgttccggttagctctttcttatgccatgcatttgctttttttttttggttggaattaatatttgctgtaatgtttctgcatttcttttctgccgtttatgatcgacaatgttctgaacttttgttcgatcgattgatacaacttttgttgccttttattatttttttgttaggtttttacgcttgttctaatttgtagatgtgaagtgtttcgcgtaaattatagagtatgggagacgcgtgaatactgccttgttctgaacattaattaatggaagtggttttgttggaatcagattgacataattcatcaattactttcccctttggtgtgcatgctactgaaaattagtgaagtatttacatccgatttaattcgtgccaaatctcttgtcatctttttcaaacaaagttgatcgacgcaattcaataaggattatggcaaccaaatttttttttcttgagggttatttattatccttttattgacgaagtggatgtgaaatgtgactgggcgtattatacttgaaaggggaatatttttttttattttgattatgtttgtcaggtt

SEQ ID NO: 101940 - DNA, 265 bp, Mimulus guttatus
  Intron number 5 from transcript mgv1a011369m (locus mgv1a0 09145m.g) derived from phytozome v7.0 (chr-ID scaffold_89; pos 114784 to 115048)
ctattcttgcagtcgaactctgtcgagaacatctggtttgtccactaacacaacaatcttgcctctttttctatcataaaattacttcttggatagtgaatagtcctttaaataagggtttgatctgaggtttcttgaaaattaattctctaaattacgttttggctttattttcggtaaaagatgatctgtacttttcaaatatcttcgtaacataaatcctgctgcagggagttcatccttgtgataagaggagaagcattag

SEQ ID NO: 101941 - DNA, 391 bp, Mimulus guttatus
  Intron number 1 from transcript mgv1a018914m (locus mgv1a0 18914m.g) derived from phytozome v7.0 (chr-ID scaffold_108 ; pos 811247 to 811637)
ggtcgggtccgggccgggtccgggtcagacccgacccgtggccatgtctagtcccaactgtattaatttatagaggtttaactgtacttacataaaaatatataaaaataatttatataataaataaaaacttatatatatttacaaataaacccctatacttttgaaaaatgccgtttctccgaacaacaaaagtcatttgaactttgcgtccatcttcccaaaaccaaaccccattgtttcgcccctgcaagaaaatggcttcaaatttcaacccgaacccaaacccaaacccaaacccttctctcattctcccaatcccacaacacacgaaaccccaaaccaacttccctcagaagccaccacctctccccgccgacccagatccgaa

SEQ ID NO: 101942 - DNA, 1029 bp, Mimulus guttatus
  Intron number 1 from transcript mgv1a012325m (locus mgv1a0 12325m.g) derived from phytozome v7.0 (chr-ID scaffold_60; pos 886477 to 887505 reverse strand)
gaagcccgttcacaaagtcctcggcggtggccaacgtatgttttaaaattaattggaaatatgaaacaaaattcctatattttatctatatgagttacagcttttccttttctgcttttgttctggttatattatggtgaggaaatcgttcgatttggagatctaatttttcgattgtcaagttttagggtttctaattttgcaatttacgaatgtttcactttcttaatttgttgattttttttatttttttgggtgggatttggggtttggtagaggcgatgggttgtttcttgaccaatttggtatgtgatttgtgcttgaaaattctaagttgccttctgtgattattgcgttttgtgatcagatcgagaatgttataatttctattccataattggggtttttcttcggggggtttcttcggttttctttttgtttattgctttttttagtcgtacatgtgaatttgttacttggctaatgtcatcgtttacagccgaataactcgtttatttaactggtaaaggtagagcaatctatctgtttatttgtatgcaaaatgatgattgagcatgtgtcatttcgataattggttcagtaaagtaaactctaatgttccactttcgtcccaaagctattaacatgaaaacttctcgattgatgtcgataattacctattacacataccattttgatataacttttggggagtttagacttctatgatgatgcattttaatctacgaggattgtttttgcaagcaacatacatatatatatatatatatatatatatatatatatatatatatatatgtgtgtgtgtgtgtgtgtgcgtgtgcgtgtgcgtgtgcgtgtgcgtgtgcgtgtgcgtgtgcgtgtgcgtgtgcgtgtgcgtgtgcgtgtgcgtgtgcgtgtgcgtgtgcgtgtgcgtgtgcgcgtgcgtgtgcgtgtgcgtgtgcgtgtgcgtgtgcgtgtgcgtaataactttgtgtattctgtacgtatagctgccgatttgctctt

SEQ ID NO: 101943 - DNA, 602 bp, Mimulus guttatus
  Intron number 2 from transcript mgv1a011474m (locus mgv1a0 11474m.g) derived from phytozome v7.0 (chr-ID scaffold_64; pos 59143 to 59744)
tcaaagatctaccaagccttccactcccaagcgtatttctttctttcttatttgattttatgcacccacatgcatcttcaaatctgtgaaatcatctgctattattgtttgtttgtttgtttgttggggttattacaaggaattaattagtggtagtccacttgacataaatttttaaagtaattaggacagagaaacacaagtggtatagctggcaatattatcatctctgtttttataaaaaaaaggatgacagctcatcatgtaatttcttgggtgtaaagagagatgcagcagcacactttagcttttgtgctgtgctgtgctgtgtggattttctttactagtagtagtagtcgaactgagctgtcacctgtccattgagaagaatccaataaaggtgggaattggaaaaccattattcggtcggtctacttgtctcatcatcatcatcatcacctttaattattactccacgtatatatccatacatatatatttgaggacatgcatattaatattaattaataaatatgaattggaataatggtgatgatccatcagtaggaggaggagggaggcacataagggtgattggaggt

SEQ ID NO: 101944 - DNA, 1057 bp, Mimulus guttatus
  Intron number 1 from transcript mgv1a001574m (locus mgv1a0 01574m.g) derived from phytozome v7.0 (chr-ID scaffold_82; pos 728385 to 729441 reverse strand)
tcatcgtcggtcttatcgagaaccgcgcaaaagaggtctcccctctctctctccctctctctctctctctctctctctctctctctctctctctctctctctctctctctctctctctctctctctctctaaacacgcacatcgacacacacacacacacacacacaattacgttgattatatatggaggaacttctgtattgcgtgggtgctaggttagattatatgtgattatatgaaattattggatttttttttttaactgagcttctaattgtgcttatctctacatgtgtatgattcgtgcaattgcgtatttgaactgattgtaattgatctgctgttcaatgttcagttacatagatcatacgtgaaggaactcctagtattgggcaaaaaaacacaaatggaattgattttcctgggcaatgggaaattccttagtaatatttttgaattaactgtttattgagcgtaagactgtatctctatgattattgggcagttcatgaaaaactgatttcatttaatgcatatgttatttctgaggttcgtatgtgaattattgggccggaatttgttaaaacgttggaattgcatattattcgtggagaaacttcaaatttccgtctagaagtggcaagcataaaatccctatgagttttacatggatatgtatgttatattaactaagttggagaagttggaaacggagacttgaaattgatgactctagagtggatacacaatgtgttgtctgttcttacattcgagagtcgactccgtcaattgcaccggaatttgttagttgtattgaagttatcctagctaaagttccttgatatatgttaacatcttcaggaaagaccgttcaatctagagactttaagtacttccacactattttatgaagttaattgataaccgaggaatgaaaatgttttctagtgatgttaaattttgtcagtaagttatctaccacttattgcggttggtaaactatcatactacctaacttgcaggttggagttgctgcgttcgacttgagatcagcttc

SEQ ID NO: 101945 - DNA, 836 bp, Mimulus guttatus
  Intron number 1 from transcript mgv1a010608m (locus mgv1a0 10608m.g) derived from phytozome v7.0 (chr-ID scaffold_48; pos 343974 to 344809)
aaaggacaaaattggaataataaacacgtgagggggtctcacaattcctaatgttaattttagatttctttacaaatgataaatattaaaatgggcctaaactctattattttgtgtattgagggggttatccctcattttcccaatattatattgcaaagaaaagttagagtaattgaatgagtcagttccaattagtggtttgggccagctgcccaaaaaaaaaatatatgggccacagaatcgtaattaaaagtaggcaaattacggccaccagaggtaaagttaaattacgaaaataccccttatgtttgagtaattacagttatccctcaacatcttacaaaaaagatcgttccgataggtaaaattaggggtcttcattcggttgaatcgtaccgaaattttgccaaaattttatactgtttatcaaagcgaaatatgcggcatggttatgtaaataaccaaactatcgaacttttattaaaaatatttagaaatttgttttcttttttaaattaattttagttaaatactaatattacatatagaaatatttattcgataataaaaacactgaatatgggttcgttaatcggcatgtaccgaattttctttcggtcggtttactgacgattgaacacaccccaggtaacattgacatcgcaagaatgaatgtgtaaaaaaatacatagttgaaggatgtagttgtaattacacaaatattagggagttttttgtaatttaatttagttgagggcggtggttattacattaaataaatcgaaaattaagagtcagacacacaaatttaagtcccatcgagtcaaaattga

SEQ ID NO: 101946 - DNA, 587 bp, Mimulus guttatus
  Intron number 4 from transcript mgv1a016153m (locus mgv1a0 16153m.g) derived from phytozome v7.0 (chr-ID scaffold_6; pos 1543943 to 1544529 reverse strand)
ggagctctaggacttggccatctacttcaaggaaggttagatgtttgaaaatttattatctttcgagaaagttgtgttttattctctccgcttcggatatattatctctgaggcatatttaattttaagctgcgtaaagattgtatctgtgtagaaacaaacggacatgatctatccaagaagtcatttttttttccggaagattatttggacatcattctttggctttgtttatgcccatgaattgagttctccaaatcatcattctttgactttgtttatgcccatgaatcgagtgctccaaattgcagtatgtaggaattgccgttgcattgcatcataattgtttttacggttgcatgttttggattttttttgagttttacaaggatttgttcaactctttggatcatgtattcaatgattgctcctttgattttagttccgttttgatggcataggaaaacgggattaaataatttatctggtattttactattttattctcacgtgcctttgatttttttctatttaatctgatggagtgaaatatcgaaaatttagcaaggatattgcaaaagtgaagg

SEQ ID NO: 101947 - DNA, 827 bp, Mimulus guttatus
  Intron number 3 from transcript mgv1a016153m (locus mgv1a0 16153m.g) derived from phytozome v7.0 (chr-ID scaffold_6; pos 1544711 to 1545537 reverse strand)
catcaaatcgtcgtccggctaaaacaagaactactgtaagcaaattaaatttccaatcgaaataaataggtttggtttgaaaatcgagatttatatttttacctttggaaattgaaaattgttcatgatttttgatttatttgtgtttaaatcgaattccaaaacctaaaacatagaaaatggtggaaatccgtaaaaaaaaaaacagagcaattgtgtgaagaagacgatagatgcagattttcatatcaaatccggtgcaaattttcgaactcatattcgtttcagattctcaacgaaaaattcgatcatcgatttacgcagaaacattcggcacatattttcacacagtttcggtacagattttgcttgaatgccatggcagttggattgaaactattgccctaatttgatttacatcacctgtatttttctttatttatttttctttgtctctgttgtacagaaaaatgtaatttaatcttaggcattatatacatagtcgagcggacggattaattatcaactttataagaatttagcaactccacatttgtaatgaaagtaccaaaccttggtttttattcctatcgtaaatagttattttggtttctatgtgtccagttaagctaaaacgtctgccccgtttattgatgagagaatttgttaactagtaatttgtttatttagcttgattatccgacaaaaggtttgaaccgaaatcatgttatatagcttgcgaatttgatctcgtattagtgtaagaaatatacaccgttcacttctaaatagaaatattgttggactttgtgatgtaggtagtttct

SEQ ID NO: 101948 - DNA, 804 bp, Mimulus guttatus
  Intron number 1 from transcript mgv1a011162m (locus mgv1a0 11162m.g) derived from phytozome v7.0 (chr-ID scaffold_15; pos 76469 to 77272)
tagcttctccactcgccccaactctcggattgcaggtcagaaaccctttcatttttcttgcaatttcattatctcatatgtaattttttttttccgagcaattatacatgctgaaatcggtggattgtgtgtgaaattgtgtgaattttaagaattataactatggagttatgaatatctgcattcagcttctgtattgtatttttcttcagttcatccaatttcatgagtctggttaggtaatccaatgcacaattacttgtgtgttgtaatctccacattttattgcttaatttttggtgtaaagggtgtttaatcagcaaaatactcattttgcagaaattccacgaatttcgtgttatcggaaagtatttagctgttgataatcacgatcatcatcatccacttattagctttattttcaggtgacttatgaaaaataaaaaatggtagtacttcttacaagatcgaatcgagtttgttacgtgtccgtttaacttcatttttttccttaagtgagttcatgctgtaaatttcgattgttttttaagatatgtttatttcggctaatgggaatcactcgttttgtgtatccatcatttggaattaagaagttttgaattttactcgtgctgctgtttcttcaatcttcattcagtttatgttgacaaatatgaattagcttttgtgttagtataagtaacagaatatatatgtatatatatatatatcatcacggcttcaactgattcatcgatttatttcttcttcaccttcttttgcatgtttgttcttgatttaagg

SEQ ID NO: 101949 - DNA, 680 bp, Mimulus guttatus
  Intron number 1 from transcript mgv1a003009m (locus mgv1a0 03009m.g) derived from phytozome v7.0 (chr-ID scaffold_2; pos 1087017 to 1087696 reverse strand)
gtgaagaaattgggctgcacaaaagttgaagaaaggtactattttgtctgttttttcttgatcactatgtactattgtttgctgtctgttccttatcgatgtaatcaatcgtactttaatttgtactagattttctcaaatctatctgtaatcttatttcaaactgagttctctgttggtttgactttgaattgggtttttttcttatgaaccaaagaagacttttttatcagtttttactcaaaccaaacccattaggttttgtttcttgatttcaatttaatttttttttaaatgttttataaaaatctgaattttgtcagattgctttggcttccccttttggtcagttgtgattggtcagggacaaattggatctgcaagtcatcaccttttttgcttttccttaattatttgtttgtttattttgcaagcattcatagattttctatttttctgaaaggggattccaaaaatctaatttgactttgtgtttgatctctgtgttcttgaatatggattctttcattgactttacattgctaaaatctgacttccaattgtttgataaatgtattatatattggattttcagttcgatttgtaatagcttatcggcgattaattggtacgataccaatcatcttttttcgataaatttatattcagtttcggaaaaa

SEQ ID NO: 101950 - DNA, 915 bp, Mimulus guttatus
  Intron number 1 from transcript mgv1a021785m (locus mgv1a0 21785m.g) derived from phytozome v7.0 (chr-ID scaffold_101 ; pos 641230 to 642144)
ctatgtgttcgggttttccatccaaacgggatcgtacgcctaccgccaccgctaccgccaccgccaccgccaccgccactgtataatgggattgtacgcctaccgccaccgccaccgccactgtattcaaattagcttcttatatatgtaatatgttatgggtattaatctttatgaaatttgtttcttgacgaaagaaattattcagctgcttgtattcaaattttcggtgttttgtagttgtagacttgtagttaggcaagaaaactaatattagggtaacaaacttgggacttaaaataattagtttcactaatcaaagtaaagttcgaatccatatttcctaaaataatattgtctcgattattcatatattttggatcttctaaaataatatctcaggatggccaaagtgatcaagacacaaagctattgacattattcaaattgtataataataaataaaaaataaaagaatatttgtggatggacacataacctaataaaatatattaagaatctatataattcaaagaatgtaagtaaacaaaaaacagggacggaaagtgtaattttctcattttttaaacaatgcagtactaaaaaaccaaacatgcaatgagattttggtatttgtcatagaacccctaagaatgtaaaatatacaattagattcttacattctttgaattatatagattcttaatatgcctcacatgacttctccaaatcagggtcttacaaattttccctagaatcaataaccatcttctcaattcttctgatacgacgaagtattgttctactcattttcaatttatcattcgatttactcttcctctctcactctctctccctatatacacatgatttgttggagggaggaatcaaaattccaactcttgcaaaaaataa

SEQ ID NO: 101951 - DNA, 879 bp, Mimulus guttatus
  Intron number 1 from transcript mgv1a015384m (locus mgv1a0 15384m.g) derived from phytozome v7.0 (chr-ID scaffold_12; pos 2493549 to 2494427 reverse strand)
cgctctttctttctcctccggcgcttcattcgcaggtgtttaactcttcaatttctcataatttgtttctttcaatttttgagtggttaatttgatcctttaatttaactgaattggggatgtttatttgtggattttctgttcaaatttagcaatgtatgaagaattatttgcttcgttgtaattattttcaatttacagctccaatgaattgtacttctctcaattttgccagtactactcttaatcagctttgagaaatagaattaatagtgaaacaattaatcaaaagaatattttaaggtttttttttttttttttttttttcccgtaaaattcatctataaggaaacgactaaactaccctaaaaaaataaagcaaaaaaccctacacccaaaaatatatatacacaaaagccaatttcttaggtttatattttttaaggtttatttttattttatatttctaagtttccgtaatacacgtgcactagctcgaaacggacaaataatttggaataatggtcgtatagttttttcgtttcaattcaaagttgcggttctttgccttgttagtgtttcttggacttcattttaacggcgtatagtgtttaaatttctcatatttgacggtgtcgtgaaatatttgttcgatccttttagttataaaatgaaggtaaatcgggaagaattaggactatgttgcattcttggttttttcgtaatatgttgattttcgattcaatttttcaacttccattcgttgttttctcgtttttgcattttctcggtgattctttgacttcatcatcttgattttaaatgtttcttatatacgttgcaggatcatcgttgggcttggatttgacagctagcatt

SEQ ID NO: 101952 - DNA, 612 bp, Mimulus guttatus
  Intron number 1 from transcript mgv1a000614m (locus mgv1a0 00614m.g) derived from phytozome v7.0 (chr-ID scaffold_2; pos 4503166 to 4503777 reverse strand)
ccgaccgtgacatcgatcaggtatattttacatttgttttctctctctagaattcatgcacccacaaattgaatcaatcgtttttttttttttttggtttttaacttggtaaaaaaaaaaaaactaatctaggtttttcaagaaatgttcaaatgtaacagggcccttgatgtgaaatgtggatgttaaatcttgattcggagctctttgccgattttgattacttaatagctcgtaatttaacgggcaatgctagttcgatatatagcacgtctgccctaattactaaatcgataatttttttatgttcactgcttgtagttggttccatataatgatgatgcgctcgtttctttggctttcgtgtgttttcaagaagggtatgtgatgtttaaatttttggatgcctagtgatgttcgaagagttaacaaaatcgaaacaaaacgagacctttagataatgaatagcagttcacttagtttgactccaaaggttgcattaaaatatatattgattttacgagggatgatgtaagggtgatgtttcgttattgatccgtttcttttttgtattcaggcactgatttcgctaaagaagggagctcaactact

SEQ ID NO: 101953 - DNA, 390 bp, Mimulus guttatus
  Intron number 1 from transcript mgv1a009266m (locus mgv1a0 09266m.g) derived from phytozome v7.0 (chr-ID scaffold_17; pos 2228332 to 2228721 reverse strand)
tactcaaacgcttcctctccgcagctcaaattcaggtctgtatgtatatatgtataatgaatcctttgattttcagatgaggtgaatgggaatacacatacaattcacaatcttttttttttccggggagtggattgcaaatacctttagttaatctgaaaatatgattctgcttagctaaatgttggttgtaaaatgaagagattgtgatttgtgcttgtgatgaatctagttatctatggaaaatccaattggggagagtgcttagaacttattttagccaaaatatgtgaatagaagagtcgaaaacaatccgaagaacgtaaattattgtagaatttgttttgccggtattcattcgttggttttcttgtgtttttttggttcagg

SEQ ID NO: 101954 - DNA, 574 bp, Mimulus guttatus
  Intron number 1 from transcript mgv1a009395m (locus mgv1a0 09395m.g) derived from phytozome v7.0 (chr-ID scaffold_32; pos 733478 to 734051)
tctcgacagtgaagttgggaagtcaaggacttgaggtgaattaatttatccacattctttttaccttctcgcaacttcaatttgattaatcattcgttgatgatgaattaaaggcgtgtttttataatttctgtagtaatgtatacatatacagatttgattacacgaaacacgcttttttttgttgtttgtcttgctattgactttgttcctggtaatgtgtttgtatttcaagttcacaaaactgtttcagaattcagatcatggattttgggggtgggggtgtgtgtgtgtgtgtgtggggggggagggggggggggggtttggtacttactcaaatgacacgaatctctgtttaattgcgtaatttgaatgttgttagcttcgattgaaaatgatccaaataatcgctgtgtttctacgaatccgcactagaaatgatcgatgccactgtactttgtcgatcgattctccggctgaatatagaactatagtttgctgtatccgttttattttgtttgttgttgtgtgtgttttacttcatcttctctgctgcaggtttcgaagattggct

SEQ ID NO: 101955 - DNA, 468 bp, Mimulus guttatus
  Intron number 2 from transcript mgv1a001847m (locus mgv1a0 01848m.g) derived from phytozome v7.0 (chr-ID scaffold_96; pos 668076 to 668543)
tcttcaatcttggagttctcgagtaagtaacttctctctctctctctctctctctctctctagtcctcatctgggattatattgtccatgatacggtaatatgtgattatcttctgtttgagatttgtgattatagaatccgtgtattagctacatatatttcatatgattgtgtaataatataggtttattttgaaccgaatatccttaattcataggtttgattttgaaatccggacatcaaacatttgataaagcttgattatatagtctatcaagcataatcacagttcccaaacaactttcatacagttacatacatgattgttcttaaagaccagtatttttcgacacatgttcttgattcaatagttactacctctttaatttttcgtcgaaataatttatttatttattttgtttttttgggcagagattgcaagttcgtgtgtcttttcatagccaaga

SEQ ID NO: 101956 - DNA, 376 bp, Mimulus guttatus
  Intron number 1 from transcript mgv1a022215m (locus mgv1a0 22215m.g) derived from phytozome v7.0 (chr-ID scaffold_154 ; pos 370812 to 371187)
ttgcggttgctgatagagatctgaaccactacgatgtaagtgtttttttgattgcgaatgtgctttttctgcgtagagaagttttgtctgcgattgcgtatttgtttgtatttaatacacatctcttttcatttcatgtatgtgtttgccttgtgtgtgtatgtatgtggtatatgtgtttttgttatcatgtatcaattatcatagttctctttcgaaaccattaacattcttctggtttattgtttttcgtgtttctctgtgtttagaattgaagagtagtgtgttgcgatttttcgtaattgtttctattattttggtgcctgttattttcattttaggttgctatctcgcctgaggtaacctcgaagaaggt

SEQ ID NO: 101957 - DNA, 172 bp, Mimulus guttatus
  Intron number 2 from transcript mgv1a000954m (locus mgv1a0 00954m.g) derived from phytozome v7.0 (chr-ID scaffold_84; pos 543372 to 543543 reverse strand)
aagggtttctttcgttcttcaaaaccctacccaatgtaagcatttcgtttttgatttttttttcttctgtagttatattttatataataatggaaaaaataatgattggaattttaacttgcttctgatatttgcaggaccctagagctgttcgattcttcgatcgtcgggt

SEQ ID NO: 101958 - DNA, 772 bp, Mimulus guttatus
  Intron number 1 from transcript mgv1a009461m (locus mgv1a0 09461m.g) derived from phytozome v7.0 (chr-ID scaffold_44; pos 982298 to 983069 reverse strand)
ggttgtgcagagaacagagtttcttgaacattagtgtaagctatctttgttcactatgaaattctgttcagccttgtatttttgttcatgcaaatggttgttcttgattgttgtatgtatgtgaaatgtcttggatgtgggtaaaaatcgaatcttttttagatcaaaatgtgaactttgaattttgtttagctttgtgtttttgttcatgcaaacgtttgttgttgaatgttgaatgtgatgtgaaatgtcttggatgtgggtaaaaatcgaatattttttagatcaaaatgtgaactttgaatttttgagcttataaaaatcaaatctttgtttagattaatgtagtgaatattataatatagtttcaatgatatcttctttcatatggctactttagatgaacaataattaatagctgttggcttatatgaatgaactgccaaactgaactctcttattatccttacccatttgtaaagtggtccacagcatgggcaagattttcttaagtggttctatcatcttaggatatgatattatgatcttgtctaatttctatagaaaaaatgtcctaacatgtatttaattggcttttatctcagtttatgctctaagtatgaagctcttggtgttttcatagttcttgatttttgatgttagtttaggaccttttatgttgtcgcttactatttgttgtatgattttttttggaatttcgatcagataagtatgaagagtttgaggcaatgggcagagctttcgtcaggaa

SEQ ID NO: 101959 - DNA, 464 bp, Mimulus guttatus
  Intron number 1 from transcript mgv1a002506m (locus mgv1a0 02506m.g) derived from phytozome v7.0 (chr-ID scaffold_27; pos 718673 to 719136 reverse strand)
gctttcacttcaaatccgatctccatcgcttcaatgtatgcttgttttgctctcctcctgtatttaatttgattatttttcaaattgtttaccttattgaataagctgaatttgagtttgaaggattcattctgaagatattttacatgtgataatctgtagccagtttttgttagtttaggtcaaaaattgtatgtagcataaggattgttacttggtgttgagaattaattcattgctagtattattcatatagaaatgttaaatctgagtgcataaaccttggtctcgagaattatttctttgcaaatttgtttttaaaattgcgataaggatggagttgctaatttattctaacaatttgtattgttgaaaacatgcgttttctttatttcacagcttgatttacaatgcagtttctgatctcagataaagctaagcgttgctgggaaaaacatcattaa

SEQ ID NO: 101960 - DNA, 645 bp, Mimulus guttatus
  Intron number 1 from transcript mgv1a002141m (locus mgv1a0 02141m.g) derived from phytozome v7.0 (chr-ID scaffold_4; pos 3562360 to 3563004 reverse strand)
attctcccattcctatcacgggtatgctttctctaacacctgcgtcacttgcaatttcgatcatcatagatttcatctacattcgttttagctgttattattgttagatagattagaatccagatttctcgaaatcttccaacttctgttgcgtctcttaattatgtcttacggaatggtaacggtgctttggaggtattagctattttccgtcttccctgagtttatcactgagcatattttatctggcgatgacctaaagagttatcaggcagatcgaactatttatttgagtaaaattaatgggcataaaagtgctggatatgaggtatttatagtaatattaatccgatcaatggtagttaatgttaatgctaggttagaagttattgtctccatagactcagaaaccactcgaatgtgcgcctttttttgtctgttaactggaaaaatgccggttgtactttacttttgcccactaaatctgagattagagaaaagagaatgttgaagacacatggagagatatgattatccaatgaggaatttgattttatgtaactaatatatagaaactagacattacccgttgatgattctaactatgatgtattttttttgcttctgatctcatggcaggttttt

SEQ ID NO: 101961 - DNA, 959 bp, Mimulus guttatus
  Intron number 1 from transcript mgv1a026413m (locus mgv1a0 26413m.g) derived from phytozome v7.0 (chr-ID scaffold_113 ; pos 478086 to 479044)
aggggtaagtatcatatttacatatttttcaaggtgcaaagtatacttgcattttctacaaggcctacatatgtaaatatcattcaacaaaaatccctactttcacgcgccccacacactaaaaaaaaaaaaaaaaaaatatatatataaaaaaataaaccctacttaaatttaataatacaacaatataacattaatcaattacaaacaataataagaggtttaagaatttgctaaaactcaacccttttgattcacattattagcaatgagagtatatatactttttcctcaaaaaaaaaagagtatatatactttgattttttttttttggcatatatttatttatatatataataaaaataaataaattaatagttaattattattattattattattattattattattattattattattattataattaaggaggtaattatatatgagaaattaagagggggaagaaaaggaaagaaaagaaaaagaaaagacctcaacacccctccgcccccctccgcccccaccccccacccccacctccatatggtgtctgtgttcatcaaaacacaaaatatacatacacatatacatacatacaccacaaaaaaaccacaaaaaaaataaaagagcatccgcattcagaatcgcttcgatcgttgctctttccttggctgcgaaatagattctctggggaaattacattcactaatttatcggcgtatgcacgaataaattcaatacacacgtctgttaatttacacgttgggggtgatcaactagagtttgggattagggtttttgattttgaacaatttggggggaaattccggtgggttattgtgggttttgggagtattttgccgggttgaagtttgggtttttttgaattgggggagtgattatgttggattttaggatacaggcagggtttgggtttgggaaattttgag

SEQ ID NO: 101962 - DNA, 822 bp, Mimulus guttatus
  Intron number 1 from transcript mgv1a011531m (locus mgv1a0 11531m.g) derived from phytozome v7.0 (chr-ID scaffold_179 ; pos 209654 to 210475 reverse strand)
ctatcaccacccatttcctcaagagagtcttggaggtacatttctagctaggtgtacaatatctatttggattcatatggttaggcaaaacatttgtcagtatatttgtcactgatagtacaaattctatatagtggcaataaaaagataataataataataataataataattgacatcaacagatatcggacttttatattagtgataacataaaaaatgttgtctcttaatgtaagaaattagtgacaacttttgatatcgtcaccattgcagggtacatcactaatgtcgtccttttcttttaaatttcttgtcaatttgatatgcgatttttgtcagggtaaattacatatacacccttgaggtatgctaacatatatttaaggtctttgtggtatcggtaattacaacaaccctccgaaacattgttagaaacactaacggaataatgcattggataagttatttcgttagggttctaatcgactattagtttcaggaaatggtggagacaacttagagttaggaggtgacatgcctcccccaacatttcttaaatccttattattttatataacattaatacatattcgtctatggtagcgcagaaaacaaaatagtgcatatcggtctccaggatatgaaatcttggctctggtaattacttcaggggtgtgactgtaattaccaataccatagggaccttaaagttattttagcataccttagaggtctaggtgtaatttacccttttcttaactagtaattgtgctttcatgtggaatataggtgctcttcgttcacaaatttagtgggtcg

SEQ ID NO: 101963 - DNA, 709 bp, Mimulus guttatus
  Intron number 2 from transcript mgv1a013377m (locus mgv1a0 13377m.g) derived from phytozome v7.0 (chr-ID scaffold_89; pos 1008838 to 1009546 reverse strand)
agaggaacgagcgaaagaaagagaagcgtcagcaggttacattttaaacatatccctgttttcttcgattaactttcgattttatcagtctcaattcgtgttcgatctttaatttattccttggaagatgctttgtttgttattctgcttccggggcttgtacattgtgcatatctatcagaacttccaaatagccctatcgtctcgattagtcatgtagacgtgaaaaaatgtgtgtataggtgtatgtatgtgtattggtctgttccaagtcttattacgtttacgtatacatgtagtgtgtgtgtgtgtgtgtgtgtgtgtgatgagggacatcaaattgatttagggtggcatcataactacttgatcacgagaacgattcttgatgcgcaaaggtgaaaatataataattatataatgttaaatagatgtaaaatagttaaggaagatataacattcggcattaacacaaatttcggagaattttctctatttttctggtggattccgaatttttttctataggattagttcgttgaattaatttttttttagccacttcaacatggtgataatacgtatgctcaaaataataaaataagatttaattacctatgaaattactcggacttctatattacagatttcatctctcttaatttcaagaaatactattggtcgcaggcagccgttgataaggacgaaa

SEQ ID NO: 101964 - DNA, 467 bp, Mimulus guttatus
  Intron number 1 from transcript mgv1a001834m (locus mgv1a0 01834m.g) derived from phytozome v7.0 (chr-ID scaffold_64; pos 158881 to 159347)
gcctaggtaattttacgcatatcaatttctattcctctttgcattttacgtttctgtttgtttttttgtgagttactggcgttgtggtttaaaatcatagctaattagggttttctggggaaaatatgtccaaacttctgcatcatttgagtagaatgaagtgaatgcatattattgcaaaataaaatcacaaaatagatcgttagtataattgactcttacctttgccttgatattgcatgggacattttaattttgtttctgaagactccatgatcttattccgaatctgaaatttcagtgcgatttgtttgaaagcaattgaggaaattatggatatcatatactttgattatgtctgtttatgtctgtcagatttgattaatgcagatttttattctgtacagttgaaagggaaaatatttatcttctaaggtcaatgataattttcttagcagtttcacata

SEQ ID NO: 101965 - DNA, 738 bp, Mimulus guttatus
  Intron number 1 from transcript mgv1a002401m (locus mgv1a0 02401m.g) derived from phytozome v7.0 (chr-ID scaffold_173 ; pos 100699 to 101436)
ctacactgtatgcactttacatgttatatgttcatacgtattatacacacgttcacatttacttatatttatatatgtataaatcaaattacgttggaaaaaaactgcatgtaaatccattgtattattttcactttgattattttttaaatgaattattttgaagaaaacattaaatgaattttcatttattttccccttgccttgcaaaaccagtaaacaggtcaaaaaaggaaaatgtattaacctctagtcttttcaatttatttccaacaattacttttccatattaaaaaattaaatacaaatcggaaatattttccaaaataaatatcaaacgtttcataaataatatctggacagaaagaagtaaaatcaatacattccaatttccaacggtgctatagcacacaataattagcatttaatcccacgtaattaaatattttaattaagaaattagacgtggttagttatactatatatgtcgcacaattcccaaaaagaaattgagacgcctagagagagaaagtaaattatatatatatatactatatagagtctagagagagaaagagagggagatagagaagagaagagagagagagagagagagaacggtgttgtggtgtgttcctcgatctgtattttatgagaaaatgagattggtgaccggtaatcctggagttgtggaagaatgcagttgtggcggcgccggggacgacggcggtggtgcgg

SEQ ID NO: 101966 - DNA, 840 bp, Mimulus guttatus
  Intron number 3 from transcript mgv1a012946m (locus mgv1a0 12946m.g) derived from phytozome v7.0 (chr-ID scaffold_46; pos 880840 to 881679 reverse strand)
ggctggcaaggcgctaatccgtccactgatttcaggtataattattatctaaaaggtaaaattaggattacgtaatacaggagaacctcgataattttaatactcgataaattaataacctcgtttaaagaacaattttttacagtcccgacacggtaaaaatgtactaaataattagctcgataatttaatatttcgctaaattgatagaattttgtcaatcccaactatattaatttatagaggtttaactgtaatgggttttgcatttggactaaatatctttcatattcttgattaaaatcctgtcttaatttttttatcacgtgcttgaacgtttgtttgggaagattagccatgattaactaaataattgaactttgtttgatgtttggtaaaccctataattttccgggtcgacttgaaaaaaaatagtttatcatggcctatcttgcatttggagattattcatcagacctcccatggtcaataacacaaattaggttttcgttagattatttaatcttatcattctgctttcgattatgaaccaaacatggcctcaatatttgaccaaaacttcattatattgtataactcccaagcaatgcataaataaccgaaagcagaacgctacgtacatctgctcatatactttatgttgaagtactctgtgttacttttctcgttttttttttctttcaagtagtacaatctatgatcattaattatgttgtgcatttcataattcgtctcaaaattttgagattattattgcctctttatgctctgttatttggcttagggggtgtggattaatttcgctcgagaacttgctat

SEQ ID NO: 101967 - DNA, 613 bp, Mimulus guttatus
  Intron number 1 from transcript mgv1a006029m (locus mgv1a0 06029m.g) derived from phytozome v7.0 (chr-ID scaffold_7; pos 2048301 to 2048913 reverse strand)
aaccctaactccttaaattcatcaggtaaaatcatgggtaattatgaattatgcaaatattctttaaattttgtgctcaatttttatttctggagtgatgattttttgttgtatttctgattaagggtttgtctctttttttttttctttgtaaatttaagctggtgaaataaaaaatgattagtgcattataaatagactgaagattatgttctgtgaagtacctaattgttaggtttatgcaaaaaaaaaaaaaataataataataataataataaataaataaatattgtgtatttattgaattctgcaaattgtctatatatctgaaccataaagaagtttctggtggctaatttaagccagaaaatataaagcaaatatagaaagccatttctcactgaaaagcagcttatttatgtcgatatcggtcgccataatcaccaaatatttaatttacttaaagaatggacgattatcttttgatgttgctcgtactaatatacgacacttggcatttgagatattatccaaaaaaattaattttttttcgtagtggattttcgaaggacttgtagtaactgttggttttcattacaggcagtggagtttc

SEQ ID NO: 101968 - DNA, 967 bp, Mimulus guttatus
  Intron number 2 from transcript mgv1a021268m (locus mgv1a0 21268m.g) derived from phytozome v7.0 (chr-ID scaffold_68; pos 961069 to 962035 reverse strand)
tttcgatacgatccaattaagaaactgtttcacaagtaagccatattgttttgataaaatccgtgttaattttctttagccgtatgtgtttgtcttaattgtgaatttatgaagaagttctgctgatgatggagagggtttaaccgtatgttgtcttaattgtgaatttatgacgtagttatgctgatgaaggagagcctttactttattgttcaatgttaaaagatgatacttaattatcaatatttgtttttgttaggttggtttttcatcttatataggggggtaacgcatttaattattccgtgtaaacctgttttagaactgtatctcatatgccaaattacgaaaggaagaaagtctattgtgccctaactggatgaaatagtctcttattccttttactgtttagcgatgaccaaattatcaccaagagtagttgagcatctatctcaccgctcccaagattctttgatgtctgggcttaatgttcggaagtctcctgcatagacaaattgtatatgcagaatgcaccttaattttcaagagtaatttgtcagttaattacttagaactagactaggtgagttcacaaacgtagagtgtatacattgtcgctgtgtaattactctaaaaagggtggatttagacttcccgaagttcatgaatttgttcatgaaatatgcatttttataggtgtgtaacttggtcattacacttgagttttcttacatgcatcatgttgtttttatcaaattactgctggatacatttacttgatgtgattaatgggttttaagttcatttcatttgaaatttttggcacttgtctcttttaaatagaggaaggatcataatggttgattttctaaggtataagttcatgtaattagctttgcacacttccaaatcttttaatcaaactttatttaaaacttttgtagactcacggggaaccttccgattc

SEQ ID NO: 101969 - DNA, 800 bp, Mimulus guttatus
  Intron number 2 from transcript mgv1a012198m (locus mgv1a0 12198m.g) derived from phytozome v7.0 (chr-ID scaffold_126 ; pos 601409 to 602208)
gagtgaatacaagcgtaagattcaatttccctattttatgttatttattttacttcaaatttcatcatttattgaattgctcgacattatttgttagaaaaaaaaattctcctaagcaatccaccttcatatttttggacttcaacaactcgtgcctggggtgaaatatttagtatacaaactccgtcactggcaaaatcagtattgcattttgctgcactattctcttaactaggagttttaagtcggtaatttatagttttaatcatgattcatgggtatggcacaacagatactaatgggaggatgtaaaccgaatatattcaatttactctagatatttgactagacactggtgcaaacttctgatagaggggcttattgaggtttaggcaattttgtgccagctccattctacagtgctgttagatccagcaacgaagtgacttgtgcatatccatttgtttccttgagtttcttcatgttttttattgtgtatccaaacatcttagcccactgatttatgctaggcagatatgtatctttctaatattcaggcacttctctaacagttgttatactgcacttacgaaaaaagagagccttcatttaaatgctagcaaaaatattagctgaaccctttcatttatttgtttgtacgatgcaaataaaatataatgcatattgctcctataaatgtgtaacttctcatggatttgagttttcttatcctggatgcattttacagtttatgttcctatgcaggtgttgctaatcgacttccacaattagttcctgat

SEQ ID NO: 101970 - DNA, 951 bp, Mimulus guttatus
  Intron number 2 from transcript mgv1a017919m (locus mgv1a0 17919m.g) derived from phytozome v7.0 (chr-ID scaffold_1; pos 3254449 to 3255399)
tgattgtggtgcccttttctccaggttatttttattttatttttatttaatttattagcattggattaattaatcagccatgaatcttgatttaggtcaaacttattatctatagtttaattaggtttcagcatcacaagtatcaagaaaatacacttaatgactaaaatgtcattttttttttaaaattattatttatgtgtcaaaaaaaaattgagaaaaagttggaatgtaataactgcatcgttggaattgatctaaattgatgataatatgaaccaaaaataaaattaaaaataaaaatgtgtaagggaaggagtaataattgtcaagtgtactgaagagttgcaagtacaaagaatataatgatgaaaaaaattgaaataagttgtgcaagaaagttatggaaggtttgaatactttttggccctgctgcaagaaaatttatcatggtgtggtcgctgttttactgacaagagtaaaaattctcaacttatatatatatatatatatatatatatatatatatatatatatatatatatatataatatcatcatcatcgtcaaaactggtaatattaatatctgcacaagtcattgccaatatcgctgcactgttttttctttgccttgtttgtatgttgcttcatagactagagtatacattatgtgtagttttgcacatgcacccacatacacacacacacacctgtgtgtgtgtgtgtgtttgaggggttactttttaccaagttctgatcagtggtatatgtactgtactgtggtcatatatattttgcatgcaaaatgtatacgtaaatattatttatatatggtaaatatttttttttacagtcattttcttcatgagtactaatcaaaatctattgcgtgtgaattcattttttataatacaggaaggatagctttatcacacacagggcattttgtg

SEQ ID NO: 101971 - DNA, 939 bp, Mimulus guttatus
  Intron number 2 from transcript mgv1a008353m (locus mgv1a0 08353m.g) derived from phytozome v7.0 (chr-ID scaffold_37; pos 868982 to 869920)
ttgctctcagatttcgccgccctccctggcaaactgtaagacctgttcacacacacacacacacacacacacacacacacatatatatatatatatatatatatatatatatatatatatatatatatatatatatatatatatatatatcaatgctcgcttgcttaagtaaatttggatgagttgcaatccatgtctttctccatgctttacttctttcctcgttcaacattagttcaaagcttcatgatatctaatattttgtttttcaagaatatagtcgggtttgacagctcaattactttgattcgattatgcaaggaaaaaaatggcacattgcagtttgttcttcacctcataaaaaaaataggaggtcgattagttgttacggctgaactttagtattgacacatcacagatataactatttggccctagacgacttggattctttggttaacaaaaacagaatcactttgtcgagttacagccttgggagaaaggttatctacatttactatgtattactggatttcatattggcttctaatcaaccacacgaacattgtctttgcgtaatgcgtcaattcttgattgtatccttgtccaataaaaaaaaaattggaatgtttgcttgtttagcaagatatcttttgacattccacgaagcagctaactctaacctgtctttaagcaatagcatttatttcattaatcaagtatgttgaatacgagtactagtgtttggcagttaaaaacttcaccttccatttgaggaacaaaagtcgcatttcatattctatttgctttgccttatcaaagtaagattggttgcaattaatcaacaccgtaattgtttttgttttatctaaaaagaattcctcgcttcaaaatttgatgccagggagttgaagttatagagaatacgagctgctatca

SEQ ID NO: 101972 - DNA, 698 bp, Mimulus guttatus
  Intron number 1 from transcript mgv1a016524m (locus mgv1a0 16524m.g) derived from phytozome v7.0 (chr-ID scaffold_208 ; pos 245725 to 246422 reverse strand)
tacaagtgaccctaacagtccggagttcacttttggtatgttgagaactcttattgagaagaatgatttttactccaaagaatgcaatccccatttggatcatcatgattatgtcaaacaaggaaaaaatacttagaaaaaaaattatatatagatttatttatatgatcaaaaatatttggatttgattggtgagaaattgttttcgggtttttcccggtgattcttgttgggggtgattcttgtaagaaatgcccgggttttgttaccgaagaaagaaaatcgaaatcgaagtcctttttttaattaaagattgtgccattcttgatctttattatacggatgcttttcgatgttaatttcgtcggatttcggtttgttggtatggtattagtgtggctgcattggagtgagtcgtgttaacgtaaattgtgatgcttaatttatatatgaactcgagtcgatcatttagggtatttgctttggtattggagttgctagaatgtttcgaaacgatagcattttttttcccgttaataattgaagcccgttaatcgaatgaggggatttcgtgctgagaaaatcaaatagaggaggttgtatttgttgaaacatttttagacgaaattgcatatgatggcttggatttttcgagcccgattaatatttatgggaattgtggtatttgaaaatgcaga

SEQ ID NO: 101973 - DNA, 832 bp, Mimulus guttatus
  Intron number 1 from transcript mgv1a015620m (locus mgv1a0 15620m.g) derived from phytozome v7.0 (chr-ID scaffold_37; pos 1724354 to 1725185)
caccttcgcgctgcccggcggccaccttgagttcggtcagcacttactaatttgtttttatacatatttgcagatttgtttagtgtaattgtttccttgatttgtagtaataaatttctcgtcgactgatgaagacctaattaatcagcgactaattgaaatgggttattgattaagataagggggagtttaaggaatttaacaattaaacatttaatatgtgtttagctcagaaattagtcttaatttttgtccttgattaatgacagaaaccagaaacggtgtcgtattctatgcctaagggttagtctgtgagtgtgaggactgaggagtttcttgatttatcagataatttgttcataataaattatctagtagttctctggctgagattaggggtggaaatttaaacctaatttccgaattccactggattaaaaaaaaatccaattttcaaacaacattttttattccggtttctgattcttttggaacgctattggggtacatattagattttgatttccgatccgattttatctccgaaaatatttccacaaatttccgaaacttacacttgtgatgctgatattattatatattttatgttacaagtgactaaaagtttggaatttccggttcgattagaaaatttcccattttgggaagaaaaaaattcattccaatttccgaaattcccttttgattgtttttggaacaaaattggaattagtttttaacttccgaaaaaagttgaattttttccccaagtgtcaatttcgatccgatttcgaccctaagttgagataatttcaggtgagagctttgagga

SEQ ID NO: 101974 - DNA, 820 bp, Mimulus guttatus
  Intron number 1 from transcript mgv1a001334m (locus mgv1a0 01334m.g) derived from phytozome v7.0 (chr-ID scaffold_39; pos 1082137 to 1082956 reverse strand)
ttccgtaaacaggttctctctctctctctctctctctctctctctctctctctctctctctctctctctctctgtttttacttttttttacttctctcacttattttacttcaatcagctaatctgagttagtattggtttttcagtgatgaattgatcaaaactgagttggggatatgttgtttggattgttattattacttctgatttgtagaaatcaataatttatttaacttaattctctataactaattgtgattatgctcgtctctcgaagaagtggttggtgtttctgtacttacggtagttatctatggcctagcattgtaatttgatggtattttaggttcaattgtttcaattatgaaggaaaactagtccaattttttcgatttctattggtattcttgttcaagggaaaaacgaggggagttcttaggttatggagttttacttgtcaccgttgtgatttgtgattcccagtaaggaatgtttgaataaatctattttgaaggatgtcacgagtagttatttttgtcatcaatgataataaaacgtaaggagatgtgcattgaatttgactaatttgaactcatcgtattataagacacggtccaaggtgatttgcagatatagttaaaccttctggaagaaagccagatgattgaagtcttataaatttttagtttcttgaaatataaaattctgtgttatccacacacgtgtaatttgatttttcgtttcgtttggtagtttcctgagaaaaatgctctgtgtgtgaacagatacaaaccttggaagaaggttccgaatccttggg

SEQ ID NO: 101975 - DNA, 792 bp, Mimulus guttatus
  Intron number 2 from transcript mgv1a005202m (locus mgv1a0 05202m.g) derived from phytozome v7.0 (chr-ID scaffold_79; pos 83677 to 84468)
cggagtccaccggagaaggtattcccattcccttttccttttttcagctggtgttttagtttaactcaagaacaagaattagtcttcatttgtttgggaaaataaaagtagctcattattctggattttgactaattatagagtttgatctgtttgttgcccatcattaattcaaacagctatttttggaattagagaaagatgtcacagtcagtattggtttttccatttctgaaataactgaaaagagaagtgaaaatgaataatgttggcctttagttggatcccttttgtggtgattcttcgtttataaccatatgtctgttaaaacttctaccctcaataataactagcaacatggtaaaatgcttgtcctctccgaaatagagggattgctggggactaaccaaactgaaggtggccaaacctctttatatatctatcgttatgaaccgcaaaagcacatgtgccttgcgtacctaaagttggtttattccatgcttgccaagtacagcgggtatatcttcaccaccatttattcacacacaaaatacacacattattaatgctgatgtgtgtagtgcagattaatgatgatgatatacccaatgtacactttgctgggtgtatctcagatttgacgtctatagtttaaccatcttcgggacgtatatataatttagtaacttctgtttgctcgtctaagctttattttacagaattttgatttttatatctgactgaacatgttcctccctaaggtgtttgagtattttgcatctgttcgtgcca

SEQ ID NO: 101976 - DNA, 1015 bp, Mimulus guttatus
  Intron number 1 from transcript mgv1a003759m (locus mgv1a0 03759m.g) derived from phytozome v7.0 (chr-ID scaffold_60; pos 1308916 to 1309930 reverse strand)
acggtcttcagtacgatcttgtgagtttcttcttcttctgttctctctctctctctctctctctctctctctctctctctctctctctctctctctctctctctaatttaaattcctttggattttttgttgttgtgatgattttgaactaaccgctgcctaatttagggtttttgtttgccaagaaattgatgtacgattgggattgaactgtgcatctgtttatttttcttgtagtatccgtttttatgttttggtttttgggagatttaagactgaattttagcttattttattttatttttaccgtggattttcttttgatgctttatagaaaattgaagaagatatatggtaattttgtgttgttattgagtactgtttttccctaattcttcaagcataatggaaatgtaacagattgagtttgaatttggggtatttaaggtcttgtctctgttttcgtttcactcttccatttcaatgtaagcccttaaccgatttttgataactcatctcatctctgcctactcttccctctagtggtagtttttgtcctaaaaaaatgtcttcgtcttgctgttcctcatatttggatgtcgaggagaatatgtttctttgatataatattttggaaagttatgtcatatgcggaattcacgctgagtaaacggtgctgtagagaagtaccattaggtgtccaattccttagaacactgttttttcctctcttccttttttttttaaaacttatggtataccactacgattacgtcgagcatgcagatctataatctcatcccactcttgtaaatgattggactgttcgggatagtagtatttgatggatgaagtttctgcaccttttgttaaatgtcagaactggaagtcccctctatctatatgatcgttttaattcaaatgttatgttcttttgctgagttggctcagacatcatgcttttatgatttatttattaggaggatccggtgcttttggttcctgagcagaaaga

SEQ ID NO: 101977 - DNA, 551 bp, Mimulus guttatus
  Intron number 2 from transcript mgv1a009837m (locus mgv1a0 09837m.g) derived from phytozome v7.0 (chr-ID scaffold_1; pos 3750592 to 3751142)
gtctgtcactcgagtgaatcagttgaaggacttgggtgggtgaaattttgcttttcttctcttaatttcgtaggttaagtttttgggcatttacttattgtagtaaattgtggacttgtaatctgttggattgcattattttgatacttcttggtgattgttttcgtcgtaagttaaattgcccctggtcgtgaactcgtgatcgattaatataccctgatgtgtgagagtctgtgtatttgattgcaaatttagggacaatgctgtagtagtctagaaccattgtgaccagattttactggatactacagaaatagcagaatttcaattattttcacgctcgatttatacatttggtgtcgtcaccgagtaaaattccagaagaaactttttgctttgtcttggttccagtgaaaaaacatgaaggagatgcttttaccaacatgcttataggaaatatatctgataattatatgtttcttgctgatcctcgtattttttatgcttctttgtcagctcaattattggaagctgcaagcaaggtcttgccg

SEQ ID NO: 101978 - DNA, 790 bp, Mimulus guttatus
  Intron number 1 from transcript mgv1a018882m (locus mgv1a0 18882m.g) derived from phytozome v7.0 (chr-ID scaffold_36; pos 1007952 to 1008741)
aagaaggtaaatttcgttctttgttttttttttctttctgcataagttgaatcttttcccatgcataaatttacaccgaggtcttcacttggagttagcaacgaatgtttagacattttgtttactgttctcaatttatgctgtttgttggtttttgtttaactctttctctcttgtggaatgcttttgattgattctgcttttggctctcatctgaataactgctctatttaattgttgagtttgaggatactccctccgtttcaaattaatgtcgctttggagaaatttttttcttccatattattttgtcattttagaattccaaaaatgcagtatttactatttttccgattatgcccttattactcttagattactataagcattcattcattctctcaaactaaagaagcaattaatgaatagaattagtgggaaggacattttagtcatattatatgctttgtttttctaagattcatacatattattagttttcttaatacgtgtgttggaacgtctaaaccacacttaatttgaaacaaaggagtaacctttttaccctaaaagtaattttttttgaaatattattgcttatatttgtattatgcctatatgttttctccatgaagtttatgtagattcaattaattgataaattttctctctctgatctcctcatttctcttgtttccagagttacaaggaatctgatgtaatgcccattcaaccatcaacctcaaatcgctgtggaaagacgagattccaggtttcacaattcaaagta

SEQ ID NO: 101979 - DNA, 691 bp, Mimulus guttatus
  Intron number 2 from transcript mgv1a011300m (locus mgv1a0 11300m.g) derived from phytozome v7.0 (chr-ID scaffold_206 ; pos 223835 to 224525)
ttactttggtcgactacaaattcactgttggggtaattaattctctctctttcgttctttctttcttatttccagcttgccaccagaggtgttaattagtaattacaatgaattacaatgaagtttcggaattttgattttgaaatacaaaaaatttccaatttttatgccttttatttctttggaatgagattggctcacaaaagttcgaacttgaactcaaatttgaatttttcgagctctagctttctgacgagtcgagcccgagctcattcctagttgttcatgagctagcagtttttttttcattttaattttttgaattaatataaaattaaataataaattcatataaataattaaaaaataaatacaattcatttttttttttcgaatttttttatgataataataatcaaattctaataatattaatacaaaaaacaaaataagaaaatatacaaaatggactggggctgagggtcgagccaaaaatcaaatactcgaagagctccaactcatcaaaatagatttgagcgggccaaaacagccgatctcggcttttttacacccctataagttccccctttttaattagattttaatatttgagttccgatttttttttttttttttttttttaatgatatatgcagatagagtaccctgagcatacaggatcaataattgt

SEQ ID NO: 101980 - DNA, 909 bp, Mimulus guttatus
  Intron number 1 from transcript mgv1a012863m (locus mgv1a0 12863m.g) derived from phytozome v7.0 (chr-ID scaffold_2; pos 2141080 to 2141988 reverse strand)
tcgtcgccgcctccaccaccgtcaaactcccgcaggttattttgttttttaagttcatttttgtcagtaattcgttttttttaatgccgattgcattttcattgttgtagttttcgatccgcgtttgcttttgttttgaggattttttttttcgtgaataactgaagaaaaagtttgatcttacacatgggggttatgaattatgataatttctttgtgataatttagtggatggttctgaattaaattataccacaatccctggtgtgaatagtgattgaataaatttaaatattagggtgtttcattgttaataaaatgatttgatttttttctcgtattcgtctagggatgattttgatttcagcaatgcagtgccccgactctctatgccaattaaaatttcagcattctaaaactatattttgaatagtgaagacatgagatcttaagttccagattttcatcaatcattctttgttttcttgtaaaatatagaaatcggaatcattagtatggtggtaatttcagaatgtacccgaagcatcattttaacttcgactcactgtacatttgcactgtatgtatttttcaggattattttttctttattatttagctttttaaacgagatggatacattagatttcgatatccatgaaataaagataagaggaaagggaaataatgataacgagtgtagtttgtttactagttgaggctcaaagatgtagtcacttgtgtgtttgtactatgagaactgtaactttgagatggaaaccgatacgtcgagacgagaatccgagcacttggttttttcctttttcctctgagaagcttcagttataaaatgtctcttggttttatatttcagatactaaagattttgaaaaacaatagtgtcagagg

SEQ ID NO: 101981 - DNA, 882 bp, Mimulus guttatus
  Intron number 1 from transcript mgv1a020357m (locus mgv1a0 20357m.g) derived from phytozome v7.0 (chr-ID scaffold_69; pos 297137 to 298018 reverse strand)
atcgtacgatgtgtctcttgatttgtaaatatcagattgtggtgcatcgaaaactgcatttttgcacaaatcgagtacaaataggaaaatattccacataatctagaagattctattaaatttgagtccataaggtgaatatgtaaaataattcataattgggagataattataattatctaaatatgaattttttttcgtaattcgactttatttcaaacgtggccgtattttaaatacgctatacgaaaatacggaaatttgaaaagtaggcggaagttgatagaaagagaccggaaataagaattattagactagtcaaacaattccccctctattgcttcattttgcaagcaataaaatactttatattaaaagatcgagctaattgcaaatacaaccccatgaaacctcgaatcggcaccccatataaaaaatgaatatttatttaattagtgaattagtaatatatgaagaccaataaaaatgtgatcaaatctataataatatatttttttaaactaaaataaaaaaataataccaagtggattggcaaagccaccgccacgtgtacaagtataattcaaagacggcaagcaaaagaaaaaaagataatctcttaaatacagacaaaattcgtagagccaccataaactgaccgtatatataaattaattaatcaataaataatatattttctttttttttccaattgaataaataaatatcccactatatatatacactactaaattccttcaattttactgtatacacaaaataaaaatatctacaataaattgggggggaaaaaaaaggaaaaataaaataaaataaactatttcagcgtgttgttccctcaatctctctcctcctccttct

SEQ ID NO: 101982 - DNA, 563 bp, Mimulus guttatus
  Intron number 2 from transcript mgv1a001603m (locus mgv1a0 01603m.g) derived from phytozome v7.0 (chr-ID scaffold_24; pos 88279 to 88841 reverse strand)
taggccatcaaagaaaccaacacttctagccataggtacggagtgaattagattttgagttgagtgctttcggtttaagcgcagcaacatttgtttcattatggctttattattttgatataaagtaacaagaaaatggtacatgattcgttagaaaattcttgctccgtggctgccatttgtttggtaatattgaatattggagttttttttagatgagttgacgatttgtctaatagtgataattgatagaagagtgtaattccatttgatgtgtgcttcgataaaatagaagttgattcaggtgctgactaacttcatgtcttaaccacaaggcattgattttatttaaataattggcgatatatctttttagcttgctaggtgaatgatttgggacacctcttattgctgccgttgcctctcctgatatttgttaaatgtcaaatgcttacttatactgcaaccttatttttgacagtgctgtacccaaccttaatttattctaaattattctgcgaattgcatattttttgtaggtattgaaggagggtttgataaca

SEQ ID NO: 101983 - DNA, 730 bp, Mimulus guttatus
  Intron number 2 from transcript mgv1a015769m (locus mgv1a0 15769m.g) derived from phytozome v7.0 (chr-ID scaffold_17; pos 1968216 to 1968945 reverse strand)
gatcttggactggtaccataattggtcctcataatgtgagcatcttctcggaatatactattgcattaattttgatgtcgagtaataaagtttgagcgggcatgcttttgtttggtgcgacatgtattggtacttcaatgcgagggttttggaatgaaaacaacgaattgaaattctcttacaatcatatatttctatttgatttgtatttaaaagaaatagtgtgaacatatccttacaacacatgcaccccatcgaacttctgacatctcaccatatcccattgtgggttggctctgaggctataagccttagtgatagtttatttgctttgtattccgcataaatgctttcatttgttagtcacttataatttatggagaatttcggcaagaatccatctttcttaacagaaatatgtttatgtggctgagtcttttctcggtaattttagtagttaattcaaacaattttttaactcatggctaatggttgcacaactgattgtgttaagatcgatcaaaaggcatcaaagatatgcttgctgttgatgtgttaggtggttaaacttgttgaaatatttgaacgggggctttaatgttcatttcttctattgttgtgctgattgaatatagttagtttattttttccttttaaaacccttggctgctactctttatttatgcaaataactgaattgcatgttttctttcttcctgccagtctgtac

SEQ ID NO: 101984 - DNA, 710 bp, Mimulus guttatus
  Intron number 1 from transcript mgv1a015769m (locus mgv1a0 15769m.g) derived from phytozome v7.0 (chr-ID scaffold_17; pos 1969016 to 1969725 reverse strand)
acccttggctcaggtggatccagtgttgtcggtaacgtttttccacctcttaataagataattcattttaatgctattccttttttttcgtttgaattttcttcatgttcatacttttatcgtgctcagtctgcaattaagttgttgaatttcgtggggttttattgttgcaattgattcaatatttaggtgtcggatcttaagaaacacgcgttcatattacgctttggttatcgtaattaattgggtgatgttgaggaaatattgattcgatggaattcggctgcttggacatgatcgaaaaatctgacatacagacttagttgcataattcaattgaatttctatgttgagtgattgatgagtttcttctttgttgccatttcgtggtgtccccgtggttctcgttgctctctacatttgttatgtaacctaaataggaacatgacatttaatttgattttatttcagtgatatactgtcttgattttgtgcttatttccatgatttcgtgtttgaatgatttgaccaatcaactgtgcgaagggaaatcgtactaagatggcgttatcatttcacttttgaatatgttgcacgcaagcttcattgtcatgtgttaatggctgaactgattagctattctttgtacctatttttttttttttctttttgcagtccctaggaatttcagattgctggaggagcttgaa

SEQ ID NO: 101985 - DNA, 630 bp, Mimulus guttatus
  Intron number 1 from transcript mgv1a005095m (locus mgv1a0 05095m.g) derived from phytozome v7.0 (chr-ID scaffold_27; pos 743029 to 743658)
aattgagcattaacgatattaaacatctacttctggtgagttttatgttttctgatttttcgattatatttctttttagggtaaattacaaccaaacccctgaactatggtcaaattatgtaaaaatatctcgtgtttggataattataactacccatcaactacgaattttctaacacatccacccttatggtgtcaaattcaatgtaatcttctagattttgtggaatgttctctaatttgtactcgttttgtgcaaaaaatacagtttctgatgcaccacaatctcatatatatgcaagccaaaaaatacattttatgatcatcttgcttcaaaatgtggagctcgaacgggatgaaacgggtataaaattgagaatatttcatataatctacaagatttcactaattttgacattgcaagggtggacgtaagaagattatagttgatgggtggttgtaattacccaaatatgagggggtttttataatttgaccatacctcaagagttggttgtaatttaccttttttttttaattatttattcatttttcgattttttgaattatttgggatataaatttttacatttggatcaaaaaaataattaggatatatttctggcggga

SEQ ID NO: 101986 - DNA, 719 bp, Mimulus guttatus
  Intron number 1 from transcript mgv1a013336m (locus mgv1a0 13296m.g) derived from phytozome v7.0 (chr-ID scaffold_15; pos 233722 to 234440)
ttctcgtctttctcgctttctccttctctcgacaggtaaaaaaagtttctccgttcagtgaccttttctttttttttttgaacttttcgcaattattgcttctctgaattcctgtgattctgatgcttgttgtttaatttgatgattgagctgaattatcaattttcaatttgtttgatttagatctgattgcacttctacatgatgggtgatagttgttttcatgtgctttctcttccttctgaatttgagatgccgcctgtgagtgtgtgtgtgtatgtgtgtgtgtgtgtgtgtgtctaatttgcattttgcaaatcaatgaatttgagagttccgttgtaatatgcattttgcaaatcaatatgtagaatcatagaatgtgaaatcaaacttagggtaggtagtccatgaaaattcacactgcatttatttaaccttttctattttgctgtttatgtttcagccgacttgcttttatctttatctgtcaaaagaaaatttatcgttactttcattttccaatgttgtgatcttgtttgctacattattaggataacaatcacgaaaaaaaaaaatccatagattttaaacatacatatataacacagttgtcgtgtagttgtgttttatcctaattctgctgccatttcttacttttgtcgtcttttacaactccagcaggtagagaagacagaaaaggtccacgagatcaccca

SEQ ID NO: 101987 - DNA, 866 bp, Mimulus guttatus
  Intron number 1 from transcript mgv1a003468m (locus mgv1a0 03468m.g) derived from phytozome v7.0 (chr-ID scaffold_396 ; pos 25781 to 26646)
tcttcgcgttcctcgtctcttcctcactcggcaaggtgagatatatttgtaatttacccttggatggcttctcaattttgtcgtttgctgcttctagatcttgtttgaatatgtatttgcctataaattttattacattcgattccctttgatgcataactattgagatttgattatggctgttcattttcttatgttatattctggcattgttgagttaaatgacaagatgaacggtagctgaaggtaaatgataggaaagagcaatgggcggttttattttctgaaattaattattgtttttttcccctctatgttgccactgaattatccactgttgcacgaaaaaatttaaatggttgacaagcgaaaattgaaataaactcaacagcccctttaagagaagttgttttggtccttttgccttctttagtcattaagtttttcttgattttaaagatcaaatgctgtgcttttcatttaactgactgttttttcttgtgatatatcaagaagatgtgccataacagcacggtggaattccttttctcatctttccatttacatgaacatgcacattgtttctagtgcgtacttcagtatgctacatgaaatatatctattactttttaatcaagatctctaatttagatgtgaacgaaattgtttccagtctatattattcaatatgctgaatgaatccgttacttttgaatggaaatatcagtcaatagaacaaattatgtccggtgtatttattcaggaatttaagagaattctgctctctgattgtgtaatggataaaagaattgattgcatgctccccatcgttcacatgtttttaattgttttgcagtatcaagacg

SEQ ID NO: 101988 - DNA, 622 bp, Mimulus guttatus
  Intron number 1 from transcript mgv1a011575m (locus mgv1a0 11575m.g) derived from phytozome v7.0 (chr-ID scaffold_26; pos 1038928 to 1039549 reverse strand)
attatcggtattccccaatactctgtataaataatattttttttaattaaatagtttaagtaagatagtttctgcatctcttttgtatgctgatgcgaatccttcattattgtgaactcatttatgagtcacgcgcggctgtttccctccatttttatgttgcgtgtgttggagcaaatggtgattatgatcctggaaaagtaatttttctttttgttgtttgtaatgccaattttgttatttactgctgaaaagtattgtttgggtgttcattgttcagagttgatttcatttcagaattatttccaatttcaatagttcctatgtgaattcaataacttgaaacagtacggtgtgggctagaagttgatgctgccatctttaaactgcaagctgtaatcaataattgattgctgaacgataagtgaacatgtgttctcgttttaggatttcgtatcccaatttatttctttgccttttcagggctgcgagtccattaaatttgtgttgatcctgaatatttattatttgctgtttttagtttaatgcaattagtttaagtgacggtttgattattgaatgttcaggtgctttcattcagttggcatttataaggaagttg

SEQ ID NO: 101989 - DNA, 610 bp, Mimulus guttatus
  Intron number 2 from transcript mgv1a010236m (locus mgv1a0 10236m.g) derived from phytozome v7.0 (chr-ID scaffold_48; pos 1315836 to 1316445)
ctgttgctttggctctagggaaagctggttgcaaggtttgattctttacttccatacgataaaattttagtttaaaaataagtgtaataagtaactagaggtgccagataaaatggctattatttggttgctcgtttatacgaactatgttttttttgggggaattgcttggataatgagaaaaaatcatgcatatatgctcaaattgatcaataatattaaaatccgattaatcagcccgaactggctttttaatgggattctcatatatatgctgtttaatggaatagttgtaataaaggtattgacctttgtaatagaatttattgattataaatgaattttctagattatgaatctagtttttgaaatacttacaaggtacaccggatcttcttttccgttatttcgttgttcaggttctttgttgtagacacttttgagctttccatctgataaatgagtaaatgaatagacataaccatgttgtagttctcgactagaactggagccagtggatatagatgtgattactactgtgaagcttctgtttcatctttactgatgctctacttgattgtcgattttctgttgcaggttctggttaatt

SEQ ID NO: 101990 - DNA, 573 bp, Mimulus guttatus
  Intron number 1 from transcript mgv1a013163m (locus mgv1a0 13163m.g) derived from phytozome v7.0 (chr-ID scaffold_26; pos 1456334 to 1456906)
gcattggctggtaatttaattgcacttagggttttgctcttgttttttttttttttctttacttccctttcttaagctactaatttcgaatttcattttttactgaagcaatgcatagtaattcaattgtggttgattgggtaaaattctgggtaatttggctgcatatgtcttttctgtaactggatctgatgcagtgttggtattttcatggtgttagtttttataattttttttttttttaattcttagtctgattcaccgtttgattttttttgctcatttgaatttctttgctgcatttattttaatcattttaatccgccattgttgcaatttccattcatcctctttgttaaattattgcagacagttccttccaagtacaattgttctgtagtatcactggataattgcaatattcccaggatagtttaattgttggtcttttatgcaattaaatttgttacccatttatacattttttttggcaatttattgatttcgaattataagattgggggaatgagttgcagttacgaggattactgatatatatacaggttctgacca

SEQ ID NO: 101991 - DNA, 396 bp, Mimulus guttatus
  Intron number 2 from transcript mgv1a013163m (locus mgv1a0 13163m.g) derived from phytozome v7.0 (chr-ID scaffold_26; pos 1457023 to 1457418)
ggtaagcttgattttatctccgatattgatttttaattccgtttaattgctttcgataactatatgagatgcccttttttattctgcaaatttagatagttataagcttgatttacgaacatatccaaaattcttttgatgattcgatttttttgagagaaatataaattttcttgccaaatgcatttttagttgaacatgggaaagttgttgaggttgttacctgggattctttactcttcttttccacaccattttgttttttctcttttccttcgactttaacgcgttctgtggtagtcattcttttctttgcttttccttttttatcctggtccaccatgtatatatataatcatctgatatatatactattatgtattttcttagcatttg

SEQ ID NO: 101992 - DNA, 941 bp, Mimulus guttatus
  Intron number 1 from transcript mgv1a013408m (locus mgv1a0 13408m.g) derived from phytozome v7.0 (chr-ID scaffold_140 ; pos 787783 to 788723 reverse strand)
gattaaaggaaagaagaatctttgaataagttggggtaagctttgttcctattttgagtttcttggatttaaataattttacttttgtttttacttgagtatgaattctttgatttgccagaaatgcagatgacctttcttaattcaattaagatattaattaaattaattgagatttaagcattctttgctcagttttagttgatttcttgtatttatgtagtttgcccaaaaaaatggttgaaatgtatcatgtgctgtggattttcttgatttatatatatatatatatatatatatgtgattccgggttggatctgttgtatcgaatgtatacatgttattgggttaaggattaaaattcgatttcgcgaacgaagtgtagatatctattgcaatttattgaacttacaatgtgtagttagtaagtattgactttgtaaccaaaatgcagccaagaaaaccgactatcccactgattttcttgcgttttgaaacatttcttcgaccgcgttccgagattttttgggattttatgacaattcgacaatcggatcttgtgttcttaagtatcttgattttgaaacaaccttgtgaaaatgaatgcaaaatttcacttatccattaccgatggtgtctattaggtcgaaaatttcaactcttgctcggttttatttaatttatccgtgaaaaaagtgtttgtgcgttttccatttatttaacgacaacgtaacgagaatctatccaaaatcagtagttttactcattggagaagttaggtttgttctgttttgtttgctgcttcaactgtctcttagacctaactttgccaaaacgggttttttttttaattaattcattttagagtttcttattgattaccatttttttatcaatcttttgcagaatcgaaaaaaaaatctccgaaattcaaaaaccga

SEQ ID NO: 101993 - DNA, 740 bp, Mimulus guttatus
  Intron number 3 from transcript mgv1a012124m (locus mgv1a0 11035m.g) derived from phytozome v7.0 (chr-ID scaffold_18; pos 1194728 to 1195467)
gtcggtaagtgactgcacttgtttacgtttttttttgcaattgatgatgtgctagaaagtgttcttctgattatagtccaccgataggcttagatcgatatataggtgcttgatgttttaggagactagaccactgccttttggtattaaatcaaagttccttataaacaaaatttctgcgtatgctagcgatgcattgtaatagaaacggtttcaaattaggtgttcataagttggatttccaaacaaggcgtatatatttatttgacttaattctgtgatactataaatctggtatgctaaaaataattcacatgttgatagatgttacacttagggaattcggaataggtttgagtttaggttaatgaatcaaagctgtgaaatgtgccttacgtttggggaagaaatgctgattattgatattatccgaatatcagagaccagaagatggattttgtttggatctccttattcatcattttcctttttccgttttgtgttggttgggggttgtggaagacaagaaacctttaatattctcaagtataataatttactgcgacagctctttgcacgtgttttgcaatacttaaacttggagtggtaaccttagttgctgacttgcttctacgtgtgatatacttgtctgctacacattctcaaaattttgtagatttttttaattggtgtaaaatcttgcagagcggtgatcttgggcttcgcttactctggcacat

SEQ ID NO: 101994 - DNA, 767 bp, Mimulus guttatus
  Intron number 3 from transcript mgv1a025878m (locus mgv1a0 25878m.g) derived from phytozome v7.0 (chr-ID scaffold_32; pos 458696 to 459462 reverse strand)
caaaaattttcacatttggttcttatcggcttggggtatgattttttttttttgtttcctttgtgctttcgcttatcatttgtacaaattttaccttacttccatcaattgaagttgaaactcttatgttatggtcagggtaattatagtactactcgatgaagtgaaaaaatgattagctattttctttttggatagtatcttcggctacgtaaataaaattgtctgtaaatcttctcaaatgccttcactgagatacaatcaaacattactttaatttttcaaattcttctttcaaattacattttagacatatgtcggttatacaaagttgagctaagatacaagattatatatgtcttcttcacgagcgaatgtgcatggttctatatgtttcactggattacgtgtgttatttgctggcactggagttacttttacttttacttatttcacatgaaatgttaacgggttttaagttttatacttttatgtggttgggcctaaatagaggaagatatctagattgcattgcacgagctttattaactgacgaatacatgaaatatcatgcaaaaagcaaaataaagtaaccagttatgggaaaggatgaatatttattatacaaattatcccctggctctaatcgtcgaaacagtgtgttcttttataggaggggtgcaaggcgtgtattggaggattgacttttagttgctttcgtctattttctaggtacatagtcctggtgctgatatagacaccttgtg

SEQ ID NO: 101995 - DNA, 632 bp, Mimulus guttatus
  Intron number 1 from transcript mgv1a025878m (locus mgv1a0 25878m.g) derived from phytozome v7.0 (chr-ID scaffold_32; pos 459687 to 460318 reverse strand)
ttatcaagactcgtgagttggaaaaggttggttctatatatccttctcatgagttttgtacatatgttctgctcagtttctttgtgtgattggggttgtttttggttcaagtaggagatagctattctattcgaaatacttatgtggtttcattctctaaggttcagttatggcattgaaatggaatcgggtattcattgtcagaattgaaaatgattgtcattcaatttgatcgatgatgcattttaattaggtggttaacttgattgtagtttattgatgttcttagggaggtaaaacagaaagaagacaagctacttcttttttataggcaaaatctgactttgttcgagggttttattgttatttatttaaaattcagtttcttttgtcccttcttcctctttttctcgagaaatggaaattctgtcgcaactacaacttgattttcgcttaaaattttgattgtctacagctacagttttcctccatttagctacttctgattgaaacaacattgaatttttcttagcttatgaattttgcgatagttagaagtaaatcaaatcattatcaagtggaagtggtttataagtgtgttctgacttgtgtatgggatcagtttcttgtag

SEQ ID NO: 101996 - DNA, 607 bp, Mimulus guttatus
  Intron number 2 from transcript mgv1a012407m (locus mgv1a0 12407m.g) derived from phytozome v7.0 (chr-ID scaffold_26; pos 119151 to 119757 reverse strand)
ctgagaagcccggccttcttcttctcggaaaacaggtcaattttcaatttagggctttttctctgaaattggatttagggcaaattctattttgtgatttataagatttggggatttgagggtttaatagctgtgagtgattattctaggctacttatacatactgaaaatgtaagctttttagccagtggcaatgttgcaattatgtgattaaaaccggtcagttgaagttcaatgaatctgagtgttctgaattcgtagtcccggtttataagctcagaacttctttccgcgcgtgttagaattcattcgaaaagaacggaatccattacaagggatgctggtctaagcttccattagagatacgaagttctcaacattgttcggaagtttccggaagccacgtttagcgtttggcagtcggatgtgtttttctctttgtgtcgattttttttcaagatactgatagaaagcattctttatttgcttgtttgagtttgtttctttatatgttgttgccctattatttatttattttaaaacgattcttgaagattttacgtcggatattggtttctgatgttgcgatttgtgtaggcaatcgacg

SEQ ID NO: 101997 - DNA, 709 bp, Mimulus guttatus
  Intron number 4 from transcript mgv1a012535m (locus mgv1a0 12535m.g) derived from phytozome v7.0 (chr-ID scaffold_18; pos 589740 to 590448 reverse strand)
attgctgatgtaagacctccctttctctctctaatattattttcgatttccgtggatttctaattttccgattttttttggaatgaaaattgaatatgtattcaatttcgatttttcgattcggatattaatttttgagaatccgattttgtttttttttttcaaaaattacatatagggcactggaatttccgatttcgttccatttttttcatctttatagggcaaattacggccacccctgagttatagtcaaattacgaaaaccccccatcttttttagtaatcacagtcatcctctcaactatgtattatcttacaaaaatacccctccagcggtaaatttagggatgttaaatccgtaaaaccgaaacgaaatttcggtacgccaacatttcataccgtttaccgaactgaatatacgatttggtacggaattaatcgaattacataaattttatgtaaaaatatttaaaatgaggggtgattgtaattaccaaaacaataagatttttttttcttcgtaatttggccatacctggtgcagtaatttgccttttttttattaaacataattgaaattaattttacactttcggaagaaaaaataaatcgaactttaaaaaaaaaagtgttgatccaatttgtacgatttccacccctacacacatttacgaaattgccatttcgaaaaaatagggcaagtatc

SEQ ID NO: 101998 - DNA, 1008 bp, Mimulus guttatus
  Intron number 1 from transcript mgv1a024334m (locus mgv1a0 24334m.g) derived from phytozome v7.0 (chr-ID scaffold_7; pos 2931822 to 2932829 reverse strand)
taagaaaaggtgtgcttgggtgactgcaaatactggtataattttttttaacgcttctttcacgtactggagatagttgttttgttgctcttatttgattttcggttttacttgttccttatgaatattatggtttgtcgttagcggatattaaatgttcgaatttcagtctacatgttttgtgttaatagatctgaattcggagatgagtttgcctcagaattcggggttttgggttcgtagtgtacattctcatgaatcttttgatggagggcatttcttgaactttttcttgatgttgtctcaagtttgatagcgaaggaatcggaagtgcacgattaaatccattcggtgataaatctttagcctacattgcagtgttacaatagcagaagcaactaagaatccagtactgtcgttgctgttttgtgttcgttagtgtcggatggtagttaatatccgtatacgtcactgtttgtccatttacggccaataatcatgtcgtgaactggagtaaattaaccctaaaacaaatatccgttgactgggtatttttcactaatggagttatcacatttgctactaattgttgaagtgtcagctgaaattgttgagtgaaagagaagtgggctggggtcctaactcaactgtaaatgcacatgaccgaatacctgccagtttcttaaatattcctttgttagaataaccctgtttagaacctccccatatcttggttttaatgtgaagaaaccaagttatagaaattcacagttgtcttttacgaggtaataaataaaaaaattaatttatgttgggaaataaatttgtcgtgttccgatttatttatttttttgcttgaagatgcagtgcacttctgtttaatttaatgctttcgatctagttgttattccattgatttattttagatgctatgtctttgacacgtatgcaactgctgctgtaattccttgttttgattggtctttattttcttcaaagatccattgt

SEQ ID NO: 101999 - DNA, 669 bp, Mimulus guttatus
  Intron number 1 from transcript mgv1a016602m (locus mgv1a0 16586m.g) derived from phytozome v7.0 (chr-ID scaffold_7; pos 684362 to 685030)
gagagaattcttgtgtggattttcttgcaattaaggtaattacttactatattgtctctgttggtttttcatcttaattttgtttgagtttgaatctctctgcttatgggttttgattattaaattatagtatgtgtttcttagcaatttttcattgaagaaacataccttttacctaaattttgctgccataaaaatttgatctttacttcgtttcaagcatgtttgttcaaacttgtttggatttttatggagcttccgaacttgtgtttgagcaattgagctcgaatcgatgagcaattgagtcgaactctaacgagctttaatcgagccaaaaaacgaattcagaacgaaaatacatgttcgagcttggttcgctatgttaacaaattgagctcaaatgaacctcaaatgaacgattatcgagtaagttgtttgatttttttcgaacaaattctcaaatgagtgatctttatttagttttcggattttcaatcgttaacgtatggatctgttcgtttcgattgaaagatgtcggctttttgttcgtagaacaaagataattatttttcttgatcttgagtttctcttccaacactaacatgtagatttttatttttcttgccaatttcagtgattgaaactacgatttaaataaaaaatacccga

SEQ ID NO: 102000 - DNA, 990 bp, Mimulus guttatus
  Intron number 3 from transcript mgv1a009217m (locus mgv1a0 09217m.g) derived from phytozome v7.0 (chr-ID scaffold_60; pos 1184386 to 1185375)
ttattttgtgcagattgctgcttggcgctttggtggtgagttaatgagttctatttcatcttttttgaatttgtttcggagtgatttattgtgttgttacttggaaattaggatcgaggtttaggttttaatttcggttttcggttttcggttttgcactgtgtttttatatgtatcttagatctgatgtttttgcatttgagttttctgcttttcttcaaggtctgagatgccaattctgatggttatgatttgactggcttgtctttgtggttttacattgggttgacttggagtatattagtcagtttcagctattctcacttatttgattgtctttcaattgattttattcaactcatcgtagattgatctcaactcacagaaatggtgccctaaatttgtttcaatgattgtgctactgcgtgtaagaatgctaaaaaggtcttctaatctaatcaaattcaggtcaaacttggataaatatggatatgccatctaaatttgacatatgaatctgctagatctttgttaactactgttgatgtttgagattagagtacattgcgctagttttttttctaacatcgtcagaggaacatattatattttgctcatcctttaatcattcaccacttcgtttagatatctgcatgtgaatctcgaaatggcatggatggctaggtttaaggtttgagtttgaaattattttcaagttcttccaatagcacttgtactgatagttatgcgcatctgatgtatatttctgtttcaagtacgtgcattctttcaagacatgaaaagctgagtggaaggaaatatgtaaatgatgtatttattccggatcagtcacataaggaatcgactttttattgtgttagttattgtgcattctaggatatttcgaaatattaacttgatgaatattgtttcttcgaagtttgacttctttctgggcttcgaaattacagtggaccttgtgtatcatat

SEQ ID NO: 102001 - DNA, 854 bp, Mimulus guttatus
  Intron number 1 from transcript mgv1a014390m (locus mgv1a0 14390m.g) derived from phytozome v7.0 (chr-ID scaffold_102 ; pos 726299 to 727152)
cgacggtaaatacacttaaaccacttttttttttttccagctgccacattttcttgaattttttttttaaggtttattttagggttagttattttttgtgtgcaataaccaatgtttaggacaaaagggttcctctgtttttttttgtttctttgtcttaatattttgagcgatgttaagaactaagtagaaaacagtgaaatttctggcttgagtctagatttgaagatctgccattgttttctccgacaagtttcttgattttcttgaatatgtagtttcattttagttattggatttgctgtcggttatgttagggccagattttttggttagtactctgtttaattaattaactaattaattaatgttttggtttaagatctaaccttctctttttcataatgaatttccttaaaaatgatttatttaagattagaattaaggttgcttgtattgtagacttccatttgaagtttggtacaactaaaataaaggcattgcttcatatgaaatgaaggcatcttttatattagatctggaattagtaattacctttcgagtgtgtaaatgaaattagtcgagccgaataagctacagctcgaagctggtaatgattagttcatcgattctcgatttctagttttttggtaattatatgagtctgagtttgaatgagtgataattgtttgcatatcttttatttagatatgtgttagttaatcgagagcttcgaatcttaatatgcttaatcaatcactcagtcggacttttaacactaatcttgataacgcaaaaactcgaatttttttttgatgcaccgtgattttgatcttataatttacgaaatgcag

SEQ ID NO: 102002 - DNA, 433 bp, Mimulus guttatus
  Intron number 1 from transcript mgv1a001039m (locus mgv1a0 01039m.g) derived from phytozome v7.0 (chr-ID scaffold_25; pos 302194 to 302626)
gttggtacgagtggctcgacccctccattaaaaaggtatttttctgttcttcgtttctctaggtttttttttcagaatttttaattgaactactctatttgaaaattggataattaaatccacgaaaataagtattgggagcacttggaagcttatgtgtagaaatgaaagtttgattttgtagattttgtataaatttcaagtagtgttttggttatttatttgaaaaacgagttggtgcaaatcacactaaatatacagttctgggagtttgtgtatcttggaaatgttcagttggggatttgggcttggaattttcagttcatttgaaaaaaaatgagttcaagaaggttgtagaatttggtgggatttttttggttaccttcaacagacaaactttcttgattacagactgagtggactcgagaagagg

SEQ ID NO: 102003 - DNA, 531 bp, Mimulus guttatus
  Intron number 1 from transcript mgv1a006937m (locus mgv1a0 03151m.g) derived from phytozome v7.0 (chr-ID scaffold_120 ; pos 13112 to 13642 reverse strand)
agattctcgtagattgcaatcaaatagcttcgccggtgggtctttttgaatatgctgcacacatcttcatatacatatatatgtatgtatctatttgggctttttggtgttgattgcttacttctggtagcatttcagacaatcttttgtgggttttatttattaattttttttatctggattgttattcttgaggatgaattaatggtggttttgtaaatttgagcccaaaattgtttctgggcacttttgattattcatcgaatccttgtttctggtgagtcttcaagtcaatatgatcttttgcaatccgattgattattttgcttttcttattgttgttaaatgatgttcatcaagactgttaatctctcttccaggtcctagttttaaggttttcgatttgaatttttttctccgaaaatggaaattattattacttcagtctcgagctaatatttatgatcagttcatttctctaacaagttcttaatttttccagaatcgatcgtgatcgtgctgcgagagtaa

SEQ ID NO: 102004 - DNA, 918 bp, Mimulus guttatus
  Intron number 1 from transcript mgv1a007317m (locus mgv1a0 07317m.g) derived from phytozome v7.0 (chr-ID scaffold_27; pos 815810 to 816727 reverse strand)
acaatatcgtataattactatgtcgattctatactgatatgggccggattgcctcgtaaacccaaacaataagatcttacaaacaaagttcatagtcgctcatgtctagtccgctaagccagccactagtacatatagggtagttataggtgatgaatgtgaatactaaaagacgaaaagtttgcagtgtgacatggactcatgaaaggtccactgggcattatacgaagcgataagatccgcgaaccctccccatttgaactaaccagaaacaattcacaaagaacgaaaaaactcgccttgggcagacgtgcaactcacaaaagatcacatcacgcccacgtgtgagtataataagagacaaaaggggagtccaccatcctcatcctaaaacaaatacaagtatagcctcaagaagcaaggcccacaacgcgtatttaaaatacaccttactcttgttacgttatttgatacgctcgacaatcgcaactgatttaatcgttggagtgttgacgccggaatattttccgggggaaatactcccttttatgcagatttttcaggtccaggaccacgtgagattcttcttatttgggcttcatttattctatattccaaggtcatctcatttctttatattggaatcaaccatatgggccacatcaactctaggcccaagtcatttctttctcttgtgaaaaaaaaaatgtataattttatgaatacaattaaatcatttaatataaaatctaaaagcaaaaataagaaaatagaaatgtagtgccaaaaaatacaagtatcgttaaaccccaaacgaaccgtaaaatctaaaacccctacggcggttctcttactatgagagaaaaatgatgacctttctcagccgtttcttccgccggaaaacaccgccaggagtta

SEQ ID NO: 102005 - DNA, 201 bp, Mimulus guttatus
  Intron number 1 from transcript mgv1a009133m (locus mgv1a0 09133m.g) derived from phytozome v7.0 (chr-ID scaffold_68; pos 821806 to 822006 reverse strand)
acggcgtccgcatccctgcgcactctaagatattggtactgcttcttctctcgacaatttaattttgtttttcctcttcgattttgattctgtttgatgaaggaagattagattttggcgtttattttttctgattttttttgggaaaattaattatttttaacaggcttcagcgacgccggtgctggagaacattataga

SEQ ID NO: 102006 - DNA, 498 bp, Mimulus guttatus
  Intron number 4 from transcript mgv1a018132m (locus mgv1a0 18132m.g) derived from phytozome v7.0 (chr-ID scaffold_4; pos 3408274 to 3408771)
ttcgaggtagtttactgatcgctgaaatatgcagtagtaattctatgattttctcatcttgctatgtttttgggtttttctatgttcaagtcacatatcaagtaatttgatgacttttagaaactgattttttaaaagtgcaaggataggtgtacttaactttgttctttgttattacttttatttcataataatgaagcatgctgatatgttacaatttctgtctctgagaacaaactcataattatgtgacttgattgaaaacaagttttattttgattatagttcttttctcctgttcttattgaaaaaaaaactctgttttttgtgaagtcttatatttcattttattttattcagtaaaatgaatctatatcaaattatataatatcttggtaactggagggtgtgatccgcacctctaaatttaaatttgctccttttttcgtctattgttgagactatatagtttgtgcattgtttatacagattctttgg

SEQ ID NO: 102007 - DNA, 784 bp, Mimulus guttatus
  Intron number 3 from transcript mgv1a019228m (locus mgv1a0 19228m.g) derived from phytozome v7.0 (chr-ID scaffold_89; pos 857196 to 857979 reverse strand)
gggccttacggacaaggatcttgtgcttcttagttgtatgtattcttgtatctatatattcatctctctctctctctctctctctctctctctctctctctctctcagaggcagcattcgcatggtagtacggtaatacatgcagagtttgtggcctttgtagtcggtgggcatccgaatcatatgatatgagttcgtcgggtggaaattggaaccgaatttctactaattttcgccctaaattaaattttacgatatttaaacaatactttttattcttttttccgatttatttgtttatcggaattggaatatatacaggatttcaactttcgatccgattctaatttttgaaaataatttcgattttttttacggaaattacacttgctatgtattttatattttaggtcaatgaaaatttataatttttcgaatttcgtcaattttgattcgaaattccgactcttctttattttttttagcataattggaacaaaaaatcgcttccgaaaaaagaaaactctgattttaattttcaaaagtactaattttggtcatttccgtccgatttctaaatgtttgacactatcataaacattctttctggcaaactcaaataaatatacatttgaacttcgataaattaataacgtcgctttcggataatctagtctttcactaaattaataaaattttattagtctcaattgtattaatgtgttgtaatttttgttttataatcttagccgcgcacacaatcggaaccacggcgtgcttcttc

SEQ ID NO: 102008 - DNA, 471 bp, Mimulus guttatus
  Intron number 1 from transcript mgv1a003241m (locus mgv1a0 03241m.g) derived from phytozome v7.0 (chr-ID scaffold_27; pos 960636 to 961106)
gtgtatcggtccagtggccggaaagtttgcacaaggtgaaatgatttacattatttttcaatttattgattccttaattgttcgattagaagcaatttttatgtagttggtttttgattttctaggaattttgggtgcattttagggattggcattgtctttaaatgttgatcttagcttgattattatgtgttaaaataagctaatggggctttgatgaatgctgtcgaacgtatggctttccggtcgaattatgtgttttgagctcgagtctaaatgtgaatgttaaattactcttttgcaatgtgatcggagtttacgattgagtctttgattttatgtcaatctaaaatgaacatacactgcatttgctgcaacgtattgcgaaagctcgtctaaattatctattcgaagaaattgaagggtaccattttttcttacacaatcattgctcaattctacgatgcagat

SEQ ID NO: 102009 - DNA, 625 bp, Mimulus guttatus
  Intron number 5 from transcript mgv1a000362m (locus mgv1a0 00131m.g) derived from phytozome v7.0 (chr-ID scaffold_17; pos 1561270 to 1561894)
tggcgagggagcagctcgtgcctcagattttaactgtaagtgtctttactgctagcagcaaaatttagatattaaattcattggcaactgaatcatgtagctttataggacttctaattattacaagacttggatttaattagattgaatgatgtgggaattagccttttgatctgtatccttaattttcaaccaacaagtattgtgatgaatatcatatgtctccatagtttgacttccgatgcacacaatggtgcatttcctacttctgttatgacttgatttgtgttgtaattcagaaaaaaaacatcttatatattcttatcgagcagagcctgcagactatattcagtttaagttgttttgttaagcatttataatgaagtcagggtttgaaaggtggctagtgtttagcaagaaaaacctcatttatactatatgtggtaatttatcaagatcagctacccaagaaaagttataatttaaactgtgagtgtctttttagcagagtaactattagaatggaatcaaggcaatataaacttactgacagcaaaactgttttgacttcttatatgttgtttttgcaggttctgctgcacttagcttctctatttcccaagaa

SEQ ID NO: 102010 - DNA, 843 bp, Mimulus guttatus
  Intron number 2 from transcript mgv1a003919m (locus mgv1a0 03919m.g) derived from phytozome v7.0 (chr-ID scaffold_195 ; pos 132851 to 133693 reverse strand)
ccaatattcaagcatccaaggtagtacccactctcgtaatctcgtccttttatccttttctttgatgcgttttgaatcgactttgaggatcaggagtttgtgtattttctaaactttctatttattttgcattagcaatgtgaaatatcgtgctcctttctgatgcgggcctataaagagtagctactttagtaagattgccttttttcgtatctgcctgatgtgctatgagtgattgcataaatctgtttcttggcgcttttgagcaactagcgagaatactgcctcaacccagggtttgggcaaagtagcataacaaaatcttcaagtattactctacctatataagtaaaactttgccatttagtttgaagcccaatcatacacgggaggatcggatttatgtaagtgtcatgacatgtatggttatagacaatgtgtataccaatgcttagcagtttttggatgaccaaaacactattgatggtaataaatcctaagcaacaaagttatactaataacagtgcatttctgtaataatattttctttaaaactcccttttgtccctcttgtttaacatagtataacatctgggaagagtgggagactattggtttaattttcatgctgtgtttctcgatgatgtttgtgatgtctcattatgtttatgatttttgtttgatgaatctcaatatctgcttctggtctctattagaccatagggctcggagtttttttcccttactccattttttgcccccattaccttattggttaaattcaacatatttgttttgcacttgtcaggctgttgcagatattatacgtactactttaggtcc

SEQ ID NO: 102011 - DNA, 575 bp, Mimulus guttatus
  Intron number 1 from transcript mgv1a003919m (locus mgv1a0 03919m.g) derived from phytozome v7.0 (chr-ID scaffold_195 ; pos 133701 to 134275 reverse strand)
ccccagtcctcgtactgagtaagttctccttttcgcttcttcttcctcgccattttacattctctctgattttcttctttttaaattcattgttttttgtaccaattcgcacggccgccatttcttacgttttcagtacacgcagtagatccattacacacttcagttgttatacatctctatgtatttgtatatgtatatgtatggtgaacagagcaagattcaaacgcaccgcgaatcaaatgctccgatctcgattagttttagatttggatgcacattcgaaaatgcgggtttttttgttaattttacctagggttttatgtttttaagtgaaggaaatgcctcttttgagtctgttaaggggtagggttgttttattgtgtagattttggacataaagttcacttcttccttgtatggttactttaataaatgtttcaaatgtactgagatatggagctcagctcgttcatggcttcgttcatgtaagtgttgcactaatgatcttgctcatatattttgatttcttttaagcagaagatacattgaagcgggagtctggaagcaaggtg

SEQ ID NO: 102012 - DNA, 569 bp, Mimulus guttatus
  Intron number 1 from transcript mgv1a019461m (locus mgv1a0 19461m.g) derived from phytozome v7.0 (chr-ID scaffold_163 ; pos 573149 to 573717 reverse strand)
cccagctccgcggcgccagattttccggcggcgatgtaatcttctatattttatcgttcaactcgatgcgtttcttcaatttttttaaattgtagtttctgcgtggataaaattttgcaatcccgttattattttagatcttcctcgttcaatttgaaacttcctttttgttcgttcctctcgtccttccgtgttaatgagttaatagattagcaaaccgagtcgtgttgtagtcgcaattttcagttttggggtttcatgtgtattttgattttgcgcaggtgagaccaggaaacgtcattgaaagaagaggtaatttttctactctgattgtattttgattacatatgaatacttaaccgcatacactgactgattattgtaacatggtttgtggatcttgggctgatgctattcaggaaagatttatgaggtaattatttgacagtaaattcttatgttttatgtactacgatcatgtagatgtagttatggttatggctcaatataacatacaaatgtgctaatgtttaggtggtaaaagcgcaacacagtacccaaggaagagg

SEQ ID NO: 102013 - DNA, 603 bp, Mimulus guttatus
  Intron number 1 from transcript mgv1a013957m (locus mgv1a0 13957m.g) derived from phytozome v7.0 (chr-ID scaffold_17; pos 1376685 to 1377287 reverse strand)
atcaggaagccgctactgaactcggcaaagttttggtactacattaattttttatttcccctttgttttttttttttttaatttaatcgcgtgggtggtgtgttgattgataaattaatggtcgagtcgaatctctgtttttaatttttttttttaaatttgtttaataggtttttgctataaattgttcgccctactctgttttccccaattttgtattatgaatttgtttgtttgtttgtttgatagcttaaaccattgtgtattctcatgcaaaatgtactgttgttcaaatatattgaatctccatttatgtactgttttttttttttctccatttatgtactgtttgtgaagattgcagaactcaaaatgaatggagcctttaatctacgaaataggaacagaattaactccttattttagtgcccacatcatgtgatgttgctttcattacaggccactcactctctctttttcaaatattattatttttttttctccaattgaatttaattttactctgaaaattggaactataaataaatctaaattatttggttgatgtgtttttgaaggtttcaaggaacattgatttggtgt

SEQ ID NO: 102014 - DNA, 1034 bp, Mimulus guttatus
  Intron number 1 from transcript mgv1a003397m (locus mgv1a0 03386m.g) derived from phytozome v7.0 (chr-ID scaffold_122 ; pos 465112 to 466145 reverse strand)
cgacctctcttcattgcgattcctttaattaatcggtgctctatttaatttcatttgggttattacaaattcctagtttgattttgcttactgttcgaatatttatctagaaatcaagcgttttattttgaatcagaaacgaagtccagtattaggtttccgatgaaccccttgggccttttggattttcgattttcagtttctgttttaagttgaattgatatatatgtatatatatgtatatgtattgttttcagtctgattggttttgcctttttgtttaatcatggttgttgcatgtaaagttatggactgattatgaatattagatgttaatttattccctggcaattggttttactttgtttgatgtggtaagtttgctaggttagtatggttaatttttggatgatagctatgtttgtgtttatgctactttctctttgcctcgaaataacgggcatttagctgttaatgcaggatctcgggcgattatgcttcttgttaaaaatctttacagttagtcgctatagtatatgaaaaagcattacagttagtcgtgagaacattgttgtctcgttatatttcatcaacggaatctcgagggcagattacaatttccccgttatattttcgggtgacctttccgttcaatctttggatacagttttaactgatgtcagtatattaaaaattagcagatgcattagataagttggacataagtttgaagagggggaactcgtaatgctaaaatcaatttggtttaaaaccgtacgtttatactttattcgtttttttatttctgggtcaaacctgctgggttcttgtaattgagccatagaaaatctttcgtgtagcagtagagattctcatttaatgtaatagtagcatagtgttttaggtgaacttactggtttattttctgtgtctcttactccaaatatatattctactttatgctccctgcattagtaacacccgtttttccctttacagaatatacgatacgggattgatcaaatatttgccag

SEQ ID NO: 102015 - DNA, 476 bp, Mimulus guttatus
  Intron number 1 from transcript mgv1a024968m (locus mgv1a0 24968m.g) derived from phytozome v7.0 (chr-ID scaffold_173 ; pos 49328 to 49803 reverse strand)
aatttggtagtcttgctcctcacaaagtagccgttacaccaccccccaccccacccccaacttcccctttccctcttaaatctttttcttttccgtgaatttaattctacttcttttatcaactccgctcctctcttcttttgcttaatactattttattaattattatttattatacatacacatatacatatatatatatacactcaacatatttatatacatatagtatacgtataggtggggagctatttatcagttgtttgtttgctctttccggaaatttccccaacgtctcttttttccatatatatacacacacacaattctccatcttcttctcttatttattacatcaaattcaattctttttaagcctgtaattctccccaaacagtatcaataataaaattaaataaataaaataaaaaataaaaaaaaaaatatgcttcgttccataaaccaccccgtcagag

SEQ ID NO: 102016 - DNA, 370 bp, Mimulus guttatus
  Intron number 1 from transcript mgv1a009713m (locus mgv1a0 09713m.g) derived from phytozome v7.0 (chr-ID scaffold_27; pos 1672135 to 1672504 reverse strand)
tgcgggcggcgccgccgcggaggaaggccttcccggtacgtgcttaatttttaattttatttttttccagaaccctactactgtcttagctttcctgaatgagtatttgctttaatttcttctgaattttttttccctactgaattttgtgcgtatgatatattgatgctgattgtatctatttctgaatccattcacttttttctattattttgagtttctgcaattcgaacggaattttgttttgcgagtgggatatttagaagaaacccttgtgaacattctattgtatgcgtttgattatatcacttcaattttcctcgtttgattttgggtttacgtagctgactgggctgtttctttttacagt

SEQ ID NO: 102017 - DNA, 711 bp, Mimulus guttatus
  Intron number 1 from transcript mgv1a005529m (locus mgv1a0 05529m.g) derived from phytozome v7.0 (chr-ID scaffold_33; pos 1371557 to 1372267 reverse strand)
accggaaccctgttgtaagatccccccatatctcttcccccattctctttctaatattcatgaatcaatctgatatgtttgtgtgaattatttccggggattaatattaatttgccggatgtgaatttgattgatttgtcacacttttggaactcacctgagctaggttcctttctattgtaaatatttgcatatggttttacaagttggaaaaatgatttgattatgattatcctcaaaacaacttaccttcttaggcatgtatgatatagttaacatactacacaagctatttcgtactcaaacgattccttctgtttgggggttgccaaattttaaataattttgtctttgttttcgtagttagtgtgtcatgggaattagtgggtctcaaatgatattagtgccatctacataaaacagaacagagggctactgtttgagattaattcccaaacactatgtagatgatcttgttctctgttttatcttctttcaatggttgatgaattactttctagagttaggaataacaccacacgggcattttgttatctcccaagagaaagatgtcactaatcacgtgctgaacaagttcaacatgcagaatagcttagataaaagattatctgatcgaatgcagtttacttttctactaccagactgtctgtacaagaaactaacccgaccattttttattttgtgatatag

SEQ ID NO: 102018 - DNA, 979 bp, Mimulus guttatus
  Intron number 1 from transcript mgv1a021444m (locus mgv1a0 21444m.g) derived from phytozome v7.0 (chr-ID scaffold_36; pos 512843 to 513821 reverse strand)
caagtggaaaaacctcgtcaacagatataaggtattaattaattaattatatacatacatgaatgtgatttttgtgtgtgtgtgtgtgtgtgtgtttttttggttaaatttatgtgccttgtttgaatgattaaattgatgtgttggttgatgaaatcaaatttgtatacgtgatttcgcgaatcgggaatgtagttttacccgatttttttttatcgagtttgcgcgtaatttctctgtgtaatggtattatgttattattgatgttcgaataatggaatctggattaaattgagttaaaagctcgatcgaatttgtattcgggtcgaacgcaaataaccgtttctgtttgtgcatgtcgaagctagttgattgatcgcagtaatctctttttctcgcgataaaatttgttccaaatcgaagtatcgtgagttctttcgtggtcatgattattatagtcacgggtggcttggataaattgcgaaatctgagttagtcatatcgtgttggatttcgtgattttaaatgttattattgactcgtgattgtatcgtgcttcggtatttgcggaaattattatgggaaagtgaaatgttgtaaaagaaatgatttggaagtttgttgttccataaaacgaggctcgtttaagatttgaccgtacgaataattttcccttttgttggagttgtgcttatttcttggctcaacgaaacgaggaaacattttgtgggaaacaaaagcccaattaatgaaccctcggctttactttagtaacttctccgagtttttatcgaaatcggagaacggtaatattttgctctttatatatctcaattaaaaatcggatcttgaaagtgagaattttcatagatgtcgcgcgtgtgtaacgagttaatcatttagtcaagttatttaatttaatataataatcgtttcgaatttggtgctcgtttaaaaatacaggggcaagaagcatccg

SEQ ID NO: 102019 - DNA, 598 bp, Mimulus guttatus
  Intron number 2 from transcript mgv1a016291m (locus mgv1a0 16291m.g) derived from phytozome v7.0 (chr-ID scaffold_122 ; pos 190228 to 190825)
ctgagcctcttgatttcttcatttggactgttgaggtagtaaagctttcatttttctttttaattcttcaattcgttttgtttgatcttgttttttaaattttaattctttggatcttgtaatttttttgtaattctttgtgtatttattttattttatttgattatttacctgttccagttgatcaaattcttgctgcttgcttggttagtgttgattttgggggtgggggtgttgaaataatcatgaaaatatattttttttaattgaagtttttgtgtttagtcaatttatggtgtactgattattttataatgttttggtgatttttagtttgaatcttgactcttgtttctaatgaatgtgcaaaaaattgggtttgaaaactgaattgtaaaatgagttggttaaactagcatttgatccatgttaattatagagctatataaacaaattactctgctaagaaataaaatatgcttcgtgttcgtttgaaggacctgaaaaagaaaaatagaagacagggtaagagaataattgtttaatggaagtatttctcgatcaatttttcgtttttttggatttatttgttcatagg

SEQ ID NO: 102020 - DNA, 817 bp, Mimulus guttatus
  Intron number 3 from transcript mgv1a016291m (locus mgv1a0 16291m.g) derived from phytozome v7.0 (chr-ID scaffold_122 ; pos 190983 to 191799)
cataactttgtgcaaggagctcagacgaataaaaggtccctttcgccctctcttcttacccttcttcctctttatatctgtcttaaccgtgtaaaatatcgtccgatcacatcttaaactgcatcagttgctcgtgattaagttaatggtccctcgatgtttatggtatttctagttgaatctctaatttgtcagttcaaaagacatagtgcctgtttgttttcttaattgcaaacgtgatggatgatcattactacataatgagttgtaggatttatatgtttagtgtatagactgaaacttgattattgtattgtttttgttatttattctttgatttcaaatgcggatcgaagaaaaagccaaaaaaattatgacatcctccttaactcatccactacttacaccaactattgcaccaaatataaagaccaaccccagcatctatggagatgatataccaaaagtcaatacgcaaatgtctatattgccctcaccagccacatgaccgataatttcaaaaaaaaaaaagaaaaaaaagattatatttatagacatagcagttcattatggggatctctcctgttatacacttatactattctgcctaatttgtttgtgaaaaatatcatctgattttatcgttctgatgttcttgaagctcgtgctcttggtcttaattacatcaactatttctgaaaattcagcacatataacataggaccgtctctattaacatggaattgcatattttttactgaatgattataatcatgcatcagtggcttgcttgaaaggggagcaaaaggtacgcagg

SEQ ID NO: 102021 - DNA, 713 bp, Mimulus guttatus
  Intron number 1 from transcript mgv1a002126m (locus mgv1a0 02126m.g) derived from phytozome v7.0 (chr-ID scaffold_36; pos 1411677 to 1412389 reverse strand)
aaaaagattggtagttcattctagctccctttttagtgctttgattttcttttctttttcttccctgaattgaggtagtgttgattttgaaattgatgaagtttgaaagaatggtgtattacaagattggattaactttgtgagaattgaggattcagctattttggttggaatttcattgattgacttgttgctgctgtgcacagtagatgcttgtcttaatgaccgatgattactagtattcagtagcttatatttatggaatttctagcataaaagtatttggaggatgtttgttctcttgagctagtctccaagcgatgctctctagttatatccttgttatgaataagaagtgccgtatagacagctttgttaaattggaagtcgcttgggctccctctaaagtctaaattgagtaatcataaatatagttacattttagtttcggagttaccaaaaagacctaataacttgtgtttgtgttcgtgcaaaagaactggtttcacttgtgtaatcttagtcacatgtcatgactactacattgtaacatttatcccttgtattgttgtgtatctttacgtttcccatgtctagcaaaagtctcgtatctttctggttaatccgttaaattctatctaactgttgttcagttttattaaattccttgtcgaaatactggacttattttgtataacttaacaggtgggaac

SEQ ID NO: 102022 - DNA, 410 bp, Mimulus guttatus
  Intron number 1 from transcript mgv1a002664m (locus mgv1a0 02664m.g) derived from phytozome v7.0 (chr-ID scaffold_2; pos 2199944 to 2200353)
tcaactacagcaacccccagggttagtattctctacttttttttctcttcttgagttatttcagattttgtcaccttagaaatctatcgttacttgatgatttgtgtttgcatgtgttttaatttgtgatgcatctcgttaatctgtgtttatctggtgtttttgatatcatgcggtacgaaaagttttttttttttttttttctttttttatatatatatatatatatatttatataaaaaaattcttattaaaagtgatattttgatatatgattgtgaatgtttgtatccctttaagttaattacacgaattaaatcattgtaatgattaaaaaaataaatcttttacccgtcgtattgattgggattacagctgcaagggctttggaatcgttgaactttgctcta

SEQ ID NO: 102023 - DNA, 433 bp, Mimulus guttatus
  Intron number 2 from transcript mgv1a012866m (locus mgv1a0 12866m.g) derived from phytozome v7.0 (chr-ID scaffold_293 ; pos 105146 to 105578 reverse strand)
ttcctcaggtaattttccgtttccccctaaatttctgtatctatatgtgtgtatctatcgtctgtgtatgttttattgtgtgatagactgagtggtgattaaataaattgggagtttgttttctatctggtttgtgcatagtgtatacttgttttaatttgaatttcaatcttttttctatacctaatcgcatttcggattttagaatatcccccaatttcaatctgattcttgtgagattgaattagatcgagtatgaagccgaatgcctattcggtaaataaagactccttgtttgtgaatccatattagaatcttcttgaaagccttgaatagacttgttgtttgccgattttttttccttttgtgttcagaattttgattatatatgtgtggttttttatctgtagttgcacgttcgcaagtgcaacga

SEQ ID NO: 102024 - DNA, 549 bp, Mimulus guttatus
  Intron number 3 from transcript mgv1a008076m (locus mgv1a0 08076m.g) derived from phytozome v7.0 (chr-ID scaffold_79; pos 392426 to 392974)
agaccctaggagaagagtattgtgacattactcaggtttgcatttctcatttttttttttaattttactggtgcatatgcttatgcatgaggaatctatggagctaagattgaatcacaaagacaacgtagaaaacgatgatgtcaaccacttagatggaggaatgtttgttcagcgtgacatatatatcatattatattttctttgttttgttaaatgtgtgtgcatactatctcttctaagaaatgcaaacaagaagatcttaacagatacttgcgtttggaaaattaatcatctgcacacctctgtaatatttttgctgaataatcttcagcatgattcaagtccatgttacattgtatcattcgatttatcaatcatgatttggtttctaatacgttagctgcagagttgataaaaaggggttgttggtaatccaagtttaaattgataaacaagaaaggtttgaattattttgcattttaatacatatgcttggaaattcaatttgtttagtggttgtattgcatttgcaggttgcacgacccc

SEQ ID NO: 102025 - DNA, 896 bp, Mimulus guttatus
  Intron number 2 from transcript mgv1a015679m (locus mgv1a0 15679m.g) derived from phytozome v7.0 (chr-ID scaffold_25; pos 296412 to 297307)
gttggtacgactgcctcgatccctccattaatacggtattttctattcgttgtttctcgcttttcagattttttgtttttttttttctaccatcgttgctgatatatatatttgataaaacttttattccaagctgctcgtgtgaatagaattactcaaccatgacaaagtattttcgaaaacctggaagtttatgtatcgtttgattttgtatatagtgtttttatctcgatgagttttgttagtttgtgatcgatgatcttacaaaaaattcctatggaattagtaattaagaagctgtttatttgaatttgtgtaggtggtgtttgcagaactttatttaaaagttgaagttagtgattgtgagttggattgaaattaagtgcttatttcgaaaagcttggggtgtttgcaaattagctgaaaaatcaactaaaaacttcttattttaagagaagcaaaaacaaaagtttgttttgcaaacacataaaaacagattatgtgcagaaaaaaactcataatctatttctaaaaacttttgcaaataccaccgtagtctactttatgccttcttgtgatgttgaattagttttaaactagtatttcatatatatgtgcgttttagataaaataatcaaacgaagactttgaataattgatatataatgaaagaaaatatagataagaaaattgtgatataaaacataatttaatttgttgaatacattgtaaattttctgttaataatttgccctcacaaattttcgaatctatgaaaagaatctcaactcgagaaggctgtagagttgcgtttgattaccttcaattatatatatatggattcttgataattgacaaactttcttgattgcagactgagtggactcaggaagaag

SEQ ID NO: 102026 - DNA, 400 bp, Mimulus guttatus
  Intron number 3 from transcript mgv1a012704m (locus mgv1a0 12704m.g) derived from phytozome v7.0 (chr-ID scaffold_48; pos 799212 to 799611)
ggtagaggtatcttcaactccgattctatatttactgtgtgtgtgtttgggtagaggtatcttcaacaccgattctatagtttgtgtgtgtgtgtgtgtgtgtgtgtgtgtgtttatgtgtgtgtgtgtgtgtgtttatgtgtgtgtgtgtgtttatgtgtgtgtgtgtgtgtgtgtgggtgtttgagtattttgagtatgtgaatctgtgtgttatatttcttctattgtaatgtaattgttatttttcgtctattgtaatgtagtactgagagaatgtggaattgttatctgaacgattttttgattttatttgattttatttatttcattgtacagaaaaattgaaaaccttttaatctttttgtttcctggtgattttaagaacaaacgatcggga

SEQ ID NO: 102027 - DNA, 1014 bp, Mimulus guttatus
  Intron number 1 from transcript mgv1a025549m (locus mgv1a0 25549m.g) derived from phytozome v7.0 (chr-ID scaffold_274 ; pos 212962 to 213975 reverse strand)
gtgttaatttaatgtaatcttctaaattatgaggtgtattctccagtttatacccgttttatcccattatacctcctcattttgaaacgagatgatcataagatgtgtttcttagcttttaaatatcagattgtgacacatcagaaactatctttttgcacaaaatgagtacaaactagagaacattccatgaaacctaaaagattctgttgaatttgacacgataaatgtggacgtgtacaaggattcatacttgggaggtggttgtaattacccaaacaaaatgagatttttcgtaattcgatcttatttcgggggtgatcgtaacttacccattatttattatagcttaaatgacgaatagttatatattagggtaaatagaaaatcacaatcaatttttttctttttttagaaaattgtataaattaaaatcacaatgtaaattactgattttgccagattttactccataaatcttgaccgtttgccaatcctatacaactaatttgtttttgacaatttatacaactaattaagctgaaacataatttgtgccttatatggatataggaccaattaatcacaggtcaacgcaatatattcttttgtggcttatatttttgaatcatttccaaagttttcaactacataaatatatatatactaacacatccgcaaggtattaaatttgattatgtaggctataaattgttgtgatatgacaattataatcaattaccaatcaaattttcatataattgaggtaaagtaattcgcagattgcgtctttacatagcaagtagttactatttaaactcaataaacttgtcaattttttttattgcaaagaaaaacgttaataaaagtatatagacaaagctgcaatgaacaaaatcaatgttgtgtctttgtttttattttgttgcattttttgtgttgtatatggttcggagacaagctccaaactaaatggtcggaagcaagctaccgattggtgcatttcccgaccaa

SEQ ID NO: 102028 - DNA, 771 bp, Mimulus guttatus
  Intron number 1 from transcript mgv1a019431m (locus mgv1a0 19431m.g) derived from phytozome v7.0 (chr-ID scaffold_6; pos 3926438 to 3927208 reverse strand)
gaggttagtatttgcacttcttaaatcttcacattttcctatatattatttgtgggaaaaatacagtttttattcataaagtttgcactaattttatttttggtccctcatgttcacaaaaaaattacatttggaccttatttacaaaagttcaacatgtttagtcatttcagtcaatgattcgttattactaacggaatcaagcgtgtgcccttaactggcggattaatggtaaattgacgaaaatgaccaaaagtgttaaattattgaaacatgaggtaccaaatgtggtttttgtaaacatggaggactaaatgtgaaatcagtgcaaatttgagggatgcaaactgtaattttctctattattttttccaaaataagtatagttgtggactgatgaattcaataagtttttgttttttcatgaataaacatagaatgtgactgaaatattcttcccattaattttatttccaccaattctctgtcgactaacaaatcaaacccgaaaagtacaaaactgagagaactgtttggtacattgcatcattggaattgttaagtgacagacaatatcatatgagaaaattagttatctaattaaaaaaaaaccgacagtcaacaattaattagaaacgaaaggagtaagtagtttaattttcttgtctttacattccaatttgtgtctaactatagatacacacacaccttgataaataaggattgaacaaaactgcagggcgtattaccatagaagatcttgccacagcg

SEQ ID NO: 102029 - DNA, 714 bp, Mimulus guttatus
  Intron number 1 from transcript mgv1a012784m (locus mgv1a0 12784m.g) derived from phytozome v7.0 (chr-ID scaffold_55; pos 948509 to 949222 reverse strand)
tccttcccttagcgatattatttggccctctgctggttagtccagtttctctctctaaacattattttttttatttttttaaagacattgtcatatatcatatatatgcatgtgtgaaggattgagtgagtggtttgaaattttccgatttgattatgaactctgcaactaatttattacatgaataaaaaaaattaattataataataagagcaaattacaaccaacctcctgagatagggttaaattacgaaaaatctcctcctgtttggataattagaaccaccatcaactataaatcttcttacggtccacccttgcggtttcaaatttagtggaatctactagattatatggaatattctcaattttctatatgttttatcccattcgagctccacattttgaaggaaatgatcataagatgtgttttttggcttgtataaatcacattgtggtgcatcataaactgtattgttacatatagcgagtacaaattagagaacattctacggaatctagatgacggaatctagatgattatgttgagtttgataccataagggtgaagatgtaagaagattcatagttgatggggctatatgcaattatccaagcatgaggagttttttcgtaatttgaccatatgtcaggagtggttgcaatttaccctaataataacagttataatgtaattcaggggcttttgctgca

SEQ ID NO: 102030 - DNA, 532 bp, Mimulus guttatus
  Intron number 2 from transcript mgv1a011756m (locus mgv1a0 11756m.g) derived from phytozome v7.0 (chr-ID scaffold_22; pos 909823 to 910354)
tacaagtgagttttttccttcatttttgcatccatcagtcagattatttgagttcatttatgacttaaagcctcgaaattaaattttcgcaataaattccaaaagttgtagtatatcctgttagggccagatgctcggcatcgtatttgagatacgaaacaatcacattttctatttatgacgaggaaataccgttcatcttttgttctgtttctgtttcttcctacgaaataactaatgcaactctgcaatctcgaaagttgtttttagaattgttcggaaatgctttcaaaagtttcgttgaactcataatatgcaataatccagcagtactgaaacggagattttttttttcttatttgagattcttggtcattagtaattacggggagatgaacaatattttgttggattctttttcacagagatgatggtgcttttttttttcccacgtttttcttatttgagattcttggtaattagtaattacgggaatatgaacaacatatgttggattcattttttcacagag

SEQ ID NO: 102031 - DNA, 625 bp, Mimulus guttatus
  Intron number 2 from transcript mgv1a001510m (locus mgv1a0 01510m.g) derived from phytozome v7.0 (chr-ID scaffold_137 ; pos 85399 to 86023)
cagattacagccgcttcttacgctactactcgaaggtacatctcgtcaactttttgcaaaagcttttacaatcagcaaaagtcagtgattctgagttaagtgtagaataagcggaatttttttttcggaagtgcaaaactaattcgaattccattccaaaagaaaatcagaaaaaaaaaaatcaaaattctgatattggaacgaaagaacttggtccgaaatccgaaaattttggatcggaatcggcggaatttgtaattttcaattttttagtcacctataataaaaaatgcatagtaatattgatacttttagcataattttagaaaaaaattggttttttttttttttttttttgcgaatattttcggaaattgaaatcagatcggaaatcgaaatcaaatatgtatcccaattccgttctcaaatcaaatcagaaatcgaaactatggggattcagaatgacaaatgttattccaaaatcagaaatatttggataagaatcggcagaattcgaaattttcgttgcaattattttgcactcctactcatgacaaagtaatatatataataataataattatcaatgttaattattgcaggatctcccgaaactaaactatca

SEQ ID NO: 102032 - DNA, 839 bp, Mimulus guttatus
  Intron number 1 from transcript mgv1a011883m (locus mgv1a0 11883m.g) derived from phytozome v7.0 (chr-ID scaffold_44; pos 587108 to 587946)
cagatctaattgtggtcactggttttgcggcaagttcttttcttttcttttattttataatttacttattttgtaacgtttatttctttgaattcactgggagtactttagttagtatttggtgttttcgtttatgttgtgatttttttttatattgaggttgttacatggaattaattataaattctaattggaaaatatatgatattaaaaattaggacagatgcactttcatccaatgaatttttcattttcgcaccttttctcctaaaaattcaaaaaaggttactcccgatattattttggttgcagtttgccctagaaaaggggcgacgcgcaaaaaaatagtgtttttaaggggcctgtagcgaaaaaataacatttactggggcaaagttaaagggactacgatgcaataaaaatactcaatttcgatcgttaatccattaaaggtttgctacttttaaaattttgaggggtgaaatgcgaaaattagaaatttacaggtgtgatgtacaatttgccctaaaaattaataactgagtgcaaattgtaaaccgagttacaaattttatgataactttcggcttctaagaaacttgttatttatttattattttttttttatatgtagagatttgttatttttcgatatgtttttacccctatgttatgttattataaggaggagatagcttttattgcaactcttgattgctaaatgtgacatatcttatttaatttgctactcattacttaatttttttcagtgatcattgttttctcaatctttcatattttatttcttttatgcagcaaattgcatattgcagttttgg

SEQ ID NO: 102033 - DNA, 926 bp, Mimulus guttatus
  Intron number 1 from transcript mgv1a005955m (locus mgv1a0 05955m.g) derived from phytozome v7.0 (chr-ID scaffold_32; pos 1530100 to 1531025)
tgctgcctctaagcttctcattctcgtcggcgcaggttcttcccttctctctctacctctctctctctctctctacttacatatttgtttgtgcctgtaatttatttgtacggtgcttcagttcaaacttagttttttttttttttttactgggtcatggaattgaactcagctgatttcttcgaaggtttgaagtttaactcaatgttaaatcgcgattgattatatttttaagttctattaactggatctgtcattttgagtagccgatttgatttctccttcaaaacctgatttcaaaaaaaaaaaaaaaaaaaaaaattaaacgaagctgaaaaaatcacctggtaaacataatgccgctgttctaacaactcagttgccccatatgtgcttcgccgtttcaattcactgtcgatcgtcttaaatttttattaggtatgaagacgaacacgaatcgtttatttgatgcattgattttgcttatttacatagattttggtgcatagaattttcaagttcaatgggttgtttgtcaatttgtgttaaaattcaagatgttgagtacctaattaaagtttagacaaatgtgcccaagtttttttcgataagttagttttctaatcatgcactcctagttaaaagctatactcactagttccggtaacttttaacccgacggaaaaagcaaatacgacttgcataagctttactctaaacctatatcgacaaaatttatgcacttctggatatcgaaatgtacaaaaagaactgcaaatgtcttgtatcaatgttcttcaaaataggttgattttttttttacggaattttatgaaaaggacatggattcaccgatttttcgtctttcgttgtaaatccccttttcttcaggttcgacagttgactaaagagaccgaagagtcaag

SEQ ID NO: 102034 - DNA, 213 bp, Mimulus guttatus
  Intron number 1 from transcript mgv1a003816m (locus mgv1a0 03816m.g) derived from phytozome v7.0 (chr-ID scaffold_326 ; pos 158657 to 158869 reverse strand)
tctggaaggtcaccgttatacaaaaagtatgtcaagtatttgattatttgttttctgttcttctctacagttttatggcatctttctgcctcaccttctcgagttacctgaaacaatcattcagtaaattatttcctgtgactcatatctcttttcctacttttgtttctgccattagagcgttcgtcttcttcagctcacctgttgcccggg

SEQ ID NO: 102035 - DNA, 474 bp, Mimulus guttatus
  Intron number 1 from transcript mgv1a012697m (locus mgv1a0 12697m.g) derived from phytozome v7.0 (chr-ID scaffold_1; pos 254110 to 254583 reverse strand)
ttgatctcaaggtaacgtgattttacgccgtttttttcactcttcaccgtaattgcgttggttgtttttgtttttgtttttttttttttttttttaatagtgtaattgactgtatttttgtatgtacaatggctgtcaaatgttgaaatcgatcgagttattctatttctctttgtgttatacggccatatcagtgggggtgtttttccctctatgcacgtgatcatcatattatgccgtttatgctatttataacactgtttttttgatatgattcttcaccttgaattgtattggttgtatctctaaattattcttcaattgtttgttataaaattcgtgtgtgtgtgtgtgtgtgtgtgtgtgtgtgttgcttgaatttcgaagactggagattagtggatcttttttgctaattgtttttacttttgtttggtgtatttaatcggaatttttctcgttctcctaggacaa

SEQ ID NO: 102036 - DNA, 627 bp, Mimulus guttatus
  Intron number 3 from transcript mgv1a014981m (locus mgv1a0 14981m.g) derived from phytozome v7.0 (chr-ID scaffold_128 ; pos 478392 to 479018 reverse strand)
tacgctgctcctctctctgccgtacccaccattactctcatgcaccctcatcatcaatttatatcaatatttcatttcattaatcacatcatgaaataaattagttttaactagttttatttcgatacaagaatttcacattatcgtttaatttttcgcaaagtaattttgaaattaatacatatgaatgtttttttttttaaattgagttttgtgacggatttaatatttcaggatttaacggattcgcgcctctgtgtttaatttaattcttgcagaacttctagtgtgatttttattagtacaatatttttagcgaacattcttttcaagatataccatttagtgagttgtgtgctaaaacagtgcattatagggaaatgttttgcaactattaataacacgaagatattttttttttttcgcgatttaaaacaacattttgtttttcttttacacaattcacttattatggagtaatatttaaaaaaaaattatgttcataattcttttataaaatcctaatcgttgaattaaaatgcattattgaattcatctatcccatttttcgtatttccttttctaaataaatgtagctatttttgttgatagagaacggtgattaag

SEQ ID NO: 102037 - DNA, 646 bp, Mimulus guttatus
  Intron number 1 from transcript mgv1a004802m (locus mgv1a0 04802m.g) derived from phytozome v7.0 (chr-ID scaffold_3; pos 269673 to 270318 reverse strand)
gattcccttcatctctaaaaccgtcgaaaaatgtaagctgtagatgctataccgtatgaaaatgtatcacgacagatttacatgtaatcaagtgttgatctgtgttaattaaacatgtgtattgaatatataaatgtgttagatattggtcgatgaagtgttcttcggatgtagcgtagagtaaacattccacgtcatgtattgaactatttagtcttttgcagttcttgctacatatttaggtaatatagtgaaagaataaacatatgtctatggcaattcttagatactatatacggcttaaatcatagatcgacccgatcgatgtgttaattttgtgttgtagttgatattttgactaggcttagaagtatattgatttttttcttttcaataaacaaataatgttttgtttctttaaattttgcatagtggacccaaggcataaatcttttctttgatactggttcttagttctttctttggttcaagtgctctccgctgtattttccaatttgtaacaaattttgatttaaaaaataaaaataggatttctttcgagattttgtgattttgagattttgagctcttagaggattcaagaatggttaatttgttggctctatttgtaggtccgaaatcgatt

SEQ ID NO: 102038 - DNA, 577 bp, Mimulus guttatus
  Intron number 1 from transcript mgv1a009664m (locus mgv1a0 09664m.g) derived from phytozome v7.0 (chr-ID scaffold_12; pos 1816204 to 1816780)
actctcctccgccgattcaccagcccacaccacgtgtatgttaaaaaccccaatctccaggatacagtaaaccctaaaaatagctcatctggtataaatgatccttgggtttccattttcggactcaacaaatattcacaactctgatttgtcggcatggaggattcgaattttgtgaaggttaaggtatgttaaatattatctggcggtaattgtattttctttttccgttaaaaaccagacaactatctcaaattgtatgtacagtgacttcccgatatttttaaacttgcagaggggaagatcaaattcaaatactgatgcagaaatcattaaaataaaggttaatattgtgttatgatttatgaaatagctatctaaccatgctcattttttttttatttttttcattcagaggaatgaaactccagatgatatcttctcagcacttctcaaggtctgtaatctttttgctatcttttgattagatatttaatgaaaaaaactagtgacgtaagttttttgtctgttttttttttgtatttcctgaaggaacaaggtctcgacaaagattccg

SEQ ID NO: 102039 - DNA, 557 bp, Mimulus guttatus
  Intron number 1 from transcript mgv1a002875m (locus mgv1a0 02875m.g) derived from phytozome v7.0 (chr-ID scaffold_4; pos 668212 to 668768 reverse strand)
gctgtctaaacaacataggcacggagattacgcgagtatgtttttttttctcgtttcgttgattctcttaccactgttatattgattctgtgtgttttcttgcatacgatgtttgtgaaaagattttgaagtttatgtttgttgaatgtcctcgtctgagtatcacttcgatattgcatttttcttttgcagagaatagtcaaattttagtagactatgtttgacttgattgtactctcttctaatgcaacccatctgtcaccggttagctagttaaagtaaaatataccgatacaaatcctcttattttgttgtaactaagtctgaattcttacttcttagtgacttccctaagtggtgtagcatttttttcgtttcccctctcgtttacagtatgttgttttttaatctagcaactgttttgaacgactttcaaataattgccagattgatatgttatgatacttcagatttatcgaaatgcgtaagagtcacatatttatatgattttgaagcttgactcgttgtttcctttcttttcttagtgtcacttaaag

SEQ ID NO: 102040 - DNA, 885 bp, Mimulus guttatus
  Intron number 1 from transcript mgv1a014899m (locus mgv1a0 14897m.g) derived from phytozome v7.0 (chr-ID scaffold_1; pos 2184928 to 2185812)
atatatatccttctccgatcttatttatttcctcggtcaatttcttatttattcctcggtcagtttcttatttatttattttttaattttttttccattaattaatttctttgtgtatttatgttcttcttatgcgtccacagacggtggatctgccgtttcagtaaatatttcattttgggggttttattttatattaattaatattgtgaaaaaaatgattattaaatgaacgtttgtgtttattttttatttattggagaataattttttttctatttaatttttttttgtatattttgcaatagggaggattttatttatttatttgttggagactaattttttttctatattttttttttgtagattctgcaatagggaggattttattatatttgaatgttgttttgattgtgtttgaggtgtgttggtttgaatttttcgggtatttttttttttttggtatattttgcaatagggaggattttattatatttgaatgtgttttgtttgggtttgaggtgtgttgacatgagttggtttgaatttttcgggtaatatgcgaacgcgatgaattttgtcgatgatgtcatgtcgttttacaccgtagatataggcacaatcacaaacatacacatgcgtgtgtgtaaaagttagtagcttacacacacgcatatatatatattacttgatattatcttgctttcaatgtgggattaggtgttataacaatacacttgtggtatattcttttccggacatcgttgatttaaaatgtacgttagcacgtattgtttgcgtttctttgttcttttccttgtctatacgtacaagattatcgcatcaattagtcgtaacaaaatttattccagaaatcacgaa

SEQ ID NO: 102041 - DNA, 920 bp, Mimulus guttatus
  Intron number 1 from transcript mgv1a004174m (locus mgv1a0 04174m.g) derived from phytozome v7.0 (chr-ID scaffold_36; pos 633400 to 634319)
ttccggctcaacccatcaccggcgccagtcagcaggtgtgtgtgtgtgttggtttttgaattattttaggaaagttctgtagatacttcgatttcaacttggaacatttttgactgtatatctgacaattttgaggttgtatataatttcatatgttgtttaatccactaattaacattcgattatgataattggaagtggttctggttccttaatgtatatgttttgctcagtttgtgccctctatttttattattagatgataataattgtgtttgcagttgatgcttaatatgtatctttgtttcatgattaaggaataaaagagtgtatatgtaagtatgttatgtaattatagtgtggactctagtttttgctattcagtatcatgtgtttttatatatgcttcttttataggtagttgtatacaggatttggtgtgcttgctttgattagtttagaatcagttttctggctcataattcttttgttaatatattttaatccactaatgaacactcaattatgataattggaagtggttctggttcgttaatgtatgtgaaagtgtatatgatgcctaatatacactgtggttgcagttggtgcctaatatgtatcttgtttaagggatttctgtgtttcactcgttgatataatgttaggatattgtgtactcgtagtttctggtacttaggtaacctttgtttgcatctgtgattcttttatccatatttgtatatttggtttgacacttgcttgaatagtttataatcaattcaatggctcttaatttttaccacttaggcagacgtgaatggtagttattttattcttcgagtctttatctcatgaatttttggttaaatatattgactcttgtaggtggagattcaagtgaggaaactttattgtgtgaa

SEQ ID NO: 102042 - DNA, 734 bp, Mimulus guttatus
  Intron number 1 from transcript mgv1a014986m (locus mgv1a0 14986m.g) derived from phytozome v7.0 (chr-ID scaffold_130 ; pos 480617 to 481350)
gcgcgtggggtttaatcttctcaatcgtttccaaggtatatttcttaatctctcgaattttccgtttcaatttcatgtatgatttaggtattttcgtgataattccaaatcttagttcatcgtatggggaatttagttcacaattttacctctcgaaaagtaagtgattttgcagtaattgtattcgtttatggaatcattttacttgaagaacacagtcttgttttttttggttgaatttagtttttgctcactggaatgcgcataattagatgagttattaaagtggagtgaggtaaagttcggtgcatcgaagcttcgattttgtgttttgctgtagtctctaaaattagaaataaaacagacacttcaatatgaagatttgctcgtattagccagtcacgaagttagtaatgggaagattttgattggttaaatgaggcgattctcgtatccgacttttttaattttcactggagtctgcgtaaaccaaattcgcctgtcagcttgtaagcaaatatattgattggattaagatgcatatgattagtacgtgtcgtaaaattggtagcaagacgttaattactgaagccttttttccgaaattggttactaaagcatttttttggtctattcaagaataagtaacttttttcctctacgttttcgttttctgttctaatctcttatataatatggtataacaatttactattattgcacagacgcccctc

SEQ ID NO: 102043 - DNA, 839 bp, Mimulus guttatus
  Intron number 1 from transcript mgv1a014997m (locus mgv1a0 14997m.g) derived from phytozome v7.0 (chr-ID scaffold_13; pos 2127554 to 2128392 reverse strand)
atatcaacgtaagactttcaatcattttttgtttttaattttgtggtttattaatctttcctgttttcgagtaacctcaattctgattttttttgctgtttgggtaatcgagtttactgatttttgtttatgaaatttgatctgataatcttaatcgtaggtttgattctataaatattttgcattcgaattactggattttttgtacaattcagtctagactctgaatttgctgactttaatatgaagatattcaattggaatcttaataattgatgtcgaacagttattgttttgcattgtggggtgtagaaattacgtttacttttcaaatttgggtgtgtgttagaatggaaatttatgtgggaaaattcatggtttttccttttaagtatgtagggtttgaccggtacctagcaattgctcattgatcgaattttgtgtgttgaaggaacccgttgaatgatgaaagaatagtcgtctaacaatttcgatttgtcgattgttaggatttacagtagaactttgagatgttctgcttctgattttgtttcttacggttaacattttttgtgcttatcaacgagtttatgctattgtatgaattgaacttcatgctttgttgaatgaacaaaacaacattggcaagttacagtgaatcggtttacgtaggcttcaattgtgttttatggtttaatggcaactttttaggaattaattagttaaatttaccgtaaataagaatgaacggacctgcatttgccttgacactaactcgcttttctttctgattccgtctctttttagtctttttcgaacagtgttgaaggaggggccaa

SEQ ID NO: 102044 - DNA, 575 bp, Mimulus guttatus
  Intron number 3 from transcript mgv1a026222m (locus mgv1a0 26222m.g) derived from phytozome v7.0 (chr-ID scaffold_73; pos 715370 to 715944 reverse strand)
tgcaattataaggatttttggggtaactaaagaaggtcagctctatatatctacattccttttcccattatctgattctgctcttgatattcctatttttgcaaggggcctacggtcactagcagccgaatttactggtcaagtctgtaaaatttcgtggaatgggactgaattattattatttttaaatctaattttgggtttcaaccatctaaagctgcaacatggatacacttggctgaactttctatctagtatttattgcacaactgaggaaactgtccttatattaccaaacttgtagtttggatcttataacatattttttatcgcaatgtcattttttcaaaagtgcatcggtaactattttaggatctgataatagacatcaaagttattatgatgaaggtgcagtgcaactcaaccatttttttattgtgcttacaactgttagcttttgttctactagagacttcagtacttgcagaaaatcgttacatggattaaggccgataccatatgtttttaattctaaaattattcttggccagggcatagtgtttgctgtttagtgc

SEQ ID NO: 102045 - DNA, 744 bp, Mimulus guttatus
  Intron number 1 from transcript mgv1a020721m (locus mgv1a0 20721m.g) derived from phytozome v7.0 (chr-ID scaffold_44; pos 1300993 to 1301736 reverse strand)
tccatgtgcaaagtcttcttttaagttaaattatattttttttctgtcacggcatcgcattttcatttttcattgactttgacttcacagatttacttactaccaaaaattaattaaaaactaaagtaattttacccagtcgactttgggtcgttgactttatttacatcaagttgggccttaacccaaacggcaaaaacccatttagtccagcaggatatgtttttcttctactttcgaaaaggcgcaaatatttactaattactattaattaattttctgctgttttggattctcatttatattcaatgggcatcttatcaagtcctcgtataaaatattttcttaaataataaattaaatactaatatgcatatatatgcggataacacaaaaaataattaaagaaggatgtattcgtggcagtgtaattcagcctgactaagcaactgcgtgtcgccatccatcatatgatccagccacgtctgcaccgcacgtgcacacgtgtcatccttacctaactcgtatatgcacctctctctagtctatatatacacacacatatagagcttaatattgattaattacgatggtgttatgtgtttatgattagtcgattgtgttggggttgtaaaattaattaattaaataatcgatcggtaaaaaaggatcgctctgtagctaataatatataatggcatcggagcaggaggaaagagcaaaactggacgagagagcaaggca

SEQ ID NO: 102046 - DNA, 623 bp, Mimulus guttatus
  Intron number 3 from transcript mgv1a019441m (locus mgv1a0 19441m.g) derived from phytozome v7.0 (chr-ID scaffold_152 0; pos 4786 to 5408)
ttgcttctaccggaatataaagaagccgatagagggtatcgaatttaaattaaatttgcatcattttatcatttatatgcctgtaattttgtcgagaggggctgcggcccccaagattaaaaaaaaattaaaaaaaaaataagtaatttataatttgctctttccgaaagataacgaagcggatagagggtatcgaatttgcatcattttatatatcttcgatatgcctataatttatgatcaatatacagcacataaacatatacttgtatatatattataacagacaaggtaaacttaaattacgaaaacatccctcttctttatgtacgtaattttacatttactcctaatatacatgtcataattgtctaaaagtcgtttcctattttgtgggatcgaggataaaagagttttctagattccaagaatattcgtcatcaaattcaaaatataggggtgtaattgaaagaatttttatttgacaaggggtttaattgtaatatttatctaataataaatatagtgaattttaaaatattgatgttgaataatgtaacattgtgctaattaataattaattgacagacactgggatattgtttggaacaaaacagggcagc

SEQ ID NO: 102047 - DNA, 925 bp, Mimulus guttatus
  Intron number 1 from transcript mgv1a012522m (locus mgv1a0 12522m.g) derived from phytozome v7.0 (chr-ID scaffold_122 ; pos 679747 to 680671 reverse strand)
ctagcttcttccattcttcaacgtttgcagctcaggtaaagttttgatttttatttcaatttattgattttttttttatcatttaaatctgtagttatttattattatctttttctgatgaatttgttttcttcttgtttgacctttgtatgctgtttaaatgcaaaattgtgttctgggttttagtggaattaaatatccctgcttatttggttttatttatttttaaatatatttgttgggtttgatgtctgaagctcacgtgtatagaagtgttagcatagtcttgttaattaatcatcataattattatgtaatgacgtttgttgtatctatttgagtttgcatttcttctttattttcaacaactctgttttgatgtgctaattattcccttctttaatggatacaacaaacggacatccatgaggtaaggtcgaattacgaaaatacccctcatatttgggtgattgcaatcactcctcaactcatgaatcttcttacatgtcaatccttgtcgtgtcaaatttagtggaatcttctaaattatgtgaaatagtctccagtttgtattcatttgaacccatctgaactccacattttttaaacaaaatgatcataaaatgtgtctcttggcttgtaaatataagattgtggtgcacactgcatttttgcacaaaacaagagaatattctgttgaatttgatgtgtaagaagattcatagttgaggggtggttagaacttagaattacccagacattaaagggttttttttttcgtaatttgaccttaccttagagggcggccgtaatttacccttatctttattttcttaaaattccgaaagtatacttgattacttgtatatatatacacatgcatataatgtcctaattttttttttctcgagtacagagaaaaaaa

SEQ ID NO: 102048 - DNA, 804 bp, Mimulus guttatus
  Intron number 3 from transcript mgv1a013602m (locus mgv1a0 13602m.g) derived from phytozome v7.0 (chr-ID scaffold_8; pos 1736901 to 1737704)
aaactggagttacttcagctgatattattgctgaggtatggatttaagttcgactcgtttcgcatttctacttgttagggttgctttcagcagattcaaaccttactctcatttccatgaaattatgttaacattgtgtttctttgcgttttcgttttttcccttcatttttactgataccaactgtgatgaagtaatcatatatgttatcgaaatggatttacgataaaataattgctagtggtgaactgagagaagactcgaagttgatggaacgttagaaaatctactgtagtgggctttagagccacgtaatgttcggggaaagggaagtgacgagagattcttgccgagattccaaataatggattacgtgctttttttaacagacttccgaaatatacaattgcgttaattaggggcttaagctttacatggggagcttaatagcttatatttttatcttaatcgttggactcagtagccgactgatactcgtagatgatagttaaagaatgtttcttgcacataacgtaatttgcattgacattaaacgggttatttttctcgacactgaaacttgccgtatgttgctcagacttgtgttttatgacaacagtacatgtgttgagctttagcaaattagtttctatcataatgtagatgcgatggtagtcgggattttctatttttcgtttcaccgaaagttaacagagatatattctattatgtgactgcacacatgcattattgtgttttatatctcacatgattcttatctgcaggtgccgtattggttgacgt

SEQ ID NO: 102049 - DNA, 726 bp, Mimulus guttatus
  Intron number 1 from transcript mgv1a004729m (locus mgv1a0 04729m.g) derived from phytozome v7.0 (chr-ID scaffold_121 ; pos 271607 to 272332 reverse strand)
actgtactcatcctggtatgttttatgcttttttttttgttattgaagaaaaatggagatttttttttttgatttatagttttgatccgcctgattttgagtttcttagagttaggttgatattagcagcttctaattgtcatgttaatgtttaaatttgggctgcaaattaatgcacttgaggtgcttgagaaaatgacattgctttttggagtgggctcggctcccctaagttggggaaatcttttgtccaagagtggaaatcggaaggattggatcgaaattactaattagccctttcggcttttacttttaattttttgaaggaaaaaagtaattccaattcggttccgaaataaatcggtaaaattggatatcggatatttggatattggaatgaaaaaatatgttttaaaatcagaattttttggattcggaagtgataaattgataatgtatgcgtaattttttttcaaaaaaatcggaattattttaaaaaattaaaatcgggtcggaaatcggaatggaaaatcgaaaaaaaatcggaacggaatcggtagaatgttgaagttccaattttcaacactatctaggaaactcgtaaaatgatctctattcctgaaaatgaggctttaaataatgaagaatcgacttttaagaaccgaacttgattggatttgaatctttgcagccaactcgggaaagagcctgctagtgaagaaatac

SEQ ID NO: 102050 - DNA, 838 bp, Mimulus guttatus
  Intron number 1 from transcript mgv1a012120m (locus mgv1a0 12109m.g) derived from phytozome v7.0 (chr-ID scaffold_13; pos 2200978 to 2201815 reverse strand)
tgttcctggaggagtattgtctgtccctaattaaggtattctctaaaacctaattttatttaatggaatcgctatttgctgactttatacactgttgttcttcatcattggattttggatctgaattgtgttggcatgtgttatgttttttattcaactcttttcgctggatttagattgaggtgtgtctgtagcatatgcgatcgacgaaattgttcagttgttccaaaagtctctctttttcttaattaaatttgtattttttttttttttctttttttgaggattggaattggattggtcttcaatcggatctggacttggttttatgtgatctaactttgtttttcgaatccgggtcacagttgaaagaaatcacgattggtagatagatatatttggttcattggtgagaaaatttagggcaaaatttagtttcttaaatcagaaactaaattctgcataccaaaattctcttcattggatactaaacattgttgaaaaacatcgtcctctaatctctgcctgttggacaatttggctgtatcaagtcttgcccttgttaaagaagggcagtaatgtaaattaatattttttggaaattttatttcactatttgtttttgctgagtaatacagattaagaaacatgtgaattttataaagaatattcagttagattttgcggtttcaggtgtattggaagagtaataaagaataagagaggaatttggtaatgctcttttcccatattttatctgttatgttacagtttataaatcccccttgtcgattaaagtaaatcatatttcttacagccttcaaaaaagtttgacaag

SEQ ID NO: 102051 - DNA, 428 bp, Mimulus guttatus
  Intron number 1 from transcript mgv1a005362m (locus mgv1a0 05362m.g) derived from phytozome v7.0 (chr-ID scaffold_66; pos 985505 to 985932 reverse strand)
ttcactcacctccccttctccgtccactcttcagtgtaagcgtttaatctgcaggcgtacatttttctgtttgcgttgatgattgttagattccgagtgatgcatgatttcgctgtacgttaagcgaagaagaactgatgttaaagtcgtttaatttgattatgtattagttaacaattacgagaggttttcctaaaattactcggctgctatttaaaagtttgaattatggatgcttattttgatactgaagattcttcttctatgaaagtttaatttaaaaaagagtgctgctttttttgtgttgtttttttgttggtcaaatcctggatccaatctgactgtagcattttttggtatcgaatttgtgggtttccgggttgattatattaggtttgaaggatattgctgcactgattgagacgggg

SEQ ID NO: 102052 - DNA, 799 bp, Mimulus guttatus
  Intron number 1 from transcript mgv1a006868m (locus mgv1a0 06868m.g) derived from phytozome v7.0 (chr-ID scaffold_66; pos 751161 to 751959 reverse strand)
ccgaacgcttcttcaccaaactcatcgagaaagatgtgagattttttcctttgtgatttttgttcatgctctctctctctctctactgcttcgcaatgacatttgctcactagaagatgttttaaattgtcaactacgattagtgtttttttttgttgctgcaaatttcaatcttgatctagtcttctgtctcgtgattgatttagtttgatgattttagctttttggtttgtaatttaattgagttaatttgttagatgcagatttcatatctacagttgaacttacttgatgaaattgaatctttaatgttgctcttgtttaatatatttgcctttggaagaagaaaattaaccaatcaaataagagggaaaggaattgaaatttagttcatcatctatcataagtaaattggttcaaggtgattatcgtttgctatgggaaaatagctagatgtaattgaaccctcgaactgtttgatgctagttatgaatgggcatgcgtcgcataattatcatcattagtatattttgcaagataccgtccttctacgaaacttctatatttaaggaagatatattcatcgatatggtaattgaattttatatgacaacaactaataactcgtcgtctaatttacttttttcctctgagcttagtgtattatttttaattgttagtcatttagtgttttttttttccctttgaaatcttgggcttagatgaagaactagacaactaatggatttccactgtacaatgatgtagggtgatcccgagactcaagatcctgttgtat

SEQ ID NO: 102053 - DNA, 253 bp, Mimulus guttatus
  Intron number 2 from transcript mgv1a013659m (locus mgv1a0 13659m.g) derived from phytozome v7.0 (chr-ID scaffold_11; pos 1200356 to 1200608)
gcggctgacaattcggtggatatcatcagagaccggtaaaattataattcttttttttttctgaattaaatcaaaatatagtgatttttctttatacgtttcttcaaattcaaaaattcaaatctccaaaaaaattgaactaaatttttaatccgctgcgctttttaggcgctgtgtgtttcttcgctgagaaaccgtttgtaattttttttttgcagtagagaaacgacgccttcgagtggcgacgacgtag

SEQ ID NO: 102054 - DNA, 470 bp, Mimulus guttatus
  Intron number 1 from transcript mgv1a007077m (locus mgv1a0 07077m.g) derived from phytozome v7.0 (chr-ID scaffold_170 ; pos 252661 to 253130 reverse strand)
gaggaaggaagctgaaaactgcgactgcctccagggtaataattacctttttgcccttcccgtgttcgtttgttcaatttggtgtttgtattgttcttctgttgttgatctgtttatgaaatagtgattgtgtttattgaagtgtgggtagactggataattcttaaaatagtcataatgaattatttgtttgagtatgattgaacttgttagggtttgttattgttgaagttcctttgttggagtatcatgtatatgcttattgtgtgtggatctgtttttttatgctctgtatttgtagtccttttcgtttttactccttgaagtttgtaggtttttgtgaatattattacttcataaacttgctctgccgttcacatttttttcagattcgagatataattcgatattagtaacacctttgttctggtttttctgatgaatctgttgtattttgtaggattccaagt

SEQ ID NO: 102055 - DNA, 482 bp, Mimulus guttatus
  Intron number 1 from transcript mgv1a014467m (locus mgv1a0 14467m.g) derived from phytozome v7.0 (chr-ID scaffold_67; pos 358784 to 359265)
cgttgtaagcttcttccccactttactctgtgcccaaacacttcttatcctttttacctgttattatttattatatcttgtcaaaaaagaagatggaattttccaaattttatgcgagcggatttatttgtgatatattactcaaaataaggttgtctgaaaataatgcccttcattgttgaagataagataaagggacattgctctttcttgaatttctgttgcttggttcatgggcttttattattttatttgtttttggtttagtttagtagtaatatgcagcagtataaatgtattgttaacaaaagaagacatatataatattgcatgaattttcatttcaattcgatagttgaaagggattgaaattacaaggaatgggtagaaatgaatttttgtagtttatattgtagttaaatagctgctgaagagtttttgttttaggtttgaattcgaaggcagttggattgaacattaca

SEQ ID NO: 102056 - DNA, 967 bp, Mimulus guttatus
  Intron number 1 from transcript mgv1a003203m (locus mgv1a0 03203m.g) derived from phytozome v7.0 (chr-ID scaffold_224 ; pos 13323 to 14289)
aaaggaggaaagcaagtttgttcaggtatgaatttccgtccaatttttttctggatttttttatgtttattatttcctaaattgaagtgcgaaaatttgaattagaacctgagattttcgtccgaaggagaaatttcttgcgactgaggcatcagttgttgtaggatttcattagatttgacgaaattggtgtcaaagtaatacaaatttcttgtttggaatccacagttaccaccaatgaacttgatgaactgtcgtcgaagaccatcagttcaaattaatttgttctttgtttgatggattttaccttgttttgttgctattttcatgaagatgaaggattggcgttgtagtttttcgctgatgttattttgattattggagtcttagatttttcacatgataaccgtgttcggggtaaaaattggacttttgattagtttttcctaatttacaattattttcgtcaatgttttacttcgaaatcgaacaaaattagagaaagtatttgaggtataaaaataatctttgattttattttcctcatttcaaaatccacgatccaattagagcctcaacggtgtaccgttttggtaaattgggaattttctcgtgggcttaccatatgagtgtagatacaagatatgactctgtgtgtgtgtgtgtgtgtgtcttgtttaccgtcagtaagaagaaggagacgattcttattattgaatatatcataaccattactagaaagttatattatatgtcggtggtttgttcacaccgacatataagaacttattttcttaggaaatgaacagcacttgttttatttcgaaaaaactgatcaaagaatcatgttgtacttctcataaaactatgtttaatctctatattttggattaatccgtattcatatcatgttcatgcattatgcaaagattttctaaccgatgacatattaattgcagcagaaaat

SEQ ID NO: 102057 - DNA, 533 bp, Mimulus guttatus
  Intron number 4 from transcript mgv1a003203m (locus mgv1a0 03203m.g) derived from phytozome v7.0 (chr-ID scaffold_224 ; pos 14843 to 15375)
ttggattgggtgattcgggctaccaaaaatacaatgtaagggtggattggggttggtattagtttttaataacttaaaattttgctaaatcctctgtgtattattttttcattatattatgtttgttgtataaataattaaataatgattgtatattgctattctcttgatacaataggtcgggtcttacactgttagtttgttaacgccaatctaccattacatatgttttgcacctatctctttagttacgtatacattacttttttcagttcatgaaatctcattaaatcgagggtgttgtcatatgatagctaaatttagtatcgcattttctttgatctcataatttctgcgattaagttttcatacgatagctgtaactagaggcttaatcttgcaattccctcatcatagtaaattccatcacgataaaattgatgacctttgcatcttcaaaattttatcctacaatttttttcatttttctgtttgcagtttgtggcaaagaagttggacaaacggctgtcaga

SEQ ID NO: 102058 - DNA, 686 bp, Mimulus guttatus
  Intron number 2 from transcript mgv11b016288m (locus mgv11 b016288m.g) derived from phytozome v7.0 (chr-ID scaffold_7 9; pos 497879 to 498564)
aggtttcttcaattgacaagcatctggagtctctggtaaatcttaatttgactatttacgtcttttttatttatttgatttgaggtactatttagctggagtctttgtattgatatttgtgaattgttaatgttaagctgctccattgcaaaatagatggaaaaaaatcgatacattgtaaattgcgaatttgaaggttcggttatagccttcaataaggataagaaaagttgaatttactattaagttcaggagcccaataattatggtagttttgtcaatttctttagcaggtttttggatttcgaaactcatgcatttctactttgattgttttggggtataacgtggaaatatggttttcttttgccattttgtagttctaattaagggagagtgcatttgcattcttatatctgaatgcaattagttaagtaacgttataaaagttgaaatctttgaatgcaaatactgggttcattaaagcataggggtgaattttgcggctagactcttggatacagtaccacacattagcaccgtataacaatagtttttatttgtttcttcgttgtgcttgtgtcattagtatgtgatacagtgatagtgataaattcatggagattaatagatgtttgccctcttctgcagatagctgaaattccgaagctaacatctggctgcac

SEQ ID NO: 102059 - DNA, 793 bp, Mimulus guttatus
  Intron number 1 from transcript mgv1a009428m (locus mgv1a0 09428m.g) derived from phytozome v7.0 (chr-ID scaffold_266 ; pos 142289 to 143081)
ggttgcgccggtactcttttctttttttttttctttttttttttcttcttaaaaatttatttcataagaactgatttgtatgggtttgatttagttggtgattagctgtgacccataatttggtttccttgattttcttcaaagattcaattttttttattccttttctaatttttatcacggccctaatggattggatggtgaagttcataaaattgttttactcgaatattgattgatgtttccatgtatataaaatgtggtaaatgtgaatattttgaatcatgtgctcttcaattaatgtttgttctggataaaaattgagtcttgtaatgctaaaagtatcaatcctgggagacatacaaataaatgaaaaccttaattcattatctggcgactgatccatcgggtttacatggtctgacatgtatcgaggactcaaatttcagagtcaaaattctcacatgagcatattgaatagtgaaagatgagtgttctttagtcgtcaaaattgctttcggtaatctgtagtcactttaaaccatgaagtattatttagaatgtagaacttaaaaatcaacttggttatcgacaacactgagattatttagttggcatagcttacaaggtcaggctgtttggttcaacttgctaattgcacttctgctgagttttgtcgtccaaaattgatgattaaactcttcaattttctgacctgcgttttctggaaataatgatttttgactttatttttgcagtcctccttgtattattcaataaagcagctctttct

SEQ ID NO: 102060 - DNA, 537 bp, Mimulus guttatus
  Intron number 1 from transcript mgv1a019016m (locus mgv1a0 19016m.g) derived from phytozome v7.0 (chr-ID scaffold_3; pos 1283780 to 1284316)
cattttggcggacgatcgtacccttcggagctacggtataatcattaatcacctagttactctctacatttatttccgcactgatttgttttttgaatgaggattacacgtacgaggtgaaaatcggtgttctgttttcatgaaaatgaatttctgaacgaatttgttggtagaaaatgccatggtttctctcgtaatgcagtgctagttacttttcgtctttaaagtgtatgtcgtttaccggaaacaatttcgtatttcttctactttggatagtcgcatcttttgcttgaaatattacctgtggtggtgtcgtacgtgctacaaattcgaaatcgcgagtttccgatgttctgagatgtagtcgtaatttcgtaattgggatgcttcaaaatatttaactaacatttcgacattgaattgtaattcagaactcgaccgagaatattaaatgatagaatgatttggaattaattaaactatttttattttttgttgacaggtctcgaggcaggtcacactgttcacttggtacga

SEQ ID NO: 102061 - DNA, 654 bp, Mimulus guttatus
  Intron number 2 from transcript mgv1a013749m (locus mgv1a0 13749m.g) derived from phytozome v7.0 (chr-ID scaffold_123 ; pos 76786 to 77439)
accaccggtgctttcaatccagacagagtcgccgtgtaagttcaatctgtaattttatttttatttttttggggttatattgtttaatttgttgaattaatggtttgattttcttacacttagtttctgaattgttgaagttattggagtttcatttgactgaaggttgaaacaaaacagccacttggttttggtttctaatttctatgatcaattcatgctatggtaatgagttgctggtgttcaaacaatgcagtagtttcggttaatgaaatggcttttgtatacgcaattaatacaactttatcatactacaattggtttattctatgctacaccgggtagatctttaccattcatatacacaaacacccacacacccacattggtgtgtgtagatcaacggtaaaaaattcccggtgtagtcttcaacgggcgtggcatagaaataatcgactacaaataacagctgtatttatagtagaacatcgtaacattcatcacatttctatcttacgagatcaaaagacaaataatcataagattgtttcatcgtgttaattttcgaattagttcttgcttttaagtgtcttctgttagatgcgtttttcaataaagtttttcttgctcgttttgctttggcaggtactgtaa

SEQ ID NO: 102062 - DNA, 479 bp, Mimulus guttatus
  Intron number 2 from transcript mgv1a022146m (locus mgv1a0 22146m.g) derived from phytozome v7.0 (chr-ID scaffold_82; pos 419846 to 420324)
cttggagaacaatctcgtttcgctaatttgccattgtatcctcccacaccaattagtgtttattttacggttgacgaaaatgcattacctttattttgcatggctggaaaattttaattctctgtggtcaaaagggattttgtttcggtcattcttttcgaaatcggtgaagatgaaactgtgtatgttttctttattttgggtttgatttgttctcggtgtaacatttgcataattgtgttagagctaaatccttacggggttttgcaggagaagttttttcttatttaatttagtaataatggctgcaactttctgtgtttgcgtgtgcacattcgtggtcggagttgttgagttttttttttttttgtttcttttgttgttgtctcaagagcccgaacttaagtgtatatcttttctatcttttattagtgctgtcacatttttgggtagtttttttccttaatgcaagcacacag

SEQ ID NO: 102063 - DNA, 537 bp, Mimulus guttatus
  Intron number 2 from transcript mgv1a007128m (locus mgv1a0 07128m.g) derived from phytozome v7.0 (chr-ID scaffold_8; pos 763572 to 764108)
tggttaaggtacatgtttatttttggtaatttcgattattgaattatttactttcttcaaattcgactaattcacccgtcgttactttcagaaagtccatgaatacgagcaataccatcgcctacttgatttatttagtgtcattttttgactttgtaaggatttatttggatgttccgtttgtgctcatgtggctttatgtaggctgaaatggttgatatttgctagtgagggtgtttgagtaattggccaaattgactatcttcatttcttaatttaatgagttacagattaattggccattctgtctaactattgtatctaatatacttgactttatgggatagtgttcgtattggtctaactatttagatatgctgtcactaacctcttattttattcctcctcctggtattttccggtgccgacagaaatttttacttctataagttccttttcttatgttgtttctgatgattcccctgtttgtattacattccagacaaggttgcaggcacaagctgcaggagtcgctta

SEQ ID NO: 102064 - DNA, 516 bp, Mimulus guttatus
  Intron number 2 from transcript mgv1a008894m (locus mgv1a0 08894m.g) derived from phytozome v7.0 (chr-ID scaffold_48; pos 715206 to 715721)
ggagttagtaaattcacccttcaaaaatatttcttcttcaatcatctattactgtgagggttttggtgcaatattgtactcattcatgttagtagctatagcctatagctagtattccatgatctatcacacacttttgtcttgtgtgggttgacttttctgaggtttcatgttagatcaaccatgtctcttgaagctgttcagtttgtacatgtgtcgaactgccgatattttagctaatcggctgctcgatactcgacttttttatttactttgctgctccattgtcgcaattatttttgattttagttgtgcatttatattacatgcatagtagtgaactagtttatcagagtcgatttttcttctatgtcgtgctgcatttgaataagttatcgatctcccgaccaatttaaagacatcaaatctatgtatatgtcgtctttcaatatcgattccgtttccgtttattgacaattggtcgtataaatgaaaaaaaaaacagagttcactgac

SEQ ID NO: 102065 - DNA, 627 bp, Mimulus guttatus
  Intron number 1 from transcript mgv1a008361m (locus mgv1a0 08361m.g) derived from phytozome v7.0 (chr-ID scaffold_130 ; pos 51567 to 52193)
catatctgcatctctgaaactcaagctttttcgaggtaattgaatcttcggttattctctcatctgttttcactttgattttcttcattccttgctgaattaggttttgattaatttttttttttaatttaatttgaggtactgtgttagcaattacttgcgcgcacactgtttgctgaaaatggtgaaaactaattgatatatcaaatttgtgtttttttggaaattcattttcattggtttgagagattgtacaatttttttatttttttttgtttggggtttaattaagctgttatatatgtgtgtatgttctgttatcttcaacatgttcatgtagtctcttatgttatgaatggatttaaaacgattctgtaaccccgaaccacaacgatttgaaatccatcacaattactcgaagaaagtaactcgaaatttgactaaatattcgaaatccattgtcagattctgtaaaattttcgttagtttttcgactttaggtattgtagtagtatgtctagtttcttgaatttagtttgatttactcgactctcgtttctctagataaatttcgctgatgtattcgttattctaaattttatacctatgctaataattttgcagaaa

SEQ ID NO: 102066 - DNA, 666 bp, Mimulus guttatus
  Intron number 2 from transcript mgv1a008361m (locus mgv1a0 08361m.g) derived from phytozome v7.0 (chr-ID scaffold_130 ; pos 52572 to 53237)
atcgaggctggcagaattaacggagttaagaggttcgggtttttttttcctttctttctttaaaatccagttatagtatatgcgaaagccggaaaatataaatgtgttcaaagataatgaatgtgtagtcgataaagatgtgtgagaagataatgcatgggttgatgctcttttttggtttttgtgtagttgagaaaggatagtggtttagattcttgattcttgattcttgattttatacttgatttattcgattctcgatttttaacatggttgaggctggtagaattatcgggggttaagaggtcccttgttttctttaaatctgcttgggtttggaaagttgaataatctcgttaaagtgtatggaaaaataaacgtgtttgaagataaggattggctgatgctcttcggtatatttataatcgacaaaaagaacttcacatttaccttgcataatcgacatagtggtttagatcttagtttccctagagatgattccatcttgtcgtttattactaatttattcaactctaataagtgttggattttacacgtgcaaggtatatatgcaatatggctcatatttggagcgaagaattaagtaaaattttcccctttttgtctataggtttttctacgcctcaagtgcgtgtatttatcccg

SEQ ID NO: 102067 - DNA, 868 bp, Mimulus guttatus
  Intron number 1 from transcript mgv1a025694m (locus mgv1a0 25694m.g) derived from phytozome v7.0 (chr-ID scaffold_63; pos 95618 to 96485 reverse strand)
gccgatttcagtcaaaatacttcatctcactccaggtgtgtttcttctggtggaattttgttttaagcgtttgcaatttttgtaaaattttatttcgaattttggggaaattgttatggaaattgtaagtgtgcatcatatttaatgtcatcactcccgatcgagctcttgcgtgctgtaatttagttttactcgttttgctgctggtgtttttttttcactatgagttggaaattggaatgtatgaatgaatttcactaacatgcttggttatttttcatccaatgttctgtaactcttcatattgtgctgaacaatacagagaataattggactctatattgctaataaatatggaagagaaggcccgtaagaattattgaatttaggtttagggttctcatgttttgaacttttttttggggggaaggtgggtgaaggcactggataaatgagaagaagctattggattgtagatttggttgaggaaaatgcgagcgtgacttggccttgctaataggaaatgaaatcctaaagtgcgcctgcatcattttagaaatgttagcagaacttctttccccaaggcatgtagtttgtttttcgatgtagctaagtaggagacatatatttgtatttgtggctaaggaattcactctgcggtgaaattatgaaggcaaaagtttcatatatgcaaaactatccgtctttagctttaggaaaagtgaagtacaatgttaacagtaattttgagatgtgaatccgtaagattgagattggattttcatatacattaaatgaagtatttgtccagcacttatgttcctgaagtagaattattcatttgcaacatgcaggttcaacttggata

SEQ ID NO: 102068 - DNA, 675 bp, Mimulus guttatus
  Intron number 2 from transcript mgv1a012788m (locus mgv1a0 12788m.g) derived from phytozome v7.0 (chr-ID scaffold_13; pos 1907265 to 1907939)
gactttgtgatccaggtaatacgtttttcagttcagattcagttaaagtttacttcgtaattttgaattcaggtccttatctttatgtgcatgaatttcttggcttttttttcacttcgattttagtttttgcaattgggaaagtaaattctttgatgtatcttcctgattaggtttttcctgctagtttgaaggttaattagtttaattcaaggaatacaaggtttataactttgaatttgctttctttgaagatatgtttagctaatttgttgttaacaaggaaagctgggggatttttttttttttcttgcagctttcagcttaactaatacctcaaattgcaaattgattcagcagcaatttttttgtttttcgtctctgtagatccttgttatgatttcttgttttagagacgtttcagtttcggtaaatcattatacaactttcagcaactcgtattcgatattattttcctattagtcttccaatcaattactaaggttcatgaagctcgtttatatacaattataaacacggcattgtgtcaatttaaagagccgtttcagcatttcatgtaacttgcatggtatatcagtttcattatccctttattttattcttgatttggttttactaacttattaattttagagaaggagaatttgtgtctat

SEQ ID NO: 102069 - DNA, 744 bp, Mimulus guttatus
  Intron number 1 from transcript mgv1a004401m (locus mgv1a0 04401m.g) derived from phytozome v7.0 (chr-ID scaffold_102 ; pos 853763 to 854506)
cccggtaaattattattaattttatttgttttgaggaaattactgtttttatggttttgatgtgtgtgtgtgtgttttgaattgaagtcgaggtttctataatgaggtggttcgtacgggtttcgataatggagcgttaaaatccacgagatagtttgtactgattcttctagatgagtaaatgaaaggaaacgtaaactcgaagatcatcttatctacaatttttgaagttctttcctggatttttgtgtagagtgtggtttcctttaagttcggtaattgttaatgctaggagactactgccatttcttggatttgaagaatatggctttgtttgtcaaattactgttgcgtcgttctaccctatgtaatctcgagggtaagtgcatacatgcaacaagcagtggggttacatagtcggagttggggaactgtagttaaaccttgaggatgtccacgagggccttgagttaacagcaatcttgtacgtattttagatctttagtgaatgacatagagcttatattatcgtgcaaaatatgttcactgaaacttaatgctcattgaaacttgtttgtatataacatactagacgttttcctgctgtatccatataggttcattgattttcttatgtttttcttgttcgtgtaagtgagcagtgtcgttcctatattcttgcagctagctatggtagaagttcatatgcagtgtctcagtgcaattgatatctattttgcagat

SEQ ID NO: 102070 - DNA, 836 bp, Mimulus guttatus
  Intron number 1 from transcript mgv1a001932m (locus mgv1a0 01932m.g) derived from phytozome v7.0 (chr-ID scaffold_316 ; pos 76130 to 76965 reverse strand)
caggggaattgcttcgcatatatgtttaaattatttaaagtgtacagttcagattctcctctaccttgcaacttaacatatcaaacttctatattagttttatattttgtacaactgatacttttataaaccgttgcaattttatgagatcaaaggattttataaattgaattcttcactgtagaagatgccattatgttgaatgctaatcatactactatatttaggttatttgaaatttgggtttaaccgagaagaaggtggcattgtgtaccgtgaatgggccccagctgcagagtgagtatgttgatctcatagatagatatacgagttttcatttaatatcctttatttttgtctacgtgtacgcgcttctacaaagtgtgagtcctagaaagtgtttgttttcaattgccagaagtcattcgtgcctttacttagtactcttgattaataacaaatacgacctttgagatgaagaaaacatttagatttctaaatcctctaagctacttagacctaatcctggaccttacaatgtcccaactaaaataaaatttagccaagaaatagtattttgatgaattaactctttgtatgaactgggtcaaaataaactgaaaaaacatatttaagttaataggttgacagggtgaaattgagataattttctatcaacgtagaatcaaagagacctatatacacatgtttctgcacatgcaacacatgtgatctttctaatgttgacttaattgtctcattctagttgatagcctcacatttaacttgtttgtaactcagggaagcacaagttattggtgattttaacgggtggg

SEQ ID NO: 102071 - DNA, 694 bp, Mimulus guttatus
  Intron number 2 from transcript mgv1a007056m (locus mgv1a0 04028m.g) derived from phytozome v7.0 (chr-ID scaffold_11; pos 2642227 to 2642920 reverse strand)
ggtcaaggccagatcagtcagagctcaatcttctggtgcgtatatttcgtctaactgaattctcaataatgtttgctcaaagttgagtttaagcagtataatatgtagttattctagttataaactgtaagctttttcgaacttccactaaacgaattaacggatgtaaggttagtacaattcaattgcactgctgtaaaagatattgtggtaatgcatcgtatgagtaattcttcgaggtactaggacttggagtaacggactagcaaaaccactggaggcccttctccgtcctatcattagatgtttgtatttgttttaatgtccaaagttccagtaccttctaagaatcaccatacttcttagttagtgataaagtgttcaactatgcttgatggcttttttttccttaattgccagtggcttatttacgacggttatttgtttttagctgcatattgcacgggtcggtgatatttatatatttttgtaaagcaatatataaaaatgctatccaaatgttttagtaaagcaagacgctgtcagtatagataatttctctcctagttccagttccaatcttcatacgtgtttaactcttctgttttatattttcacactcaagtaccatcatcgtgttattatattctaactgcttttcttacaatgaaaatcaccgttcgtgaaggaggag

SEQ ID NO: 102072 - DNA, 831 bp, Mimulus guttatus
  Intron number 2 from transcript mgv1a001184m (locus mgv1a0 01184m.g) derived from phytozome v7.0 (chr-ID scaffold_79; pos 28912 to 29742 reverse strand)
agctgttcgtggtaatcaaagagtaactgatcagagtgggtgctcacatcttatagctttaacttttgaaaaatttagctatttcgtaaatcattcaatgaatagaagaacttcttaattggattgcgctgcaacgtttattttagatattggtaagagtcacaattggagtaaaccatcttttaatgaaggggaacattttcttgtgcttaaaggctcatcatcattttctgctgatgatcaacttcgaccaaaaagtaatctcaaaacatgttactttgtctaagtaagtttttattgagtatgactagttccttgctgttaacatttaagaagacttaattgtgtgctctgataaaaattcgtaaagaacatgacagagaattttatatgttagtagtttcttcagcttctgttgtttctgcatatgaaacaaaggttcattgagtttagagatctgtatttgttatatgcaatgcagatatttgcagaatataagcagtgaagaagtatattacgcagtgaacccataacttttcgacattcataaataaacacctcaatccattttacactaaagcaatcaacaaatttcaggtggtctctcatggtgacagctagaaaacaattaattccagaactaaattcttccatatctgtatgagacagttgtattatcgtctgtctctctttctctctattttctacttgaactattagttcataaaagttgtcttcgattttcttccccatttgattttgttgtttactgataattgattggctcattgtacaggtccagaaggtaaatacgaggcacttgaaaaattt

SEQ ID NO: 102073 - DNA, 839 bp, Mimulus guttatus
  Intron number 1 from transcript mgv1a005393m (locus mgv1a0 05393m.g) derived from phytozome v7.0 (chr-ID scaffold_29; pos 114124 to 114962)
gagttcatcttctctggtaaaaaattagatgttacacctacaggttatttacatgtaatcacacacatacacccatatgtgtgtgtttaattggtagttataatttaatttcatctacagttgaaaatcacccagtataaataaccagatataacatctaacttccctttttttagcaactgatcccttagattgtgaaaattttggagtggtttgctataacaaattgaatcatagaaggtttttggtatcaaaagagttggggacttttttaaaattagggaaaatacaggggtactaaatgcaatgaacttcgatttaagatctttagtttattttgcattcaatacccttgaattacattgctaaaaaactccacatatcattagtattagcaaaaaaaaacccttcactccatttctttttagcatacaactctctaaatagtgagcctctaaaggtagtttgctaagaaaacgaatttagagggatttctctaataaaaaaataaaacgaaagtttttttccaattttctctttaatattttccacattatcccaaaattttgcaaatgatctttttaaatttgaaatttttgcaaatttgtattgttttatgtgtagactatttaaaaaaaaaaaactgggagcgctgccctcgaatccctgtaaactttatacatattgttattaaatgttacttatatttattactatattcgatttcgattgccaaaaatcctggattcgccactggttactgaatgcaataaacactaaacattccacctaactttgaaacagagcttttttcttgacaaaggaggagaaaagaactg

SEQ ID NO: 102074 - DNA, 782 bp, Mimulus guttatus
  Intron number 1 from transcript mgv1a004271m (locus mgv1a0 04271m.g) derived from phytozome v7.0 (chr-ID scaffold_11; pos 1669024 to 1669805 reverse strand)
aagctgcaaaggaaggatcgcgagccccccgtgaagtacgtttttcgtcccgttttgttttcttgtttttttttttttccgagggttggtttgcttcacattgcttatatttcattttttgccggattgactactgaaaatggagtattttggtcccctgtgaattttgagattcggatcggtaaacaaatgcgaatcaaactaagttttagaatgtagtttgatattggcctttgtttgagtgatatagttgatagtcatcacaacctttggttttcggaaattgagcttaactaaatgtgattgctaatgtgtgaaaccgtaagtgtacacatctctatgataaatagccctatgcaatttaaaattcacgttagctacacacgtcttcttcttggccgtgaattaaatttccatcaacttcttacgccatgaaacaaatgtacaaataacgaaccgtaaagagaaaaaggtagagccgggagattttaatatatgattgtcaagaatgaagcatgctcgggtatcataactcgattgttaaaagtttagaaacatcgcattattctattcgccatccaattgtctattttttctactttaagctatgatattccatatatacatacgagttttctttgtaatgacaagcattatatgtatttatcaatacgcgtaagcaataggctatatgctgtttatgatacaaaaggattgaccaatggtagtgatatgtaattgtggcaggtccgtgttctgggcgttatttggggcaatatatc

SEQ ID NO: 102075 - DNA, 357 bp, Mimulus guttatus
  Intron number 1 from transcript mgv1a007622m (locus mgv1a0 07622m.g) derived from phytozome v7.0 (chr-ID scaffold_4; pos 2318358 to 2318714)
atctagcggttggaagtaagtgagtttgtgtcagtcgatctaggtccgagtggtttacatttctcgcatggtttgcaagttattatacgaggccgtatgtttccccggtgaacctatatggttataagcgatttctttattatcgaaaaaaagaaaaagaccctcaggatattattacacaaattaagtatgacaacctttttcatgcactaaaaaagaaaaagggaaaaaacacaatatgtaattatcctacgttaggaccattttgaatcttttctttttcttcctttttaagtgatacaacttttttttaataaaaaagttttttcccttcaccttctttacttttctctagct

SEQ ID NO: 102076 - DNA, 313 bp, Mimulus guttatus
  Intron number 2 from transcript mgv1a019257m (locus mgv1a0 19257m.g) derived from phytozome v7.0 (chr-ID scaffold_27; pos 528468 to 528780 reverse strand)
tcacttgtgttgtatttcaaggtgttcttgtcattgtaagtcatcttcttacaactacttttctttagtttattttttctaaaactaccgtttttatatactaaagtctcgtttttgtatagttcgaccgatgggtctagtatacgatccatcaataggtcgagataagggctcataaggtcaaaaaagtccagactggactaaccaaacaacgaataagatccaattatttaattaatcatatttttgcttgaaaatacttttttttgtttttatagggattggtgctattatccttgtcaactcaagaatt

SEQ ID NO: 102077 - DNA, 953 bp, Mimulus guttatus
  Intron number 2 from transcript mgv1a001977m (locus mgv1a0 01977m.g) derived from phytozome v7.0 (chr-ID scaffold_261 ; pos 178191 to 179143 reverse strand)
ttgaagtttacgaaggcttctgcaacttaaaacaggtaaccaaaaaaatctctctgttcttgaactaacgccgttaatcacccaccgtcacaaaaaatgtaacggtgttagttgagttccacttaaatttaatgtaaggtggtagtaactagtaacatgagataatcaacagtgtcggtggatctctctctctctctctctctctctctctctctctatatatatatatatatatatatatatatatagacaatgctttattacataacctctcatttatgacttgtgtagactttgatttcaaagaaagcatggataaatacatagtttaatagtagggtttgttatgccattactttggtttgattttcagccttaattgttaggtgtgaatgttgttaatataaaaataatggtaaattaagcccccgaggtactgtcaaattacgaaaaattccctcatgtttgggtgattctaatcaatcccttcaattaatcttcttacgtgtccaccatttgcgatgttaaatttagtggaatcttctagattatgtctcgttctactccattcgagctccgtcattttgaaacaagatgattataagatgtgtttcttggcttgttaatatcagattgtggtgcatcagaaactgtatttttgcaaaaaacgagtataaactagagagcatttcacagattctgtgaaatgcaacaccataaggacgaacatgtaagaagattcgtagctgaggtggttgtaattacccaaacaagaggggggttttcgtaatttgaccttaccttcagcggtggtggccgtgtaattttacccgatgatataatatacatcatctatttttgtgaaatattatctgatgaaaattgaaggaatattttttttaataaattttctgatgttataaaatggtgcaggtagacctaaaactgaaaat

SEQ ID NO: 102078 - DNA, 764 bp, Mimulus guttatus
  Intron number 1 from transcript mgv1a003949m (locus mgv1a0 03949m.g) derived from phytozome v7.0 (chr-ID scaffold_94; pos 1107898 to 1108661 reverse strand)
acgtacgaacaaaacgcgacccagttagtacacaggtgctgtgctttttaaaatcttacgatttccattcgattcccagtttacgatttttactacaatttaaggaaatttaagatgactatacctttttataataaaattcaatcaaaaatatattagtctactacgcttttgtcaatttctccccctaaaatactattaaaacaaagtattcaaagaaaatcacgtattttgattctacccctcatttatagttaatgtaggaaaattaattggaataatattctattttttcaaaatattaattatttttattttaattagtcctcataaggcatttgtatttttttacttggatatcttcatgccaccgattttaataaaataagtgagcttacatcatacatgtattttgtttatatttaattcagtccattctttatattttcaaattatatatatatatatatatatatatatatatatatatatatatatatattgtgaatcatgggaatttgtaatatttgtaatatgagaattaatatataggttataaattttttattttattgtgttgaaaattttgttaaaaaacatttattggatttcaattttaatgggtcaacagacaacttttacatatcattattatcattaatattatctttgaaagaattaaaatatgttacgatttgcgattcgatttacgatttaacaaccatgcaggtggcagtacatcgcggacaaggtggacgataatc

SEQ ID NO: 102079 - DNA, 840 bp, Mimulus guttatus
  Intron number 2 from transcript mgv1a025972m (locus mgv1a0 25972m.g) derived from phytozome v7.0 (chr-ID scaffold_206 ; pos 316112 to 316951 reverse strand)
atatcactttcaacccaaaaaaaattggattagtaattcctatttaattttcttcatttaaaaaaaacattttcaataataagtatatatggcataacttattatatgtattagtacataatttttttgagttgcttgaattaatatatttagtgacacttgttattttcctctttccataatgctgcgtgggtgatgaacgaaccaacatcagatccaaatggtaagtttctcccttctcttcttctttttttttttttttttaacgttgccatttttagtatttttataactatttttttcaaaattttattgcatttggtaccttttgttacatcgaattgttaaaaaactccagatatttttaatattagcaaatacccccctctttaggcaatagttcacgccttattaaaaagttctacactttaagcctgcaattgaatgctactatttagttaaattagtatcacctttcccttatgtgattaattttgtcgggtgattaaataaagacaattttatccttaaaaaaatatattaattatattcttaattttgttaattaaaaatctttgtagacatttcttatttaataccaaaatttaatacaagaattgaatctaattaatcaaacatctcactgacaaaataattagttggtagggcatattaattcaatcttaattagcaaaagaggcctaaaacaatttgaatcataaaagaaagtttgctaataataataattcacagatttttatttttaaaataaaccctaattttccatgtctaagtttcctcaaaaattaattagtcctcttttaatttcgaacagcacca

SEQ ID NO: 102080 - DNA, 736 bp, Mimulus guttatus
  Intron number 1 from transcript mgv1a025972m (locus mgv1a0 25972m.g) derived from phytozome v7.0 (chr-ID scaffold_206 ; pos 317075 to 317810 reverse strand)
aattttgtaggtacactaaaaaggaaaaaaggaaaagaaaaaagagagagagagaggataatcttgtattaaaaatcaaaaatatcatgatatatttatcttttagttataaaaaaaaaaaaaaaaaaaaaaacaattgtagggtgcattttgtcattgatatgcaattaagggtgcattttgccaataccaaaatttaagggtgcaaaacaccaatccacataattttggggagcaaactgcaattcacccctaaatgcattataaatgatttttttgccaataaattaacatgagaaaatctctagtaattcgatatacacatgagtaataaattctaagaactctttaaattttttggtaggcacatcagattttgtgcatgtcagcacatcaaaaaaagaaaggaaaaaataaaaggaaaccaaagcttccatataaaaggaacatttaaatcttcttataattaccatatatatatatttataatttaaatctggcaaacaaaactgaatttgcaatcaacaatataatccaggaattctcaaacacaattagattttccttaatttgactataaatacatcccaactccctctctaattttcatctcactaccaacattttttcctatttaatttcatttattgaatattaagttgttttactaataatataattctcctaaaactcgaatggagctctcgaatagtatccgttggggtttgccaatttt

SEQ ID NO: 102081 - DNA, 385 bp, Mimulus guttatus
  Intron number 3 from transcript mgv1a012413m (locus mgv1a0 12413m.g) derived from phytozome v7.0 (chr-ID scaffold_44; pos 801689 to 802073 reverse strand)
aaagctcagcgtttgttgcagcatcaagtaatcaggtaatggctcgtgattgtaatgaaatattttttttgtttcttctgattcagtaaaagagaaatggaaaaagcaaacaagaaaaatgttaggattgtcgtaaggcacgatttgaacaatgttcatccaagatgataaatattagtaagacgtcagtctaaactccatattatattccacgaatctggtcgtgaatagaatgattacattcaccttcgaatttgaaaagatgtccctatcatatattcaaacgatcgaaaatcttggcacgagacacttctgttatacctcgttttctgaggtcgaccttgactttggttctttgttttgtaggcttgagaatctggatttg

SEQ ID NO: 102082 - DNA, 456 bp, Mimulus guttatus
  Intron number 1 from transcript mgv1a012413m (locus mgv1a0 12413m.g) derived from phytozome v7.0 (chr-ID scaffold_44; pos 802560 to 803015 reverse strand)
atctctagttttgaaaacctagccactgaaatcaggtagttcttccttagttatggttaaatgaagctgactgtggtctgaaacctaagtaaaatccccttcactgttgtttcaattgcttttttttttttcaaaaattatcagtctccttcatatttgttttttcattaattgtcactatcagttttcaaaatagtgaatatagtttgagtgtttattctagttgtatttatgatacagcctggtgaaatttcatacctaaagttcggttttatcgaaattttcgtaatcctaggtttagatgttcttaatgtcttcaacatcttaattgtagtggaattggttgggggcagcagcaattaaccataattagaagcccaaatataacaggccttcttagctccaactatacgacacaaattctcaccactaagtgtaatcagcaggggcaaagtt

SEQ ID NO: 102083 - DNA, 726 bp, Mimulus guttatus
  Intron number 1 from transcript mgv1a002815m (locus mgv1a0 02815m.g) derived from phytozome v7.0 (chr-ID scaffold_27; pos 1866016 to 1866741)
aggaaagtgtcaaggagatcctgaattacaatcaggtatcgatacagcatgcgattatgtaaattcgtaaatctcgtcaaacgcgcatttatgtatgtatttccatccgcacctttacatgttcagctggtatgtgtgtgtgtgtgtggcttttttccttgagataattttatcgtttaaccagcaacatgtttgttctctaatcaacttactgcacattatacgactgtgattattcagagaagatctatatataacttcgatttgtgaaatttataaatccaattagctgttcaaaaatgtttagcgaaaagtactgttattccgatgcatgttgcccttgtaattgatttcagttgctgttcttttcggtttttcttcatagatctccccttattttccattacaatacatgtgttcaatttatttttttcctttgaaatttcacttaattttctatgtcttattttgttagagtgaatatttactccccatgcatcataattttttattggggtggttctctgtttcaattccggtctccgattattacgaactgtaaatggtgttaagttattgaatttaaaatgcttattaaattgcatgatgaactttgaaagctgttcagttgtgtagttcagtgcagtactaaattagaacagcgctgacagcttctatcacgaccgagcaggtttttgtgagagactttttcccgtctgcgctggc

SEQ ID NO: 102084 - DNA, 625 bp, Mimulus guttatus
  Intron number 2 from transcript mgv1a012814m (locus mgv1a0 12792m.g) derived from phytozome v7.0 (chr-ID scaffold_36; pos 982029 to 982653 reverse strand)
gcctcggtgataaaggctccaggtataaacgtataacgattaattttttttttttttttatatagtcgtcgaaaaacggaacaatattttttttatttttttctgtttatttggttttgaagtaaggttgcaaattaagagatgaataatcacgtaaattatctatctcgttgcaaatgctgcttagtatagtttctacgacatgattaatgtgtgagtttcgttcgaaatcaaggatgttgattcttttcaatttatttacaagaacctttatactaaaaatggtttcgggtttcggggttcggtttcggtttcggcttcggcattttgatctgtgaagaatagaatagaagatcattttttgttctccttgatatgatcttgaagttgagaagtcggaagttgaataggggaccacatactcactagatatgctttttatgttttaaaaacttattaaaagtataatatgtatttatttgttatttgattctttcatcttgtttttcgtttaatatgtgacgaagaatatgcttttatttgtgattagtaatttgtggtgtgctttaatttaatcatcacttttgcagctggtcacaaatcttggaaaaccttcctcttcaaa

SEQ ID NO: 102085 - DNA, 689 bp, Mimulus guttatus
  Intron number 1 from transcript mgv11b018920m (locus mgv11 b018920m.g) derived from phytozome v7.0 (chr-ID scaffold_2 285; pos 3321 to 4009 reverse strand)
tccatttgagcgagtgtgtttgtgcatgtttgttgatttgtattaatgtcctaggattgtactttgtgttttcatgaacctttttgcgaatgcacttttgcgtgagtacttttgtgcatgattttgtacttttacttatgtgcgtgtcttttgtagcgagtgttttttgtaaacgtttcttgatgcgcattcgtgtcctcgaactgtagcgggtattttcatgatcgcttttggaatccaattttgaccatgttcgtgtccgaatttggaaaatttgacattagacaggaattgtagccagccgaaataggtttctattgccgccggaaccagttgatttgtagtccggatgagaaagttatgctcgacttcgtggacactaccgaagatgttgagggatcctctcttctaattggattttattttcctaattgcaactcttttgttactctttgatcatttttgcttcatggacacctcattatcaatttgtacctatagaatactaaatccaccaattaaaacagaaatataaatttaatcgataaaaaaatccacgtaaacgtaaacgttgagtgttatttctacactccgcttttatcttttgtatctagtgttcttgctgttgtctggttaggcgtattaaagtcctagtgttgtatttcgtgtttttaagaacgttgttgcga

SEQ ID NO: 102086 - DNA, 715 bp, Mimulus guttatus
  Intron number 3 from transcript mgv1a005741m (locus mgv1a0 05741m.g) derived from phytozome v7.0 (chr-ID scaffold_115 ; pos 877 to 1591)
tatttagtttggctgctttacttggagtcacactagtcagtggctgatcttcaatgttgtctatttttttttccctgaactaagagaattgtttacgatggcttttacccttagtcttacattgttctttgttttcatttattttttattttcagattattctatgtgaattggtccgaacaacacttgtatgtgccggaaatacctcgacgggtaactccttgtttgggcttgcctctgtggttagtaataaatcatttgccctactccgctcttaggtagatgtttgaatttcatctaccgagaagtcaagttatgtgaaactgaagtgtcttgattttaacatttcaatgtcacggagttatttatataaacagaaaaaaggtcacaactgttatatttggtttatctctaaattgcacgtatttctatcagtctatgtattaccgataaacagtgagatgtgtagaacctatggtaactttatttgttatattattctttgtaatttgaatgagtattagctagttaagaagtactttagaatatttgatcatttagcatttgttgtttccacattttattgctttttgaaaaactcaagtgggtcagtggatgtactcacgaatcatccttttgtttgccaatactttcattgttgcattcgtacttactctttatgcagattggcgggttgcacatttcacttcccaat

SEQ ID NO: 102087 - DNA, 789 bp, Mimulus guttatus
  Intron number 3 from transcript mgv1a011891m (locus mgv1a0 11891m.g) derived from phytozome v7.0 (chr-ID scaffold_324 ; pos 120130 to 120918)
gaaatcatgtaagatcatttttatttatttatttatttatttattttacctttattatattcctttgtttttttcaataattagccataaaacgtgtccaacttttattttaataaaaaaataataatttttcggtacggtaatatttgtcgttttgtaaattttcttgtgatcgttaattatagaaagaagaatagacccgaagagtaagatggagtatcaattacttcgtatattccatattatctgaccttttaaattttcaatactgcattaaatacattttttcttgttttttaacattattaattcaactataagtagtaattctctcttattacatcaataaacgattaaggttattttagttcttttaatgtctttttcctaaaatcaagacacatttattgagatttttaatacttgtgcaaagttgaaaaacgacaattgattaggaaccggtggagtaattaatacttacataattttgttaaaagagtaatttgggttttttttttatcaaaataatttgataaattatttactctgcatgcataaaaattaattaaaaagctaataaaatgtcacgtagggtaaagatcatttatgtattatcattaccctaagaaaatgtcaatatttacttatttaccaatatttataggtgacaccacctaaaacttccattcaacaataaatgctactagcccacaaccattgattgagaatgtataaaatgtattttactattattacaaatcttgattaatataatatttaataattgag

SEQ ID NO: 102088 - DNA, 854 bp, Mimulus guttatus
  Intron number 1 from transcript mgv1a004693m (locus mgv1a0 04423m.g) derived from phytozome v7.0 (chr-ID scaffold_63; pos 443814 to 444667)
tctcctccgccgtctcttttaaccctttacttgaggtttgctgctaccttttttccccttttcaaatttttttttttgagttgagaaaggaaatcccaattcttctctatttctctcctgatttttactagtttaaccaatttgcgccattgctgattgtttgtggtattaatttttgcccctttgttattcattttctgtaaaggggattttttggatggtgttgagttattgattgcatgtttagttggtgaaattgtagtttgattgatggaccaaaggaattgaatttgctttttcccatgaattttccgatttaagttactagagttgaattcattttgcatgctgggaattaggtttctggaatctctctctctctctctctctctctctctctctctctctctctctctctctctctctctctctctctctctctctctctctctctctctctctctctctctctctctctctctctctctctctctctctctctctctctctctctgtgttaaatattttttttgaaacttacaacattaacacctaattttacaatttgatagaatttgtgaattttgtccgttattcatgccaaatgtaactactgttgtttcaacacctccatgttatatcttagcttgggttattatcatttctatggcgtgtaaaaacaacagtaaatatgatgagaaggaaatgttgtttcttgaaaatagtagttatgtgcacagacattagatgcaattatatggaaggaattaaactcatctgtttctctctttcgtctttcctaatttttcttggctatctcaaagaatattttaattttccgctatggtgataga

SEQ ID NO: 102089 - DNA, 688 bp, Mimulus guttatus
  Intron number 1 from transcript mgv1a007003m (locus mgv1a0 07003m.g) derived from phytozome v7.0 (chr-ID scaffold_79; pos 191633 to 192320)
ttctgaaaggtaacttttactactgtaaagcttactgcttcatcgcttgtcatttatacattcaaatgtgtgcttttgtcttgatgtagtaatggtgttgtttgtgaactggaatttagctactgaatctgaatcttggaattattaaagattggatcttgtgtggggggaatttggagatctactgtctacttcgtttgcttagctaaaactttcctttgtgggtttttactaatctgaactagttggttaatggcttaatgatttagttaatgattctgcttaatgattttcttttcggaaagggttttttgttgcttgaaaagatctagagaagggtggcttgaaaatgttaaaacttttgtgctgaaattcttttcagtgtacacaaaaagtgctttcttgttggttaagatggaatcttgattgtgatttgtttagtgctccaaattacctttgaagcctagttcattgttgtgagctaattttttgtgcagccatcttctgatgaattgcttaaattttttatttagtgaaatgaaatggctttgcttaattgtcattaagaatatctaatgtctgctacaactgattagctcttgtagtttagacgattttttttttaattggagtttcgtgtgatttattagacgtcaaacgggagtttccttttgttttgttagataga

SEQ ID NO: 102090 - DNA, 493 bp, Mimulus guttatus
  Intron number 1 from transcript mgv1a003135m (locus mgv1a0 03135m.g) derived from phytozome v7.0 (chr-ID scaffold_96; pos 118655 to 119147)
cgcacttttgaagcttccctaactccccatcgaaggttacgcctacactcttttttcctggaaattttgattcttctatttcatgtcgaattgaagactgtttttgttaaattttaattcgaacatcactaaattgcatcaatgtaccaaaatccctttaattcaggcgagaaatacagtcaattttttttattttattttgctctctgtaaataaattgtgtaggtttatagcattttgctgaatggcctgaatttcatgtaccgatgtcgttttttccagatttctgtggttctgatgcatagcttgttcgaagttgttatttttgttacgatttaggagctttttagttcattaattttcttggatacttaacaaattcaagaaataatgaatttgaactagagttccgttctcgtaaaaacaaaattcattaatttcgtgcaggagagaacttcagcgttgaccttttcatttcttttcacagatagga

SEQ ID NO: 102091 - DNA, 859 bp, Mimulus guttatus
  Intron number 1 from transcript mgv1a023566m (locus mgv1a0 23566m.g) derived from phytozome v7.0 (chr-ID scaffold_54; pos 621007 to 621865)
cgtcaggttttcggaactttgattagcactaaacattagttgacatccgacttatctatttccgccaacggattgttgaagcttcgattagctgactttaatgtcaactgaaatccaacttctttttgtgccttttttttttcagcggcgtgttgtcattagctccgattgagttaactacatcaagttcatcgctgttgaagtcaactaatgcttagtcaactaatcatatcttcgacgaccagcgaccgaaaaaaataaatcaaatgtcatttaatgttgaatcagctgaatagggttctgacgatccgctgcaaaaaaaatagtggaaagaaaaaacgagttgaatgtcacctaatagttcgttagctaatcatagctccaacgacaggaaaaataaaaatagcaaaagaaaaggaaagaaagaaaaaattgaatatcaattaatattgattaactgtgaactaatcagaactcggacgatctccaattgatttattcatttttgtttttaaaataagataaaactattagggatatctcccaagtcctaatacataaggaaaggttatattaacctcaaaatatagttggaaaaagttacccataaacaacattaattttgtacataagatattgtaaccaatcagaagagatcaaaaatacatgggaactcaaaatacactttggataaactttaatcagaattcaaaatcaatctagatatattaattaataacaaagagatccaaacctaatcaagagtgagaaaaaaaaaaaaaacattttcatctccactctctggtctcccatggcggccgaagcacgtcgtcgttttgtgggacgaggttatctgcga

SEQ ID NO: 102092 - DNA, 563 bp, Mimulus guttatus
  Intron number 1 from transcript mgv1a011373m (locus mgv1a0 11373m.g) derived from phytozome v7.0 (chr-ID scaffold_126 ; pos 522078 to 522640 reverse strand)
ctcatccactgccaacaagaacaaagtttccgagggtacgctgttaatttaaaaaaaaagagaaaaattgaattgttattttggatttgtaaagtgaatcaatttggtaattgaaatcaatccgattttttttttttttttttttttttgagttcgtgtgctgcgaatcactttgtgtcagtcaattatggtgcaatgtatggatattaggtttttttatgattgaatattattaaaaaaaaaatctggatgtgttaatgttttgtgggtttctgttgcttttgagaattttgggctgaagtatccgtgtttcttattttttagtggcttaattgatctgtatgggctgttaatttgtgactacgattatagatggtttcgtctttcgtgaagttcttcagcatttgaatgtaacgtggctttgggagggtggtggagttcgtattttgattttgttctgtttatacgtacacggttgttaaaattgcaaaacagggtacatatacgtgatgtgccacaagttaaacagaaactatagattgctaattgtatctattttgcag

SEQ ID NO: 102093 - DNA, 947 bp, Mimulus guttatus
  Intron number 1 from transcript mgv1a017077m (locus mgv1a0 17077m.g) derived from phytozome v7.0 (chr-ID scaffold_11; pos 2792889 to 2793835 reverse strand)
cagagagaatcacgtcaagaagaaggtcgaagaaggtgcaaatgttttcgattaaattcaaattcccaaaacccccattaaaccctatttattcattgcgtttcatcggattatgcttatatgtatgggtgcattgctgactgaatcacaatcgctttatcttttgttctcatcgttaaatcatgtactctagacatcaatctcaattctaagaaagcaattgcgaaagaatgtgatgcgttttgatcgaaaggtgccctaaattgctgcgaatttcatctaatttattactggtatttgggtattcattggcaagaaaaatgatttttttttattgtttttcggtttttttaatgtaaggaaatgtttcagtcaaatgtggcaatgaaccttttcaatttgttttcgattgcctgaatctgtatcaaattcgaaatattttatgtacttggtctgtataataatgtaataccattgaaaaagaattgtctgtgtataatattgctatttactatttgaatctttattttcttttataatcttcttgagaagtataacagtctaacatctcgattgaggtggagagaacttaattaaaagactctctctctctctctctctctctctctctctctctctctctctctctctctctcttgcccttgttgagatgcgacacttgaaggttctttcgtgcttatgctttattagtatttttctttggagttctgctttcgttcttcatcatattatctacttcttatccatacagtagttttttgggctatgtcttctgttaatgagaatcgaattatagtttatgctaagtgtagagatggcaaagatcagatattttgatagtttatgcaattgtttggggggttttgaatttactaattttaggatgctaataattgttcatcaaaatatcagctttgcgcagtaaa

SEQ ID NO: 102094 - DNA, 653 bp, Mimulus guttatus
  Intron number 1 from transcript mgv1a018225m (locus mgv1a0 18225m.g) derived from phytozome v7.0 (chr-ID scaffold_363 ; pos 112133 to 112785 reverse strand)
ccggcatcgtggccttgcgcgactctaaattaaaggcatcattttttttcccattacgtttttatgccgatttagtttatgggcttgcgttgtgtctttttcttttttttttcctcaccttcagaattttgttctgtcttgattgaagcatattagtcatcagggccggtccggcgtatttgggggcccggggcgagaatataattgttcggtaattcgggggcaacgtccggatttttttttccgcattaataaataatataagaaataaaaaaataataagagtaaaaacattgaaaaaaactagaagaataatttcttttaacaataaaatattttttgcacataaaaatatataatatatatataataaaaaacttaaaatttgggccccctatgaaattgggccctgggcgtgggccctgctcgccccaccccagggccggccctgttagtcattcatttgatggtacaactcaaaattgtgtactgagaattgtcattactgtaccgttaggaaaagtgtgacagtatgtagttagacttgggaagttgatgattttagattgtgtagtttctgataatcatgttcatatatctgtttatgctgaatggatttttatttttttttccctttccgtagacatttccag

SEQ ID NO: 102095 - DNA, 599 bp, Mimulus guttatus
  Intron number 4 from transcript mgv1a009660m (locus mgv1a0 09660m.g) derived from phytozome v7.0 (chr-ID scaffold_219 ; pos 321055 to 321653 reverse strand)
ctcgtatcataaggtgagtgttgtcattcaagtttatttgaatttttttatggagcttttttttaaacaatacgtaatttgaatgcgtgtgccccttagttattgttagctagcagattaggtagtttatgaattagacaattaccaagcttttcgttcgtttcttgaatgagcaattcagctcttttttttttctttttcttttttcactttcaagattctcacatcatataataatttagaaattgtgtttgattatctgttgaatcgagctcgaacgactactaactagtcgaacatgaatcgagctcgaacgagagtactaactagccgaacatgaatcgagctcgaatagtttgattgtcaatataaaacatcgatttaatcaatttttgcccacgtaagatgtgttttcaccgaagtttcttgtcgtacaccaatttcacagattttttttaaaatcagtttaatcaatttccgattgaactcgtttttggcatgcatcacatattgtttgtcggattataaatattttgaatgatttataacttctttctttttcagtgggcagggaaccatatcgctagagcttttggagc

SEQ ID NO: 102096 - DNA, 665 bp, Mimulus guttatus
  Intron number 1 from transcript mgv1a009660m (locus mgv1a0 09660m.g) derived from phytozome v7.0 (chr-ID scaffold_219 ; pos 322568 to 323232 reverse strand)
gaaaacagtgtgagagaaacagaggaattcttactgtaagttttcattaatcccgttttcatacatcaattcttgaaacccttttcttgtcggtttgatcttgtgcagagtatgttctcaattcttctattaaaaaataaataaataaaattaggtttttttagtgtgtgtgtgtgtgtgtgtgtgtgtgagtgtgtgtgtgtttgtgtgtcttttttttttaagcacttctgtaattgttgatactagttttgattagctgtagactgagttagggttttgttcggtttttcttgataattgtaaggggagccaggactatgatacaggggggccatcgcccccctcccattgcttctcaaatacttggtatttaataataaatatttgttaaacctgatgtatattacagtagaacctcgataaattaataacctcgattaaataatggtttatctcggtgaaaacgtattaaattattaactcgataatttaataattcgctaaattaatagaattttcctggtcccgacagtattaatttatagaggtttaactatatgcatgtatttgattaactcatagatgtaaattccattcccttctcgaattccgatactatttaattggatgaactgaaaaaaatcaaattcgaatagtttcag

SEQ ID NO: 102097 - DNA, 631 bp, Mimulus guttatus
  Intron number 1 from transcript mgv1a005395m (locus mgv1a0 05395m.g) derived from phytozome v7.0 (chr-ID scaffold_4; pos 1652385 to 1653015)
gttaaacgcggtgttcatatcaagtatgcttcttctttcaacttttttttttttttttttttttttgattttttttttaaatgtgggttgtattttgatcttgatgcttggttaatttatactaattattttcacatttacgcttctttcaattttctttttatttttatattttttttgtttttttttttaaatgtagggtatattttgatcttgatacttggtttatttatatactaattatttttacatttgtgggtttttgaattttgatttgttaataagagaaagaactgatctttcttggcttgattaatgttgttagtaattttaatattatgtttataataatgagtcaagaatttgggaagtagctagttttggttgtgcatatattttttcgatattcaatcaagcgaaaaaaaccctacccggattctaattagagctgattctgctcagttctcgattgaattggaagatcggatatctcggtttgtgcacgtcggctcgtttttagttgggacttgctatgtttaatgaagtattcatgcgtgaattatggcttaaaaattaactctctgcaaatattgcaggtttgttgctgtgggaaacgaaccatttctgagta

SEQ ID NO: 102098 - DNA, 295 bp, Mimulus guttatus
  Intron number 2 from transcript mgv1a013049m (locus mgv1a0 13049m.g) derived from phytozome v7.0 (chr-ID scaffold_257 ; pos 228357 to 228651 reverse strand)
ccaacaatctcctggatttctctcctccatctgaggtacatatatatatatatatacacacactttgtatctatctttctttaacaactagggttttgagaaataaatacaatatagtaattgtaaattaattacttattagtgtaataattacagatctgaaaagggttttcaattttgatgatttccacagccaagaatataattccttaatcatgtttattaattattttaatttaatttgttttttttttaaatagtgcaatagcactgcaacaacaggtggggcagcagc

SEQ ID NO: 102099 - DNA, 554 bp, Mimulus guttatus
  Intron number 1 from transcript mgv1a003896m (locus mgv1a0 03896m.g) derived from phytozome v7.0 (chr-ID scaffold_16; pos 1270225 to 1270778)
ggatcttcctagtatgtatataattcagtattaattaatttagggtttttggagtaatgaaattatatggctattttgtttgttcttgttcagttcgatttttttcttgcagaatttgctagttggtatgtaattttgttgctgttagttgtgggttttttttaattatcttttttttttaatgtttatgttggttttgctagtgaatctcgatttagatatcgaattaagggtagcaagttgaaggttgttgggagcaaataatagatctgattttccgaataatggggtttgttggttgcatctctgtacttgagaatttgagttgggattttatcgtttacgaattacgactgaataaatggagatatggttatcactttcttcatacatcttacccgttaatttcgttgcttggatggatgatttacttgctcacatgtttaacacatatggatttttttcttctttatctctgaatttgaaatgaattttatattaacggtggtgcggttttaggcttttcgaagctgaggagtagagatttggagtgg

SEQ ID NO: 102100 - DNA, 418 bp, Mimulus guttatus
  Intron number 2 from transcript mgv1a003896m (locus mgv1a0 03896m.g) derived from phytozome v7.0 (chr-ID scaffold_16; pos 1270995 to 1271412)
gaattggagaaagctggcattgtccaggtgagggttgcatcattctttcatctataccctatgtcgtatttttagctaatagatttgctaagaatggcgccgaataaacgtaactagtgtgtaatgattgcatggtgactgaattcttggatgtgtatgttggaacaagttatcatgaatcaataaaccaaaagaaaaggaaatatacgattttgttttcttgattttcccttgagatagtatttcgatttgatgtaagtcattgatgttacttttatcagcactaaaggaacttccgttgcaataataatttgtgatcattgtaattatcattatcatgacatgggaactggttcggaggatctgttgttacagactctcgatctttactaaacttggtgtattttggtgcaaaagg

SEQ ID NO: 102101 - DNA, 490 bp, Mimulus guttatus
  Intron number 1 from transcript mgv1a004662m (locus mgv1a0 03785m.g) derived from phytozome v7.0 (chr-ID scaffold_8; pos 1123212 to 1123701)
aacagcggtaagcaccgggcacctcgtttctgaatctgggcagctgcttctcttttctaaatgaatctcaccagatcatttcttgcttaaaaaaatcggattttttttcccctttttgttttcggaaatgattttatttatgttggaagaagtttgctattatattgaaacatgtataataataatttggcatgctattaattttaaaatacatatataattttcttgacagtgatgatttctgactgaccaaaatcatttctgtgaacaaatatctgcttgttaaattatttgctctattagttagtttttttttgtttttcgattagtgattgtagtcttgtattaggttcaggtgttcttgtttgtgttcttatgcggtcggtactttgatatgttgtgatgttttattgttcgcttaattactgtaaattatgtcgtaacggagatatgttcaactaatgtttcatgttttcccacttacgtagca

SEQ ID NO: 102102 - DNA, 529 bp, Mimulus guttatus
  Intron number 1 from transcript mgv1a000432m (locus mgv1a0 00432m.g) derived from phytozome v7.0 (chr-ID scaffold_11; pos 721786 to 722314 reverse strand)
aggtatacacgtgtttaattatctgaaattaaatcatcttttttttaacatcgatgggtttgctttctttctctgaagaaaccttacatctacattattaccatgtttggagttgctcttttctaatgagtagagttgtcatgtgttaataatttatttctctacccaacaactttttaaacctaatttatttatttgtacagtgggtttgtttgttggtctgctaagattttttggcattgaaaattcaccagcttcttctttagtttgcgatctttatatgaatcgggagagtttttgggtaatttcacagtttgaaacataacctgttagtgtctttcttaggttatacagttttccatcaattaatccagttacttgttgtagtgattcttagttcctgtaaaaaccaaatttcctttcatctttatggaagggtgttgtctaaatttgttgcgggtgtaaagattctgctaaaattttctgtctgaccatttgattctttcagctctttgagtatcaatacaac

SEQ ID NO: 102103 - DNA, 1005 bp, Mimulus guttatus
  Intron number 1 from transcript mgv1a004467m (locus mgv1a0 04467m.g) derived from phytozome v7.0 (chr-ID scaffold_124 ; pos 428035 to 429039 reverse strand)
gcgtcagtaaattctaacctaattttttacttttttttttaatttatttattttattttttattatagtttttgtgttttttttttttttaattctagtacaaagtggatttctctagctatgttcatcatcaaattttgcattaaatgatttatgtatgtgtataactgcacatatatatatatatatatatatatatatgtttgactggtcaacttgctgctagtgtgttcagattcttgtaatatcttttttttttcttttttttttttgtgtaaacgtttaagctggcaaaatatgaaactggataaaaatacagtcttcattttaaatttagtgtatgtagttgaggaaggggctggccctgaattcactatatagttatgcttcatagatggaatcttttgcggtattttcggcatcgacttaaaaaaaattatttcttttgttccatttttgctagtttgctgggctttttcaatcattgatactctgttttcgtgtttttttcgtttttttagcaagtaaggttataaactaattaagattatcgatattatttatttcaaagttcaaattttatggagttaaaggaaggcacctgccctaccagccctcgctggatgtttaaaatcgtttattatgtaaattgaacttcaatacactttcatgaatggcatcttttgttctttctctgttgtggcgttattccattatttttgtcaatttatccgtagtttagatttagtgttacatttgaggtctcgtttggttggtaatataatcccataactaattaattaattacgtctactttgataactggttagtgcgtttattgttttcttgatttattttttgacgctatcgaattacgcctttttaattcctccaaatgcacgaacaaacgagatacgaaaaggaatatttcgatttaaaaaaaattgttcacaatttttcgattttgcagccgaggctatcctgcttggatttcagcattattta

SEQ ID NO: 102104 - DNA, 453 bp, Mimulus guttatus
  Intron number 1 from transcript mgv1a001435m (locus mgv1a0 01435m.g) derived from phytozome v7.0 (chr-ID scaffold_102 ; pos 331444 to 331896)
tcccgcagactccttcccaattcatcgtttctcaggttttgcttttgtgtcactttcaatttgtttaatattttctagggctcgatttgattattgatattgtgaattgatgattggagattgtagactttgatgaaattgatttttggaagaactgatcacactaaaataacataaaaaataaaaaaattggtatgcaaaaagaaaaattatccttctgttgcctaattgttagcttttcgatatgcactaagttcactactcagtttatatgaaaaaatgaccgaaattttgcacgttacgatttccgtttttaatcgggattcttgtgagctgacacactcgattgtgtgttcaagtggatgacgaataaacacgtgttctcaaatttctttgccgaaatcgagataatttagtggtgttatatgtactttaattaaattcagtttgggc

SEQ ID NO: 102105 - DNA, 557 bp, Mimulus guttatus
  Intron number 3 from transcript mgv1a019475m (locus mgv1a0 19475m.g) derived from phytozome v7.0 (chr-ID scaffold_191 5; pos 3782 to 4338 reverse strand)
gagggtgaagaacttgcgtttggtaagacatataggtaaatcttctctctctaataaggcctcgtttggttgcggagattagccatgattattaactaaataattagactttgttcgatgtttggtatcccaataacttgccaggtcgacccacaaatactacgttatcatgccttttaagcatgtaatacaattgagtttcattagattatttaattttatcttggctaatcttattctgggcgttcgttttttgttcattggttaaaggaatcaaattgctagctactttttttttcaattaacttttagttttgctttttttttttttttgcaaaattgtgtttacaccactatacttacgagttacttcacggcaagcttttgattcgtacgttagaccagtcgctcgagaaaaaaatcataaaaaatcgtgttatctatggctattttgatgttggcgaataaattcccgactggcatacttgtaaattgttttcagaaaacatgttcacaatgtatatatttttatgcagtgacgggtgcctcgcgtggtt

SEQ ID NO: 102106 - DNA, 865 bp, Mimulus guttatus
  Intron number 1 from transcript mgv1a025714m (locus mgv1a0 25714m.g) derived from phytozome v7.0 (chr-ID scaffold_88; pos 940277 to 941141 reverse strand)
aacacaccaaaactgtcggcattgtccatttaaaggtcggtaaccgataaataataataaaaaaaatatataaataaattttaaatttgaggtgtagaaagaagagaatggatgtttaggaggagagatgtatatgtggggagagtgaaagtgaaggattgtcttttatggtgtgcagtgtgtactaatagtctcaacacttgtacacatataaagtattttttgccactataggcaaaaaattgaatcccaatttttttttaccaagtctcgttaccatattttcttcatgacaattgacagcagaaacaattccaattgcacgaatagccaccaaatatagctttgatatctgagccatgataatgatacacttttttttttcccattctttctttgctggctgtaaattattaaagatttatttccctttaaaatgtatttgaaaacatttaactgggtgtgaatctaaagtgggtcacatcagcaggtgagtgtttatgagagaagccaaaaaccaaattatagggcaaaagtggtgtaactgtagtctagctattttaatttcctttttttttaattgatgtctggtcacatcaaaatcttctggggttcattttttttttgactaattttgttactgtaacagtataagtttaaaaagaaatgacaatttctataataacatagtcggtggtaacactcttgatgtgtccggaaaacaaagtaaatatttaatttgacgggtcgacccaatccgacccataaggaatagttggtagtgaagaagttactagttgttgtttattgtagtgttgaagaatattatgaatacagatctcatcgttccgggagagcaagtcag

SEQ ID NO: 102107 - DNA, 904 bp, Mimulus guttatus
  Intron number 1 from transcript mgv1a024057m (locus mgv1a0 24057m.g) derived from phytozome v7.0 (chr-ID scaffold_125 ; pos 711439 to 712342 reverse strand)
cgctcaacttgttcttcaatctggtggcggcgtcggttctaatattgccgtgtttatattattatatccgtaaattgtacgtgaataatgtgatgatttattacgggttgttcttcttgaatttcgtctccttgttcaacatggttgtttctatggcgtacacggtgttttatttccggtgtaagaagcaccacggcgaagaagaagatgaagaagaagagatagatataactattaaagttggagatttgcaatacactaaattacctgttttgagtagtgatgatattcactgagggttttggcttatatagtatttacatacactctttgattttcactgagtgtatatttaccgttgatctacacacaccaatgtgggtgtgtctgtatttgtgtgtttattaatcatgatcatatatctgctatataatttggttcaagtcaaataaaaaaccatggccccaccgtattgataccccaaatcacatagcaaacacttatatattttcttatatgttacatatatatttatttttcctcgttgcattaataaataaatgttgatcaagtcaaaataaatattttaatgacatgtgcatccaatatttagtggactctttaaatccttaatactttcattaaatctttaatattttcgtagaaagatcttttctcgagtatcaaacgaattacatggaagaaacacttctcaagaagatcatactcatcgtcatcgtcgtcgagttttcttgtaatcgttgtcgttttagctgttgtcttataactatttacgtatcccaattttatgacaattcgtgcagccgttattttcgggatagttgtttttattttccagctgtattcgtcggttgtggtctctattgttgaagatagttcgagg

SEQ ID NO: 102108 - DNA, 494 bp, Mimulus guttatus
  Intron number 1 from transcript mgv1a007568m (locus mgv1a0 07568m.g) derived from phytozome v7.0 (chr-ID scaffold_124 ; pos 632696 to 633189)
tggtgagtgtattttgtttacgccctaggtttccaattcgtgtgtattattattatcatcatcttattttgcgcaattttgtttctctatatacctttgcttgtatcaaatttagttgaataaatagcttaaaagctaaagttgagtaaataggtagcttaaaagctaaagcgaagaactggtgttcgttgtatttcttctttaacaagttctgcatcaatttatagtatacattttgatgtatttaagtctagggagaaaacgaagtagtcgaacgataaacaaagtggtctgcatatcatgtttgcactagccttttgcttgctaattgctttaaaactaaacaaagaaaattgcgtcgtactccattaatacgtaagatccagacattaaagaatgtaacaagttaattttgatgatgattactgttacctgattcaaaattttcgggttttaaaggtcaattacaatcgcggcagctcctggtagctttc

SEQ ID NO: 102109 - DNA, 847 bp, Mimulus guttatus
  Intron number 2 from transcript mgv1a003083m (locus mgv1a0 03083m.g) derived from phytozome v7.0 (chr-ID scaffold_12; pos 1762803 to 1763649 reverse strand)
tgaaacttttggaggaaattttcaagatagtgcaggtaatgtatgcttggcaattttggttactccttcaagactatactagcatgtgtataaaccaaaacaaataagaatgtgaagttcttttaggatattttgagtatttgtgtaattttctctccatttaaattgaatagggattataagttatctaatacagactacctgcctgatccatggggcatgatttaggactaacgagttcatttcaaatcagcagaagattataacattgtgaagtttgtcagtaaagatgttgtgcttgtgtacattttgttccatctggggactgataagtgttgtttattttaacttaattcaattttttactgttgctggaagatcatgtatcaaaagcttttctgttccttctttttcttggcttaaactatactaaatgggtgttagttagtttctccttcgcattggacatgtgtctattaatcgacaggcttgtgattttagattgttagttgcaagcaactagggtccttagtatttaatttagaggtatgaaatcgattttgaatgtcaaattacgagatatgctaaaaatttgttcatagagtatgcattttgttttacttggtaatataatcattctaaagagtgatttctttagaaggacattcattgcagcatagactactgatagcttatgcgactgtctgcccgtagatatgaccatggacacatcttatcttcatatttgcttagagcaacttatcctaatactggcatggcgtaacttaattcttttcttttagtgaatgcagacacacttactgcgggcttctgaggtcaaaagagc

SEQ ID NO: 102110 - DNA, 822 bp, Mimulus guttatus
  Intron number 1 from transcript mgv1a001950m (locus mgv1a0 01950m.g) derived from phytozome v7.0 (chr-ID scaffold_113 ; pos 627592 to 628413 reverse strand)
caggtaatagatttaggtcttcttcttcaaattggaaatggttatttatgctttaagtccattttctctctcttgaattggaaaatggttcagttatgctataagtagattctcgtttttatttatttctgtgggaaatatggaatgtgaacttacagcatcatttacatacctttgattggcaatagttgcacagtggcactgtttttgcttgaattcttgacaggatgttcgaagagtatgcaaacctttgtgatgctaaaacagaattttgacttattttactagacacgtctttataactaagattttgtggaatttttacttagtaatgcacgctgtttatccatataaccatcacttctatctttttaatgatgcttactggatactgtttttgttctattttttcatggggaggaaatatcaatggaaaatgacttgttttattgatttctgtgttcatgaaattttgaattcgtgattaattgtgagattgtgatgatatatgaagggctatggaccacagtctgcagaagagaaacagagacttttcaaattaatgaggaatctcaactttaatggtgaaactgtgtccgagccttataccccaagtgcccaaagttcaggtgcatttgctccatcagagggattttattctccggaattcaggggggattttggagctggacttctggatctacattctatggatgacacagagctcttatctgatgtatgcttattgaaaattatatgcttcttggtaaaactcgaaaggtcctggctattaatgaacaactcgctttaatttatttcagc

SEQ ID NO: 102111 - DNA, 693 bp, Mimulus guttatus
  Intron number 1 from transcript mgv1a011200m (locus mgv1a0 11200m.g) derived from phytozome v7.0 (chr-ID scaffold_7; pos 3177948 to 3178640)
cattgtttccaagaagaggtataaattcatttgcccttttcattatgtttgtatgtatatgtgtatgtatctataaatgtgtggatggtttttccttttttttttttttgttttttttcattttgtgtgtgtatgggcaatttttggttcttgatgttgtttatcttcttatgtaaagttgtgcaattagattcaagatttcattcggtgtcgcgcctctttagttcgatgtacttggtccgattatgttcgagttattgggtttaattagctgaaagttcagttcgaaaaaacgaatctgaatgaggtggcgaagtaactaggaccctcctcgtttaaagacatgttttttttttgaagatcttgctcaagattttgaattgttaattagctaatgttacttattgccgattgatttaagtgtgatgcacattaattgaaaaattctgttttagaaatctctccgataatcgtggatggtcgattgtgctgttttgcggcttatccaaatcccgatgttagattttgctaataattcattggaccgttatatatgcacactttgcttgagtttttgtttttacttgtacgccaattgttaattggggcgtgcattcgactcgtctgtcgttttatgttgcaactttttatgtgtcagcttatcatcttcgacgagtatatttataccaaaag

SEQ ID NO: 102112 - DNA, 1044 bp, Mimulus guttatus
  Intron number 1 from transcript mgv1a005443m (locus mgv1a0 05443m.g) derived from phytozome v7.0 (chr-ID scaffold_195 ; pos 139230 to 140273)
ttcatctataaatttgggcagtaccgtctaggaaggtaagctctcagaaaataaccgtaaaatatatgttcttcataagaaagacttgcgaccaaaaataacttaacgtattaaaatcaaatactttaaagaagattactaacttggccgtcaaattgctaaccccgacacgagtccgaattttcctctcttctacagatttgtttaaagattcaaggcccaatccagccctaaagcccactttaaagatcaagtctcatcctaacaaaaatatcatgaattgggaccgatcacacacgatctatatctctcccctctcgatatcttatatgtttctctctctctctctttcttttgacgattcgtccctgaccttgttcttctccatctcaacgaaaacccaagtgatctctctctctctctctctctccgattgatcgaccgcatttctctcctctctggtggtttcattgtaaacggcgacggtggcgtggtgaaaaatgaaggttctcaggttgatggtggtgttttcattgagatgtgtgtgctaggatttccacatgacattgttattctttaagcagtggtgtttctatttcaccagtgacggttctctttcactacgagggatttgaagatgagaacccaatcgagaaatcggtcgatctaaggggaaatagtagaggttgacctttgaatgtgttgtaatagtagttgatataaatgctagaacatagttgttttaattagacatagaaactgtatttttgcacaaaacgggtacaaacttgagaatattccataaaatcctgaatattccactagatctgacaccgcaatgatgaatatgtaagaagattcatagttgaagggtgattgtaattacccaaacatgagtggttagctgtaatttaccctaataagttatttgaaaaataaaaaaaggtaatgtaaaagcactttaaatagacacggctgaactgttgggctatttcggccaaacattaaggtgtacacataacacacacacacacaagagcgtag

SEQ ID NO: 102113 - DNA, 707 bp, Mimulus guttatus
  Intron number 1 from transcript mgv1a015687m (locus mgv1a0 15687m.g) derived from phytozome v7.0 (chr-ID scaffold_54; pos 198858 to 199564)
gaggtatacgtttcttctttgtgttttcctccgtttgcctgtttttctgttcatcattttgctttttctttttaagccgtggtttctttgaaatagatctacctgtttaatgaagttcgcgattgttttcttgtctctgtaattttgttgatgatgaagcgactcgtgtttttttaaacattttgatgtgaataaattaattgtggcgaagtgagagtacgttcaacgcttctcgatttgtttattttattttaattttgtttttctgtgtttttgcatctaggatttaggtgagacttatggttcatatatttggtgaagcgagaaaaaaaatcggaagtgaaatgaggataaaatgaatttcctcttgaattaatttatttcttcggattagtttctgtcttcacatttctgcgagaactgattaggactgttagtgagtcgattggaattgaaatttatagccacttgtgtatccgatcgtcctcttaatcgagattaatttttattcattttactatgaaaatcgccatctctttgttgttggctgataagatttttaagcatataataggagcagccatttaattcaatgtgatgggaataagcttgtatatgcctctaatattgtgaaaacatatacggttattttactgttgaatgatcgttttataggttgtatcacatcgaaggagttgggaacagtg

SEQ ID NO: 102114 - DNA, 586 bp, Mimulus guttatus
  Intron number 1 from transcript mgv1a008227m (locus mgv1a0 07762m.g) derived from phytozome v7.0 (chr-ID scaffold_64; pos 201541 to 202126)
ctctgaaattcaagatcccgaggcagcttgccgaggtgatttttccttctctcttcttgtaagtgcaacaaattactagttggaatgatgcttgtttggctgaattttgctttcctcgtgttgtaaattaagaatatttagactgtactcggatgatttgtagttgccctttgttcagtttcgatgttcatgcatttttcctgtgtaattacgctacaatattcaatgtcccttttttttttgcaatttgattgtaagtaaaagttggaacctatctttactagctaatggtaactgatattagggctctttccctgttggttcttttatctcaatagcaaacagtaagaaatgtattgtaatctatgcttcgagaatgcccgttcatttctacctgcttgttaatttgacatcaatgtagattgtagattgtacttttccgtgcacttattaactgtaattacttggatgaatcttgaaggattcatacaaagtttcttattgtgtatatataataagaaaacagcctcgttgcatttacatttcttcaggtgaccttgaatcactcgagaagggtgtctgtgtc

SEQ ID NO: 102115 - DNA, 948 bp, Mimulus guttatus
  Intron number 2 from transcript mgv1a014927m (locus mgv1a0 14927m.g) derived from phytozome v7.0 (chr-ID scaffold_45; pos 489162 to 490109 reverse strand)
tctcccgcgcttgggctttcttcctccttgaccaggttcctttttattattttatttttttgttaatattaataacatgaaaaattcaaaattcaagacagtacagtagaactcgataaattaatatctccctaaaataattttaattatttcggtcatgactcggtaaaaatgtactaaatttttagtttgataatatattaagtaggttttgttaatattaataacatgaaaaattcaaaatttaaaattcaaaatagttcagtaaaacctcggtaaaataataacacagcttaaaataatagtttttttctgttaccgattcggtaaaaatcttataattattagttcgataatttaatatttcgttaaattaacagtattttgttagtttcgactgcactaatttatataggtttaactgtaaatggatattttcacaaattcaaaattaagaaaaccaagaatttgaattaattaaattatggcttaaattcgatttaatttctatctcaacttgaattaacttttttttctaagtttgcaatttattgcattcttaagggttcattagtaatttgttgcatcataattagttggctcgtcaaacatcaagttgagatccaaaagaattgaacttcaaaaattaataaatttaattatcatacctctaaatttatgaaaaaaacaaatcaagttcaaacacgtaattgcctatactatcaattatcaaatcactcattttaggttaattaatatatgtcctgtcaattaatcactcacctaatttcgaagaatttgatctatttctcaacattaattacacgttcattcaactcacaattcatctttcaataaatcaaattcgaaattaacaattaattccatcggaaaaaaataataataaatgcagcttctgacgtacgtaatactagcggcggcggctat

SEQ ID NO: 102116 - DNA, 687 bp, Mimulus guttatus
  Intron number 1 from transcript mgv11b019919m (locus mgv11 b019919m.g) derived from phytozome v7.0 (chr-ID scaffold_1 47; pos 321537 to 322223 reverse strand)
tccatttgagcgagtgtgtttgtgcatgtttgttgatttgtattagtgttctaggattgtagtgtgcgttttcatgatccttttttgcgaatgccgttttgcgtgagtaattttgtgcatgattttgtacttttacttatgtgcgtatcttttgtagcgagtgtttttgtgcacgattcttgatgcgcattcgtgtcctcgaactgtagcgggtattttcatgatcgctgttggaatccaattttgaccatgttcaggtccgaatttggaaatttgacattagtcaggaattgtagccatctcaaatagctttctaatgcctccggaaccagtcgatttggagttcggatgagaaagttatgctcgacttcgtggacgttaccgaagatgttgagggatcctctcttctattttgattttaatttcctaattgcaactcttttcttactctttgatcatttttgcttcatggacacctaattatcaatttgtacctatagaatactaaatccaccaattaaaaaagaaatataaattaatccataaaaaaatccacgtaaacgtaaacgttgagtgttatttctacactccactgtatcttttgtatcttgtgtttttgctgttgtttggttatgcgtatttaaagtcctcgtgttgtacttcgtgtttttaagaacgttgttgcga

SEQ ID NO: 102117 - DNA, 505 bp, Mimulus guttatus
  Intron number 1 from transcript mgv1a006103m (locus mgv1a0 04313m.g) derived from phytozome v7.0 (chr-ID scaffold_83; pos 901088 to 901592)
tttctgacctaatcttctcgattttgattgataaggtaacaattatttcttatgtttcctatttctatagctgttgatgattctctggtttcgattgatgtatgtttcgtgtttttggttttaatttttcggattgtctattattatctttcatcgatggtttgtatgtttccgatgcaagcaaattgtgaacgaggttttaggagaatcaatcggatgtgtggcttgattgatgcagtgtcgtctgtttatgtgatctaatttgattttgattgttgcaaggaaaaagtttgtgtctgatccccgttcgttgtagttttaatgtttgagtggattggatagattattggataaatcattgtcttctatatttcatcgtcttgcatatagcttttctccgagaaattttgttgttgtgttcagtacagacctacagatgattctacgatactgtagaaattgtgtatggttggattttctctgttaaccgtgtttaattgtacag

SEQ ID NO: 102118 - DNA, 536 bp, Mimulus guttatus
  Intron number 2 from transcript mgv1a014290m (locus mgv1a0 13044m.g) derived from phytozome v7.0 (chr-ID scaffold_63; pos 860899 to 861434 reverse strand)
aacacaagcgaagctggaaaggtgctcttaaaacggtaatatttctggtgtgcttgtatattttggtgaattttctttgaactttagcatgacactgttcttagttcttaatgactggtttaattgtatgttactaaaagacgcgtcttttagttatttggaagaatggcattgtcaagaaatggttacatctttcaccgacttgaatagaattaaacttgtaatatgatagaggtcgtttcatcttgaagatttttcttcttagagcttgttatatttaatatttttaatcgggtctccaaagttagcaattgaaatgaaaaggaaatccataaataataacaattgttgtatggtgaagattcgatacttatgtttattggtaaatgtgcttattgcttgaaatatagtagtcgaaccataaatttagtcatatgacctttcctttcataatttagtagacttgatggataaattttgattgtggtggatcttatttattcagcggtgaagggaaattcgagaaacagtatcga

SEQ ID NO: 102119 - DNA, 568 bp, Mimulus guttatus
  Intron number 1 from transcript mgv1a009042m (locus mgv1a0 09042m.g) derived from phytozome v7.0 (chr-ID scaffold_58; pos 1241289 to 1241856 reverse strand)
tccggagttctctcccctttcaatttttctcgcaggtgcgtatacctttccgtatgtatatacagtatatatatatatatatatatatatacgaattcatttcccgatcactgtacacattattttatttatatagattcagataccctaattcaagccagtgcttatctagttgtttatatgtagatgcatttttagttccttttaaaggcctgaacaattattgtatatttcagttccaataattaattatttgattcgatctatttggtgataaaataatcgaattttttgtctgagggcttatacaatagctaatttgttcctaattacttggatgattatgactgtgattgatgaggaaaaatgatcatcagataggaattagctcgaattagtgtttagaatgttttgcatcttcttatgtaaatctttacaactccatgtacaaatattttgcaagatctaagaaacgaaggtaatgtactagtcgatcatatattgtcgacaccgcataaacagcgaattagctctaattattgatattatggcagggaaaacggtgccg

SEQ ID NO: 102120 - DNA, 478 bp, Mimulus guttatus
  Intron number 1 from transcript mgv1a001707m (locus mgv1a0 01707m.g) derived from phytozome v7.0 (chr-ID scaffold_279 ; pos 38854 to 39331 reverse strand)
acacacacattgcgcaacccttaatttcaccacaggtaaggtaaaccctcgctcagaattatctatcttttcttttcagaatcgccccataattcgcactatttctgatttttccccctttcttttgctgattttggttttggattttcaattatttgtttatctctgacctatgttagactcttgcgaaaaaatgctgctgtattcttagggattgattttgtttttttttcctctttcatcttgtgcatgtctttgtttcatttcgcttgttaaaaatttgccctttgtttgattttatttttgatatctgtgtgttttgctgctttgactgtgttcgattcccttcttcttcttcttcttcttcttcttcttcttcttcttcttcttcttcttcttcttgtctctgagtctgtgtgattttatcaactaacttttgtttttcaaataaaaaggagagctttttggcattctggcg

SEQ ID NO: 102121 - DNA, 850 bp, Mimulus guttatus
  Intron number 1 from transcript mgv1a003899m (locus mgv1a0 03899m.g) derived from phytozome v7.0 (chr-ID scaffold_266 ; pos 53134 to 53983)
gttgctttcacttcagagcttcgcgaaggtagtactcttattacctagatctggtttttttgatttttaattaatttctggttttgatttttgagagatctattgtgataggttttgtggctgaagttcggggtttgtgttttacatcctgctgttttattggcttgatctttgttttgtattgagttgcggatgttttataattttggttgattttttttagaataatttggtgataggttactgttgtttctgtactgactgttgtttggatagtaactgctgattatgactgtttttcttttattaagctgttgaatttttgttgttgatctttcgttggtttatgttttttgtaagagagattttgggttttggttgttgtagttatccgtggtttttgtatggtctctcgtgtggatttgatatggtgatgttaattattatgattatgggcattcaattaaccaaattctcgtgcgcaaactaaatatttgggtaaaattataaaattatgttgtctgttgatatgattatgaatttctggatttctttaccaggacatggttattttcctctaattgttgtatgttcatagttcgacaattgttcattgcatctgagtctgtattatgcgtatcatcaaatcattaaattaaacctattattttcattagcgtctatgtttattggttttctcgtttttcttcaatggtttagcatacggtttggtcattgtatgctaataacgggttgaattgcgaactttatccaacattcacacttcttactcggaagacttcattcatatgcaggatttggttgactcatattcaataccacgcttgca

SEQ ID NO: 102122 - DNA, 957 bp, Mimulus guttatus
  Intron number 2 from transcript mgv1a003899m (locus mgv1a0 03899m.g) derived from phytozome v7.0 (chr-ID scaffold_266 ; pos 54821 to 55777)
cttactcagcttgaggtatgcgactttgtcagcgttgataacttctgatctattgtcgtgtcaaatttgaaatgcgttctataaattgtaacaattgaattttgacttaatcaactgatctagcccacagggtggataaatctaagtgagacagatatgccttgaataaaagcattttgtgctgcttgatttcattgatcatgctgcaacttgtatttgaaatcagagaataggaaattgttattcattttgttttataggtgttggactaaatatttatttgagtgaagaatgtaaaatgtgtatgattgttttaagatttgctcatctacttaagttccttattcttctgttctggtattatatacacctgacatgtagctatacacattgttggttgtaatgtgaaaagtgtaatctatctaactaacattcaggtactattttttttgtccaatactgatgtcagtttctctagtttggcgaaaatgttgaaccgtgtattactactgtatcattaactttatgctcgggttttggactacctatgcattgtcattaactacaggctaagaatggttctctcacactgttgtagcatagaatgtataatctatgatccctgtagttgttacccttaaggtttgaaataaaacaatttgtttgtacttctatgtggattcctgttattaagttagtttatctgtgaggaagttagtgagatggaacattgataaactgtagatgaaaacttatgctgccaatacttggtccataagacagacaagtctgtaaaccgcacattttgaccaaattgtcaacaaattgcttttgaagaggcaatttttcatctaattgttttgttattctttgttactaatgcacagatattctggcattttgctttcctatttgtaattaacggtacactgcacttgcgagtgcagcttcaggtgg

SEQ ID NO: 102123 - DNA, 917 bp, Mimulus guttatus
  Intron number 4 from transcript mgv1a018276m (locus mgv1a0 18276m.g) derived from phytozome v7.0 (chr-ID scaffold_92; pos 793564 to 794480 reverse strand)
gggtctcgactctactgacttggtcgctctatcaggtatacttaggcctcgtttgttagacgtctcggagtccaataaaataattgattttcatttcaattttaatttttgactaatcgtattttgtcagccaaacaaggccttatattacaagatgaatattaatcatgacaaaacacaaatctaaattcaagattttgaataaatatttttactatatggtgcaactcaaacttgcactggacgttcttttttttcatcgatttgtcttataagtaaaatactaatcccgattcacttccaaattttttttcatttggaaatcggaatgaaatttttttgttgcaaagtcagaatttcgcgaatcagaatcagttgaattcggaaattatgctccaatttatcctcttaatataagttaatatattatagtcatattataaatataatttcccaaaaaaaagagagagaggagtttgaattagtttttaaaattaaaatcaaatcataaatcaaaattgtataaataatcccaattccgagatgcaaaatatttcaggaatatcgaaaatcgggattaaagaaataggtttctaaattcaaaagttttcgatttaattcggagaaattctgaaactccactattaccattcttcaccttcatacgctacacattttttcttatatgctacggtagtttggttggaaagattaactatatatgattaactaaataacaagtcaatgactttttgagtcaaagtcgcaaatattattttatcattttttatcttgacttttatgttttttcattagattattttatcttatattggctaatcatatcttgacaaccaaacgagatctaatagtatatatattgtaatctcaggtgctcatacatttgggcgtgcaaa

SEQ ID NO: 102124 - DNA, 801 bp, Mimulus guttatus
  Intron number 1 from transcript mgv1a023770m (locus mgv1a0 23770m.g) derived from phytozome v7.0 (chr-ID scaffold_44; pos 350873 to 351673)
atcatattcttattctcggttggagcgacaagttggtaatttttttagtttttttttttttttttatttgatgatgttagattgtgaaatttggaatgtgttgtggggtttttgtaatttgattgtgatatttggaatgtgttgtggttttttgtaattgtgttgcgactagtggtgggaatcggacggatctgattggaatttggcactttcggaaaaactaaatccaattcctttctgaaagatttattttttggaaaaatcataaaccagaatttcggaaattggagtgaaaaaacttgtgttctaaaattggaaattttcggtttgaaaattgagggaattcggaaattttattctttttagtcacatttaacataaaatgcatactaatattggtattcggagtgtttgattttcgaaaaataattgaaattttcgggaatatttttggaaattaaaatcggatcggaaattggaatctaatatgtattctaattcctttccaaaacaaaaaagtaaatatcggtatccataatgaaaaatattgttccaaaatgggaaattttcggatcacaataggcggaattcggaaattccgttccaatttccacccctaattacaatgtagtatacaagtgttgtcttaatttattttttctaattgttgtttttcttcttttcggattttttttaattattattattaatttaatttttatttttatatctcgaggggttaacaaatgatactcgattattacagggttcgctactgaaacaactagcaatagcaaacaa

SEQ ID NO: 102125 - DNA, 626 bp, Mimulus guttatus
  Intron number 1 from transcript mgv1a009369m (locus mgv1a0 09369m.g) derived from phytozome v7.0 (chr-ID scaffold_1; pos 3831210 to 3831835 reverse strand)
ctaacgaatcaaaggtaaaattatatacatattcgcttccctttcttgttttttttctgaattatttctttttttcttcgtggtcctccgacaattattttctttccgggacaagggcccttgatttcttcgtctttctccgtattttatcaatttatcttctgggttatgcttctttttccagaaagacttcatttttttcaccaaagatgtctgattttactgttaaagattcaatctttttattttttgattgagggttttgaactatgctatattttctttcacccctctttaaaatctcaatttttttgtaaatttttaattttttaacttggtcatgtaaataggtttgtttcttttgtgttgggtttgttttaggtagtttcttaactttttaccaatttactctatctttacagatttgcatgttgtatttcccctttcagaatttccccctttactgctgattaccctaccgtgttcacacactactgatatattttgttagatgcttgtgtgtactgtgcttaaagaaaaatcaaatcttttgaactctgttgtaaaaactaaagaaaaaaatcccatcttttttttttaatgcagagagtggttcccctcaatac

SEQ ID NO: 102126 - DNA, 747 bp, Mimulus guttatus
  Intron number 1 from transcript mgv1a015213m (locus mgv1a0 15213m.g) derived from phytozome v7.0 (chr-ID scaffold_38; pos 1575683 to 1576429 reverse strand)
ggtcgttggcttcgcatcctcatcctacatctcaagtatctctctctctctctctctctctctctctctctctctctctctctctctctctctctctatatatatatatatatatatatatatatatatatatatatatatatatatatatatatatatatatattgcacgaatacttcaactttttaactgtttttgcatttcggacgcgaaactcacaggtacttaccggaatttctttgcgacatttttttgtaatttccaaaaacaaaaataattagttttagtaggaaatgtccaaataatttcgattaattcccttaatgatttgacaatcaattaatagttgatactaatatttctttgagaaatttcaaaaacaacatatgaaaaaaaatacaatttatcgattaataaaaccatatattcattttggtaattcccatacgtacctcaatatttgaaatatttacatattttctccgcatttttgtgtcctatatatttctttgagatatgccgtttctccatgctcgtatacatgtttcaccgtctccgctttctcatgtatgtgcatagagggaggggccttggcccctcccatacttttctcctagttattactaatatgttctcttaattatatatttattgtaatacaatgtattagcccacctcttttaattttcaacttaattagttttacatccaattcgattatgttttttctcattgtttctgttacag

SEQ ID NO: 102127 - DNA, 967 bp, Mimulus guttatus
  Intron number 2 from transcript mgv1a019196m (locus mgv1a0 19196m.g) derived from phytozome v7.0 (chr-ID scaffold_140 ; pos 182306 to 183272 reverse strand)
ctaaatcgcttttggatcctctgttcaacaatgtgagttaagttgtttttaagttacttggtggaaatatttagtcaatgcgttcgattcggcgataaatttggtgtattatgagatagaatagaagtgcataaatcacttggaatactgcatttggatgaaaggatttgagcgaatcatttcaaataagtgataacaaattatccattgagcttgacagcttgcttggattgattcgtgtgacaatggatttcaaatctttagctcttgttttttaagttactttttgagctgtggtggtgaatttcaaatccatcttatttggactcattttgaattattccccaagttatttcctcaaattcaattccttcaatcttaatgcactcttgggaaaataaaaaaccgagctcaaatatacaaaaagatatagttatataagtaagcctataagcgaagggtataatataattattcttatactaactctaacaagtggtgaagctcttcttgatagaaaattaggacactaaagatttgtattattgcatatgttattgctagaaagccatgcaggtcacataccaaagtaagcttgtgctggcagaaatcctaggaaatatttggcagaacacttttgagctttacctagaaaaagaagaaaagcttaaccgaataagtgttttaacttgaagtaacagagcagaaaagcattatagagaagtttgtctgcatgatattcaccatcttttttttcgtatacagttgagttcccactaaatggaaacataattagtgcaatatcgattatgggaacatcaataatgtctatgcatgccacggttaaaagcagtcctacatttgaggaaattaaattctgttaaatagtaattcagtacagagcactcacattttttattacaaaatcttaggttacatatctagaaccgggtcaaagctcggatat

SEQ ID NO: 102128 - DNA, 781 bp, Mimulus guttatus
  Intron number 1 from transcript mgv1a008068m (locus mgv1a0 08068m.g) derived from phytozome v7.0 (chr-ID scaffold_16; pos 1904762 to 1905542)
tggaagaccaacggtaaaaaaaaaaaaaaaaaaatttgttcttcccttttttcaagtgtttattgccgtttcgacttcaaactcgattttgatcattcttttaactccaaattttgcagaatcggaaacatagaatttgtagctttttgagttagctttagaatccaatttgaattaccaaaatttgatgtcggacgagaaagatatacattaatcaacgaacactgcccacaactgtgagctatctaaaattcagaatgtgattcattcatgcataactttgtcacacggcatctagtctaactgatttaagttggattagaaagctaatccaaagtactacagttttcgtgtttcgaattttgcccaaatcatactagaaatatgtcaaagttaggttcgaagtttcaaaatgtattagtaaaattgaaacgacgtataacatttccgggttttttatttgatttttgttattgatgtcaatggatatagagaaggtttattatatgcttcagaattatttacgctacgaattttcttaggcgaatttcgtataacatcaagttttatataaattttctgatgtatatgtgattttgataactagtaatgtaatgcataatctgattttgaagtggatgaaatcattgtcgaaaataattcagagtaatgattaataatcagttgattagttatcgaaccagatttttttgatagaaactgacgagtatcttatactctctgtaataacgaaatagaaatatttctcgtatagaaacac

SEQ ID NO: 102129 - DNA, 267 bp, Mimulus guttatus
  Intron number 2 from transcript mgv1a008624m (locus mgv1a0 08624m.g) derived from phytozome v7.0 (chr-ID scaffold_4; pos 2760518 to 2760784 reverse strand)
catcctcgatttggacggaacacttattaatacaggtgagtttatgtttttcttctgcaattaatcatttatttaaacggcaattatatgtgttatagctattgttttccaaattgatgtgggtgttaaaatcaaatagctcgactaattttttcttccctgaatcgtactgccttgaatctcgcaataaacattattagccatttactttcatttcgaacttgtgctgacaattagccttaaatcaaatttatttatatatgtcag

SEQ ID NO: 102130 - DNA, 687 bp, Mimulus guttatus
  Intron number 1 from transcript mgv1a008624m (locus mgv1a0 08624m.g) derived from phytozome v7.0 (chr-ID scaffold_4; pos 2760852 to 2761538 reverse strand)
ttggaattgtatcccggagaaacatcaattcacaagtaagtttttttttctaatttcaattcaatttctctgcaacaattctgtgtttcttctatccgaaaatgcccatatttcgataccaatgtgaactatccaaacccgaagcgcatgatccgattgtccaaaattttatttgattattatattttctgtgtgtgatcaattggggaagagcgttgtttttctttgatgtaatggccgttagctgtaatttattattattattattattattgttattacaagtttccttactgaattaccgaggattacaaaacatttttttgtaatatttgtttttaactttcttgtgatcattaactaaactatgtgagtgtgtgcaaaccaagagctctctgtctgtctatttttttaactatttttgggctgtttgattcagtatgtaaaaccactactgatgtatttattttgtaatttccttacgattatttgaaacgatcgataatttattcgtagtcgtctttaaattcaattattgtactattggtggactcgtcaagaaatcgggctgaagtagcaaatgtcaaaatttatgctttgagttaattacgtttccggaattcaaacgcatcgtgtaaatccatcactgcaggatatatattttttccgttcacaacgtgtttgacg

SEQ ID NO: 102131 - DNA, 823 bp, Mimulus guttatus
  Intron number 1 from transcript mgv1a001237m (locus mgv1a0 01237m.g) derived from phytozome v7.0 (chr-ID scaffold_26; pos 586215 to 587037 reverse strand)
ttgagaatttctctctctacgcctcactactgaaggtgagtatttcttttcgtagttggaattgattatttatccttaattttacggcgattcagtgtagaagatacttcgaacccttagccgctgaatgatttttcatattacctgcgcgtttttgttctgtttaatgttttgtttcttactgtcattctgattttgaatttttgcaaaataattttaaccctttagttcttttgtatggtttttgttgctgaagaagcttggccaactgggttccctttttgaagtttgatttttttattttatttatcaaactcatgcttgtgatgtatacatttccgttttcgtcgttttcaactgtggtggtacatgaatgatttcttgttagttgtgaagaaagttattatagttattgtaaattaaggaaagaatgtagctttgtggagcagatttttcaattgctcacctactgtttcactagtacagtttgagcttcctcgatcaatgtgacgtgtttttaaattgtaatcgacacgtttatgtgacgtgtttcatgggatgtactatgacactattgctagaacttatttttattctcatggtttacaacgtccaattagtgaattcggttgctagccgaaggtgggaaagaaagtatgttatatagttcgtttttaaagtcattcgtaaatttcggactagtcagattcgtacgtatgtttgatctgaaattctttgaatatatagggagtgtgttttcgttaccagttgtaattctttttttttttcttttaacacttaaatcggttctcttgcagaatct

SEQ ID NO: 102132 - DNA, 889 bp, Mimulus guttatus
  Intron number 1 from transcript mgv1a014308m (locus mgv1a0 14308m.g) derived from phytozome v7.0 (chr-ID scaffold_18; pos 920312 to 921200 reverse strand)
ccctttgattcagaaatctgaaaatcaaattgcaggcaagtgtttttttagtattgacttcttattttattatttaataatacttgtattagattaaagtaattttttttagtgaaatattaaattaatttattgaggttctaccgtatatttatatccgattaattttaattagacgtcaattggattcggttcctcagattaggccttttattaaatctgttgaattttattattatatgatttggctgtattaaacctcctaattaacaaaactaagatatagttttaacttttaaggataaaaattgaaatagtagaatttagtgattaatttagtgaaatattaaattaattttgtcgaggttctactgtattatccaattaatttgaattagatgtcaattggagtcggttccttagattaggtcttgtattaaatctgttaaattttattattattgttatatgatttgtctgtataaaacctcctaatttacaaaactaagatatagttttaagggaaaattaaaatagtagaatttaattgggagtttcgattttagctagtttgagcaaggacggattttgtcaaccgaacgtcttacgagtcgagtcagtaaaactgaatagtggtaattcaaataatagaatttaattgcgagcttcaatttttagctggtttgagcaaggatggggttttgtcaaccgaatgacttacgagtcgagtcaataaaactgaatagtggtaatgcgttaagtccgagtatatatacatgtgtttaatagttaagctgtactaatttgatctgttcttcaatgatatgtattgtaatatatttatcatttatctcgattcgactcgtttcagattactgtgtaacgctcg

SEQ ID NO: 102133 - DNA, 313 bp, Mimulus guttatus
  Intron number 1 from transcript mgv1a013783m (locus mgv1a0 13783m.g) derived from phytozome v7.0 (chr-ID scaffold_4; pos 2042804 to 2043116)
aggagcctccgaagagaaaattcaagtatattccggtacttttcttcaaataaccggtttttgtttttttttggatttgttgctgttgaagctaaatttgatttcagaatcgaattgaattgaattggtaattgtttacttaatattgttaatggtgattggtgagccacgagttagggttcttgacctgtatgtggtttagggcttttaattcagtaacaataattttgaaaatttggggatcaccttcttcttttttaattgtggaatggttttgaattttgatagattgctgtgcttgaagaacaaaaca

SEQ ID NO: 102134 - DNA, 175 bp, Mimulus guttatus
  Intron number 3 from transcript mgv1a002240m (locus mgv1a0 02240m.g) derived from phytozome v7.0 (chr-ID scaffold_51; pos 619933 to 620107 reverse strand)
cattgggccgtgcaccacaagaggggatgtgagtttctgaccattttgattgcctatgcgtaaattgattatttcttttctatatctattagaatgatatctcatgttaacctgtttttctttctttcttaaattgtatgcaataattggctgtatcagttgaagggtttttact

SEQ ID NO: 102135 - DNA, 664 bp, Mimulus guttatus
  Intron number 2 from transcript mgv1a002604m (locus mgv1a0 02604m.g) derived from phytozome v7.0 (chr-ID scaffold_9; pos 1046931 to 1047594)
ctcttttcgtactgattgttactacaacctatgagaattttatttttatgtttctcttttctttttcttctttttttttttttgtttgttttttttaaatcgagcttgacctcataaatggccggttacgatacatttgcacccataaaaattctaaccaccggcctcttcccatattgaaaaaatatgtatcacttcggctatgccttttgggaccattatggaataaatcgaatgtttggttttagagacataaatatttcaatttgtaagtttgaaactttcttataaatttagtcaaaatctaataagtttcattactatttatgatgtgatgttttactgaaaggctaagtttgagcacaactaaaggcttctcctgatggaaagtgtttgtttctagtcatataatttatctattattttgttttttgtttttcttttttgcaaaatcatctatgagttagatttagacttggcttccttatataaaatctttattaattgcgtctttttaatccagtagaaggtgtaaggattccatttggcttcaaaagcatgagattaggttttaaattttactctggaagaagttgaacatgcttttagtataactagtttcttctaaattatgactctgaattgaggttttgttaatgcagac

SEQ ID NO: 102136 - DNA, 918 bp, Mimulus guttatus
  Intron number 1 from transcript mgv1a002366m (locus mgv1a0 02366m.g) derived from phytozome v7.0 (chr-ID scaffold_57; pos 375573 to 376490 reverse strand)
ccaagctcaaagctgccgaaaccctactccaccatgtatgtatacaaaatccccttgtctaattccttttttacttttctattttatcaagattttattttttatttttattgttttgaccttgtgtttggatcacgatcaattgactcgtgattaattatgactgattctacatttattgtttgtggttcggataattagaattgagtcatgaaacattcattcacaatgaaaattagtgttgatgatttttttttttaattaacaatgagggttagagttgataaaaaaaaaaaaacccaattaactatctgacaaagccatcaagtaaatgcagagatgagtatataattcacgtcgaacatttgaattacgagaattgtaaaaattctacttgaatataagtaacaagaagaactataacctactgattcgaaaagacaaggcgaaataatgtggagtgagttttgatttttagacattgagaagaaggttttgttgattatgttagaattgcattatatatatatacaaacaaaatatcattttatgtagttaatgaataagttaattttgtatacagaaaaggagttattgaaattgatttgtaaaatccaagattactttgcttaattatagaacggcgtgataggtgtatgaagcaatgtgaatgaagttcgttttattaaaaccagagacaaagtagttcattgaaaaataggatatttaatatatattgcacatggtgaactattaaagaggctttataatgtaaatgcagcgcttttcattttgactccgaaacatcaatttcgtgattctgtgtgattgtacttgagtgatttgttattgaattaatgtcccgtttgattgggcggttcagattgatcagcaagctgcagaatcactaggaaagaa

SEQ ID NO: 102137 - DNA, 810 bp, Mimulus guttatus
  Intron number 1 from transcript mgv1a020973m (locus mgv1a0 20973m.g) derived from phytozome v7.0 (chr-ID scaffold_98; pos 883650 to 884459)
ctgaagaggtgaaggaatgttgaaatcttgaaagaaactcttgttaaacaatgtgaagataagtgaagtcttcaaggcgatttggtacaacgagaggattaatgttgccttaagaatgaggtgaaatcagccggagctgatgtgtccattttttagtacgagaatatggtggaatacttcattgaagtagaagtgttcgattagcaacagctaatgtatttctttcgtaaaagaaattaggatttctcgtgtgtgatggatggagtgtcaatcatggaagattgacggaggcgttcgaaaaaaattggcgttcgcccgagttggattgtttgaggcattggttctcgttgtgaggaatttgatatatattctttcgcaaaagaatatatcgaagcagaagaataaatctcattgtaaactgttttccgcgggaatcagtttaagggagggtgttaaaatattagatttattgtttatttaattaaatgattaatattagtttaggaaaataattagtcaaaatagtatcccgtgattgtaggatacttagttagttgttagtagtgggttagtgttccctaaaattaggataaatttgttaattagttttctatttaagttgtaacactctggttatgttaaatgaaaaacatcgtttatcggtttttccaacacttgtgtgagtttaatcaccagtctctgatccttaaaattcatttttatttattttaattttgatttttaatatttttattttttaaaaaataatttgcaggtttatactaggatttgtttatcctgcttttgaat

SEQ ID NO: 102138 - DNA, 844 bp, Mimulus guttatus
  Intron number 4 from transcript mgv1a002566m (locus mgv1a0 02467m.g) derived from phytozome v7.0 (chr-ID scaffold_13; pos 843498 to 844341)
aaggtaggttactttgagcaatgtcaattgtcaaatgagaattggttttaagggtttccaatgtgagattataaaaggattttgagctaggataaacatttaagcatgcttgcaaattcgctggagtaagcttgttccaaaattacatgtaaaatataagactgataataggtaaaatgtggtggactcgtctcaggatctaagtccaggttcaactatttacagtatcagtattcctttggttgtgtatgttacgctatgtatcaggaggttgtctacatctgtgaagtacgtttctgaatcacctcagtacacatttgaagttctcacttttcctgtcagtgattaataagagtctgtcctgatgctagaataaggtagactactccattgctcatgcaaacctagaatttcaactgctttaaagaactaggtaaaaaacatgttagattccagcatcaaatgcttgctcgtgttaggtaaagcaaatagatagtttttcttattttccagaacttgattcataatgttggcaactagacctttgagaaatccagtattaactcgataaaggatgaaagagctcctccatgttctatgttgccgctagtaggcaatatttaaaggttctaaccttaattttgttggttttgttgtcatatctgttccagtttcttgtctcatctattctgcaaaatgaagctgatgtatttgttcttatgaagttatgataacagtgttaatgtgggttaggatctccgtttgtcaaatatttctgttgatcatgttcatcttgatgtacctaagtctactcgactggtcgatgcagtactagacgcagcta

SEQ ID NO: 102139 - DNA, 469 bp, Mimulus guttatus
  Intron number 1 from transcript mgv1a018021m (locus mgv1a0 18021m.g) derived from phytozome v7.0 (chr-ID scaffold_47; pos 1505195 to 1505663)
tttttcgtggccttactgttgtggtaacttttcttcttcattttttatttttattattattattatctcttcttgttgcaatttccacaatctcatcaaattgctactcttaattttttgtgtttgagtaaattaaaatctaaagaaattgggatgcataggtcaatgtaattaccaaaaaaattatcttttcccatgtgccactctttttgtttcccgatgaatattgaggtttcgatttttatttcatttttttttaaagagaaccttgatgatgttatattgataatcggtggaagtttgcattttgttaaaaaaaaaaaaaaaaaaaaaaaatatccacgtgcagtaaaaaaaatatagatttgggcctactaagaaaatttgactagaacaggattattatgtaaaggaaactgatatttgaatatgtatattaataataatttgatttgtgtaattgcagtta

SEQ ID NO: 102140 - DNA, 636 bp, Mimulus guttatus
  Intron number 2 from transcript mgv1a014105m (locus mgv1a0 14105m.g) derived from phytozome v7.0 (chr-ID scaffold_121 ; pos 234361 to 234996 reverse strand)
aaggtttgttttgggttttaatgtttcaacttattaattgtgatgaagaaatttattaattactgatttgaatctactgtgtatatcttggtgcattctgttgtggatttcgcgttcgtgaatttatattttgtgtgatgttttcgttgtagtttcttgtgctctttaggtctaattcgttttgattcgtgctgtttatttttttactgcatatgacatgtttggtcacaaccgagtaggatttgtaagtgtcggctaatcagacgaatgaatggaatgcatttttgctgtttcttaccaactcgtcttgcgtgcagaattttgttctttgatttgctgtataggatatcaatgtcgactatttgttgtatgcaatgggtattccgtcaatttgttaatattgctagagtcggctggatttatatgatattaactatggtcacagatgacaatcatggttatcgtattactttccttttaccgaatgttggatcatatacagaaaatcattactatgtaagaacttggtaacgtcctgagttgttcaattaggtatatacatacatacaccaaaacaaatgattatatttttttttcatcattattttttttttgtcacaggacttcaagacggag

SEQ ID NO: 102141 - DNA, 965 bp, Mimulus guttatus
  Intron number 2 from transcript mgv1a015586m (locus mgv1a0 15586m.g) derived from phytozome v7.0 (chr-ID scaffold_29; pos 499090 to 500054 reverse strand)
cttgttaagctcttgaacgctcgtgcacgaagaaggttcaaaaattctatcttttttttttattttgttttttgttattttgtttttgtttgtgtaatggttcttcaattttttttttttttgtgggatttgttcagtgaatttgcctatttttattgttttgcatttttggatctgaaattcgtgctttgttgggaggatttgattggcacgtgtcattttttattcctatttttagggtttgatgatgttgagttatttagtgtttagcaactgatgaaggagactgtggttgctacttattggtagggtacgagcagtggcgagtctagtaatttgttacgcggcgggtgtaaaattttgggggtcattgcccccaatattttttttgacgacaaaatcagaaaataggaaaagaacaaaagaaaaagaacatttttttagagcctttttttgctttaagttggatttttgttgggctaattaattaaatttggggattttttttgtgtaattatcaattgagggtgggcttaagtccaccctggatacaagactgtacttatcttagtttaagattttttcgatttgtgctttttaattatgcacatttgcttgccttttgcattatatctctgttatttaggaaagtgtatataattgatgctatgttactgtggtggtaaaggttgactttggtgctaattgctcagttaaaatgttcaatctgcttatataaaataaacaagtgtctgtgtatggatgacatgccgcgttttattgaacctgaattctcttgtttatttattatgttcgacacattaatattagcctagtgatgtatacgagatgttttttctctctttgatgcacacatttatctccgaaatgggcgttctgttgaggttatattttatctcatttgcatgatatgcaggtttcagaggggtttgaagaggaagccg

SEQ ID NO: 102142 - DNA, 656 bp, Mimulus guttatus
  Intron number 1 from transcript mgv1a020705m (locus mgv1a0 20705m.g) derived from phytozome v7.0 (chr-ID scaffold_173 ; pos 383134 to 383789)
actttgattggagggataccgctcttaaagatcaggtattcttataattaacaagtattttcacttttcatgtcgaacagattttattattatttaccctaactgacaaaaatcaaatctacagtagtatattttagtaattctattttatattaattcctcaactgatttgttaattggtttgtgtatgaaatgatttatattataatccttgtagctagccctaccatgtcaactcttcatcctaaattcctaaccatgaaactcaagctttgaacccctgatttagtattcttacactcgataggtatgtgtatgcatactttcgaaattggaaataagaatataagtcaattgattttttccattacatctactacttctttgccataaagatagatgaattatggaaaaagagaggtgggggatgcttacgcgcacgaagactttacagttggatttcttatatccatgttgtttatatttttcttatcaattaatatgtatttgaagttcaacctcagccaaaaaagagtgtctcatctccaattagtctcttattttaatctgtctcttgaatcattcttgtttacctttgatttttcttgcactttgaacaaaatttgtttatcctttgcagttatctgaagcattgt

SEQ ID NO: 102143 - DNA, 521 bp, Mimulus guttatus
  Intron number 2 from transcript mgv1a020705m (locus mgv1a0 20705m.g) derived from phytozome v7.0 (chr-ID scaffold_173 ; pos 383871 to 384391)
aattgttgtaagtagttttacggtgatgatatcacgctaatatttgattttatatcaatcatctttatgccctatatctccttcggggataaccctaatatgtagatatggtgaatcatttcatgtcttggttgaagctcttgatatgtcttttgtcaactatggtgatgttgtgtttctaattattatttttagttgcattatgagcaagttaatatcttactgtttgtacactttacaaggtgagttgttttcttttctttatatattgatatttttattacaagaaaatgtgaatcatttctacttgtataggtttttgcttgttgttgacattatgctatggactgattgaaaatggtgggactaccattcatattttatgctatagaattgaaatgaagtaaatatggtagtacgtggattattttaagaggtctttcagtctttgagcattttatagtgtttctattctaattgtgatatgtttaatatttttacatgcccgatttcagaggtga

SEQ ID NO: 102144 - DNA, 867 bp, Mimulus guttatus
  Intron number 1 from transcript mgv1a008267m (locus mgv1a0 08267m.g) derived from phytozome v7.0 (chr-ID scaffold_75; pos 207604 to 208470)
aactgtttgatttaggggttcagatttaaaattgggtgagttccttcagttcaattttgactcttatttattttattcaagtctccatggtgcaatcagcaacagaagaaattaggtttaatttctctacaagtttcgctaccaaaactttgattgggcgtttcagatttaaacttattttgaatgatgggttttctccatttctgggttttacatggtcctgagttgtttcgtaggaatttaggattcaatcttacatcattgaccgaatttcagttgattctcattcaaaagtttaggttgaaaacatcctttttcttctttacttacctaatcctctctctctctctctgcggtcctgaaactgaattcgtgtatgtatttccttttcctatttttgaatagtggattaagagtatttttcacagattttcctgattgcttcttttgcctttgctgcagtaaccatcttagtttctgattactttatgctaattaaggattatcttagacatatttcgagtcctcggctattgggctattggtaatcaagctctagctcctaatggaataactacgatttatattactgtttcttataatccctgtaggatctgtttatattatgtcttacttttagttaattgacagtttaccatatgttgttttctactgcacatcaaaattcccgattcacggtttggtgtggtttggatgtctgcatcagaatcttcattgaaaaccattgcaacttttacttaattgacagtttactatctgttgtttttgactgaacatcaaaattcctgattcttgatttgatttggtttagttgtgtgcatcagaatcttcattgcggtgaatacg

SEQ ID NO: 102145 - DNA, 612 bp, Mimulus guttatus
  Intron number 2 from transcript mgv1a008267m (locus mgv1a0 08267m.g) derived from phytozome v7.0 (chr-ID scaffold_75; pos 208773 to 209384)
tttaatcatttacttagtgagcctttgtttccctttgccttatttttttcttctattatagctctcttctacatttatgttacatttggagatttcctttgataggatatgttgctttcttgaacctaatgcatactggtcaattgtcatggcttggtttgtcgagagatggattattgcttattagcctgttgatataaattttagaaaatatgtatcggtaagttgtgatactagtaacgactaaatttattggtaatttaacaaaattaaggtagtagtgaaggacagccctacataacggaggctatagagaaataaaatacaatgaagggaataaatggtaaaagggcctttttgaggggcacactttattctttagcttaattgcctttttttgcttctcctttgatttgtttttttcttctttcattgtctgtgattgtctgtttcaatatgtggatggatcaagccttatatagcccacttctggacttttgagctacatgatggcatccgttgcaaatatttgttcgtagttgatattagtgaatttgtgtgttgcatgatatgacccccccatttctctttatataggactcgcacaagaaa

SEQ ID NO: 102146 - DNA, 646 bp, Mimulus guttatus
  Intron number 2 from transcript mgv1a012821m (locus mgv1a0 12821m.g) derived from phytozome v7.0 (chr-ID scaffold_32; pos 1133325 to 1133970)
agagcaagaggagatcattgctgtgcctgatacaggttcgacttctcgtgtatcggtttatatacatacatacatacatacacacatctattgtgtttttttatggtgattcaatgaatttgagcaggggtgtgtttatatagagggcacattgaagaagaacaatcgagttattttatcgtaaaggcacctgcaaatccatgcccgattagaatatactttgagttgaaaatatatattcgtcgagttgatttttaagatgtatttcgaatctcgacactcttattttgaactattgttagttaaatgtagatctgatatccacgttatggagtcatttaaaatcttttatgtcaatcaaaatccgtcgatccaaatgctactttacttcattctatatgcgtttgatccagtttttagtttttttctcccatcgatttctcttctctgttccatgattcgatccgtgtagttccttattgccaaagctctatactatgtacatgtgttcatgcagtttttaagtgataattacactttcttttgcgaattgttggagatttttttaaggtttaatggacactgtttattacttgaataaatactcgcagaagctgctgaggttgcggaaatattagctgattac

SEQ ID NO: 102147 - DNA, 164 bp, Mimulus guttatus
  Intron number 2 from transcript mgv1a020200m (locus mgv1a0 20200m.g) derived from phytozome v7.0 (chr-ID scaffold_26; pos 1272959 to 1273122)
ttacgtttaaggttgcgttaattatattgtttgatttctaatttcttcgtgtttttaataatttcttttatgaatgcttagttcgatgctaatagactattaaatttttatttttttttcttgtactttttttggtttgtatttaggtcgagacttcgaatccg

SEQ ID NO: 102148 - DNA, 538 bp, Mimulus guttatus
  Intron number 1 from transcript mgv1a009978m (locus mgv1a0 09978m.g) derived from phytozome v7.0 (chr-ID scaffold_297 ; pos 65835 to 66372)
ttgttcttcgattctccgatctgatttctccaaaggtaatcataacttgccgccgtcttatggttatgtcactgatttttttatttttttttcgaattatgcctgaaattgaatttccctattattccatgattttctgtacagttcgattttcccctcttccgattaggttttcctttttccttaaacttcacaagtctggaacacgattaacgattaaaaaaataaattaaaattcaattgttttaatgaagacaactcttgccttggtttgaatctgtttgtggaggtttgatggatgatgtcacatacagtagattagcttatgatgatgatgatgatgctaggtgtaattgttgttttaattttctgactactgtaattgagtttcgactatggattgtgaactgtagcattgtaaatatgctaaaacgttaatgaagattagagttctgcctttgcattaatcatttccttaattgtattattaccaaattggatagaaatgacattatttgtgataatcacacaggttata

SEQ ID NO: 102149 - DNA, 872 bp, Mimulus guttatus
  Intron number 2 from transcript mgv1a011862m (locus mgv1a0 11862m.g) derived from phytozome v7.0 (chr-ID scaffold_20; pos 423109 to 423980)
aagaagagatctccaacatctctcaagacctctctgtattttctctctcctctctctctctctctctctctctctctctctctctctctctctctctctctctctctatatatatatatatatatatatacatttattttctttaatgtgtgcacaatgctgggttaaatagaacttgccctgtttgttcttggtgattaattgggttttactttagaggatctgtctgaattttctttttcttggttaaaaattgaatcttgaaattaatttgtgacgtgacaaaaatggataaaaatttctggcttttattagttagggttcttaaagaataaaattcagaattgggaattcgggctgctaccgaagaatttccgtttattgcgtcgttacgatgatgagatttaatgcgtgcaaaaaaagggggattagtcgattttcgtttagtagcattcattttgaattgatggtagtggtactgttttcgacaaatcgttcgagatctgtccccaccgatatactcgagtaattgcttaattgttttagacgagtaatttgggtagtttcgaaacctcgtaaactgtttgcattcttttatttcgtatagaaaggtacttcaaattatgatgtacatttttaacttcgatttgtaaaatggttatgtatagtacattagcaaacgtaaatcgagtacattgtatatatttgcgtttctccgacaaatgtacctatcccttccaaatcgatctcaacagtattttgttgaagatctattcccacatcggctaatgattagatctttaattcgttttgcttcatttgtgtatcgttttccagacattctcgaacaccgtggaggagaaggcaaagtg

SEQ ID NO: 102150 - DNA, 956 bp, Mimulus guttatus
  Intron number 1 from transcript mgv1a000828m (locus mgv1a0 00828m.g) derived from phytozome v7.0 (chr-ID scaffold_45; pos 478533 to 479488)
tcttctcctcctccgagcctcactcccgctgccaggtgaatttaccttactgccccttcgacaacccttttccttccaattcagttgccgtatattgtgtaatttgagcgcgcaccaccctattcaacctatttgattgccctattacgtattaactatggtgtaatttgagcatgtattaggtgaatgctcattttttagaattcaattttgtgttttggccgtcaacttgttgcgtttgtataattttttttttgcggaattaggtcgtacagtgttttggggcttttcggtgatttatgaattactagcttttcggtgtgtaattgggggttttttcttttggttgccaaagattttagcttttttgttcgaaaagtctctttgagcagttaatatttgttgtcagtttcgtgggatctatagatacgaagtagtgttgactggaaagcgggttgaaccccctcctgcatcttctttatagtttcctagaatttatattctggtttttttctatttggaaatacattgatatgtatgggggagttctatatattaccttatatgaagttcgaatagtaacggtaaattatatctctctggaaagagttcatgattttgttcagtatccagatcttttgtcgagaagctttttttccttggatgttgtgtgtttagactagcttcttaatcatatttcacttttgaactttaaagagtttatcaaaagaaattttttaacttcgaacggggaaacacgataaagttcccttgaagaggacaatcaaaagcgtcctctgtaattttcttatatactgattataattagatgaaaagtgaatgattgccgccacatggttctgaatataataatctttatgtgtgaatcaagtatttatacggctttgttcctttgaacagttctgccggggcatcatctgctgctgttcccacaa

SEQ ID NO: 102151 - DNA, 623 bp, Mimulus guttatus
  Intron number 1 from transcript mgv1a008666m (locus mgv1a0 08666m.g) derived from phytozome v7.0 (chr-ID scaffold_98; pos 99235 to 99857 reverse strand)
gggcattggtggacgccgacgaaactgtttgatatgtaagtggtttctcatttcggtccgtttttatttttttgtttcagaacaaattatgagtaatggttggtaaattggagttaaattatcggatccgcattggtacttatatttgaattttactcgtggatgcattttgttctttgtttcttctcgataaacgaataaagaatcaatttttattgagttttctcaacgactaaacttcttgattcggtaggatcttgctcttactagtactatcttgtgattatcatacgttgacctatgtgtgtatcgtttatggacgtatactatcgacttataagtgatatttccgtctggaacatagattttttaatcagtatatgcaattgttttgatgtctgtaaaactgccttttgaattttgattggttaccgaaatgagataatttgcactagaggtttaaaatcgaaactagaggttaaattggactcgaaagttagaaactatggagttgtagttgttcttgtttctccaatctttagtttagtcgaagtttcattacaaactacgtctaatatggattttcagatcacaggggttggtattttcagattggtggaaag

SEQ ID NO: 102152 - DNA, 473 bp, Mimulus guttatus
  Intron number 2 from transcript mgv1a023089m (locus mgv1a0 23089m.g) derived from phytozome v7.0 (chr-ID scaffold_5; pos 3276707 to 3277179)
taatcagatttctggccattacctttattcgctaggtatatattattttttatgggaaaagtacagtttgcaccgtcatgtttgcaccgattttgtattttggtccctcgtgcacaaaaatacacatttgattcctcatatttaaaaaaaataaacacttttagtcatttccgtcaatttttcgttagtactaacggaatcaagtgtgtgccactaaaagtgttaagctattgaaacttgatggaccaaatgtgttttttatgaacatgatggaccaaatgtgaaatcggtgcaaacaagagggatgaaaattgtaatttccccttatctttatctttctttttgtttcttcttttttttttcgtgttaattagtttgttttagtcctatagagtagtttctttaaattgtcaaggactacttttttttatttataatgttatttagcaggaataacaagacgtttccaaaca

SEQ ID NO: 102153 - DNA, 592 bp, Mimulus guttatus
  Intron number 2 from transcript mgv1a012126m (locus mgv1a0 12126m.g) derived from phytozome v7.0 (chr-ID scaffold_102 ; pos 369290 to 369881 reverse strand)
gactacgttggaggtatatcacatatacatacataaatacatacagcgagcttataattattgtttatttggaagtaggtgtttctttcttccctatgcaaaacgcattccatctttcgataattcactgttattatgtcagcttgctgcttataaaattttgtagtgtattatgttctgaagtatttctgtgcttctagttctcaacattattaagttttaaccaattacattacggaatcggatatgagttttgtactgcaatcagataatttgactggcattcgtctataataagaaatgctctacttgttcaaaaatgttgagctagggatatccaaattacaaacccttgagaattgtgtaatgtctggttcaagatcaatgctacattctaaatgcatcgttgtctctttcttcttacaaaaaaaaaaaaaaaaaaagaaaaaggtatagttgaaatcaatcacttgcaaactctttagaattcttggggcatgaaaaaaattctgatactttttactcgaagatgcaagtttgaaatttatgcattgtcccaatttttggtggtgacactctcgtgttccagggt

SEQ ID NO: 102154 - DNA, 585 bp, Mimulus guttatus
  Intron number 1 from transcript mgv1a004145m (locus mgv1a0 04145m.g) derived from phytozome v7.0 (chr-ID scaffold_17; pos 2356897 to 2357481 reverse strand)
ctttattaaggtttcatttcatgatttttttgttttgacttctactgtggcatgtattgttcattttttatgtcttccatggcacttttttcagtttttactttgattgagatttatcgttaaattcttttcttcatcatcctagaagcaataactgttcgtgctgctatttgctcgtggaagacacaagactttgaattatagcaatacctgcaagtttattagatggacatttggcagaaggtgtttgagagaaagaaagatgtatatagttgattttttcgacttcatcactatagttagttatgatatcactgcccaatccttattaatctgggaacagaaaaagatttatgaatagtgtatcaattattacagattgagctttctgcaatttgggtattaagtgtgtaggcatcttatatttgcgtcattaagatttaagaattctttttcttgatagttgtattttcaaattcggaaggatctggggctgcaagccagtgtttgaattatttcctctatcttgtattttcaatagatgcacaagtgtattgcctgtaacaaaaatattatacttgtagg

SEQ ID NO: 102155 - DNA, 264 bp, Mimulus guttatus
  Intron number 1 from transcript mgv1a011312m (locus mgv1a0 11312m.g) derived from phytozome v7.0 (chr-ID scaffold_11; pos 798261 to 798524 reverse strand)
accacattaacgttgtcactgtccgcaagctcactgtaagtataatatttgcttgtgtgtgtgtttgtgtgtgtgtgtgtgtgtgtgtgtgtgtgtgtgtgaaatatactgtatttgaatttgaatttttaattgagctgaacagagatagttatattgttatcggatttaggaatgcaagaattaggtgtggaaaataaattaaaaaaaataatgtgtaatgttctaacattttcgatgttctttgcctgaagagcaaagcag

SEQ ID NO: 102156 - DNA, 760 bp, Mimulus guttatus
  Intron number 1 from transcript mgv1a000855m (locus mgv1a0 00855m.g) derived from phytozome v7.0 (chr-ID scaffold_18; pos 1208186 to 1208945)
ctggtgagtgagtaattcgtacattttttttccatcgaattacttgatttgcactattgagatttgtggttatggagtttagggacacgtttctcacttcaattgtccattttggggattttagatctgtgaggttgtataatagttgtaatgtaggtaacgaagtgtcagttttgtgattatcaagggggaaaaagtaagtactcataatttgcaattttaggtgaagtatttggctctgaagcatgcattacggtgttttgggaacttagggtttgttagggacagggaatgtgttactccatccacatcttatccccagactaaatagttataatgccttgtttgtgataatgaaattaaatgaaattatcgggtaagattttatatgtttgatcctgggttaagttggaaaatatccgagggagaccattgagaatattctttgttcttaaaatgattttatttcttagggacattatgtggaaatgattgaggaaaactttgttcagtgttgaatgctgccttgcctctctgccttattcccttcggtctttctccttttccaactgacgattaattgcctttttggttcttctcagtgtttttcatgggaggcggaatcatacgagaaatccaaattcattagaaatcttgtttcatatttgttttcaatatccagtccttgaagtttaggttttattagatactgtagaccaatttatctttctgtggttatctgtgttataggttggttttc

SEQ ID NO: 102157 - DNA, 805 bp, Mimulus guttatus
  Intron number 2 from transcript mgv1a006187m (locus mgv1a0 06187m.g) derived from phytozome v7.0 (chr-ID scaffold_324 ; pos 99181 to 99985)
gtctgtagatctgcacttctccattttcaccaaaggtttgcttacgtcatcagatctggttatttacttctgttattgtttggatccatgtttccgtattgcttttttttttttatgaattcatgtgttcaaaacgaaacgtcggcagatttggtgtttttctctgcagacgaataagcagttttttggttggtgttttttttttttaatcgaactcaccaaatctaagagttgcttctcagaatttgatgaatgaagcgttaattttcgtgttgtttaatctgagattcagatcttgttgcgtttttgtttttgacagagagaattttatgattttgggataaggatctgtatcttgctgtacgtaattcgtgatccagtgatttatctgatgcgtaaatttaatggcattaattagatttatatttatagatctgtatggtctggaattatatatttctagattattccttaacatgacgtagaaactgtgattatttggatcatatcagctggtttaattagattgcaaatttcagtttgattttagttggtgtaattagacactgaaattttaattagttcttctgcagtttctgattttaagaaatattatattgaatcagatgcttgggtgatgagccaataatctacatatttaattcaagcagagatctctattttgttctgaaaattaacatgagtgtgatgtgcttgatatgtttttacattcaaatgtctggttttattgctaaatgctacctaaactaacacataacctgtcaattttgtttcagaaaaaaac

SEQ ID NO: 102158 - DNA, 718 bp, Mimulus guttatus
  Intron number 2 from transcript mgv1a015070m (locus mgv1a0 15070m.g) derived from phytozome v7.0 (chr-ID scaffold_7; pos 2379760 to 2380477 reverse strand)
ggaatcaggttccattttcttcttcaatttttttttacaaatttattgcattttaggttttttttttttttttttttttaattgcggatatattcaatttgtaattgctggattaatatttgcaagataatctctgggggtattttgaaatttgaacttgatccttggattttagctgatcacagtatcaaagactcgatttttatgactcttttatgtgcaagaagtggatgaacttgtgtatagtagttgcgactggatataaaccgatgcgttgtgtaatttatcttatagttgaatctcatttgctaaaatatgagtttctttccaattgacgaatgtgtgtgagcaagaatctataccgattttattacgtagaaagtgagtttctagtgtacgtaaacttgattctttttgcttgtcacaacatcttgtcgaactcgatttaattatgtctcttttatatagaaagaaatggataaacttgccgatagtagtttcagtatatttgttgtagattttaactaggaaaataatggaatttatggaaatagtttcgaaaactgcccacgaaactttagatatattagtaacacggccacggcaacaatgttaacggtttttgactcgacttgactttcaccacttagtttttgactctcaattttcaaatttatttacaggtttacgcaccaagactggatagtcctggttcgaa

SEQ ID NO: 102159 - DNA, 576 bp, Mimulus guttatus
  Intron number 2 from transcript mgv1a010509m (locus mgv1a0 10509m.g) derived from phytozome v7.0 (chr-ID scaffold_251 ; pos 280449 to 281024)
tcactggaattacaaaagggaagggctttcaggtgatcaattctttacaatcaagatgaactcatcgaaaatgtgtttcagtttctgtatgaagttgctgtgatttttctcagattttttatttttattgtcatttgtgggctccaaacaaatcatattctcattatttcatttttaaagaaagtctccatgagcactacccccttaccctgctaatcaccatgacagagatagttggatgttttgtatttccttgggattatgttggcaaaaggaaaaataaaatatcccgaagcaggagctgctgtttcgaaaataacctgaaaaggatgggatgttttcagtttcaagcgattaaagctatgtgactttaggcaggaatgcttgccattcaccaactgtaacatgagcattgttcctcagactttgagctgtcaaataagttctgaaatcttgtatagaacttcattttttctcgtctttgttaagtgagatccatgttaggtttgtgaaattgcagtttttttgaactgtatgataacagagtgctaccgtttcttctgtttttagggtggc

SEQ ID NO: 102160 - DNA, 570 bp, Mimulus guttatus
  Intron number 2 from transcript mgv1a012472m (locus mgv1a0 12472m.g) derived from phytozome v7.0 (chr-ID scaffold_58; pos 518097 to 518666)
acctgaaactgtatgtataatcttctttcgtttttagttaataatttttttttttgaaattgattcatctgctgtttgattattcgtgaaatagtgttcgatcgttctgggtaattcatttctatctgctatggttgaatatttactttacatgtcgattatcgtttgtaatggattaatgcagtgtaaaaatcgaactgtgctggtctatttgatgatgtttttttttttttcttacacttgaattttgtaaaattggattatttctatgttaattgatttcacctcaattcattcatagcatttgaatatgtaagacatatgttcgtctactaaattatattcttgcttccaaaaggatcgatcattcatctactctgttgttcgatattttagaaaccgaaaaccagaagcccgaagaacccgaaaacccgagtcttttaattaccattaatcagtctattgcatctaatatacctagataatgagaacataacatttcttatgatatattcgttgcttctttcaatttcagtcgggtgttctgggacaagaggatctcccaggaag

SEQ ID NO: 102161 - DNA, 697 bp, Mimulus guttatus
  Intron number 2 from transcript mgv1a012121m (locus mgv1a0 12121m.g) derived from phytozome v7.0 (chr-ID scaffold_8; pos 164512 to 165208)
cagataattgaggaagagcagcttcagttgaggaagtaagttgactttcctctcttcctttcattaatttctctatgtttgattttgatttagctgatattttgttggatttgatataactgctttcgtagtttgttttagattgagttttagcttaattgaacgtttagatctcggatactctgatgcatctttccttccatagactttagattgcgtataattgaagttacttctagttaaacaatgttcagtaatcagtagcatgcctaagaaattatttatagtaacgaaaaatagcagttttgggagttaatcggtatatcacgtggcgaggacaacaggattataaagttaaattagaaagaacaatattcgttttttggaagttcgttatgtagttatataaattatatgctttgggagtaatacttgatgcttattcttcctgtatgtgatcagcaatctcgattaagacttgatctgcaagtaaacttagtcagaaatagtcggaaatttgttgaagaagaaagtaagaaaatgcttaataaaggaggatacgagcaaattcaggagctaacatttgtccggaaacctgttttgctcctgacataataaaatgtcatgataagttgtgaaattatatgccttgttcatccactcaggtacatcgcagaaaattattccaagattcgag

SEQ ID NO: 102162 - DNA, 804 bp, Mimulus guttatus
  Intron number 4 from transcript mgv1a014893m (locus mgv1a0 14893m.g) derived from phytozome v7.0 (chr-ID scaffold_239 ; pos 210652 to 211455 reverse strand)
tcactacggaagtaagtaatatttattgtatatcaaagcatttatttttcagattttgattacccttaaaagcattaacttcttactatttgcttcctcaattttgcatgctttcaaacttgattaaaattttgtccgttaaaatagagcactccatgaatgctttaaacaatgcgaatgttctagacaccttctaaaaggtaagtacaattagacttgccaatggctagaatgatatctagtttgagattgtgtgcggaaggcctaaatgtgggctatatttctggtcgataaagaacaagattttttttcagaaaagggtaaaaaagtgagacagctttgaagagatttgtcgaactttttagttgttatagctgatatataatctcccgaccacttggagtgttcgtatgattcttgaaccagaaaattgttggatgagatgtagaacatttgaattaggagggaaatttacaaaactgtttgtttcctatatcttaaaacaatgaaatttatattcataacaactaatctgcttatttgggaactagctaatcttgctgcacaactctgattgtcgaggacttctgtttgaatttgagaagtcttttctctttaatgattttcagcctgtttatttcccccttttttcgtttcgatttatttattccaatgtatttgacttgataagggaactgacatcgttattcattaatgtgatcgatatttatatttgaatacacaatacaatacttccaatttttattatgttcccctcaaatgtgcgacaggaggctcgtgctt

SEQ ID NO: 102163 - DNA, 327 bp, Mimulus guttatus
  Intron number 1 from transcript mgv1a025115m (locus mgv1a0 25115m.g) derived from phytozome v7.0 (chr-ID scaffold_113 ; pos 324417 to 324743 reverse strand)
ttgtttctgaggaatcttcaaacatcaccgagcctgtgagtaattttttttttcttcatttttcttttattatattatatagatatttgggttattaatattttattttattgtttataaaaaatggtaggtaattttcttttattatagtataatttcctttttcctctgtttctatgatgttttgattaagtaatttggtttgattttcagtcctaaattgatgagtggatattaaaaatcaataaagagattaattaattaattaatttttgtgtcaattatcttgcagattgaaagcacgaaattatacgttggtctaccgtt

SEQ ID NO: 102164 - DNA, 652 bp, Mimulus guttatus
  Intron number 1 from transcript mgv1a018337m (locus mgv1a0 18337m.g) derived from phytozome v7.0 (chr-ID scaffold_9; pos 3175203 to 3175854)
gtcttggttggtccaaaggtggctctgcttctaaggtgagaactgttgtatttttttatgccttgtaagtgtttgatttaatgcctgaaagggaattggacttggaattggaaggcctttatggatgagcttgttttgattcactttatgaactgattttttactagcaacaggggattaaaataaatcgataattaaagaattgatcggttgaaataatacgagccttttcgacagacagactacttgttttttttttttttttttttttttttttttttttatgtttacgctatgtttgtctatggggcaaatttagatattagtgctgatttgtgttcaaaggtgtctggttgatttattgtttaagtttgtattttttcggtccatgaaatatgtgtgatacttacaaatcaatacgaaatgtaataaaaagaaaacgatattgtttcatagtttcgagccatatttttcttgaacctcgatttgaagaaactatttcacttcttagtggtgattattattgacttcggtttcggtttcggtttcggttcgattagctaagggcttatgaactagaaccgcagtcttcttcatgtaagatatttacttacaaaaataatttcatgtcttgcaggtgagattagaagta

SEQ ID NO: 102165 - DNA, 987 bp, Mimulus guttatus
  Intron number 1 from transcript mgv1a000385m (locus mgv1a0 00385m.g) derived from phytozome v7.0 (chr-ID scaffold_12; pos 2680807 to 2681793)
agcataaccccggccaccaacccgacttcgctgaggttttttagtcgtccgtgattactactttgaattcaattggtacatttgaggagttggccggaagaaaaaaaaatgctagggtttttgacttgggaggttttttttttgggggggtttttaatggattgatttcgttcggcgctgagtgagttcagatttttctgtttttttggtatttggtgagaaattaatttcacaagaaaaatatacgattggagaaactatgagtgagtggggtttagtttattacagtaagttatggtaattgatttgctttggtgcatttcacctcgtggttgctggacttgattaagaataaagagaaccataaagaataaaaaaggattatgttcgaacatttagttttttaagtaggtttttgggcatatgaatactaggctgattgattattgacatttttgtttggtggtgcagtctatttgtaatagatatatttttgaattttaggtatttaatgcggggtacgagggtcgggcggaaactttcttgattctaagaagggcgtgatttgttactgcgattggataaatggattttttatgtggaatttttatatgattggattttacgaatttatgtggactaggaaataaatttttgaaatcagcggaggaatgacacgtggatcacattgttattccacgtgatcaaataaattgatgaagattatataaaatgatacgtggtggtgatgtggcaaaagagttggggaatctgtttagtttgagcattgtttctgaaatgtggctataaagaaagcgattacttgtatttctgaaatataattgagaattgaactatcttatgacttgtgaatacaatgaaaatattgcttatttcttcagaaggtgatttggtgaagagtctaatctatcctgtttccttactcttgcagactatctataagattagtttcgggcagatttatct

SEQ ID NO: 102166 - DNA, 708 bp, Mimulus guttatus
  Intron number 1 from transcript mgv1a005078m (locus mgv1a0 05078m.g) derived from phytozome v7.0 (chr-ID scaffold_68; pos 456842 to 457549)
tgattgtgctgaatttgtcgaacaatcaactcgaggttagttttactagttaggatatattgcgtgaatattgaggatgatatttttgaattgttcgatttagtttgtttatttgaaatgtgtttgatttggcactcattcgattcatgtttggttgcttgtccggttttgcgtcttagattgtgatgatttattagcaggtgtatttaatggtatgttgttgagaatttgtagattaggcgagatagttgaattattgctattgtcgatactcgtcatgctcgtgattttgtctgtactggtgaatgcatttatagtccaataaattctgaagaaaactggcttgattttagattgacgaattttacgaggtttgtgaacttgtagactattgaatgctctgcgagttcatcagagtgtttggttaggtaagtaacatctgagagcatgcagttcagttggcattttttgttgtttgctcaaatcttacgaattgtcgaattcgtattttgaagatccaattttttctttcgcactggacttctgacttctgagttctgtctgaaaatagctgttttgcgttagcaaaaacgagacgattttacaattttacatagcagcatagccattaaattcagttattaacattttggcttctgtgtgagcaaaataggcaattcccgattcagttgctggattagagaatct

SEQ ID NO: 102167 - DNA, 659 bp, Mimulus guttatus
  Intron number 1 from transcript mgv1a011408m (locus mgv1a0 11408m.g) derived from phytozome v7.0 (chr-ID scaffold_165 ; pos 526062 to 526720 reverse strand)
gacaaggtcaatttttttattctaattcatcaactttttttccttgtaaatttttttcaggattttgtctatatagatatacattaatctgtgtgttttacctgctactcctgtaatggtggtcgattaatgctgagttactgcgaattttactatttgatttgcgcttatttcaaactttttatgcaattggtgctgagtgtctgatcgacgaaatcatcgctttagtggtatgttttgattaatcatgtgtgtgtgtgtgtgtgaactggagacaattatggtgcagtttttgttttgtcggtgttgctctagtattaatcatcgagaatgtttagtttcgataatgcatttgacatgtgattgttaaagctaccgtaaacatagagctgcttctatccaatcactcgttaccacttctcttatctgacattctgaacgaatatcttaatagttacattcacggccaactacacgtactttttccatatttgctgtgcaaaaacttatgcatacaagaccattttttcattcttcaaaatagtattcactaagtttcacctagaatctgttgattaaattttctttcttattgaatgtggcgtgttcttatacttcttgcaggaaatcattccgataataatttgggagaggcaaac

SEQ ID NO: 102168 - DNA, 562 bp, Mimulus guttatus
  Intron number 2 from transcript mgv1a006609m (locus mgv1a0 06609m.g) derived from phytozome v7.0 (chr-ID scaffold_9; pos 3244096 to 3244657 reverse strand)
cttatcgtccaggtaatatttaattcggtgttcacccaatttttgtgttttttttttttcatacttaatttggaaaaatattgattgtggtggttcggaaggtaggaaaaatgacttttttggttcgattaatcgaagaaattattattagttgtggggaggtgttaaatgctggtttcaattttattggtaccgtttcgatttcaaatgtggttttgaccatttttagtccgagtttgactaaattcggaacaccaaatttgatgttttgagtattctgagatttagactgtaacccattcatgcattactctctcacctgatatttaatctctcactcgacattcaatctagcgtataagaaaactaactcaaggaactatatatttgatgctttgaatttcgccaaattcggactaaaaatggtcaaaaatcacatttgaagtcgaaacgggaaacggcatttagcatttcagttcttattaatttttcctagtttaatttttccctatttttcgttgttcccttctttaaggtcgacaagctggaactccgctacatc

SEQ ID NO: 102169 - DNA, 728 bp, Mimulus guttatus
  Intron number 1 from transcript mgv1a000197m (locus mgv1a0 00197m.g) derived from phytozome v7.0 (chr-ID scaffold_819 ; pos 5523 to 6250)
gattctccactgtcgcttcgttgctcaacaatcaggtgaccatcatcccgtcttgtttattacaattatgccactaggtgaaattttttatttgttgttacgatacatgtatatctcgattgcaccgttcgaattgtttttcttcatgtagatattgtctctctcgttgatcttgaaattaagcgatattttgagctcgtgttttattaattggtttcttcgattattgaaaatactcccttcgttccatattttctgtcactttagataattgtttttgttccatattatctgtcattttaaaaaaaatccaatagtgttttattaattggtttcttcgattattgaaaatactcccttcgttccatattttctgtcactttagataattgtttttgttccatattatctgtcattttaaaaaaaatccaatactgcatcaattacataatttccaattatacccttactaactctttccaacactctcttctgccttagtaattgcaactcatttcttatgtagacaagggtattttagtctaagaatttctaaaacaaagccacatttactgagatttttaaaatttgtcaaaggtgaaaaacgacaatgaaagtgtaatggagggagagtctttgaagaagtaattctttattaatatatttgtatctttatcacgattgttaatgtaggagcgacgaagaagagggagagaattcgacgagtc

SEQ ID NO: 102170 - DNA, 616 bp, Mimulus guttatus
  Intron number 3 from transcript mgv1a002633m (locus mgv1a0 02633m.g) derived from phytozome v7.0 (chr-ID scaffold_87; pos 1046214 to 1046829 reverse strand)
aatcgaataaaggggacgtgctccctcctcacagggtaaacgatttctacactgcattacttttcaaagagattatgcacttcagtattctgtgcggctaaactatgttactaggaatgaaatataaaagtgtatgctactcttaagtgtattatttagttaagttattctgataatgatgcgatctcctaatttaactgcttccgttactttgaactgtttaagaagagtctttgacattgccactgcagtaggaaatttggcaatgtagtagattttggactacttttacgggccattttggtgtttgcagtcaagtgttttacacaactcagtcgagatgcaatggtgtttgtttctttttcgtttttgctacctctttcacaaaacctggttaaataattgcacgtgacgtttttttttttgtattgtttgagaccttaaatttcttttgttcatgatatcatttacaaataggtgatctcaagtgttgtttccagtgggaacaatgtaacctattcatttgcctttgacataattcattttatcttcctctttgctgctgttgtcctttctcctttctcatgtttttttaatgtcttccagtttggaactc

SEQ ID NO: 102171 - DNA, 511 bp, Mimulus guttatus
  Intron number 1 from transcript mgv1a000724m (locus mgv1a0 00724m.g) derived from phytozome v7.0 (chr-ID scaffold_1; pos 3023106 to 3023616 reverse strand)
cctgtaattttccccccttccttccctctctctctctctctctctctctctctctctctctctctctctctctctctctctctctctctctctctctctctctctctctctctctctctctctctctctctctctctctctctaacttccatattatgataattagtagtccttcttaatgtttcttgataaaaccctaatccactttccttttacttatttttttcttattgacaatgtgggttttttcctttttgcttctatttttcaagtttgtgtctgtctaaggtttatttatctttatttatgcctgcatttaatttttatttcagaggttatttctgtattttaccggtagtttctgatgtcttttgagtttcttgaactaattattttactgattcttgacttaattctttcgaaagaatatcgcattatcaagatgtttgtaaaatattagtcttcatttactttatgccacttgacacgagattgtttgttgtggagccag

SEQ ID NO: 102172 - DNA, 441 bp, Mimulus guttatus
  Intron number 1 from transcript mgv1a015089m (locus mgv1a0 15089m.g) derived from phytozome v7.0 (chr-ID scaffold_2; pos 4474791 to 4475231 reverse strand)
ttaattctaagctccgccaccgtacgcttactttggtaattatcatacattttcaagtagatgagatctatcagaattcattttcttaatttcataatttatttctcagttttttttttcaatttattcatttaagtaggtgaagagcgattagctcagccaaaattagtaaattaggttaaatatgcatttggtaaattttgaattgttatgcttttgtttgtaattgaactacttgtcaacctaaagtacctgatgatggtgatgcttaaaggtgaagacaaggtcatagaaaaactcaaatagtatatagagtttctaatttgtatttttcttaattgtttgagctccattatatctccatttgataagtaaaactaaaattgttttactgttaatcgatcaggttgcgtcaaaggcgcaggagttgtcgtctgatct

SEQ ID NO: 102173 - DNA, 341 bp, Mimulus guttatus
  Intron number 1 from transcript mgv1a007157m (locus mgv1a0 07157m.g) derived from phytozome v7.0 (chr-ID scaffold_83; pos 278648 to 278988)
ggcaaacgcagctccatttatcgaggcgtcacaaggtacttcaatgtttcaaccatcaaacacgtggtgtgcggtttccttcattgctaagcaacttttttttttttttttgctttcaattactagagttgcttattgttatagtagattagtgaaaatttagctagagttgataatgctagtcggtagatcaaagtacagctattgaagcgcgaggcactactgatcacctgcgttggtcgaaagtcgaaagcggattcttcttcaatttattttgaattttgcttttctgaaataattagtttttttatcgtgctttgttcccgcaagagtaggcatcg

SEQ ID NO: 102174 - DNA, 833 bp, Mimulus guttatus
  Intron number 1 from transcript mgv1a020083m (locus mgv1a0 20083m.g) derived from phytozome v7.0 (chr-ID scaffold_48; pos 414478 to 415310)
gctggactactttccgatccgccaccgttggtaagaatatttgcacgaaattctcttctctttcatttccgtccaaccgtttacgcatttgtatttctaataataacaaatttgccactaaacttgaaatttgaatgcattttaaatttacgaaattacccttgcatagcatagactgggtatattacaacaacctccctaaggtaaaatgtaattacgaaaaaactcctttgttttgataacttacatgcaacccctatagtttgtaaatatcttacatccaacccctacaaaagggtgttaatgtaagaaatttataaattgaaaggggtggatgtaattatggaaaaatgaggggttttatcgttaacataacttaccttagacggggctgttgtaatataccctaggttttataattacaaaatggtgcaaatttagaccggatagtttgttttaatatgaaaatcggatgtcgacacgtggatagtttaaataaaaatattattacgattctaataattagaagaaaaaaaaaagaaaaagaaaacctcagcataaccccttctaaccctaattacagcgtgatccttctaaccctaattacagcgtgatttattttataagagtttagacttaagagtgccacgtgtcaaaaaattagtggaattggatttatattaaatattggctgatccgctacagaatttaatctcattaagaaatttcaaatatatgacaaatatagtgttatccaattcactcaaccttatgatctctataaatcaacaatcacagccgtctcgggcgagggattcctagcacgtgacctg

SEQ ID NO: 102175 - DNA, 748 bp, Mimulus guttatus
  Intron number 1 from transcript mgv1a005694m (locus mgv1a0 05694m.g) derived from phytozome v7.0 (chr-ID scaffold_211 ; pos 334442 to 335189 reverse strand)
cagtcattcttgcttctcaggtatttaccaaaagaaaaaacacacacacacagtggtattgattaaatatttgattttcttttttatggtaaaagttgctttactagtatatgaaaaaaaaaaaaaagagagattattttagtgagggtaagaatgtcatttattgagtgcagattggatttttgtccgggatcaaaaggtttacataattttataaagggcaacccatgaggtaataaattacgacaaaacccctcatgtttgggtaattacaagcacctccctgaactatgaatctttcttacacgtccacccttgaggtgtcaaatttagtaaaaaaattctagattatgtggaatgttatttagtttatacatgttttgccccattcgagctccatattttgaaacaagatgatcgtaaaatgtatctcttcacttgtaatatcagattgtggtgcatcagagactttttttttttttttgcacaaaacaagtacaaactagagaacatgtcacgaaatctagaaaattctgctaaatttaacactataagggtgaatatgtaaaaaaatcataattgatgggttattgtaattacccaaacataaatgatttttttcgtaatttgatcattacctcagggtgatttacccttttataaatccaaagacataataagtaataacctgggaggataattaattgataaaaataattaattgaaatgaaattcaggaaataaacac

SEQ ID NO: 102176 - DNA, 938 bp, Mimulus guttatus
  Intron number 1 from transcript mgv1a008091m (locus mgv1a0 08091m.g) derived from phytozome v7.0 (chr-ID scaffold_161 ; pos 254814 to 255751)
ggttagtgggttagtttagaagttaagataaaatccacaatttaatccactaagcactacttaacccactaactactatacttaacccactaagtactacttagcccactaatcacttaaccataactaaaatttagtttgaaaaataagagagttaaaaacacataaagaaaatcaacgtgtttcactctccgattctttgccacaacttgcacacaatgtagaaccaacgatttttcggcggaatagaaaaaatacaaatttttggggaattcgtatttttcgggtatgtttaggcacatataaatattcgaaacttgtgtacatatcaaattttcttgtcttgttatataaaagaataccatagattaaacacagtttggtaaatattttgcaaaaatactttattttcttaataaatatactattttgggttgtaataccaattctaatattatgtacacaccataatcaacaaatccgataaaatgtaagaaaattaaataaattcataaaaataaataatttctttttcccgataagacagacagctaggcaacaggctggaatacgtttaggtttgatatttgaattgagtaaaaataaataaaatcacattactaacatatatgtatacttaccatataatataaattaattattacgcggcgatacgttggcgtcaactcagataaaatcatattatatacacttaccataaaaattaaatattatgtggcgacacgttcgcgtgatacgatatatttagctatttttttactttccttaacaaaataaataaataatattttaataatataatcgtaatttgttatttatttgtggttttgctttaaacggttccgttttggtggtgtgaaatagctgcctatataagtgcatagggttcggggtgaacagttcatcaattgtttcat

SEQ ID NO: 102177 - DNA, 1041 bp, Mimulus guttatus
  Intron number 3 from transcript mgv1a025892m (locus mgv1a0 25892m.g) derived from phytozome v7.0 (chr-ID scaffold_303 ; pos 45896 to 46936)
ccattctattgccatcaaaggaccagaggaagaaggtaactaaattgtttcttggtttaaactaatttcgtattgacgatataaactcgtatgcagtacattgttcgcttatttttcccgttttgcgtccttttcttatatgggtatatatgtattctgttgattccagaccaaatcggctttctctcgtaatctcttttgatggtggtggaattgagacttagagaacgcgtatgagttttatattttagaaatctatgggatgagagaacacattgatcatcattaatcgtagaaatttaattgaatttttcatgtgattttgaatatgcagaataatctattataaacgagctgcattatagattggaagaaataattgaccagttagatattattttatgacatgcaattaattattatcaatataagattactttcactctcactaacgcaaaactgcaaaagtatgcaactgttagaaatgtcggaaagtgagggatcaacaaagagaagaaatagcaacaagtttttggtacatgttaatttaaatgacaggctcttggaccattctgttgttgtatatctgttaccttttatttatttattatttttagtcgaccctttctgtactacggcagttgaacgttgaataaattttgtacatctgtttccagtccatcctcatttttatgtgtttctgccagtactatataccatatggttgttgggtgtaatataaattctttatacatgtcctcgtccttttgctcttgcttcccaggcatgataaattagcagttatgttcccttcgtgcttaaatttatggatcttattttattagcaacaggaagcacactatcgtttctctttgatttgcacttctatcctggttaattttaatggttaaattgttagacatttccgattcattataatgtacggcagttgccttttggatctttattctctaataaactgatggtcgaagttttcattttataggtccgaaaactgtgaagctttttgttaatagggag

SEQ ID NO: 102178 - DNA, 839 bp, Mimulus guttatus
  Intron number 2 from transcript mgv1a016440m (locus mgv1a0 16440m.g) derived from phytozome v7.0 (chr-ID scaffold_16; pos 1554130 to 1554968)
cagctcaagctctctcccccggaattgaaaccgtaattttttcttatcatatccgatttttgttttgttttgtttttgttttgtttatctgaataatcatttcgcattgttaacgaaaatgaagatgttaaattatcgatgaaaatgaagatgttaaaattattgatgaaaattaattaaaaaaaaaaaaacaattctttgggtgtttgtatatctatagattcatggatgaatctagacatggaaaaaatgttgcttcaacactgtgctgagtgaatatatactgtgtgtgtgtgtgagagagagagagagagagggagagagagattttaatcagatcggcgaagagttatcttcgattctgtatctgtgccttgtcgattccagtacatacttttgcttttagatccataacgtgtgtgtgtgtgtgtgtgtgtgagagagagagagagagagagagagagagaggagagagagagagagagagagagagagagagagagagagagagagagagagagagagagatgtttgtttcagttttaagcagatcggctaagagttatcttcgattttgtttgtttcgattttaatcacatcggctaagagttatcttcgatttcgtatcactgccttgcggataccacatagcttttgcttttagattcgtcaccaaagcaaaatctttttcttccgatgaatacattttctcgataattactgtatgctcgttaatgaattttttttttctcgctgaattgaagtcaatctatcattatattaacgaattcgttgattatacagcctaagcaaatccacgagatcaaggatttccttct

SEQ ID NO: 102179 - DNA, 945 bp, Mimulus guttatus
  Intron number 2 from transcript mgv1a000420m (locus mgv1a0 00420m.g) derived from phytozome v7.0 (chr-ID scaffold_26; pos 242597 to 243541)
caccgtggtttacaaaagctactctcgaaaggtttgggtgcattttattgcatctagtgtataaaatttaccttacttgcttatatctggttttatgacggagatatgtttatgtggctcctaatcatctatatgctttcttagttatttcatacgtactcttcttatcttagaaaacccacatgaacatttctcatagaaatttgatttgagaataatagcataatgatactatagtgcattttcagttacgacctgaagtcaagattgctcaccgatgatattgaatgctttttggatgatcttgtttatttattattatttttttggtaagagataataaatggaataaatctggcaagttgtgtattcctttgctttggaaaacaacattgcatgtcgaatttatttaaaggtttggtaatttgctgctgagattgtgatgttcgtttgtctaacaatcctattttgtctatgggagctccaacctcatatgcagtcgaaccaaatatgagaaatgaatctcatccttcgaccaccttatatgctatcatactacaaaaaaggaacctccttcaaatataaggagaatatttaaatatatggagttcccctcttaaaaaaaaaacccagtggatatgttgcttttttttttttgccactaagttttatgatcaatcttacggaaactatggggttgactggtacaccattaattcgaatgttcaatcaatcatcttatttatctatactaccaatacttggcatagatatcgtttctattacttggtgaatggtcttcattaatccttgtaaaagagtggagctatgtttctgccccagggatttgttacatgtccttaccaagaattggtgataagaaagaactaatatttgctatttcgaacaggtttgtccgttttgtgagcactcctgagatcctgg

SEQ ID NO: 102180 - DNA, 582 bp, Mimulus guttatus
  Intron number 1 from transcript mgv1a006376m (locus mgv1a0 06376m.g) derived from phytozome v7.0 (chr-ID scaffold_206 ; pos 149771 to 150352)
gttttcgtcactgtaagcttttctttttttattggccaatcaaatatgttatttccatttttttcctaaaatattttttctccctggatagcactaccatttaatttcattccatattatcacgagcatcgagatgttttatggttaatacttaatagttactaattttggtcatttgatgtaaatcccaaacatagtatcaccacgttttccaaattgaccacaatgtgcaccaaaaacttctcgatgattattcaccggttgctatgttctaaaagtgaacagttgaacgcgtagtcgtttaagaaagtgttgatttttgccatttgaaactgattttcaacttaaatatgccttctcgacatccgtaccttttttttaccatttagcaaatggaaatatcagggctttggaagacccgtactttacgtatagcattaacgtttgaccatagtcagattgtaatctgtaacctgctggactcacactattgtattatttctcaatagttgtaaaaaccaacgttagtttcgaagtctagacgagaaactaaagtcttttggtgcaaatgtgcaggctgga

SEQ ID NO: 102181 - DNA, 431 bp, Mimulus guttatus
  Intron number 1 from transcript mgv1a000063m (locus mgv1a0 00063m.g) derived from phytozome v7.0 (chr-ID scaffold_18; pos 716365 to 716795 reverse strand)
ttgattacataaacgagaaggtgaggcttagttgattgatgcttttttatttccccctatttttttccaattatataccaaatttgttttttttttttttttttttctgtttctgcaagtgtttctgtaaggcttctttttttttttggtatgttgtctagttagtggagtggaatatggttaattcttgaattggttacttagctggtaaatttaacgaagaccggttttgagtctggtgattcttctattgtttgaacaagtgaattcagggccatgccattaatttggaattaatagttcaattttttttaatagtttattatgtattcctgttttggaggtgaaggttggtcggggaagggggagtgctagtaattcgaatagttattactgctttttgttaattcaattattttttcagctaggaa

SEQ ID NO: 102182 - DNA, 612 bp, Mimulus guttatus
  Intron number 1 from transcript mgv1a007926m (locus mgv1a0 07926m.g) derived from phytozome v7.0 (chr-ID scaffold_56; pos 1394160 to 1394771)
ttcgactagcccgggtgtgtttctttctaatctctcttttttgccgctattctttcacatttgtgtaatttgttaatgaatggagagaaagatgaaaatttcatgaatattggttattccattgtacataaattatagggaaataggactgagttttgagagataattagaaatgatcttgatacacgaagaacacactggataactcattgtcggttatttttgggccgatatcattttagaaatgtagcaagtgttgattgtcttctgcatctaattggctagattcgaacagataattcgattgtatctgcattttctaattctgacgtggaacggatattttgatgcattttgcaatccaagttatttcaactaggtctattaatgattaaaaacatactgaaattcctactttatgggagtcgagactatttgatactgctcaagaaccattaaaaaaggaggacacacacactcatatatatatatatatatatattgatgaattgataaatgatattttgattggaaattgcaagtttcttacctgttttgttgttgtggaaagaagtagaggtctgcggattggaaagcagcaaaggcgcataa

SEQ ID NO: 102183 - DNA, 926 bp, Mimulus guttatus
  Intron number 1 from transcript mgv1a017067m (locus mgv1a0 17067m.g) derived from phytozome v7.0 (chr-ID scaffold_26; pos 310618 to 311543 reverse strand)
aataagctcgccgaaatcttggagtttcaaccgaggtatatataagttaacaaacttcttttttttttttcgctgtttgaatttattgatgttttgcttgattttgatcggcttgttaaggaattgattttgaatacgaagaacaacggtattaagggtagaaagacgatcgtaacattgtttaaggtttttgagctttgatggatagaaatgttagtaaaattggtggatcttgatttgcttgatttcgatcggcttgtttagaaattgattttcgtggttgttttgagtattttgaatacgaaaaacaacggtattcaatggtagaaacgcgatcgtaacatgtttaaggttttttgagctttgatggatagaaatgttagtaaaacgagatgtatctcgattcgtactttctatggattacctaaatgctgcataatcagtaacattggtcgaaattggtttttggatgtccgaaattgtttattcgtcaggagcttggaaatatttcttgcagattcttgaacgttcgatttctggtagatgatggaagtgaaatcggcacttgttttgcccggtttttgttaaattaataatttaatttttgttaagtcgacgaggatgatgctaatctaggataacatttttcctccatggaagttatataaataaataaagtcatacttccctaattacaatgcttattggtcgatccaagactgctttattttagtcgttagctgaaaatcgaagcattggatatatatttctcaagaagccattctatatacaatcacacacataagagatttaagattaactttacattcagcatcaataaagtttcgcgtttatcctgtaattgtaagtcgacattttatcgttccttgtgttaatatggttcctttttttttttttttgcagtg

SEQ ID NO: 102184 - DNA, 917 bp, Mimulus guttatus
  Intron number 1 from transcript mgv1a024225m (locus mgv1a0 24225m.g) derived from phytozome v7.0 (chr-ID scaffold_71; pos 1090094 to 1091010 reverse strand)
gggtatatatatatgtcaatgaaatactattggacgatgatgactttcagttaagtctttgaaatttgtcggaaatatcgtttcaactctttcaagtatcgttctttttcttcttcttcaaacatcaccactatttaagtatgttttatttattaaaagtaatttaagactaatttatacaatgtactatctatatctatactattattatttattatatattatatattatttatattttttaatatattactagcattttttttccagtgcgatgccccggatagcatttctaacgtgaaaatacttattgatttaatatgacaataacaattataataaaatttatttgtgatatgataacaacatcaatatttatacaaatttaataatacaaactgattcaaaaaaaaaaattatataaactttattctcataatataaaattgattattaaataaatgaaacaaagaaaaattagagaaaatatgctggaataagcgataaaaataataagaacaattaaaaagatattaaaagtagtggattagaattgtgctagcctagatttggtgtgaaagtaattagaaaaaagtggaaagtggctgcgaaatagaagatatatatatatatatatatatatatatatatatatatatatatatatatatatatatatacaaatatatataccattagggtttcttagggtgccctaacgtttctctcttttatatataagatatcgagtgatacgctcaaaatttaatctcccttttaatccactactccaatctcattaggtgtccttttatcataaaaaataaaaaaataaataaaatcacttgctaattgtattctataatataatgtgtgtcctagttctacaccaactcaaacctcatattatatataca

SEQ ID NO: 102185 - DNA, 577 bp, Mimulus guttatus
  Intron number 1 from transcript mgv1a017963m (locus mgv1a0 17963m.g) derived from phytozome v7.0 (chr-ID scaffold_133 ; pos 190367 to 190943)
ttctttgcctcaagttttgaactgtaacactactggtactttctttcagttatatatatatatatatatatatatatatatatatatatatatatatattaatgtaaattaatatcttatttttcgaatattgtagttccaaatagaaagaagagagtgtctttgtcctcggccagctcaaacatttcaacttcaactaagggagcaacaacggatgataatgctagagatcaaggtatttttctttccactaatgtttgaactcaaaaaattattgttttaactttataatttaattttatataccatcttatatctatgtaaaaaaataattatttatttatagtgagagttcatgaagagtctcaagtgcagcatatgggcaattcttcaagtgaggagactagagttgttattgaaggtactgttaaataaatatgttatgtttttttttctttttctgtttttacttttattatgcttattatattattttagatccagtagcataaactgttggtaaagtatacacgaaagtgcggtcttatgtttgttattgttcattaaggattagcga

SEQ ID NO: 102186 - DNA, 470 bp, Mimulus guttatus
  Intron number 2 from transcript mgv1a000859m (locus mgv1a0 00859m.g) derived from phytozome v7.0 (chr-ID scaffold_20; pos 2104072 to 2104541 reverse strand)
ccattttcggacacaacaagcttgaagagaagagggtgtgttttttaaaccttaaaactcaaaacccttgttttattcttcttttaggtgccatggttttttttaattctttttatatttaaattaaaaatatagtcttgatgattcagactagaaattcatgttaagagaccttttagttagctccagttgagtttattgttttttcaagaattaattatcatggtttttaatgattttaaatttaaatgaaaaatatagtcttgatgattcagacggcaaattcatgttaagagatcttttagttagctgcagttgagtttagtatttttttcaagaattaattatgatggtttattcatctgtgaaatttgattgcttgactcgaaaaagtttgcgtattaatcgaaagttttcgtcggtttttttttcactctcaggagagcaaattcctcaagtttttagggttt

SEQ ID NO: 102187 - DNA, 444 bp, Mimulus guttatus
  Intron number 1 from transcript mgv1a006159m (locus mgv1a0 06159m.g) derived from phytozome v7.0 (chr-ID scaffold_108 ; pos 496373 to 496816 reverse strand)
cgtccaagagaaaacgcgacaagacttcctctaaggtctctctctctctctctctctctctctctctctctctgtttaatgtatgcgctttatgtatgatctacgctgtttccgatcagttatatctcttgtgaacgcccttttaattcggttgattttttgaaggaattgaaattgggaaaacccctaatttatgagtaatgctcttttatggtgaaaagattgaatctttagagccagagagtaattagttgtgtaaaacccaatttgatttatcatttttcttcaaaaaaagaaaaagaaatagatttaacctataatgagatcgattgaccatgatttgattctcctatttctaggtgaaagagagatgttttactgttggtttttgtttttttgtttttggcagaaaaagagtcgaagaaaggaatcgaagaagtctcg

SEQ ID NO: 102188 - DNA, 798 bp, Mimulus guttatus
  Intron number 1 from transcript mgv1a011744m (locus mgv1a0 11744m.g) derived from phytozome v7.0 (chr-ID scaffold_73; pos 1008660 to 1009457 reverse strand)
aattcaccgtaacgaattgcgtaaattggtgcaaggtatgccgacttctctattatgttttcctctatcaatcaaaaagttttaatttggaatttgtgattggacctctcttattttacatcattttattagttttaatttggaatttgagattggacctcgcttattttacatccttttattagttttaatttggaatttgtgattggacctcgcttattttacatccttttaatcgtataccttctttttttttttttttttctcagtcatggtcttatttcttgtaactgtttctaggttgtattctttatgttcttgagcattcacttgctgcaaagggctgtagtattctattggcccatgtaatctttcaaaagaaggactaagtaacaaaaatactaatttcgtatcgcccttagtttcggtgcaaacttttcttcatattgtgtcaaccttcaaaatgtcaaaactttggttgggttaataagtgtctaacatgaatttggataggataaagcaaagatctgacgattcgtcgtcctcgacatgttctctaaaatagagatgttttgatagatttgctcttgatgttttttttgctatttaattgaaatgagaccgatatatacgtcacctttaccctttatattcgctatgttaagtgtcacttcttatgtaggttttagtctgtcagttcctatgcattatgcacgtatacttttgttttcattaacttaaagatgtggtgttgtaatgatttgattttgtgactatgacacacaggaaactataaac

SEQ ID NO: 102189 - DNA, 705 bp, Mimulus guttatus
  Intron number 2 from transcript mgv1a008923m (locus mgv1a0 08923m.g) derived from phytozome v7.0 (chr-ID scaffold_22; pos 1070238 to 1070942)
tcttacgatacaaacatacctcgccaggtaatggctttacgatgttcttttttttttagtggtcgtggtttatatgatttcagttcttggcaattcttaattttatcggaatatttgaattctcggtactctgttaatctttgtagtgtgtaataggctagcgatatcttagaagcggataagctaaaagcccatgttttgctaaaatttgaattaactagttcttgagaatccaattctataatcacatagttctgttgcaatgcagtagttaattatatatctctaaaaatataatatggcatcacaaatttccaactttaggctatggcaatcgttcgtccggattcctgtctatttatgttgaagcgaaatcaagaacacactcggttgtgttttaaccaccttaagtttcacatccattttctcgttgttggactctgcataatttagatgcagaaataagttgctatttttttttttttttttttgcctaagatttcaagaatatgaattaacattcaagtttctctttttattgctcaatgcccttccccagaaatgcacgaattcggctatattttcactcattacatttgattacgtagttttttttctcttaaatcaaccacttttgaactttattctctttttttttttccttaaattgaatcagacggggctttctggttcgagtgcaatagt

SEQ ID NO: 102190 - DNA, 848 bp, Mimulus guttatus
  Intron number 2 from transcript mgv1a007793m (locus mgv1a0 07793m.g) derived from phytozome v7.0 (chr-ID scaffold_31; pos 107489 to 108336 reverse strand)
caccatcctcaccagtgcctactcatccgttttcggtacttcctttcttgttttgttgaccttatttttagcctaaatgagaaaatgctgagttgttaaaagtgattcttgtatttagaattagctttttttggtttagaagtgtgttttgatttggaaattctgttattctttggatagggatatctatcatcaacagttgcatatgtattgttttcgcttcattattgagagataggggaatcgaaacaaatgatattccttatacctactcctgtctgttagataatcctacgatttttccgatgaatgaggaaatatacaaaattgttttctagctgctgagtgaaaatgaagggttttcaccaatcgctcatccgaatttgagatggttcaaactatcaggaatctgttgtgatagcctgaggtgattgatgagtaaacgatctttcttttgaacaaagagattgttattgttgcaagtttgatccatcttaagaatgattggattaattttgtatgttccattaaaatggcaggaggagattaaaaaagggaaacatgaacgatatatttgtatttcttacatcagaaggtttttaattctgatcgaaaacatcttttggtaattaaaggttaaattgtaatatggtttaaaattgcttcagattcggtggataacagttttttgatcacgtacagtcttcagttaccttattgaatttgattttccacaaggaattatagttagatgaggaagctaaattttttgacttccggtttaggcatttttattaaaaggaaagtaacattttccgttctcaggcattcctcttccattgtttggc

SEQ ID NO: 102191 - DNA, 652 bp, Mimulus guttatus
  Intron number 3 from transcript mgv1a004074m (locus mgv1a0 04074m.g) derived from phytozome v7.0 (chr-ID scaffold_36; pos 1526439 to 1527090)
tgaaggtgttgaaggttccggagatcgaacaaaaggtaaaactaaattcgcaggactatttttagctcaaagccgtcgattaattagtttttgatttcgtgcgttgattgtttactgctgtctgatttatcaggatattgattttaatgaaacatgttaaaatggattctgcagattttttatattgatattagtgtatggtccaaagctgttctgtatgctggaattatgtgaaggatgtgttcgatatcggttatcatgttagggtatctatcagaacgtgtatcgaaataattgtattataggagatactgaaaatttgataaaagggttatcgaaaaatatatatgtacgacgagcgactgtttgttgatattcgttacgtactacataaattttatttcatcaaatatcgacgacgttaaacgtaaaatgtgagctacgaatgcttaagagttaagaattaggacactttagcccttaggccattgcatcgggccttacaatttcattttccaatatagattttctgcagaaatttacgttcgactggcaaattgatgtattgtttgaccgactgttttcttcctagaaaatgattagtatttgctttagatgtaattttaacttatatgtttgagttaggctttgg

SEQ ID NO: 102192 - DNA, 577 bp, Mimulus guttatus
  Intron number 1 from transcript mgv1a015455m (locus mgv1a0 15455m.g) derived from phytozome v7.0 (chr-ID scaffold_266 ; pos 63037 to 63613)
ttcgagctctgcccttaatcttgaagtcaaagaaggtatctttctaatctttttttttttagcttattttctgcgatgggttcttttggaaattaaatttcattttctgtttgaactaatttttttaatgtatattctgcataattaggcgggttccaatggtgcccctgtgattttttttagtgggtctgtgtattttcggttaaaaattgaatctttctttgcagcattagcaaaagattaaggatcttctttttagggtaattaatcagctgggtgttaatcagattcgtgcagttcaagattaagctaatacaatgttaattcagaggcttctgtgtttatgactgtgtttgagttcgtgaatttagattagtggatttttttttttttgggtgaaatttgtatgttaatgtattgaataatgtgagatttctttatttggattcggcgtttgttttcttcgaaatctggagagctggcgttaaaattagggatctaattatggatcattttacgactcatatgatataatattaaaaaaaaaaagaaaactcatattgaacttggcaaaggt

SEQ ID NO: 102193 - DNA, 644 bp, Mimulus guttatus
  Intron number 3 from transcript mgv1a008188m (locus mgv1a0 04613m.g) derived from phytozome v7.0 (chr-ID scaffold_22; pos 1347466 to 1348109)
gaggtgagatttttaattagtctttcaatttagagctttggtgcaaatcactatgtttgaagtagtgattcttaattccatcattagatcaagttgttcatcttcaaactttattctttaattatggtgcattcggattgaaggatttcaaatgacttaaaaatgggaagaatttgaaatccaccacaattgctaaaaaaaacaagtaaaaatgttaaatgagagctatggaattgaaattccttgtcaaatgactcagatttgttattatggatttgaaactcctccctcaaattctcccatccaaatgagaaccattatactacttcagagcagattctcttttgaaggagagccaggactagaatcaccatctcactctataaagtgaaggtaaatttggtgctatatcatttcggacttgaaaaaaatatcaaacagcgcaactttctatgatttaagccacgtgagaaacaaatctccgtgtacatttgatcttgaagtcggtataagctaccctttggtctttgatatagcaagtgaattatgtgtaagaacgcgaatcaacttgtgcattacagctcatatgctatcctgtttgacttaatttgcagctggatcagttgggtgcacaaacatcaaga

SEQ ID NO: 102194 - DNA, 883 bp, Mimulus guttatus
  Intron number 1 from transcript mgv1a022571m (locus mgv1a0 22571m.g) derived from phytozome v7.0 (chr-ID scaffold_222 ; pos 277906 to 278788 reverse strand)
gactttgttacgatcgaacatctcataattttaaggttgtcgtctgatgcgatctctcgagtatcataaatatttcctacgaaacgtaagatctattctttaatatttttctcttccttctcaaaccctagcacaagacgactatttaaagataataaaaccctagaatcctaatctcactaggaaagataattaccttaactaataaaatacttaatatatatcctaaatactaaactcacggctatctatataaacctaaacaaactattctaattaattaataataaaaatactaactaacgaataaatatacgatatattaaatatatatcgtatcaaaccacccctcttgaaatgaaccttgtcctcaaggttcgagtcaatttggtccctctcttttgcgtttccacctatgtttgatttcatcgacttgcttcccgattaactccgattccgaaaaacacgatgaacgaccaagcttattaacacattgttcatgctgatccaacaaaattccaaaggctacttttgcaaaaaatctcaatcttctcaatctctctcccgataaatcaatcttctcaattgtcttttcaaatttcatctccttcacaatcaatatcattcttttatttttctcgatcgtctttacagatccgggctcattcacagtcaccaaatcttgatcgtctcctttcttttgaatatcgtgggactcttctactatccactgtagttcttcgttctcttccttagttaattcctcaccttcgtcccaaattacctcaagtgaattcgacaattcatctttcggcgaactcacaaaaaattggggttcttcgaaaaagtcatcgtcgtcctcctcctctcccttcggcgatag

SEQ ID NO: 102195 - DNA, 585 bp, Mimulus guttatus
  Intron number 1 from transcript mgv1a012932m (locus mgv1a0 12932m.g) derived from phytozome v7.0 (chr-ID scaffold_51; pos 140388 to 140972 reverse strand)
ccaaattaaggtaaatttatataattaacgtcaacaaacatgttcttgcatgattatggttttacgacgtggtttcaatgtttttttcttctataagttgaggattctagtgtaattagacctaatttaggagtacttttgtaaattcataatattatgtaactaaataacgaatttaccaaaaaaaaaaaaaggcaaatctgatgtggcatgttgaatcaaatttaaatcgtcatagcccaaccaacccaccctcccaattcaatagaacaacgattagggctatagagttgttcttgcatgattatggtttgacgaatgttgatttttttttttgttcgtttcgtttcttttccctatttttttattttagatgtttaaagtttcttttcgatctcaaccagttctttataaactgaaattttaaatccagatattatgtaggttaaatcgagttttcttttattaattattaattgatataatcttgagcggtatgtgtttgtgcgtgtaattatcatcttcgataccttagatatttaatttttctaaacataatattttttttttggacacagctgcaag

SEQ ID NO: 102196 - DNA, 720 bp, Mimulus guttatus
  Intron number 1 from transcript mgv1a011707m (locus mgv1a0 11707m.g) derived from phytozome v7.0 (chr-ID scaffold_17; pos 2126801 to 2127520)
cccaactctcataatccactctgcttctatttctggtaactttctctcatagatttatgcttgtttacattgattttaagcttcaatttttttccatgaaaaatgactttttcttttataattaatgttatggatgtttgatcaataaattgatgattcgtccctcccggttttgaaatgctaaattttcttcctgaaagaatgaatagatagaagtgcgtagcgaataataataataataataatgctaagattttagttggtttgagggttgggaaggggttattaattatagacgagattttataattcatggtttccctttttcatttcttcaaagagattgcttgtttttgtattctggagagatttagcgggaaataggtgttgttacgaggagcgttttgatttgagtttggaataatttcatgtgcacccaacgtgttcgatgaaatgacaaatttgttctcttgtttgcgagtgactgtagtgttagatttggttgctttctattgcgcaatgatgaaacttatgttgcttcaattaaatagttaaggttttactgaaatctcgtgggagtacacaagttgaaataaatttatatttctccataaattcttgcttttgattctagttgggtttgtttgttggtaaatgctgaaatgcttgtcactctggtttttagcgaatttgatattgcggaagcctttcttcaataga

SEQ ID NO: 102197 - DNA, 576 bp, Mimulus guttatus
  Intron number 4 from transcript mgv1a011707m (locus mgv1a0 11707m.g) derived from phytozome v7.0 (chr-ID scaffold_17; pos 2128381 to 2128956)
caactgttcaagcaattttgaagggaataaaacaggtatagcctctttcaccctgacgttcagcagttgcaaacttagatcaaagattctcaatgacttggttttcatcatgtttgcaactttgtctctgttaaatgaaatgcccatatcgcttgtttcactatttctctggattgatttcgtactacctttagttcactctcttttttaccctattatgcaatcaaaatatgtagcgtgtcacggttaacttcccatgtcgtgacaatcatggacataaaaaacgcttaaaagaacattttgaactggatggttttgtctcagtgggattactttaggagaaagtcgcctgtcttttattaatgtaaatcagtggtgttacagatattggagagtaagattttgtatactgtttttttccgttttcttctttgattatgtggatttcttaccgtgtagtcatgtctatttcctgccctgaaagcctttttgttctgtattttcatttttcacattggtttaatacatgagtttatttcagagtccgaagaaggtaaacttggttgctgcattggt

SEQ ID NO: 102198 - DNA, 847 bp, Mimulus guttatus
  Intron number 3 from transcript mgv1a014754m (locus mgv1a0 14754m.g) derived from phytozome v7.0 (chr-ID scaffold_7; pos 3088664 to 3089510 reverse strand)
ttcttgacctggtaaacttttcctttttattttatttccagttttcggtactttttttttcggttgaaaagatgttaatttgctgctacaagacgcacccaaaaaaaaccgaccatttccggaaaaaaaaaaacaattgtttgatttggttgaaatagaattcgtcgtaatttctttcagttggagttttatgccttactatgtgatgtgaattatgccccatgctaatttgctgctataaaatacaccaaaaaaccgaccatttccgaaaaaatatttcaattgtttgatttgattgaaatagaattcgtcgtaatttctttcagttggagtttcatgccttaccatgtccaccaatctgaatgttcaatgttgaactggaatgtacttttaaataatcgatggataagagaaaatttacttacaactactgtttgtctttaaacaagattactcgaatcatctgatcatatttttaatgagaggctacttaccgaagaagaattgtcgttttgtgagatagaacattatccgtgaacatgaaacaaaaaaaaaaaaaaaaaaaaccgaagcactcaaagcactaaattgattcggtgaacacgaacagttatgatcaacctagagattatttttatacattagatttttgccatcaaagcccgttatatattagatttaaacaaaatattctttaggtgtgatgtgtgagaccttgaatatctacgtagttgtttgtttagactttagcctttgtcaagattcttgtaattacccccctctctcttttttttttttttttgcattattcatttctttcgaatgacttgcaggaaaatcccgatct

SEQ ID NO: 102199 - DNA, 1040 bp, Mimulus guttatus
  Intron number 1 from transcript mgv1a018063m (locus mgv1a0 18063m.g) derived from phytozome v7.0 (chr-ID scaffold_198 ; pos 81065 to 82104)
gtggtacttctgcaaggttcctttgtcagtaagttagtgccgaataatttcaaaattatgttatgtttttaattttcataaggtttcgtgatatgattggagaaagttgaatagtgctgatttgtggctatcgattatacggttggaactagaactagaactagaacgattaatcggcatttgttgttttggttggtttcttctgtaatgggaatgacaaaatgtgaaatagttgaactgcttgtgctttgattcttgaccgtgttaattgatttaaatcgattatatgtatgtgcttattgtgatccttcgttcttttgtgtcatcctaatgtattgtttagcgacaagctctctgatttcagagatgtgtgtggttttccttttactctagtgaaagatgagtacatgcaaaaatgtatgatatattatttgagggaagacgaactattaatcgaatagaggaacaaatgaaaatgaacagccaagtaaagaagacggaatcacggtcaaatgtgcaattaagtctacaacttgaaaaacgaaagtgaaggggaaatcaagaaacattaactctcttaagttcaaaaatccaaaagtgtctgagatagttcagcatatactattgaattggtgcaagggaatcatatgattcagtgtccggtgtatcacatggtctttatctccaatctcaaggtgaaaacagttcggttccacttctgaagcaggtcaagtcgtgtatttgaaaagtaaaggcaattttatgtgtttttcaattcgagtactcgacaaacacgttgttcatcatactgatgattttttttctttataagtagttctagagcaaagtccacgagactattataagtaaacgggctttctattgcaacacaaattttttgccttatgtattttgttgaaaaaactgatcatataaaattgctgacctgagtgataactttcgtttgtgaaattgatcgatgttgtcaaaatttgtttttggcagagctagcagcatcggtgcccaagacagaaatagtt

SEQ ID NO: 102200 - DNA, 888 bp, Mimulus guttatus
  Intron number 1 from transcript mgv1a009339m (locus mgv1a0 09339m.g) derived from phytozome v7.0 (chr-ID scaffold_113 ; pos 111621 to 112508 reverse strand)
ccaaaactgtagctgaagtcaaagccctagaaaaggtcagcatttttttttttttttgtttttttgtttttttgcttttttcttttcaagtagtgccggagttaatttgtgatgttttttttttttttgctggagtgttgttatggtgcgttgattatggtataattggtgtttttatgttcgattaagtaccgattttttgttgaaatgcgtcccggtttcgatattgaaaagcgaaaatgaagttgtttctgaaatttagtagtattctgtgataaattttgcttcaatttataatgtggttgatctatgatgtttttttttttttggctggagtgttgttatgctgcgctgattatggtataattagtgtttttatgctcgattaagtaccgattttttgttgaaatgcgtccctgtttcgatatttaaaaagcgatatggaagttgtctctgaattttagtagtattctgttgatgattgtactggttatctagacttttgaattgttacttcaatgtagctcaaacatttgctccgtggagaaatatgtttgcggaatgcgataggaactagttagaaagagcaaaacttgcagttggattgttataattttatctataatgagtttttttgtaaatgaatatggcatcttctcaaaattactgtgttatgtacgatgagttaatacgtgagtatgccgccgttatatataagagttaccattcgatcttcgttttaatcatttgaggagaaatttttttatttatctctaattcagtgcgtacataattgaagtagatggcatgtacatagcatcatattacttattttggccgtactatgatacaggctttagaggaagttgagaagaacatagtgacaat

SEQ ID NO: 102201 - DNA, 522 bp, Mimulus guttatus
  Intron number 1 from transcript mgv1a008204m (locus mgv1a0 08204m.g) derived from phytozome v7.0 (chr-ID scaffold_83; pos 436314 to 436835 reverse strand)
tgttttgttcgtcatctcccccatctcaatttgatgtaagttttccttttttttttttttaatttatttattgaaactgtttaattgttggaaatcttaacaaattagatgtgttaatgagaaatagtgcttgttaacagcttctgttacatgtctgatcacgccctagtttgttcgtgcttgtgaatttaagcccacttttcataattctgattcttaaacagaaagaaaagaaaaacattgtctagggtttctgctgtatcattgtaattgctaccccttgttgactgactgagagtatattcgtttttggattctctttataaatctgcatgggcaagaaaaacattgtctagggttccacatcaatttgaagtaggcactggtgttttcgctacgatttcaatcgataatatcgtaaagtttattcgataccaacagacagcattttgattgatatgattttctggttttattggtatattattattacagagagttggattcataggactgggaaac

SEQ ID NO: 102202 - DNA, 1026 bp, Mimulus guttatus
  Intron number 1 from transcript mgv1a014615m (locus mgv1a0 14615m.g) derived from phytozome v7.0 (chr-ID scaffold_11; pos 1831224 to 1832249)
cttttctcaattggcttagaaggtacggtttccatcaatttttcgctcgtgttgatgaattttgtttttgattttttgttgaaagattctggtttgtttttttttttttttgaataattggttaagcgttgaaattatatccgttgattttaattgcttgattttgctcggtggtgttcgcctggtgttattgttaaatccttgagggatttcaacttgtggataagtttgattgtaattgtaaattagattgatggtgattcatgtatgtgggaatttttaagccttttaagattctcctgcagataattgttttgtgtgatacaatgtaatgcatagatgaagcgtaggatgttttcgattagccggttagaaaattataggattcattaattgaactgtagtttgtaaggtcttttacgaatagcatgatacaatttggaacttcaaaaaaaatactttagggtatcgagatttgatgcttgattgtgttttaagataagttatcatctacgatcagccctcgccccctaacccaaccaaactatacaagatgacagtttgattatgttaaattgtgacgtttgacaaaatattagaagacacgaggcaatgaattattaagtttatcattgaactttcttttatggcttcctaaactagaagacacgaggcaatgaattatctgcttttttgttctatgaccgatattgtatggattgcaattagtgcgtcgtctaaccacattaatagattttgtccggagtgttagttgaaaactcgatcaaaattgttgtgatgtctgtttgcttataggtgaatgtcgtccatgccaagatttcttgttatatgctatgttctcattaaaacaaaaaaaaattatgtcctcgcaaatatgaactgtttccgagattggggatgtctacttacagttattttagtcgtttaattttgatgtgaaattggtttccagtgtacaggctcacgttattattttccgattgcagccttttcttcaagcaagaa

SEQ ID NO: 102203 - DNA, 353 bp, Mimulus guttatus
  Intron number 2 from transcript mgv1a000305m (locus mgv1a0 00305m.g) derived from phytozome v7.0 (chr-ID scaffold_51; pos 800016 to 800368 reverse strand)
ttattgattggtatgtgttggaacctgtggtgcaaattaaactataggggagaatagtgggaggggatctggaagattaaagttcttttgattctggacaggcttatgtggaatttatgctgttgactagttagtatattcgtttctgacttgtgcatgttcgtgtttttttttggttgggcatttagtgtgtacggaattgattctgtggtcttctccttgattaagcatgattctgataggtttatgtatttttacgtgacacgtttatatgtctagttgacgaaggtagattttctggattttttcttctcgtagtactgggagtggagacgttgatacatcaactgttg

SEQ ID NO: 102204 - DNA, 487 bp, Mimulus guttatus
  Intron number 1 from transcript mgv1a003721m (locus mgv1a0 03721m.g) derived from phytozome v7.0 (chr-ID scaffold_178 ; pos 558266 to 558752 reverse strand)
ttcaaggtatctttcttcattaacatctttctattttttctcagagctactgcgattatcttttcctttttatttttttttaattaatataatccatgtcaaattatctgtactgtggcaaaacacgacaccatgttaatttgaaattgcactgtttgcttgctttcttctgctacggcagactagaagattagaataatttaagtaagttgtacaattgtaggttttcagggcatagtgatttttccccttttgtttcttgttctctttttttttttttttttcttttttttttgtgtgtgtgtgtgtgtgtttaaaattttgattcctattaatttgagattttatcagaaaatctcatgacttttgtactccggcctcgagtgggggtttttatgtattcctacattttgttgttatgtttcttccaactaactgcgttgtgtttgcaggtaggaatacttggtgtgaatctcggttctgcaat

SEQ ID NO: 102205 - DNA, 824 bp, Mimulus guttatus
  Intron number 1 from transcript mgv1a016526m (locus mgv1a0 16526m.g) derived from phytozome v7.0 (chr-ID scaffold_22; pos 356942 to 357765)
gtgcgccgccgccggcgacttttcaaatttccgtggtaaatatttccgcatctgaagattaattattgaaatccgttttcctatttattttagatgattgtatgcttttttttttcttcttctgcgattcattaatcgattgtttatcaaattgcctgatttagtaattgctggtaattactgttgcatctgattttaatgtgtatacttttaatttttgtttatttgtgtatctggtaattaaccattatgcacgaacaaattggggaatttctgttgtggaaccagggttagggtttcaaattgaaatcatggatgcggtttgaatataggtttttgtaacttccatggctcgaatttacgtctaggatcgtttattgattgaaatgaaaaacttcgataattctacagctgtggggattgatttcttcaccatgaactccaaattataactcatttttttaaaaagtatttagagatattcactcttgagcacaatcgttattgttttgaggtgaatcgaaacattgtaatcatcgatttttgcttagctataacagtttacgatttttttatttattctgtgtgactactttcttgaaaatggtggctaagtagataatcaaaggagctaaactttttgcttcttatggttttcggttttcggttttttctacgtgcttcttcttttgggttttttagctcactccttctatcgttattttgctctggtgtactagcattgggtgtttcattcggttatacagttcgttacttttttttttttttttaatttatcgaacatgtgtagttagttgaaggat

SEQ ID NO: 102206 - DNA, 444 bp, Mimulus guttatus
  Intron number 2 from transcript mgv1a016526m (locus mgv1a0 16526m.g) derived from phytozome v7.0 (chr-ID scaffold_22; pos 358008 to 358451)
tctattaggactcgggtttcttaccttcattccaggtatcttaattaatgcctccccttataaatcatttcattctttgccccttgtttacgcaaatatatttgattaagcgactatccagtttgttctatgtgggattaatccatattgtcaattctattactgggattaatccatattgtcaattctattactaaaattcttaattgtgacgagttctattgtcatgtagtcttactcctatgtatgtgaatttatgtgcaagtcttgtatggatatataaacgtggagatacacgcgtattggtgaactttgcgtatataagaaccttgtaatttttttattttttattttcctggtgtgaagttataataagtttgctgattagctgtaatgaaaatggctgcaggcttttacgagactagaattgcctactattcgtgg

SEQ ID NO: 102207 - DNA, 616 bp, Mimulus guttatus
  Intron number 1 from transcript mgv1a023028m (locus mgv1a0 23028m.g) derived from phytozome v7.0 (chr-ID scaffold_11; pos 709323 to 709938)
ttttgctgtcaggtctttctctgagccaataccaggtaattatacaccgtcacatgtcatatagcgcctaaaactgacaccaacctattcatgttaacttcttggatgtttccttaacttgttgattgtaatatcactgataaaactcaatcttttacactaatgtatttattctcttcacttttccgaagttcgtgatatttatcgcatcagttaactgactgatacattaatgtcatacgtacagcttaagtaccaactaaccagttggtattggcttctctttatctggattatatgtattcgtatctgaataatctattaccaaaagagattagaaaataataatgttattttgaaatttgtggaaaatgacttgataactaaaatctagtgctatcaggaactaagaaacttcagaccctttttatcttgtactgtcatcttatagttattctttgtttgacctaattgtctagctagttctcttcccgaacaaaaatgtttagatacttctttgagagagccttagcgtttgctgttctttatctctctctctctctaacaatttctttgaacaggtagttcagattggattaaacccaacgaatttgta

SEQ ID NO: 102208 - DNA, 480 bp, Mimulus guttatus
  Intron number 1 from transcript mgv1a008411m (locus mgv1a0 08411m.g) derived from phytozome v7.0 (chr-ID scaffold_7; pos 2241692 to 2242171)
cttcactactggtaatttttcaactctttattattaaaataattttttttttccaacattattttttttaatgcgagtttaattttaataattatatatttttggataaatttataactttaatatttttttttggagtaacaactttaattagtagattatttagatgttgaaatatttgcatggatgaatatgttttaattatatgatataataataatgtcacataatttaattcagaaactatgaagctaattaattaccatctctgcatattaattatgataataaataaatggataagtaattgagtttatttaattattcaaataattttattaatgtgcaagtgacatccaattttgagctatttttttaataccgtttcaacatgtttttttcgaaaattatcttcttaaatccgaaaatctcgatttttttccaggactattaccgaacggcaacttcgagttcggacca

SEQ ID NO: 102209 - DNA, 782 bp, Mimulus guttatus
  Intron number 1 from transcript mgv1a006541m (locus mgv1a0 06541m.g) derived from phytozome v7.0 (chr-ID scaffold_24; pos 330313 to 331094)
cttcaatttgtgttttttctgcttcttcttatcaggtaattgctcgtatatcattctctagatttccgaaggtctgagtttaaattattcaataatttgagatttttctgttctgaaatttcacttttttttttttttttttttttttttttgcttattccagttataattagggcagataggataaattagcagtattacgaaattgattcgcagataaatgcagtaatttgccgttttatttctcacattcgtggtctgagttaagatatggttttgcattttgttattacattatcttctatttaagtagtcggttttattcaatgtttatatccttgtgaaatttctgtatattctgttcttatgaatttattaaatattcatagtttgtggtatgatattttttgtttgattattgagctgtagctactacttttttttagtacaatgtataaagctacctataggtactgctaaaatatagaaattttgaaataataaaaggtaatagaaatattggaacttacgaaagtgtgttggaattttgatatgtttcggttttacccagttatcaggtctcgtatctttgttgagcttgggaagaatgcatacacttttcaccatgtttattatttttatgaatatttaagagtttccaatgaattgtgccatccacgtaattcttggtattttactgaagtgatctttattattattcgttttgagatattatgtgtctcttacctggggttttacgatatgttcagaaaagttgtttg

SEQ ID NO: 102210 - DNA, 876 bp, Mimulus guttatus
  Intron number 1 from transcript mgv1a011888m (locus mgv1a0 11888m.g) derived from phytozome v7.0 (chr-ID scaffold_193 ; pos 74737 to 75612 reverse strand)
aagtcttctacaaagaacgcctcggcgctcttcaggtatatatatatatatattcatttgcctgtttgtgatttttgtgtgtgtgtggatcggtttatgcatgtatgttaatatgtatggttttgatttttgttcgtgttcttgggtgtttcatgccttgatttgagattcggttggtactgtttttcacgaatttgatttgagtgaattgttagaaaaaccgatgattagtttgaattgttagaaaaattgatgattattttgaattattagaaaaaccgatgattattttgaattgttagaaaaaccgatgaataaacttagggttgttgattattgaatgccaactaatatggttatttgatttttgatggtgtacatgtttggggagtatctaatatttctgcatcgatagaatctaaacaaaatggttgaaaaagcttatcatgatgatatttgacctttggttaatcatttactttttgagggggcaatgattttagaaacaaaaggatgtcgagaataatatatagtccgtcgcaaaatcgaacatcttctttgagttcgtaattcgtatctttttgcatttatgtttgttttgattggctattagttctttttataaagttgagtgtctctttacaattcttgtatttcttgaaagtgaatccctttttactttatcaaattgcactcaccttcgaaaatcatttccactcattgccgatatacgtacaatatgtggttgtctggtggattcatcttctgtacattttttttatgtcgaatttcataaattaaatactgaatttgcgatttttttttttttttttaatgacagtcgggttgttgtaagccatcgaacgactgcaagtt

SEQ ID NO: 102211 - DNA, 737 bp, Mimulus guttatus
  Intron number 1 from transcript mgv1a012785m (locus mgv1a0 12785m.g) derived from phytozome v7.0 (chr-ID scaffold_104 ; pos 717550 to 718286)
ggtaatgacagctaacttgtgctttggattttttttttttttcttaatttttcaatgaacattgtactgtatttttgattgtgatggaattggacatgcgataaaagagcacatgcgagatttttcaagtatgtagtatgtaaacggagagaatagctgaacttgttaatttttctacttgttgtggcagtgattggactagtgttgaagtcgatttgtcggtcactgtcgtaaattgaattagtcgttctgtcactttgtttgcgctctgtttggagctaattggtccgccggttttagattatgcggtgtagtaattagggtttatttttcttcttttcataatttgttgttatgttgtttctgagcagctagtctatgagtcattgagtccaatttaaatttgttgccggtaaagtagatttgttggttaaccgtcaatgtgcgttaattgtagatatattagatgagtagtatctggattatcctgtaatcacgttgttggattatcctgtaatcacgttgtaacgataaagggaaaggaatcatgagttatgtaaaaaacaaaaaagtcggtgtttgtgatcgtaagacaatttgctcccatctacttgcttattggtgttatggatagacacttcatttttcttctttaccatatgatgattatttgattaaatctttgctggtatgagttcgcagaggactggaagctaaacccgctttttcagaagaag

SEQ ID NO: 102212 - DNA, 859 bp, Mimulus guttatus
  Intron number 1 from transcript mgv1a018235m (locus mgv1a0 18235m.g) derived from phytozome v7.0 (chr-ID scaffold_87; pos 737055 to 737913)
agggtttgtaaccattattctccaaatttcgtttcgtttttttttttttttttttttttttattatagaataatgaactaattttttcgagtgtttttattccttagaattgattatggaaacaagagaagtgtcgcccacacagttttttaccaagattgagggtgcgtttgataagattaagcactgaatgctgaatgctgaaaacatatctgaatgactaagagttgtttaggtatactgaatgctgaaccattaagctcatttgatagctgaagacaagtaatgtctgaataatgttattttaccattatagccttggtgaaattctaaaatattctgttaattaaattatgagcaacatatttgtataaacggaattatttttgcttgattaacttaattagcgaagtatgaatttttagtggatatcaaacatctttacaattataaaaaaattggaaatataaatgccaaacaaatagagaaaaaaaagtaaccttttaaaataaaacagctaaaagtaacattgtctcgtcgtgtagggttttcgaaaatattaacatagaaattttaggttgaagaaaaaaaatcaatcgtttaaaatagaataataaaaaaaaaagtagaataataaacaaggaatagattagttaatttgattaagggtaaatatatccaaatcacattcagacattggactgattcggtcagcacctatctttgggctgaaccattaagagtcatttgcactcattcagatgtcatcaccaaatgtactgaatagtccataaaggtttgtcgtttactaagctaacttatgatgttttttttgacaggaggctcgttatttatccat

SEQ ID NO: 102213 - DNA, 840 bp, Mimulus guttatus
  Intron number 3 from transcript mgv1a000978m (locus mgv1a0 00978m.g) derived from phytozome v7.0 (chr-ID scaffold_12; pos 1898876 to 1899715 reverse strand)
attctgggaattatttactacatcaggttttcgtaagctccatgttgctgaattttctttattgagtttgaaatgcctgtgtgatgctgaagatccttgatccttgatgcacataaacaaaatgatttttttcttgggattttagctcaatttgacagccagaatttttaatatttgatgtatatttatgcctgaaaatgcttcaaacttctgaagagagatgtgtctataccgatgtataatatacctgaaaatgtttcaaacttctgaagagaaatgtgtctatacatcggtattttctattgtttttaagatacatttaagacccttttccttcttgatatttccgttttgatataataattttggaacgtcaaagcgactctatgatgcatggctcattgacaattgaattttatgtgtttgatccttttgctctggttgcctctgatagacatttttctgtttgatccttttgctctgttagacttgagctatgtttatttcatctttgcttgctctattagttggtttatatgtttcatatgtttgagagaggttacagggtctggaatgtgaaatttagttgtgaatgtgttttttttctcagctagtgtaagaatttgcgaaaagaaatgtatgcttaatcagattggaggtacaaaaaaatactatattaatctgttgagactagggtagactggaaatatgtaatctctgattgttgttgtttttgtttcaaatttgcggcataaattgtttccagtttaatgtgtatttagttctgtatatctataaaattgtattctgatttacactgtcaactttaggattgtgggt

SEQ ID NO: 102214 - DNA, 1052 bp, Mimulus guttatus
  Intron number 1 from transcript mgv1a026835m (locus mgv1a0 26835m.g) derived from phytozome v7.0 (chr-ID scaffold_68; pos 518907 to 519958 reverse strand)
gatagaagagaccctttgtctagatctgcaagaaggtacaatcattcgtcataactagctaggggtgtaaattgagaataaaatttccgaattctgccgattttggtccgaatatgtaatatttttcattctgaattccaaaagttccgatttccaattttttttttttggttaaacggaattggagtacatattatatttcgattttcgatccgatttttatcacccaaaaatttcgcttacaatatcaatattgttatatataaaatgactaataaaaatggaattttcgagttccgccgattttcgaaagacaatatttttcattctgaattctgatttctcctatttttcgtaacaaacatcaatttcttacaagattgtctatttaaataagggttaaatacagtttgcacccctaaagtataccctctgtaacacttacccccttaaagtatcatttctaacacttacccccctcaagcacaatttaatttgtattttaatctttaataccttaaaaaaatattttattgaaaggaataactaaaagaataattaaattatacaactaaaaatatttgttcaaaaatacagtatttaaaaatttaaaaatattattttgcgttggatacttattcaataaataacatctaattgttgttggaccaactaaatcaaaaatactctatcgattaatttgaagaaatcaatacataaataatataaatcttaaatatttatatttattttagttcattaatttttttaaatatattttcattcattattacccaatatatattacttttcaataattaattttagttatttttcaattttctatgaaccgttaattattagattgttatgtttattattttttaaattttaaaatacaaaataattgatgttgaggggggtaagtgttacaaatgatactttaagggggtaagtgttacatgagatatacttcaggggtgcaaagtgtatttagccctttaaataatgtaacagaaacagggcattggaaggttttagtagtgaaatcc

SEQ ID NO: 102215 - DNA, 520 bp, Mimulus guttatus
  Intron number 1 from transcript mgv1a001677m (locus mgv1a0 01677m.g) derived from phytozome v7.0 (chr-ID scaffold_79; pos 152447 to 152966)
ctttttccctcgcttcttctcatcagctttctcaggtctctctctacggctctatgtctaaatacgtgcaaatacatatgcgtatttacatattttgaattttctatgttattcggtcaatcattttttatgtaattttagttttgttcatttgcggttactctttttatttatttttctgaatttttacacagaactatcttctaataggtggtgaattgtcattatttgtggtcaatcgaatacaagtgctttatgtcatgtagcttttgttgtttttctggttaactgttattggaacttcctcgattgacattgatatttgtttgttagaatttgtacagacaggtttaaccctggaaaagaggcataattattactcaattgtatattatttttctgctttcatttgcgattcaggttattattgcttcctagcattttaaattttaaaattgcggctgaatatctgattaagtgacttcaattatcatctgcagctttgctgttctggtcttaa

SEQ ID NO: 102216 - DNA, 378 bp, Mimulus guttatus
  Intron number 3 from transcript mgv1a005284m (locus mgv1a0 05284m.g) derived from phytozome v7.0 (chr-ID scaffold_18; pos 1956440 to 1956817 reverse strand)
ttcagtcgcacccccttctccatccactcttcagtgtaagtgttcaatctatttgcgttcgtttttggtttgattgttagattctaagagatgtattattccgttgtatatttagtgaagaagaacttatgtaaaggtttttttaattcgattgatttcaaaggagaaaagtaggaaatgaattatgtacagttatagctactattgaaaagtttgaattattgaagattttttcggttataaaagtttaatttagagtagttctggttttttttttgtgttgttttcctcagtgaaaccctagatccgacttgactctagtttttttggttgtttatattagatttgaaggatattgctgcactgattgagacggga

SEQ ID NO: 102217 - DNA, 788 bp, Mimulus guttatus
  Intron number 1 from transcript mgv1a010819m (locus mgv1a0 10819m.g) derived from phytozome v7.0 (chr-ID scaffold_122 ; pos 181602 to 182389 reverse strand)
ttcggcctcgatcttctctgcagctaaagattttggtgggtttttttttttttcaagaactgtttttcttttaaaaatttgatcttttttttttcattaataatccttttcaacacttcaatcgacatgggtttttcttcatattggcaaattctttgtaaagatatgatctttatgatcttgcatgcaagaaaatggatcatttcttgtacaatgcatgtttccttgtagtgaaagaagatcttctttttaaattaattaatggttcatgcagattaaatttcgtgctctttttgttaatttctaattgctccgttttccatcaaatataaagagatcgttttatttgcacattcatcatttatcctagctcgtgtttgtgcttgtctaatcttagtagttaaatactgtttgttggtgattgttcttgttcttgcatcgaaattaacgtcgtcgctatagctttaatcacaccattatatgtatatgagtttaattaaccaattagtcattttaattagcttgaaattgccgtttgcaaaaatgtcagtttgatggtatattagtgaaatttacaaaatttaactaatatgatatgcctatgtatatatccatgcattttgagttgatttgattctattctttaatttgattttgctttctttcttcattttctccaactatttcttaatatatgttgtgccattcttatatatacatacatacataaatacacactatatacacaattaattaattgttgtttaatatacaggttgagtttgaag

SEQ ID NO: 102218 - DNA, 761 bp, Mimulus guttatus
  Intron number 1 from transcript mgv1a018610m (locus mgv1a0 18610m.g) derived from phytozome v7.0 (chr-ID scaffold_27; pos 1332748 to 1333508 reverse strand)
tctggtcaaaccgtacgactggcattatatcaaaggtaaacaaaaattcacccattaattaaatttatttttatatatatttgttgtggtttgaggttttttttttttttttttttagtgttcttgattgcaatgtttggagggctgtgttcaaattttcgacttttttttcgaatttctatttatgttttcggtgtgtttcgtattgatgtcttgtaataatcggaaatttttgtttgatgtatttgttttcgtggttttcggtttcgattttagcacttgttatgcttgaatggctgaggccaacattactgattatgtgaatgtgattgtatatagcattatacttttggatcaattaccgggaatcgtgtccttttgtgatcacattgttcgggtttttttttttttttttaataatttgttcgacgagctttactaatgttcgacaagattcaattttgctcttgtatatctccgttctggtgtgattgtagcaattgcgagtttttccgcctcggttttacgaggcggaaaaaagttagttcttttcgtgtttaaccaataaatagtgccacaagtttcacggtagcagcaacgtatgtcaaaaaggatatactcgttctacatactgcattcgatttcaatccgctttttcaaattctttttattcttgatctaattcgcacgaacttatcgataaccggattaattcgttttcgaaatatcttgcttcgtcgcattgcagttgaattgccacc

SEQ ID NO: 102219 - DNA, 546 bp, Mimulus guttatus
  Intron number 2 from transcript mgv1a006387m (locus mgv1a0 06387m.g) derived from phytozome v7.0 (chr-ID scaffold_17; pos 862598 to 863143 reverse strand)
ttgtttcaggactttgaaactcaccacccccagctgtaagtttttattgcccctgattttttttacgagtattcggctttgttcccatctttaaatactgtctgcaatgcatcaaaatttcattattggctgtgtttgctgctttcatttatttgatgtatgttagttgtaaatgatatgggatgtcgttgccgattagtcatcatttaacttgcattctcaagattgattcgagatatgttttgaacttgcaaattagtcgtcattttacaaaattgatttcctttcaaacacacgcacactcacatatacatgtacatgttgtttgttctacaatggtcatcttttgtcactaacgtcactcttcacccgattgctttcaagaattttttttcattttctgttactgaaattgcaacatcgtttacatgcacggaatattttttttttcattttctgttaaagcatatctattacaaaattgtttgttaactatgtttgtttgttctaacagttggtgatctgaaccatttgatctccgcaaca

SEQ ID NO: 102220 - DNA, 981 bp, Mimulus guttatus
  Intron number 2 from transcript mgv1a021188m (locus mgv1a0 21188m.g) derived from phytozome v7.0 (chr-ID scaffold_20; pos 1889946 to 1890926 reverse strand)
aatttaaactcttgcaaggaggtattaaattaaaatataaatgaaaattaaataactaaattaataatatacatatttatgttttaattttagattattacatatttcagtataaataattacatgcatatatttgatatgataacatcataacactacctaatcttcacaaattatatatattaattttttttaactcttaacataaactcaattagcttgtatatatttcatatatgtataattatatatgtaattatatatatgtgatttcaaagtcatggtcgtcggcaaagctatatatatgtatatgtatatatcaaaactagcagccctttctacaccattgaccaattatataataaatatacatatatgcaacttgttaacaaaattaatttagaccaaggaaattttctatagtaaaacaacgattggttcatcaatttggttctttcatgtagaccacgtcagcaattattaattagaatatctatataaatcaatgttactattattattaataataattttattttaattattttgtggttttgattttattgatcaatagctagttccatagatttcttacaatctaattagtagaataaaatcttaatttctgcaaagtcaaacataattgattttgactataattacaggttattatggcgcacatacgaaagagaaagagcgtctgtggttattcactctcactcaagatctacatatacacataacaaaagcggacaggggtaatatatatctttttgttgtaatatttcagagtgagatagagagatagagatttagagatatagagagagagagagagagagagagagagagagagagagagagagagagagagagagagagagagagagagagataacttacatgcatgcaattttatttatattttatgggataaattgtgcagttggatcatcaacttggatcaacaaaagcagaaat

SEQ ID NO: 102221 - DNA, 836 bp, Mimulus guttatus
  Intron number 1 from transcript mgv1a007387m (locus mgv1a0 07395m.g) derived from phytozome v7.0 (chr-ID scaffold_1; pos 4734969 to 4735804 reverse strand)
actaaggagagttgagtaatccattgatctaaccggtacagctacaaatcccgagcttccagttttattaaatttatttttttaatttaacaagatgaagaagtttgccttctttatttccactctaattgtacttttttttttgtttctttaaattgtttggttttgaagtttgttcagagggttgggttaattgctgttaaacccttttacattttcttttgttgttctggggtttgttttctcatttttgttggaatttgcgcatcacatcgacaaattagccacttgattacgttttgatttggaaataatccatcttgatggttattcttttctctttttgtttcaatttttaggatatgattgatctttgtggactagattttacttcccagatctcgttctaatcatttctctaattattattattttgtgttattattattattattgttgttgttgttatatatttctgggtgcgcttataataattgcctggaattttgtgtactgtaggtttaccttttgttttataattttgaaaaattttagcaatctatttttcaatttaggacaagtgattattatgcaaatatgcattcaatgctaaattaactgttaattgctccaagaattgcctttcgaacaatttacacttgtcaattgcataatatgaatctcgtagttggttgtaatgttgcttgatacaaccagatgcattttcatggatttattgtagtaagtgcttttgtgaaaggcatctctgttttaactgtaccttgaatttattgcaggtaggttctgaatttatctattagagtttgtagaagtgt

SEQ ID NO: 102222 - DNA, 786 bp, Mimulus guttatus
  Intron number 3 from transcript mgv1a020569m (locus mgv1a0 20569m.g) derived from phytozome v7.0 (chr-ID scaffold_2; pos 615020 to 615805 reverse strand)
ccgagaactgttatagagaagccgatccaccagaggtacattaatttctttaaaagagtaaagttgccattaaaaacgatgctcgttttcggtattttttaattgcaataacattaaatcgatccctttgtttattttgttaaatgccggtttcgcctcgaaaaattatgaaaaaaatgtgattcttttcggaacttctaatattctgcaggtaaaaagattttttttttttttttataatttatgtgatcaacattttcttgtttaccgaacgcttacattttgcactcgatcagacggttacagttattcccgttcctcatcatggtgaagttcaattcggttcatcatcgaccgtaagttgtttttatttcattattcatttagaattttagcaattttcgctgatggtaattattatttacttgtcctagattgaggagaaccccggtttcgtgaacgatgtagtgccattagtagtaattccggcagggtcattagcaaaaaatcccgatccaatataccctgtatattctactcccgaggagttgccctcatcgtctttcgtaccaaacatttttaactatgtggaaagcagttcgtatactttgagccatgtcggtcaactcgatttgacttccaagtactcgtctaaaatggagacttctttctccgattcttttaatcacataaacgatatgtccgcgaaaatcgagtttgagcatgtgaaaaatggtgaatatatccccggttttgttgaagaagacggcataaagaagacgattg

SEQ ID NO: 102223 - DNA, 664 bp, Mimulus guttatus
  Intron number 1 from transcript mgv1a002449m (locus mgv1a0 02449m.g) derived from phytozome v7.0 (chr-ID scaffold_3; pos 754873 to 755536)
tcgagcgcgagcgaggcatcactatctcctctaaggtgttcgttcgctcattaccattttttttcaatttaataatatcattaactttcgttgctttggatctccagaactagtgtcttgtgttttttgtattttctaccttccttcctttaatatataatcccttaattttggtaaaaagagatcagttgtgtcgaataaggcttttatttcctttgtgtctaagtattgaattgagatctccattggtacggctgctactatttgggtggcagtagattggtgatagtttgacaactgagttagtgtgtggggtcctataatccgctatttgatttatgagttgctctataatgttcttaaataatgatgccagttgaaatgtattcgattacttttcgactaactgttacaatctctcgcaaatagctcccccaaagagcagattttggaatgtctaatctgaactacttgtcttctccaaaggcaacattacttttgcagtgaacatatcattttcttgtttatgataaactatctcaattaaattttggaattatttctggcacttaatcctctaataataataaccatggttgttgctgtgttcttttcgagcatctcatttgttaatttcatgtaacttgcaggttacaggtatatc

SEQ ID NO: 102224 - DNA, 194 bp, Mimulus guttatus
  Intron number 1 from transcript mgv1a026707m (locus mgv1a0 26707m.g) derived from phytozome v7.0 (chr-ID scaffold_19; pos 725109 to 725302)
acttgcaagattgctgaggtgttattttattattttttttgttttttgtttttgttttttttttttctgattttgatgtttgaggcgttttattctcccaacagaagattttggaatttttggtatgttgatgaaagaatcattaattggagttgggagtattctttggatgttacagaattttctcactggag

SEQ ID NO: 102225 - DNA, 615 bp, Mimulus guttatus
  Intron number 1 from transcript mgv1a003625m (locus mgv1a0 03625m.g) derived from phytozome v7.0 (chr-ID scaffold_67; pos 450399 to 451013)
agagggatcgcctgtggatagggtcagtggagagagtgagagtacttactcggataaatgaaaaatgagattatggtttttaaaaagtaaattgacaattaagggtaaatttggacttataaaaataacattttgatagaatattagctaatgaagttttctctaattatttttcacaagatgattttccataactacatttcctagatgagtatagctaaatttccctttaattatttgcagcaaaaggtcctaatgtgggtatttgcatacatcgtatgatgaatatgtatctcgaatagacgagtagtctttttcaataaattttaaaaatataatataaatacaatataatgaaactcaataagaattcattgaaccggccccaaccaccaatttatgaaaagaaaaaaacccggtccaactacctaccaattgagtgccaattccatgtcatttccattttaaaacattttggtttttacttttactttttacttttacttgttacttttctttttacacacgttttgaactttagggtaaatgctataattaaggtaattgtcaaatgtgggagctgcaacaactcggagaaaaaattggggaaggaaa

SEQ ID NO: 102226 - DNA, 569 bp, Mimulus guttatus
  Intron number 3 from transcript mgv1a000962m (locus mgv1a0 00962m.g) derived from phytozome v7.0 (chr-ID scaffold_114 ; pos 12039 to 12607)
aataccacaagtacgttcctctcttcatttttcactcagttaacggtactcgtgtgttgtcatcagcatatctatttgttttttctttcagtttgatagctcatttctgacttgaagtagcttttatacttggtagtttgattagtaagcgtgtttgcggaagtgatctattctctttgttacattaagtaaaccgtggttagtagcaatttagaccatttgtaagcatagaggtagaagactctgaaatatgcagccagaggttatgaaagtgtaccttttgttgtgtatcactaaagtcaacacctttgtccacgacaattggaagcaaaatcctatatatatgccttggttatgagggggttgagcatggacgaactatgtttttaatagcttgacctccttttttttcttctctctatgtcatggcacctgcttattatttactgcttgttgaattattactatttgaattaatgtccttaagctttggactattcttttagcagtgagataagctgaaaggacacatacttatttatactattctcttatatatagggatacat

SEQ ID NO: 102227 - DNA, 1007 bp, Mimulus guttatus
  Intron number 1 from transcript mgv1a008537m (locus mgv1a0 08537m.g) derived from phytozome v7.0 (chr-ID scaffold_17; pos 1396583 to 1397589)
gcatcggacctgagatcgccgaatcggtcaaacaggtctgagcaaccacgcccgatcaatatttatctgtgtttatttgttttgattccacttttttttttttttttttagaattgcgatatttcagtctcgcgtgctagaatttgatgatctgtacgtgagtgaatttttgttgcttttattgatgcaatagtatgtgcgttgcgcgtcaatttgctcatttttttgtgtgggtagctttgctgtgttacgatgaaggataacaaagttaaatatttctgaagtagttgtaaaattgagaggaaaataaaatgatagtactatcaatcgttactggatttggcgccatcaaatttcttatttcctaaaaggtttgttctgagtgctaccaatggttcctcttggttaccccaatattggtatacatctcaacacaattatgttcttaatgtgttagcttctgctttggtacaccacactgcgccatctgattatggtatatgaaattctcaaaacagagtatccgtcaggtgaaaggatcgtattcaactagctgaaatgtttatcggtctcggtctccttgaatttcgtgtcttttgcagtaatatttaagaaatgacagtagaaatgatcagtgagttagtctccctcaaaagttaaaaccatgttgatcaagatgcgtgctttgtaggttccagaaacgagattttatgtgccaaattacatatagatagttactctactgataagattatgtcgtcttatctttaggaaggttaatttcttcactaacatcctatgtagagcaataaatgataagtcatcatgtttgtcattattggaatataccagctaagctagtttttgttggctttgtattgcatgtcgttcagttagtatctcttttgtgtgatgaaattttcataataaatgaagcttttttaccaaactcttatttaaaatgaaaatgtaatatttggtgaacaagcaggtatttagagttgctg

SEQ ID NO: 102228 - DNA, 547 bp, Mimulus guttatus
  Intron number 2 from transcript mgv1a010312m (locus mgv1a0 10312m.g) derived from phytozome v7.0 (chr-ID scaffold_76; pos 397429 to 397975 reverse strand)
atcaggtatgatttccttgaagcaactgaaactctttgccccaatttcgataatttgttgtaatacattatttctgctaaaaataggatatatactagattgggatttgatttatcaagaatacataaaaaaaaaacactaaatcatgaatctgtaacgctttacttttataaccgattatctatagttagaatatcacatcgaaaagatggcatctgacagcagtgagaatgaaacatgtattactatatacagggagtttttgtgttttatgtattacggatagggaacctaggaggaaatcggaagcactcagtccgttgagctattgtactgtatttgtagaactttgattgatgggtaccgatatggcttctgtccttcgttcttattgtgtaaatatgttaaacatcctcagctctgcaacctgtagtgagtctggtgaagatgtattgacatcttcagtgttcataattttgttcgtattatctctctttaaaacttgatcaaattcctatctctaggctgaggacttgagaaagtcact

SEQ ID NO: 102229 - DNA, 453 bp, Mimulus guttatus
  Intron number 2 from transcript mgv1a019234m (locus mgv1a0 19234m.g) derived from phytozome v7.0 (chr-ID scaffold_1; pos 4346598 to 4347050)
gtcacaatcttcttgcagcggggtgcaagtccaaggtattatcctttctcatgtttattgattataataatattcacaagaaaatagaagtgtgattaaattaaatttcctattcttgctgttaatctagatttgaatttacaatctagtgttgtattcatagatagaatcttgaaatatgggcatgaaaattaacatgtgcttggcagcggatagatatccacagaaacttgccagttggttcatatgtttgtatcaaatttatgttgcgtatatccctttcttgtccttggatatatcatatttaattgagtacctaggttatctgttcagggagtgcagttatgttgttttcctttcggagttattagttcgtacgttgaataatcttttgcttttactactttggtatctgtagataaatttgtgggattggaggagaacaaagcagat

SEQ ID NO: 102230 - DNA, 448 bp, Mimulus guttatus
  Intron number 1 from transcript mgv11b017878m (locus mgv11 b017878m.g) derived from phytozome v7.0 (chr-ID scaffold_3 12; pos 176936 to 177383 reverse strand)
cacaaacgtacatgtaaaaaaacatgcgcaaaagtgcattcgcaacaacgttcttaaaaacacgaaatacaacactaggacttgaatacgcataaccaaacaacaacaagatctctagatacaaaagatacagcggagtgtagaaataacactcaacgtttacgtttacgtggattttattattgattaatttatatatatgttttaattggtggatttagtattctataggtacaaattgataatgaggtgtccatgaagcaaaaaatgatcaaagtgtaagaaaagagttgcaattaggaaaacaaaatcaaattagaagagaggatccctcaacatcttcggtactgtccacgaagtcgagcataactttctcatccggactccaaatcaactggttccggcggcattagaaagctatttcagctggctacaattcctgtctaat

SEQ ID NO: 102231 - DNA, 471 bp, Mimulus guttatus
  Intron number 3 from transcript mgv1a012555m (locus mgv1a0 12555m.g) derived from phytozome v7.0 (chr-ID scaffold_82; pos 825151 to 825621)
acaggtaattttttgtttggctttgaattattatttttaggttataataagttttttatgaactgggatgatgaaaataaattattgtaattctttaataattgagatttggctttgcaagttgatgtgttattcataatcaatctcttatggaattaacttttgagacaatgccaagaatttgaagtgccaattttattttggtactgggtgatggttagcaaaagaagtgcaaggtattgaagtaactgagttttagttggtgtaagcagagatgcattttagctggtcgaagtgtattttgctcttaattacatttgagaaagcaaggtttcgattgaagcttgtttttcgttttgagtccatgtgcttgtggtggaaaaaaaatattctgggtagttctaagcttgcttccttcttatcttcttagtttagtagctacttctaattattcctttttgcttccagctg

SEQ ID NO: 102232 - DNA, 819 bp, Mimulus guttatus
  Intron number 1 from transcript mgv1a004642m (locus mgv1a0 04642m.g) derived from phytozome v7.0 (chr-ID scaffold_3; pos 3105226 to 3106044)
ggttagggcaaatcaatttttttatttctttctttctttatgcagtttagtacagaattacagataaaaaaattggtgaaatctctcactaatttggtgttgttgatattttctatggatttaaataggtttagtttctggataggttaacgaattgtgattaggcaatagttacctttaattagattttctgattttttgtgcaataatttttccataatttggtttttattgaattgttttcttaaaagttttggttcagtggtgtcatggtttttattcaagtcctctttatttctttttcacaaaattattattgtgtttttaaatcgattttgccttatacttgtttcgaatgtggttctagttgttagagaagtaaaacaatcattaattttgctatcgaagtcaatcacaagatgattgctttcccttaaagattacatcttgagctcataaatgtttgatgatgttgattgtagatttcacgtaaataacgtacttatcgagaatcagaatttaatgaacttgaagtttttccttataccttatcaacatttttggaactccacaaataccgtcttcgatattgaatattagagtcctacattgaagatccaaaaataaaattcaaaatacatttgagctttgttcttttctaccttttgtatggagcgatgctcgtttattgttcatcgatgtaaaccactttgctttgtttgtatagctaaaattaattcaatttcatttcctgatttttcgtgtgtgtgtgtgtttgttcctcgctattctatttccttctctcccagtcaagtgtac

SEQ ID NO: 102233 - DNA, 733 bp, Mimulus guttatus
  Intron number 5 from transcript mgv1a016565m (locus mgv1a0 16565m.g) derived from phytozome v7.0 (chr-ID scaffold_211 ; pos 354432 to 355164 reverse strand)
aaggaccgcttgaggctcttcggccaaagttacaggtacttatacttcttgtttccttttttggttcggttaattacatgaatcattcatatttattggtacttgatgaatctattatggcttttcagtccaatttagttagtttttgttgttattacttctgatgcactgtgttatttttcgtatttaagtatttatcttaaaaaagggaactccgatggcaaaatttaagccagattttatgcatggatatcttaatagcaccattcaagatacttactgtattcattaaggtctcgtttatttccgcaacgacttatttctttggaaaaatactttgaaggcaatgcaataaaacctgtatctggatgaagattttgggaatctgaatctttcctgagcttgtgttggatttaattatgtcaccgttcttctttcacaatcatatattcatatatagatatatattaaattgttttttttccatgtgtctgtgattaaaaaggtgaagtcatcaatatgtacaatattttcagtaccgaaaagggggtaaatttaacccgttattttgatcatttatgctgaagtgttatttcatgttttttcagaaattgaatgggcactagatttatttgtttttaattttcttttagcctttgtgctgacatgttttcctatgggataattgtttgtattagccaacacaacagcaaacgcggtaccgcaaatctca

SEQ ID NO: 102234 - DNA, 929 bp, Mimulus guttatus
  Intron number 1 from transcript mgv1a016565m (locus mgv1a0 16565m.g) derived from phytozome v7.0 (chr-ID scaffold_211 ; pos 355671 to 356599 reverse strand)
aaagcggaaacaagctcggcttaatttcatccaaggtaaattccattttcccaatttcgtttcattttttacctgtttgagtttcaattgttgcgcggcgttcgatcttcaccaattctaatcattccattttcttttaatttttctcttttagttttctgataattgtttgcatgtttttatgttaatgcgattcgtatacccgcgaaaattgaatttcggtaattgatattgagatctctgaggatctatgtagatgaagatttactaaaatcaatggtagataaatcccggatttgtgaatttagccggagacattttttgttggatcacacagtagagggtttataggtcaattttttctattgcgctttagatttgtttatgtgttaatgcatgaatgataataagtttgatcgctgaacgttaaaaattttcttatcggcgtgttgtttaaccgaaaccaaaattccgacacttcgttttatgatttatcttcaatctgaagttcaaattggagtatagtagatattttgaatctttgaagactattttggtttctgcaaatgaactttgctcgaatatgttaaaggagcttgattgagaatgtcgagaggtatatgtacataaaaaaccgactgattgtgctctcgtgctaaatgataataaagtactgtaaatcatgtgataataaaaattgagttattagaaactcggaggatacttgactaatggaaaccctgtaactgcttagtgctagagtgtgtgtgcgtgtgtgtgtgtgtgtgtgtgtgtaaagtagttcaattgggaagactattatttctttttatatcaaatgtttttaaaaatagtgtcatggatccatcgatggaactatcgactcattctagttcatgttttctgtatacagtacttgtggtaaaaat

SEQ ID NO: 102235 - DNA, 831 bp, Mimulus guttatus
  Intron number 3 from transcript mgv1a013034m (locus mgv1a0 13034m.g) derived from phytozome v7.0 (chr-ID scaffold_8; pos 1150412 to 1151242 reverse strand)
ttgggacaagggtggcacttaataaaaagatagaggtgagtatttgatgcttggttattagttagcctatgatagaatttaactattgttctttaaaattagtttgcacgagtttatgtctaagttcttttgcatgatgtcatagaatgttactatgcatagaatgttaactgcgttaaaatcttcatattggatccatcggtgtcaatttgacatttaaatcagtttttaatgacatttaattgtgatatgtgtgttgtgattgttcggtaattgttttcttctttatgctaatcatagatgtagcacctgggaaaaaaacatcatatggaaattattcatccgcaaacaatgtcctattcaaattgtttctcattgggtatctttagtaatggttatgtaggttaattttgttttgaagtggatagatttttcaccacatgtggttaagagcccgtttgggtaaacttattttaactagatgataatctcctacctttaataagatgttgtaagaactaataagttgttacgtcttattgttaaaagtaattttcgaagtgtttcgataataagcttataggttgtttttactgttttaaagatgttaaatgaaaagattggatataggtactttaaaaaaaaaaaaaatcttatacgctctccaatattttactttttgaatttttaagatctattttgaaaacaattaccaaacacctttgtaagaggttataagctgtttttaacagctttttagcttagctatacacatgcctccacattttggattgactagtatagatgtgcgttgggtgcagatagccatta

SEQ ID NO: 102236 - DNA, 730 bp, Mimulus guttatus
  Intron number 1 from transcript mgv1a013034m (locus mgv1a0 13034m.g) derived from phytozome v7.0 (chr-ID scaffold_8; pos 1151704 to 1152433 reverse strand)
cgacacatcaccctgtcacgcgaccctagcaccaggtactacttgttaatgccacttttaaaatcaagttaaaccagaggttacactttgtttctcgaaactattacattcatattacattcttccatcagttaatttttgttgtttttaccttgattttgtgtattctttttcaacctttgatttttattgctgaatgttaatttgggggtaaatagcacttaatcatcctttggtctgaccattttgcacatgaccaccttgtactttcgatataagcacatgagccccttgtacttttaatataatcacataagctactttgtggtattccacttgtcgagtaataatgttcattaggagatgaaaatattgaaagtacaagagggttatatgtttatgtccaagtacaaaggagtcatatgcttatttcgaaagtacaaacgggtcatgtgcaaagagatcaaacgggggtttaagggctatttacccttaatttggaatttgaaattagatgtgagctaaaaggtgaaagaaaattacaaatgatgattgttgtcatatttagagctgaggaatgtaattgtgcactgaattggtacaccaacaaactatttaatttaaacttaatacgcaatatggtttgtgaataaatttgcggaagaatttgtagtgaaatctttttcgcaatcaaaagcatgtaagtgatggtgttacttttgatgaaggt

SEQ ID NO: 102237 - DNA, 497 bp, Mimulus guttatus
  Intron number 2 from transcript mgv1a003702m (locus mgv1a0 03702m.g) derived from phytozome v7.0 (chr-ID scaffold_7; pos 301592 to 302088 reverse strand)
aaaacaaaggtgcccatcacttgatttgcccaaaggttgcttctttttccttcaattttgattttttttctgtaattggtttgaatttactttgaatttctgttttcttatgcaatttctttaagaagtaaaaaaaaaaagttattttgggcaaaaaatctcttatgaagaattgttgaaggtgattatatgttggatgctagtgttttttgtatatgatgtggctgaagttgttaatttgtttgttttttctttttttaaatttattgattatttggggttttctttaatctttgatatgatgtagaataattgaacttagggaagtattcgtttgtgtagaattgatatgggagtatggattgcaggaatattggggaatcgactaggaagctcgaagattctggaagataggcgcacggaatggtgatcagtatcattttatttcgaaaaaaactgcagttactggagatttcgattagtgaccgcagacagaa

SEQ ID NO: 102238 - DNA, 260 bp, Mimulus guttatus
  Intron number 1 from transcript mgv1a014463m (locus mgv1a0 14463m.g) derived from phytozome v7.0 (chr-ID scaffold_102 ; pos 428149 to 428408 reverse strand)
acgtcactcctgcctccggtaattttacctttttattttacatttctgttcatttgatttataacaattttttctttcttcttaatctgcaaagtcgattttttttagcccaagtagaattttgttgcaacttgctgtgaagatgcttagatgctgtttaatcattcgtttgtgaatcgagatatattgttgttcatacatataaaaaattgctgttgtaatttatgttttcatttttatgaactcttattttgtagaag

SEQ ID NO: 102239 - DNA, 779 bp, Mimulus guttatus
  Intron number 2 from transcript mgv1a000141m (locus mgv1a0 00141m.g) derived from phytozome v7.0 (chr-ID scaffold_11; pos 1119298 to 1120076)
ccaccgctggccattcactgattgctatacttgaggtcggtgttcagtcctttttaccttgcaaaaaccccaataagtatgaacagatgtagaactgagaatgagaagaaaaagtttttgtttgattaggtgtgaatgcttagattgaccttaattgaagttctgagactaactagggtaagtacttgaattattttgattgttgtggtggcatgaaatatctttgtttcagataaattaattgattaactagttaagggtgaatggaatggatcaattgtgtaacataaataactgagatagtgtcagagagtttaacttcccgttccacttgtccaaacacaatactgaaaacatttctgtcccttttcttctcctcaaactggacgttgaacaagtgagagaattatagataatgatcgatttaaagacttgtagttttcttacatcagatctcgtgctcaatactctctctatctctctccccctttctccttgttaatattatgttatagtattcaattatgctggcagatttttgctttcttctcattagtatgctatttcaatggccactgattatagagcttcaacaatattcaagtctttctaattctgtttatcttcgtcgaactatatttttataattatttttttgctttgctatttgtacttatcaatccaggatataattgtcaatatgatgtcccctttacatgttgatgtcatctgtgttacatacaggattgcacgatccggtcttgtgactttgacagtga

SEQ ID NO: 102240 - DNA, 541 bp, Mimulus guttatus
  Intron number 2 from transcript mgv1a023151m (locus mgv1a0 23151m.g) derived from phytozome v7.0 (chr-ID scaffold_54; pos 39462 to 40002 reverse strand)
tgaaatcactgcggattcatttccagaagtgtgtggtgagtttctctttttttcaattctcattgtttttttgttctttcatggtaaataggaagtgttaattagaaatttgtttgtgaatgtttggggaaaaagttagggatggggctgaaattgtttgaattttgattttgtttcttgcaatatgttaatggctaatttggtcttctgttttcgagtatcgcatcaaaggatatctatattatgtgcatttttattaataaaaagagagagcggaaataataaattgatcgagattcgtcagccatgatttagcatatattgattgtttgtctcaatataatcgattccgtacttcatatggaaattcatcttatttgatgtatttaactatataatgagctgtagcccaatttgtataattatatggtaaagatgttttacttagtctgcgtacgtcgtagtccgtttaatagattgtgttacttagtctgtgtacgtcgtagttggtttaatagattgtgcaccatgcagagtgcaa

SEQ ID NO: 102241 - DNA, 260 bp, Mimulus guttatus
  Intron number 3 from transcript mgv1a009971m (locus mgv1a0 09971m.g) derived from phytozome v7.0 (chr-ID scaffold_104 ; pos 563704 to 563963 reverse strand)
gttaccctttctggtaattaattaacatcctttccaaaattccgatttttttctgaaaagaacacttataatgtgacatcataggtgaataaaatttttgaaattcccaaattccgccaagttttttcattctaattttcgactggattttttttaatggaatttgattacttttctacttaaaaaaaaaaaaaaactaatttcatgttattttgttacttgcaggagcgcacacattaggtaggtcccactgcacgtca

SEQ ID NO: 102242 - DNA, 929 bp, Mimulus guttatus
  Intron number 3 from transcript mgv1a021017m (locus mgv1a0 21017m.g) derived from phytozome v7.0 (chr-ID scaffold_64; pos 1088978 to 1089906 reverse strand)
gagttggaattaatcctcaacagagtgcaggtgttgaattcttcttattaatttagtttgttttattactctttattttcaatgttggtttatcgtgttaatctgataatcgactagaggcacgcacgtttgatggctgcctacatgatcaccatcattgttgtgttggaattcacgtatgccctgtgtcagactgtcagttataatggtatttggaattagtcgagttgcataactagattgtggtttttctatctccgtctccattttagggccatcacttagcacattttctttgagtcgagagtctttctacgatccaacaaggcatgttcttaacttagcccaagaaaatggcgaaagtagaattcttttggaagtcgttagttaactaatgtcatccattagggaggtgatttagtataaataggggccttagtgtgtttccttattcctacaactaatatgcttgtacggatcacgttagaagagaaaaaggcatataaatcttggactaaatgaagctactaatgtagagaaaatggaactattttacgctccaaaagaagagattttttttacatttatatgttatgctgcattttctcctcgtataacttggcttggccaataatgctcataccgcatattcgtaccactctttgatagctacgaaataccttgttattacgtatatatatatttataagagcctacacacatttatgtatcatgttattaacaaaatgaatagaagcgccatactcttttcctaaatagggctttttgttaacccgtctcctttaaactgttttttttaggatgtctgaattaattggaattattttctttggcattttatagaatctgaaatcctgcacatgttatttttagttctgatgtctggttggcaatggatttatcaggaa

SEQ ID NO: 102243 - DNA, 466 bp, Mimulus guttatus
  Intron number 2 from transcript mgv1a006245m (locus mgv1a0 06245m.g) derived from phytozome v7.0 (chr-ID scaffold_22; pos 63929 to 64394 reverse strand)
tggtaagtgttctctactaattaaactcacactcatctgatcaattttatatttgtgaagcttaatccaaataaatccaaattcgagtccctcgtttgccgtttattgttgtattgtcaaatttgtcgaattaaatttctgtattagtctacattcatctattgtgactgaaagtttggtgttcttgccttttctttttagtggtttcccctatctttcgaggatcttgaaacgaggaaaacgaaaattcaaaagtaaaacgaaaataatttccgtaaatgtgtaaattactttacctaccattgtcaatgtttttattcactgctttcttgatccgattacatctatagacaattggagcctccgatttcatatctcaattatttaagttatacccaagaagaaaaaaaaatgaaatctttcgataacatttattcctgttttctttatgcaggctcttgtgaca

SEQ ID NO: 102244 - DNA, 341 bp, Mimulus guttatus
  Intron number 1 from transcript mgv1a006245m (locus mgv1a0 06245m.g) derived from phytozome v7.0 (chr-ID scaffold_22; pos 64467 to 64807 reverse strand)
cttcttgctctcttccttcactttcacttcaacaggtaatcaatctcttttttcctctttttgtttataattttttttaatgaaattggttccatgggtgtgcaattatctgtaaagatttaatgctaattgagaaataaaacggtttgatttcattgatgatcggaatttcgagtgattaaatgcataattgactttttttttcttcaattaatgaatccgaaataacgattcattttttttttttaaaattttatgataataatgtgtgataaatatcctcgaaatctctgaagatttggatgtgaatttaagctgttgatttatgatttcagaagctt

SEQ ID NO: 102245 - DNA, 728 bp, Mimulus guttatus
  Intron number 4 from transcript mgv1a014812m (locus mgv1a0 14812m.g) derived from phytozome v7.0 (chr-ID scaffold_213 ; pos 146144 to 146871)
aagctggacctgtccaaatcttcgtatccaatcatgttagtggcttaatttcctcttttacttttcttgttgcttatatatttctcctagacgtaggatggaaccatctttatttggtacttgtctttcgtttttttgtcgatttataagtgcttgttactgtggtccagttaaactttagggattatgagcatttcttgggattacttgcctcgggtcctttttcgattcatcatgctaatttaacaatatagcatattatgaaaatatctgtgtgatcgatactctgagcagactcgggtgattcataactattgtatttctaattttgatcgtgcttttgaaaatacatctccttgttagaggtgcctttacagtttgactgtcattagttatttaaaaacttctctcttcattatcgaaagctcgattaaggtttgttgtaattattttaaagtttgttgtgtacgtaattctagaagacctttgcatctttctttgaaatgctccgttacgtatacttctgttttgtggagttgtttgtgatggaaaactatcaaccatcgtatgtatgcctatgcttctaatagttaacaatactttgatattttgccttttggattgttttcgaaacaagtttcgtttgcaatttttttcctaattctggcttaatagtttcgttctaatttgaaatttcgatttattgtttgtagttgattccggacgac

SEQ ID NO: 102246 - DNA, 669 bp, Mimulus guttatus
  Intron number 1 from transcript mgv1a016772m (locus mgv1a0 16772m.g) derived from phytozome v7.0 (chr-ID scaffold_52; pos 226133 to 226801)
tataataaggggatcagaaatagtttccgtggtatttctgcgtgttattttctttatctgattctgtatgaatcacactgcaaagggccatccaaatgcaccatcccactttatctgcagtttgtaactttgtatattcttcgagaacgtggtattttcttcatgtgatatttctccgtgaaagatactgggaaggggtctcttgctttcttggctgggaactgtagaacatcgatgccaatatattgcatatggaaggatttagttttttatttcatacagacacgagaagaaatgtgcaccatggctttgtattcttatcacacaagggcggaggatgtctatctttttgagttgcttccatgattctcgaaggattttctttctataaaagctcatgatatatctttatctatctttatacgaagagccattagttctatggctcatatggaatctgcgagaagacattaaaactgttcataattatgttactcacttgttccttgtaacggtaagcttaaattcatgttggttattggcttatggatgctcttgattgtctctgttttgagattatgattttgtgcattttgtggtggtgtaatcatttttttgtttttccaaattgcaggaagagaggagtatcgggagggtagagacttgaga

SEQ ID NO: 102247 - DNA, 668 bp, Mimulus guttatus
  Intron number 2 from transcript mgv1a006490m (locus mgv1a0 06490m.g) derived from phytozome v7.0 (chr-ID scaffold_58; pos 1215859 to 1216526)
tgctaatttccaagcgccggggacagttgaagcaggtctgattgatcctactcgtatatgtttatttatggtttattggttaatgatatctgtatttcttatagtttaattgaaattatggttgaattatttgaaacatgtgcatcagtgacatttgtgataattgtttatagtttaagatttttcttacagtcatctgcagttggatttttattcgttcaaatttggtaggaaccaaaagttaaatttcagttttttggttctgtttttttcgtttcttgttattggtttttgtttgagtttcatggattgaactaagatgattctttacttttaaggttgtaccggttgattcttgtcacgtttattacctatgacatcacaattcctttttttttcggagttaaaaacatgaatacaaattaagatgaaagaaataaagatgctcttgggtgtccgtcacgtgtgttcttactggccattttattatactgcattgattcactgattagtgatcatatatatgaaatgtaaaaccataacaagatgcagaatgaagattttgaaatattcatctttacagtttaccttgatgttgggggttttggagaatagtcattgcaccgtgttcatttttgggggtgccttttgtgcaggctgtacaagca

SEQ ID NO: 102248 - DNA, 889 bp, Mimulus guttatus
  Intron number 2 from transcript mgv1a006364m (locus mgv1a0 06364m.g) derived from phytozome v7.0 (chr-ID scaffold_12; pos 2806362 to 2807250)
ttgtaattaaggtaaattttgcatttacctgattgtggatttactaattattagttgaattaggttcataaatttcttatgaagagttgaattcaattatgtggtttgaggaaagaagtagggttttagatgcatggactgaatgcaatatatgtggagatgaatgaacaacacaatacacagtagcgcacttttgcaattgaactgctgttcaattgtttgatttggcgtgattactgaatgaatgctgttatcgaaatattattcttctttccgtttagactaaattttcaagtgacatggaaattatgagtttgtggcttttctaaaccatgtatgccagcaatttgattggatgcacgtctcttaccctcttttttggtatctacataaatgttgatagagtctggtagggatgtgtgtatttgtgtgtgtgtgcacgctctcctttctccgtctccccgttgttatttgttgttgcctatttataaatgtattcactacttgcaaaattgcattcagttttcttccttgtttgaatttgattcatgttacttctacgtttgtttgagtttcaagctttaagaagaagttttcccctatctttccacattaaaaatattgatgagagttatactaaattacctatagattgtgtgcgaagaaaagcacagaaacaaaaatcacatgttccagaagatagatgcaaatccatgattgattgttgggacaaattttgcatattgggagacactgaaatccaatttctgttacttgctatcaccctaaaataaaaaacttacgacgtcagtattctctgtctttctgtttgcatttcaccctaaaataaaaaacttacgacgtcatatttgattttcgataggctgaa

SEQ ID NO: 102249 - DNA, 769 bp, Mimulus guttatus
  Intron number 1 from transcript mgv1a024853m (locus mgv1a0 24853m.g) derived from phytozome v7.0 (chr-ID scaffold_131 ; pos 415957 to 416725 reverse strand)
ctccgttactgcttatacaagtatgtatttggaatatatatatatatatatatatatatatatatatatatatatatatatatatatgtggttgtttatgttgtggttcactaaaataaaaaaaacaacaatattactgtatgacacaataatttattatgtaaccaggtaattttgttgtttaatattactgtgttagatagtaatgtaacaacattattactgtgttaaacagtaattagttatattattgctaaacacaatattgttattgttttaccggggcaaaaaaaaggttttgaaaaaaaaataaaaataaatgaacggacaggtgttgaccggtggttagaggcggcggaaaaaaactagaaagaaaaatttggaaaaaaaaaaagaaaagaaagattcaacgtcgtctgagaccagcgttgaccatcggccaacgactggctgatccgcggcgacagttaaattggagtcaaaattgagttagtcaaaactgaataattagtggaattagggttaaatgtactaaattggattgtattaaaatttgagaggtattttagacctaatctgtttttgtaaaaaaaaagttttggttggaacaaaatggtattatttggtaatagccaaagagataaatcatacattcatattgccatcttattacttgaacatatgaggcaatcctttttgaattcttttctcggattgcaaagatttttcaatcttcaaaacctaatcacgtgcaggtcacgcgcttgaa

SEQ ID NO: 102250 - DNA, 760 bp, Mimulus guttatus
  Intron number 1 from transcript mgv1a021972m (locus mgv1a0 21972m.g) derived from phytozome v7.0 (chr-ID scaffold_249 ; pos 250773 to 251532)
tatccgctctcaccgatagtggcgatcgtaagttttttttttattacgtgattttacgttttgcatttggtgttcttgattagttgaagcaaacctagacaagcatagttcttcaattttaagaggtttggtatttagtttgtttgatcttcgtactatgttcgatgaattcgattaatcggcaacgttgcaacgtgagcccaaaaacttgtacccgcaatgattcaaaatgtcgattaaattgcattttagagaaacaatttccatatcgatctccatcaattagctgtatgttcttatataatcattatatatggtaagaaatattgttatctaaaaaaacgagagtgcataacgatattggtttcagacagtaatactaatatcattaaaggcagtttagaatcatgttagagaaacagggttgaaataaagacagttaacattgattccaacagaatcgaagaaagaagtaggtttctgaggaacgaaaagagcatattctatctcgagacttgcttaactcgtttcgtaacacttcaagtttacaccactagaacatcgaaacaaactgaaaaaaatcgacaccagggttactccctcttattacatataattttgtcgtggttcttgaccatttctcgaacgggatttaatcatgttagaatattaaatttcttagtcgaacaaatgtagaatccacaccatgttcatctttcttgcagttgctgctctaaacgccataagatccagctggaca

SEQ ID NO: 102251 - DNA, 628 bp, Mimulus guttatus
  Intron number 1 from transcript mgv1a017011m (locus mgv1a0 17011m.g) derived from phytozome v7.0 (chr-ID scaffold_87; pos 196143 to 196770 reverse strand)
ccgccggaatcctcctccctgaaaaaaccaacaaggtaaatttagattttttttttataaattatttccgactgaatcgaattgatcccggttatggatttggtttcagaattgagtgatacaaatgaaatgttagtctaatcgatagagctaaaagatctagaatttgcattttgttttgtttctgaatttgcagcctaatgaaattgtctttgttgaattcttctggctgttttatttcttagttctactgattattctaatgaaataaaatcagcggatctcgcagaactgttgtttgttttttaatagatttacaggttgtctgcgactttggtgtaaaaagtgaaattagatgaaatataatgaaaatagatgaattataatgaaattagatgaaataaaaccttcattttcatgaaattgggggttttagttctttggatatcgaactttgagtcggaattttcttcgtagagcttagaatttatttttctttttcttgatttgctcggttctttagtttgatttgtcgatttttttttttttttttttttctggagctgaatttgattggtgaacaatgatttcagttgaactcgggaaaggttgttgcggtgggtcccgg

SEQ ID NO: 102252 - DNA, 848 bp, Mimulus guttatus
  Intron number 1 from transcript mgv1a004027m (locus mgv1a0 04027m.g) derived from phytozome v7.0 (chr-ID scaffold_91; pos 506171 to 507018)
actgggggtgtccacctacaactccgccactgtcggtgagttagttgtataaatgttgttattcttttattatgtcccttaattgtgtgtttatattaattaatttttttactaatcttgttttgcaataataatcatctctacactaagcacaactcttgtttcacatgttatatgtatgaacagccagaacatgcaaataattctcatctaatccgattttttttgattttggaactatatttttcacttcaaattaaaatattccgattttttttttcaatttgtttttttaatcgaaattgaaatagaaatgagattctgaattaattttcaagattccagaaattccaacatttttccgaaaactgtacttatagtatcaatattattatccaatttatatattttggtgaatttaaaaaaaaaatgaaatttcagatttccggtgatttggatcccataaaattccggtgaacaagatttttccttccaattttcgattcttttaggaaacttttttggaacaaaatttgaattagtttttcacttcccaaaaagaaaaatcgaaatttttccaaaattgctaatttcggtccgatcgatccgatttccatcctcttagtccatagcgacgaggaaaataatgcggattgtaatgaaatgaaacagaaactatttttcttatcaaaaaaaaaaaaaaaaaagaaactattttaaagaaaaaattgtttttgcatagtcacatttaattgtattttaaataatttgcatagacacatttgattgtataaatagattgtctaacatttaattctctaattaaaaaacaaaaggtgttcttggcg

SEQ ID NO: 102253 - DNA, 988 bp, Mimulus guttatus
  Intron number 1 from transcript mgv1a015869m (locus mgv1a0 15869m.g) derived from phytozome v7.0 (chr-ID scaffold_4; pos 3025148 to 3026135 reverse strand)
caaatcccatgtatttcacctctctctctctctctctctctctctctctctctctctctctctctctctctctctctctctctctctctctctctctctatctctcaatggcttcttgatttgattcatattcggtcaggcgacggcataattgtgggattttcatctgggtttttttttttctgttaagtttattactggatttaaatttttttcgtctgggtttttgttcttgttttcccaatttatcggggttatgttgttcacgtatcgtatggttgacctgaatctttcgtatcgcgatatgggctgccgtgtatctatcatatgacaattttttccaattaaattgagctggtgaagtttggtttaactcttgattttactatgctttggtttatcagaagtagtttctttaaaactgctgaaccagtttatgagcaaagaaggactacgattcatgtataaaggtttatgagggtctgcttgttaatttcaagaaagtttaggtcgaacttgatataagcttttgcaatttgtgaacgagcattcgattaaatgttgcctatatgaaactcttgtcaaggtgacttttaaatgtgatcgttgccattagtgaaattttaccattttcgaaaggaaaaagaatgttccaacggacttctgtaaacaaaaaaagtatcaaaggggaaaaaaatggtaattttaggtataatgatcgaaggtttcttgatgaaacaattgggaccgaagatgtaagcgttaaactattaattgttatgtgcaaaatattcaaacatgtaactcgttccgtctatattaaggtcgtatattctagtggtgtaacctttttttttctagttctcctttatggtgcatttcggtattttcttttttatcggatttacgcatttaagtgggagatttgactagccgtgtatgggttcttgcagggagggtattttgcaaaaaagggtgtgacgctgac

SEQ ID NO: 102254 - DNA, 729 bp, Mimulus guttatus
  Intron number 2 from transcript mgv1a018998m (locus mgv1a0 18998m.g) derived from phytozome v7.0 (chr-ID scaffold_121 ; pos 789047 to 789775)
cttattttcagcttcctctcccccattccaggtattttcagtttcttctacctcattttttttttgcttaaattatcgatttgattcgattttgtattgaatcgctgtcatgaatttatcgccacatctgggcataattaattttgttttgagtaggttgtgtggtgattttttgtcttaattttcagagttcaatttcgtagataaatctaatttaattcggtcgagtggtggaaatgtactaaagttttgactataaaaactaaaaagtacaggtgttttttttttttttttttcttataattaaaaaaacaaagtataggttgactgtaattactatgaatttgtgttaattgttcttattttacctactgtttggattaatttattcagaactggggttctcttttcttattttaatgaattaaatttcccaaagatccaatttttattgttcaatccacacaaatgccacttttttttttttggtcgaaatgagttatagatgtgggtgtaaaccgtaaataatttcgtaggactactatgagacagggcattaggggtaaaaaaatcacttctcgttctcaagtggaatgtaaagattggctgtattttatcccatatatctagatgcacaagtattttcaaaaactgtagtagtagaagtattgtgtcatgattttccggtgagtttgcagatcggtataacaccgccctcgtttgccgcag

SEQ ID NO: 102255 - DNA, 435 bp, Mimulus guttatus
  Intron number 1 from transcript mgv1a014084m (locus mgv1a0 14084m.g) derived from phytozome v7.0 (chr-ID scaffold_26; pos 1570095 to 1570529 reverse strand)
aaaccccagatcctctcaaatccacacgtataaaggtctcatctcccgactatttcttcaatttttgaatccctgcgccgtttgtcactccgatttgtttgtttttcgatgtagttttggttgggcccctttgcatctattttctaatttaggtcaattattttttttttccgattttgggaaagggtatgattggggatgcattatcttgattagtaatggtgtctgttagatttcgtgggtgaattgatgggtttttgatttgattcgttttctccgtttgcccttttccctttattgactgaaaattgaagtgggatttcaaattggaaagaatattaggaatcaaagttctccgtatgcaaggggtattgacttctatctgtttttgttgtcacaggtggtaaaattttgctcgaaattcaacaaaaagaa

SEQ ID NO: 102256 - DNA, 694 bp, Mimulus guttatus
  Intron number 1 from transcript mgv1a006788m (locus mgv1a0 06788m.g) derived from phytozome v7.0 (chr-ID scaffold_125 ; pos 305151 to 305844)
tgacgaaattttgaaagcagttgaagggttaaaaggtaatttggctttgctaattatattatagtgttgataattaatatttcttcataaaaaaaattattctgctccaaagagttgtgatattatttatacgatgttaagcctctttacaacgcatttaaaaaaacaaaattccactaattaataattattgatgtaatctggaaaaatgcacatcacccctatattttttctatttttgcactttcccccctaaaaatttaaaaaaaaatactcccctcgaaatattattttggttgcactttgccccataaaccaatattgtaaaacaaaaataacattttaaaagagcagcgtgcaaagatgtagtgttattaaggggctgaaacaaaaatactcaattccgataaaaataatccattataattttagtatgaggcaatgtgcagcaaaaataaaattttgaaaggacattcacttataaaaaaattgatggggtggttaaagtgcgaaattttttttatagggggtgatatgcaatttgcccatataatctttaattacttgtactatattttctagtgctctatactctttattttattttttattgttcattttcttttttataactatatttaaaaaaaaaatcattgcagaaaaagcagatcaagaacaaacgttgacatttatc

SEQ ID NO: 102257 - DNA, 804 bp, Mimulus guttatus
  Intron number 2 from transcript mgv1a026799m (locus mgv1a0 26799m.g) derived from phytozome v7.0 (chr-ID scaffold_29; pos 632893 to 633696)
tctgttaaggcaacatcagtatcaagtttcttgcagtatgtccttttcgttctcttttctaatttatccgtctaatttgcaaatggatttaattaattataattcaaataatatgaaactaatatgttgaatttttttaattttttctgggtaagttacaaccaccccttaggtatggttgaattacaaaaactccctcatgtttggataattacaactatccatcaactatgaatgtttttacaaatcgaccttatggtgtcaaattcaacataatcttctagattcagtggaatgttctctagtttgtactcgttttgtgcagaaatgcagttttttatgcaccacaatctaatatatacaagccaaaaaacatatcttatgattatcttgcttcaaaatgtggagttcagataggataaaacgggtacacaattgagaataatccatataatctagaagattccactaaatttgacaccacaagggtgacgtgtaagtaaatttatagttgatggggtggttgtaattacccaaacatgaggggttttttcataatttgatcatacctgagtggttgttttaatttaccttttttctttgaagatttggagcttaaaaagatgcaatcgagcgaaatagttatccaaatataaactcattcaattaaaaaaaatatgaaaatattagttacaagtctcggtaaattgaatcaattaatatttcgtacaaattttaaaattcgatttggttgacgccattgaaacaggtgtgttcgacaaattcacggacgaagccaataaa

SEQ ID NO: 102258 - DNA, 394 bp, Mimulus guttatus
  Intron number 1 from transcript mgv1a005740m (locus mgv1a0 05740m.g) derived from phytozome v7.0 (chr-ID scaffold_3; pos 3193229 to 3193622)
gcggatccgcaccgcttcgaatcctgatcgatttggtaaaaaaaaatttatgttcgtatttgttttctgagaagctgattaattttctgtggtcattgtattggtagtcacaacttcttttctgaagtaatttcatactatgatttgattagctgctactcagttttttttttcttaataattaggtcagattctgaagtaattgaaatcataaatatcctgttatatttaattattgaattaaatggcattaattgaacaaagaaaaggacgttgttttattggccttactgggtaaaaccatgttgattagcttttacattactagttacttcttctatatgtatgctgatatgtgtttcgtctgttaggttaatattgcaagaaattttga

SEQ ID NO: 102259 - DNA, 682 bp, Mimulus guttatus
  Intron number 2 from transcript mgv1a005740m (locus mgv1a0 05740m.g) derived from phytozome v7.0 (chr-ID scaffold_3; pos 3193770 to 3194451)
attggcctcagtgaaggactcatcactttcacaaggttaactatttttcacctcactttaaccgctgtagatgtgaatatatttatttaaagtggtctgtaaattttcttgtgtaatatatgagcatgatttcaagctatacatttttgaagggaaagttctgtgataactggcattgtgaaatactttatattggagtccaaaggcgattgtatttaagaacacgtgacttgattatcttagtttgctaacaatatgcaacatttttcgcttttttacttcttttccttaaatgaataaatagtttataccaagtatggaggaattctgattatgttttaatggcaatcagaaagttctgtcccattcaaaagctgattccttttttttttgttttttgttttttgttttttgtttttttttttttttttttttttatctttaatatgaactggcataagggtagttaaggcctttcttgagtggtattggattggggtgggtactattaaatcaatagttctattctcttctgggtcgggttgtaggccatttataaggccaattttagaaaaaaagaggtagggggtaggggaggggggagtaatattcttccttttattttatgctaattgatttattaagtgcctaaaattagtttcgtgcaggattttctctccag

SEQ ID NO: 102260 - DNA, 828 bp, Mimulus guttatus
  Intron number 1 from transcript mgv1a009224m (locus mgv1a0 06689m.g) derived from phytozome v7.0 (chr-ID scaffold_3; pos 468612 to 469439 reverse strand)
gacactgataaggtattccgtctcttcacctcctccgtcattttcttctccgattcacgaaaccctagctttctcccccccttttttcaactcgatctacctcactagcttcacttatttgatcggtcgaagtttatccgtgtcgatctgagagtttgttggggtttcgcaactgtttttacttgagctggatttttcctgctaatgcatccggtttagataaaaaaatgttgatttttacttgcgagtatatctatcattcaaggtttatagttggtaaagtttgctatttcctttttttgttttgttcttcttgtgatttgttgaactttttctgtttgctttcggaataaataccgatgtatttgcgctcagtcgataaacgatatgctaaatgattgatactggtttcaacaatagatctttgatggtgtcttattttcagcaaaagatggttttgaaattgaagtaattcaaactttgttactttatttgaggtacctttagctgcttttcttgaactttaagcgaatgcaatggtgaatttggttttgcttcttgtagtgggctgatcgtttattctctctaaaataataataataataataatagtctgcttgtttccttgtcaagttttctggcatgtgatgctttcttcaaaaccatatttggtagcacacaatgctaattttttccttcttttgggggttgtgagtatagcatttctcgtaggtagttgtccatttcccgttcccttatttcacttgtcctttaggcgctttatcgatatgtgaggtcacatatgctaatttggttatattgcaggag

SEQ ID NO: 102261 - DNA, 627 bp, Mimulus guttatus
  Intron number 1 from transcript mgv1a016284m (locus mgv1a0 16284m.g) derived from phytozome v7.0 (chr-ID scaffold_193 ; pos 296231 to 296857 reverse strand)
ccgggtatgcttacgaaaaatctccttacacaagtttcttacaaaacaaaattggttttttttttctcttgggggtaaattacggccactcctcagctaaggttaaattacgaaaaaaatcttcatgtttggataattaccaacaaccatcgactatgaattttcttatacggccacctttgcggtgtcaaatttagtagaatcttctagactatatggaatattctcacgtttgcccgttttactccattcgaactctacattttgaaacaagatgtatcataagatgcgtatctagacttgtaaatatcaaaaattgtggtgtatcagaaactacatttttgcacaaaacgagtacaagctagagaatattttacggaacctagaagattatattgaatttgataccataaggtggacgtgtaaaaaaattcattgtcgaggggtgattgtaattatccaaacatgaagagttttttcgtaatttaaccttacctcacagtagccgtaagttatctttcttttttttctttttttttttaataataattcttggatcacttattagaaaatggatgtctgaaatcctcaggtatagtggagattggtcaagaattggtgtgattt

SEQ ID NO: 102262 - DNA, 150 bp, Mimulus guttatus
  Intron number 1 from transcript mgv1a000786m (locus mgv1a0 00786m.g) derived from phytozome v7.0 (chr-ID scaffold_27; pos 1509587 to 1509736 reverse strand)
caacaggggttattttgaagcctaagcttgcattggtaataactaataagcattgtatagatttttcttcttattttgttcgattaattcggtttgtttttttttccttgattttgttagtttgaatttggtttgtaggtttttgcagat

SEQ ID NO: 102263 - DNA, 819 bp, Mimulus guttatus
  Intron number 1 from transcript mgv1a004621m (locus mgv1a0 04621m.g) derived from phytozome v7.0 (chr-ID scaffold_346 ; pos 20139 to 20957)
tatttggtccaactcaaataaggtccatcttactggtaatttatctagtttcttacaaaacctttttagagcttattacatttactacccctgtgaaaattacaaccgtgcgtttttcccttgtcaaattacccaaaaaagaccttgtatttagatttagacagcatacttgaccaatttacattttctccattgaccggttgtaaaaggaccgaagtatgctgggggtttttgcaaaaaattaggggaccaaattgaagttttgaaaaacttaatcaaataagtcaagggactgaatcgtaattttaggaaaaatacataatatttataaaatagtatgtatttcgtttatttcatatttttataagtaccaaatatttcttttaaaatatttataatttaataaagttaaatcaaagaaaatgcgaaaaatatattttaaaacaaaaaaaaaacttatttaaaaaagaaaaaagaaaaagaagaagaagttgagggcagttctatcatttcacaaaataaaacgtaggaaaatcgcataacccacgagtgagacacatgatttgcggccagagcgatgtttccctttgactaataaatacagggggagttttgctaattcttttataaggggaaaaacgcacagttgcgattttaacatgaatggtaaatgcaataagctcaaaccttttaagttatgacattaaagttttcccttatcatatgcatcggatgataacagaaaaaaataaagaaaattgtcattatttacttatttaactcaagaaatcaactctatccatcaccatgcaatacagg

SEQ ID NO: 102264 - DNA, 546 bp, Mimulus guttatus
  Intron number 1 from transcript mgv1a003123m (locus mgv1a0 03123m.g) derived from phytozome v7.0 (chr-ID scaffold_104 ; pos 593881 to 594426 reverse strand)
ggagccctgggatttgcctggtaaattttctcaatttttgttttttcttcgagtttttgtcgtaaaaggtttttttttttttttttttgaaattagatttctatttcttttgattttgatatactttgattgagaagaaattatcttcatcggtttttttttgaggaatttaacttgctttttacgagctgtagaaataggatcatggattgttatgttaagactgggtggatctgaagttctgaactctcttagggcttatctgtaaatgtagcatatcgtaaacatttgattttattgtcttataacgagcattcgttcgctgatattatttattatgaattattttggtatgcaagctacgttcggtatgagatgatgtggtgatcattagttgtaagcttaatcaaagagtgtatttccctcattataaattatctattaatgttaatagattgttactaccagttagtggcttttgaaagctggagttttatattaacttacagatattgatgaattttcatctatctacattttgcagat

SEQ ID NO: 102265 - DNA, 531 bp, Mimulus guttatus
  Intron number 2 from transcript mgv1a015717m (locus mgv1a0 15717m.g) derived from phytozome v7.0 (chr-ID scaffold_126 ; pos 552983 to 553513)
tggcagatttgagaagaaaggtttcactttgaaaggtatatatatatattttcaaccaattttaatatttacatttcaataatgtgtttaatttaattagtgttaattattcaaatttttgggcaaattatgtttaacttgataattactcgttattaatttatcaatttttggtgaaatttaataagacgtttgacttgataattactcattagttgctcaacttattgataatatggtatggttttttaggtggcattatgttgtaaatttatattcggctttcgatttgtgaccagttgaaaagaaaaaataaatatattgtaaacccacaaccattttcatctgaataactaaaaatctattttactcagttgaatctttttcacttcacaaactgcttatttaattattctcatttgattgtcgaacatatttcgtctttactggataacatttttctcgttctgaactggatctaatttatgtattaaaggtcttaagctaatcacggtggatcgtgcttttgcc

SEQ ID NO: 102266 - DNA, 585 bp, Mimulus guttatus
  Intron number 1 from transcript mgv1a001061m (locus mgv1a0 01061m.g) derived from phytozome v7.0 (chr-ID scaffold_638 ; pos 10488 to 11072 reverse strand)
aaagtcctgctgtcgctccaaggcctggaaaagtttgttcatgcagacctgatttctcgatttttgttctgctcataaagttcaattatccatttctagtttgttgatattttgttatggtagatgtagaaacttgacatatatgtatttgtaattcgttctatttctgcttttagaaagagttaggtcagttttgcggagtgtgtttcacatgactacctcgaaaacagaatttgtagatgagataaaagagttaattgtaaacgaaatattgactacgtccccttccttttaaatattttgattttctattgtcgggctttctggttcccctggtttatttagctttgtatttgaggactgcaaacatttgggtgataacatggacactttatgaaaataaagaatgccagatgttgctgcaactgttggaattcgaacttttcttctttttttcctgatctctattttaatgtggttaacatagagaaattgaagaattatatatatatttttttctattttggggaatgctaaattgctaaggtagaagaagttcaagaattatctggcagaaggaaaaac

SEQ ID NO: 102267 - DNA, 730 bp, Mimulus guttatus
  Intron number 1 from transcript mgv1a000160m (locus mgv1a0 00160m.g) derived from phytozome v7.0 (chr-ID scaffold_749 ; pos 2348 to 3077)
gtatgttctgctgcctcggacgatccaacttcttaccgttttcatgtgcttttactgttcaatgaatgactacctttgatttcgttttgactctgtgttttttttttcttctttccttcccgagtcaattttgttcaatcaagaattcatgatgttcatttttcccccctttcttgataataatttttgtttttaatttttcttgcaaacaacgttaatgtcattcgatcatgtcggggaaacatacgggaagttgcattgcgatttattttaatgtaattatttcaatgaggtcggttttgtttttattgcatcgataaatgttgatcgacatcgatttggattcgttacggccttttagtgaaataaataatgcgagcatcggttactaattcgggttcgacaattgctacattgttctagttaatcacattccccgaaaactcgcggaacatagcgaataaggaactattttgaatggagaacatgcatcgtatttgaaaaacgggagtcgaaaagtactaagcctacacatttcacacattgacaatatccacacgttaatagttgttattcgtgcaaatttaggtttagcagagaattttggttcatctatttctacgaccccaaacgagtgttactctttcgtaaatttgtggtggctaatgattattattattttattttatttttttgcagacgtcaccagttaacataatagtaggttctc

SEQ ID NO: 102268 - DNA, 778 bp, Mimulus guttatus
  Intron number 2 from transcript mgv1a007990m (locus mgv1a0 07990m.g) derived from phytozome v7.0 (chr-ID scaffold_7; pos 1110046 to 1110823 reverse strand)
cgtcggttttttacggcaggcaaattccaagccaggtaatgaactcaacgtatttttcatgtttagattatgctggattttatgcttgatttttttatatgatatatttggttactgaagatttttcgcttcggtaatttgtgttccttcttttcatgaccaacttatgttatgatttgtgaatgtttctcatgttgcaagccgtagcttttgtttgccactaaattcttgacgagttaaactatcttaatttcatttcttgatttggtaaatgtaaaaaaaaatcgcgtcttgatttctggctttatgcgctacgatattactactgtaagaaaaaaatctttaaagttaaaacggtaaatggatgttatgaaaaatccaaaatgggaaaagatttgggattcgattccttcatcgatatattgggtaggagaagagttcaattattcacttatctctattttatatacacgatcaaaagtttatcctaagctgcaatgcttttacgtagttcttgattgtatttgtatcattaaaattaattttactggacttcgtttacgtagtctatgttaaatacgtttcttttgctaattagtgtttaatgctctgctaaagtggtaattcttgaatgaaatgaaccaacgaaagcatgcatgtttttgtaggcacgtatcgaagtcgagatttcttgcacttttcggtatagatgtgttgctctagaaataattaatctcgttttcttttttgcctcgtttcacaggttgcagagtgggga

SEQ ID NO: 102269 - DNA, 681 bp, Mimulus guttatus
  Intron number 2 from transcript mgv1a014643m (locus mgv1a0 14643m.g) derived from phytozome v7.0 (chr-ID scaffold_161 ; pos 357205 to 357885)
gagataacaaaagttcaaagagaacataaggccaggtatttgataaaatgccaacagtttgattgaagtaattgtttatgaatattgtagaaaaaatattaattttttttttatgtaggtagtgggaatgtttcagtgagtttcgatttagattaaatgaattgctaatactattggagaaggggaaactatatttttgctgggcaatggtatattggtaattatccctttgaagatttactgttgaaggttttaaaaaatataatgaattcgattatgttcttggtatcgaaaattgggtttatgtggattttgttgttctcgtgttcgtcttgaatatataatgggcatttataaaacccccaaatttttactttgccgattcactatcgactctttcggctaattcgtttatatagaagattgtttaggtatacgctgctgatattgtatcactacactttcgtttctacgttatggttttttaatttgcccggttctttgcgactgcagaagatggattttattgttgttgacatataatttttagatggtattttcggacatgattaaataagacaaattttgagacattgttgaggaatcgtgttattatgtcctaacaaatgaaaggaaactcttatagggtagttcgcgagagtaaagaacgccgaagacagt

SEQ ID NO: 102270 - DNA, 540 bp, Mimulus guttatus
  Intron number 1 from transcript mgv1a011323m (locus mgv1a0 11323m.g) derived from phytozome v7.0 (chr-ID scaffold_90; pos 993500 to 994039)
cttcttctcaagactctttcaatcaccaaacccaggttatcgttctctccatttttcttctttcagaatttagggtttctttttggttaaaattaattttactttttgcgcatttgatgtggatttttttttttttttttgtttgcgatgggttctgttgagctgtacttttttcctcttatcatttgcgtttccagtttcatttttcgtggtgcaattgtttatgattttgcttatatatagatttgatttttttcaagtgtttaatctatttaaattataccatcagcgtttctagggttttgcaagtatttggggattttcagcttaggaaaacagttcaccgtagatcgattactgtgattttcttttttttttttacactttgtgattggctgagtattggtgatgatgatttgaggttttatgtggtgttcttacacttcattttttctgtaaaatctacctgcatttgcagtgttcatttcgattcttattttatctaatctcttacgattctgtcgcaggcaccggcattta

SEQ ID NO: 102271 - DNA, 948 bp, Mimulus guttatus
  Intron number 1 from transcript mgv1a016223m (locus mgv1a0 16230m.g) derived from phytozome v7.0 (chr-ID scaffold_7; pos 2430025 to 2430972)
ggagagaattgaataatctattctctctctctcaggtaaataaattcgatgatcatgaatttgtgcagaaaaaaaaaatacatttaataatatgaaaattgcgtattgattttcacttttcagagatttgtgaaaaggaaaacctaattcaatcgatgtttatggtgggtgcccttttacggttcggatcggttgctgcttggatttttcatgccattgctcgtatggggtatgcatttctgattaccaacataccctaatatttttttttataatgttctggtattccatttaattcggctttggaattggatttctatcagcttttttatttgtgtttttgtttggaaaagtaagatttttttatttgctgataccatttttgtttcttatatttgagattgattattcttatataggtgtttatgcgtttgttgtgtttaagtttatgtgctctaggaagaaaaaaaatgcattttcttgagagaattgtattcgattgagtgctgattcggaagttggatatgttgatttatcggagttggtattcggagtttgatttgtcgttttaattcgatatctacttgtcttttatagttaagtttttcaagtacttccgataaattgttgtcgcacgaattctgcatctagttattttatttaatgaatttgaagccatgctgatgtccattcttgatgtccattctgcttcttcgattacaaatgaaatgacaaatatatccctctattttggtaacatttattattacgcatggacaaatttggaaattagaaaataatctcaacgtctaatacatgctatcaaaatgtcggtttttgtcgacatcaacgaacggatatgattgcttctatcatgtagtttgactatatactgttaattggaacagagcagtgtttttcttgggtgtgctactaagctcaaattga

SEQ ID NO: 102272 - DNA, 1014 bp, Mimulus guttatus
  Intron number 1 from transcript mgv1a005900m (locus mgv1a0 05900m.g) derived from phytozome v7.0 (chr-ID scaffold_416 ; pos 45313 to 46326 reverse strand)
acctggttgctattttgagcgagtaagcacatttacatttttcctcctttcaattttttttctcttatttaaatgatcagcctcgatatgaactctggctctggtaaaatttgtgctgttttcctctgctgtgctaattttttcgataattggatttttttaggggatattttgtattcatgtagtgatatatatactcacgatttcaattagggttcagtttttatgaaatgtttcgatgattcgtgctacagttatcggaaaggggcatatttcaccacgagattttacgacctgatttatcgaattgagaaacaaattatgtttcttaaatgattattttgtagagtttgtgagattttctattatggatatctttgattttaatttgttttcggttatgggtaaaaacactaatttttatacagtagtctcaactggattgaactattgatcaagttgtagaatgctatctgcatgtgatatgtttttggagttaataatgtttataatatctcaagacgaaaatgaataaattattcaataattcatccaataattgtgttatcttcttcaatcaaacattcctcagtgcaaggtctgatttttagggaatttttttggtgtacggatattgtttgacgtgctaataatatgcacgtcgctatttataaaagtcaccccaactttgacttgtcgtatgcgcgtatttgtaaagcgattgacgtggataacagtttcaactttcaatgataagaaaatgattgcataaactgaaacaacttattacgaaactttgaaatgtattgatgaatatcttttctttttccgatttttgtgtctagttgtttgatggttaactaaccattctctatagttcattttttttttctcgtgacaaaccgacaatgcagactaattttcttggatggtatatttcaactttgtcttattattttttttaaattaaaatttgtagcatcgagatatacaagcacaacaaagaagaaagaa

SEQ ID NO: 102273 - DNA, 929 bp, Mimulus guttatus
  Intron number 1 from transcript mgv1a003737m (locus mgv1a0 03737m.g) derived from phytozome v7.0 (chr-ID scaffold_20; pos 733079 to 734007)
tgcctccagaattcttgattctaagcttcataaaggtacctaccctcttttaaatgtgtttcgggttttcgggttttcgggttttctggttctgggttctgggtttcggggtttttgggtatcgggttttggctgttttgtatgtatgtatgtatctaatcttggagtttatatgtcacattaatcattatgacaaagatactactttttttttttttgtttggtgtcacttgttttattgcaacagattcatcattgtattttttgtctgattttatgtaataatttgttagggaagaaagaattgaatttacagaaatttcaagaattgggatttggtgaagtaattggagatcaaaattccttttttttttttttttaattagtggtacactgtccagacaatatgatttggcttttagtgaaaagattgtttgacaattataaattatttcaaattccatgtcttagaattaaggattctgtatgattttattttcattactgattacaattggattaatttcgatttagaatgtcgtctgataagcagttgaaagaaacgtatagattcgacgaaaaaaatgtgattcgatagggtaatgtgtttcgtgtttcgagtcaaaatataagtagaacaaaaaatttctttaggatatctttttaattccctataattcttttttgctgtatttcgtgttttgctcattgctcgaacaaattggagtatttgctatcgaaaccgttaaatgctgcattgttgtgtacacaagatttactttcaacgaaatatccaaattacacaaaatcgaccgtgagctgcaatagtatccatttttgtacctcgttttttttttttctcgtcgttcttaccttgtttattgtacctaacagacatactagaagaagacgaactcgctcaaccggtt

SEQ ID NO: 102274 - DNA, 624 bp, Mimulus guttatus
  Intron number 2 from transcript mgv1a012095m (locus mgv1a0 12095m.g) derived from phytozome v7.0 (chr-ID scaffold_83; pos 190418 to 191041)
aggtgcctaagttgcagaaacttgctcagaaaaaggtccttccttttttttataaccctagcaattttgttttgtatattttttgtgaatttgttttaattgtttgttatgagatattctggttatcattatagttgatttatattatggatcattattgggattcaatgtatctatacaattcatgtatgtattggtacacacgattcatgacgtgaaaaaagaaaaaaaacgaagacgaatagattcgaaagttacacaatgatgatagtgaatggtattaatatgtcgaaggataggttcattgaagaaaacaagaaagagattataatgcaacccctacccttgaacttttactataaacttcaatctaaaaaaagcaaatttatgtggccgtagtgaaatcaaagaaactaccgcatcgaagttggacaagtaatatactgatatatatatatatatatatatatatatatatatatatatatatatatatatatatatatatatatatatattttgcggctgacatagatatactatttataaggccggtgtttatatgataatctacaattaattccaacaggtgaaagggcttactaaagaagaactggaagctcg

SEQ ID NO: 102275 - DNA, 761 bp, Mimulus guttatus
  Intron number 1 from transcript mgv1a017444m (locus mgv1a0 17444m.g) derived from phytozome v7.0 (chr-ID scaffold_16; pos 2466733 to 2467493 reverse strand)
gttgctgtcggctgagctccggcggctcgacggcggtggagaatatggaagcggagcgtctgtggtggtgggtttgtgcaatggtggatgaggaaaagggaaggggcagtggcggagaagatatgcctatacgcatctttttgtttttttttcttttcttttttaatccaaaataattccctatattataaatttttagctaatttggcccctcttattttggatttcttttatatacgtgaccaataattttattttattttattttcttaatattgaattacacatacgtaaaatgggattgctgtagtggaattttcttttgatttaacaaaataaatcaatttgtataaaatttaataaaatcttttattaataaaaaaagtttgtagaatattgcaaaactatttttaaaattaatcgatagaataccccgtcaataagcaacaaatgatgctcgcgatttttgttaatttacaaaaaaaggtttaaatttttaaaatgtgattatgttaaattaaatgtaattttactttgataaaatccttctttttcattttaaaacattcacccgatatagaaccatagttctatataaataattatccactaagtacatatacgcatgtgtgaatgtgttattatatgttgatcaattgttcaacatcacccgatgtatttcaccgggtgtagcatgagccctcataaactagttacctacgatttatactatgctacaccaggtgaaatacaccggatag

SEQ ID NO: 102276 - DNA, 632 bp, Mimulus guttatus
  Intron number 2 from transcript mgv1a013197m (locus mgv1a0 13197m.g) derived from phytozome v7.0 (chr-ID scaffold_3; pos 4156674 to 4157305 reverse strand)
ttttggctgccgctgcccgcgattataaaaaggtctgtttttttttttttcaaatgaatggatattgaattttgatgacgtaatttgcttttacatttacgtgtagcatttttatttttttatgataaattggcgaatttggagttcataatgtatgttagctgttcgtcgtcaattggtcagatttatggttgttagcttatctaagttcacttattgaaatttcacaattttcttggcatttaaaagatcaataagctttacgattataacagttattaaaccaatgatttcgttatctgaaatggaagatgaatccgccgaattaagttgttttttttcagctttcgattgaaatgctgctgaggtccatttgtcgagtttttattagttccgaaaaaaagttataaacatgtattctcttaaagaatttatcccagaattctttcaaagcgcccccatgatgttcgatttatttccagaactatgaaattgcaaaagggttttgtctcaaaatgggattatgatctgtaacagttctcggctaagcaatttccttcgacaaattagcataaagaggctgaaatttgacgtatttttttcacaggaattgctgactcaggagaaagcga

SEQ ID NO: 102277 - DNA, 841 bp, Mimulus guttatus
  Intron number 1 from transcript mgv1a015828m (locus mgv1a0 15828m.g) derived from phytozome v7.0 (chr-ID scaffold_638 ; pos 2029 to 2869 reverse strand)
agttcatcgcatctgatcccgtccacggacccactgtatattttctcataacctacatctctgtaattttattttttattttttttgtgttatttgtttgtttgttgtgtttattctccgattaatgatgggaaatttattgggtcttctattttgtgtttgccaatcaatctgtgtgtgtgttttttgggtgttttagggatttcgtttttttttttttattatatcctatgggatatgattagtgcccagttgttgttcatctgaagcacagatgctttgtctttagtaattttaatggaagaacagctgtcgaggaatagatttagttacaaatttgatgggtatgcctgtgatatcttgattgtttgatctatgttataaaagaaacaaaaggcatataggatttttttgagtattgcagctcttggtcactccgttcatttttcccgattattcacatctaactcacctgcttgctcgattggattttggttttccgagccacgtgtgtaatactgagtcatttgtttgggtggagttctatttccatcttttgctcttctattttcgtctctttacttgtgtagcctctttgggactctgttatcggattacaggtagtgacgaaaattgtgtgattactggatttcgaaagttcagctgagggctttctcgttattttttctttatttttggggttaagaagtatgataattaaatctattttttagtaacttctttattcctttcgatattctcgtaatcgctgtttctcttatctcgtgtcttgccacctcgttcagctgaagactgcaagggaagcagcacagttcggtat

SEQ ID NO: 102278 - DNA, 889 bp, Mimulus guttatus
  Intron number 1 from transcript mgv1a014321m (locus mgv1a0 14321m.g) derived from phytozome v7.0 (chr-ID scaffold_132 ; pos 675083 to 675971)
tccctacgacggccatctttcatccgatcgaaaaggtgaatcttttcttctttgtttcttttctattgctaatttgaaataaactactttgattttgtgtgaattaattttttttttatatttattttcatttagaaaaaaaacatttggccttcgaatactgagaaaccttagttggtgtgtgtgaagttggtacttttgcagctaatgaattaaaatcatattaagtaaaataattaaaaaaaatattaattcagcctctgctaagttaattgatttctggttatgtgcttgtaaataattatcagctcatcagcaatatgatttaggtggtgtttgcaaatgcttttaaaaatagattatgagcttttttctgtacataattagtttgcaaaacaagcttttgtttttgcttcacttaaaataagcagctttaagctataatttcaaaaacaccatcgtacctgctttttcgaatgtagtttattttccagctaatttgcaaatacccccaacttttagaaataaacacttaattccaacttaactcacaatcactaacttctgcttttaattgtatgtacacaacgctacaaaattatttcggttattcaaatgcttacatgtgtatctcactccgagcaatcgatcgattttactaggtagtccattatttctcgaaaatttcaactttcgatttcgtatttctatacacggacgacaaaatattggcatgatagtgggtgaagattctcatcggtatttgattagtcgagatttttcctcgattttttttattttatataagaatgaagttaagttagttttatttcctgttttcttttctcaatcagaaagtcgtatcattacctgatttcgcggaaattga

SEQ ID NO: 102279 - DNA, 662 bp, Mimulus guttatus
  Intron number 2 from transcript mgv1a011571m (locus mgv1a0 11571m.g) derived from phytozome v7.0 (chr-ID scaffold_211 ; pos 136897 to 137558)
ccattcttggaaacaggtttttttttctttttttttattcttccttgtagtacgaattagcactttcggaaaatttcgtttttttttaattttttttaaattttgtaaagtgaagatctaattccaatttggttcggaaaaaaagaaatgggaaattgggatcttggaaattggaatgagaaagtttaatttgttctggaattagaaatttttggattggccgaatcgactacatttgtaaattccattttttttttcaagtgatgtataaaatgcataataatgtcgatattataaatataaatttcggaagaaaaaacgttcaacattttcggatcggaatcgacaatatttgaaaaattccatttttttttgtcaactggccggtatataaaatggataatatattataagtgtagttttctgaagaaaaagaatcaaaattttcggaaattataatcggaatctcatatatattctaatttcatttatataaaaaaaacaagaaatcgaaattggaatgaaaaatactattccaacatcagaaaatttcggatcggaaaaaaaaaaacaatggtcgatttttccgtttaatttccggtttaattattttcgactttttttcaggtgggcagcaattgcttctcaactcccgggaagaa

SEQ ID NO: 102280 - DNA, 784 bp, Mimulus guttatus
  Intron number 1 from transcript mgv1a008756m (locus mgv1a0 08756m.g) derived from phytozome v7.0 (chr-ID scaffold_51; pos 1037863 to 1038646)
tgcacaagccaatattaaactccgaaactttactggtaaggaatattgttttttttttttttgtgtttttattattgcacataaaaaaaggtgaacgtactttgggttggggcagttgaacatcatgttctgctttttggtattaaaggtataaaggaatgggatggtttttgtgtgatttgaattactttttttttttttgttcaattgctgttccagaactctgattttatggatccaaaaatacgttattaatggaaattttcaccatcatgaattcaaattacaattgtcgatgtggaattctcactatcggctagaaacatctaggtggtattcaattgagttgattgttctgctcttcgtgcaaaggtgaagccgtcgatgtattttgcgttgaaatttatgaaaattgatggaatctattaagtatacgaatctgtggatccaatctataaatgtttcttattaaaataccatggtttcaatatcttaatttttcgaatgatatgctggccttgttgcccctgtgatgcttaatttcattaaagaaattattgcacgcacgtggcaatattttgttttatggtacttaaaagtcaggtttgctttgtgattcatgatttgaagaaattattgtatgcatgtggcatgatatatatatatatttttctggtatttaaagttcaggtgtgttctggatattattactgttgttttatataaagctggttgagaggttgttactaacctttgcatgtttgatgaacagaggctgttgctg

SEQ ID NO: 102281 - DNA, 506 bp, Mimulus guttatus
  Intron number 2 from transcript mgv1a000808m (locus mgv1a0 00808m.g) derived from phytozome v7.0 (chr-ID scaffold_18; pos 576997 to 577502 reverse strand)
cattcacggtgagtcttttgatatctacttcattttagcctcttttggccctacatgggaacatgaatctgttttctccttgagtcttcattgctgggtagaatgctttctctggctcactttatcttatattctttccacgatccgtactacagtgttttgcctaatcatgttgacggtttccgtgccaatatttgactattttgtctcatcaactgctgtcatttgattttttctatttttcttagaattgtcagtactacagcaagaaagtatttggattagttattcgccgttatagtgtttatatcatcgccggtttttttcttatctgacctgagcatttgcatttggattctgtctctgttaattttagtaattaataatggccatactcctgacagactcagatttgcatccaatatattcttcttttatgctcagaatggttgattcatccccaccttttccttccttcttgaatcttgcaggttcttgcgagcaat

SEQ ID NO: 102282 - DNA, 748 bp, Mimulus guttatus
  Intron number 1 from transcript mgv1a000808m (locus mgv1a0 00808m.g) derived from phytozome v7.0 (chr-ID scaffold_18; pos 578153 to 578900 reverse strand)
agtggctcaatcacagcaacgctcgtcagtgcgaggtttgaatactcagactcacgtgatgccatttgttgattagtagaatttgttgttttatatttgcgaatttcataattagctgtttagttggcgtcgtattcttgcgtttgtggtaattgaattgactgttttcatctgtttgttgaaatattgagtttgctctttttggcggtattagtgtggcatgatgaaatttggcggagtttcttttgttcaagtaaattcagtttttagctaaaagtaattattaaatgggagagatggatttgttttatttatttatgttttgattaattaatttatttgttgctgttgttctttcctttttggttgataagttattagtaaatattctagattttgaatatgtacgtaggaatttgttgagactactacagaaaagaatatatgtagaactgagcttgatgtccaatcgaaacttatgtctgaatgaaacatagtacccaggtcactaacatatacacacgcatgtcgtacattgtgatcttagcagctaattgctcccatgtactgctatatgctgagttatgttctctttatttggaattctctatggccagtgatgctattcccatcctttttagatttattgaatcattgtggtcagcagaacgtacaatccatcgctgacatttgtattttgatgcgcaatgcaggtttgcaaacacccgttttcattttctccagttta

SEQ ID NO: 102283 - DNA, 454 bp, Mimulus guttatus
  Intron number 2 from transcript mgv1a002400m (locus mgv1a0 02400m.g) derived from phytozome v7.0 (chr-ID scaffold_122 ; pos 236510 to 236963 reverse strand)
aatttctgaagatctggatttagttctgtatcttggtaagaagttgttatttaatttatttattttatttatttttttgttaaattctaagctcaaaatctgaaaatggcggttgaatgagtttttattgagctattgttagctagatcttcgattaatgggaacgtcttgctaaaattcaggcgatctgtttgtttttacttaggtttgaattcagatttacttattttgactagggtttgaattccgtaaaaggggaaagtgtactggaaatgaagtattaattcgtgttaattgtgcttgtagtgtaatcaaattgcttctgttttctgttttaatcgttgattcgagatttaggatcgatctgctatgattcgaaacacgaaagatattgtatttattgcgagtcattatattttaacaatctgttattacttttttgcagcaagtaata

SEQ ID NO: 102284 - DNA, 645 bp, Mimulus guttatus
  Intron number 1 from transcript mgv1a009824m (locus mgv1a0 09824m.g) derived from phytozome v7.0 (chr-ID scaffold_102 ; pos 423950 to 424594)
taatcaaaattaggtttcaggtaaaaaaaaaacaatttgaatttatatgttctatttcgaggtaaatgcatcgctggatcggatgtttcatgttaggatatataagtaattttagattgctttatttctgcaagcattatgttcttctgaatttatcactgtttagaatttttaaactgtaattctttgtgaaaggatgggtagatggaagtggctttgaatgtgctggtttaagaaggtgatttttgttagaagccactatattcgttgcgttgaatgttgattactcggataggccgacatagtagataaatagtaaatagaaagaaaaaaaaaaaccggttagtgaaccaatcagggtaatccgttcggtgtttgatatgttactttggcgtatttgattggagtcgtcaataactattatgatgatggtatctatccacgtgttcgtgcgttgaaagaataccaaaaacattgatataagtgattagattcttctgagttatcacgatttaaatgatatatcgcacgtgtgtttttatatgagttcacaatcttataaatgaagagtagtgaatttatgtgttgatgttattattaccatatgcaggttcagctagaacccactacacagtggcctttgtt

SEQ ID NO: 102285 - DNA, 780 bp, Mimulus guttatus
  Intron number 1 from transcript mgv1a013919m (locus mgv1a0 13919m.g) derived from phytozome v7.0 (chr-ID scaffold_1; pos 2921838 to 2922617 reverse strand)
acaaattcgattactctctctgtctcagcggaaaggtaaatccccttttactttgtaatcatttcttcattttttttctagggtttttcgtgtttgtgcgtattccatttattgaagattccagcgtgtgggcttttctgattttaggatgtttgtgttggattttgggtggatttctttggattcgtctgttaatttgatccgtgcttgtttaaagatcaatttttttggttacttgtctaaatatttcaaaattgaagaaagctatattcttgattttttggggatgctcaatctgtgaatagaaaattgaagtacagaaactacattatttacctatccctacaatttccagcaaaatgaggttttcagctagagagaacgatagagaagccaattcgcttattagggtttgtctctgatttgtgccgatacagaaccatgggggttatgtttggtgaccaatgtcagttgcctatctttagacgatgatgttaaaatcgaacgagcccaaaacaatccttatgatttttcaaactcttgtgatttttcaagactcgagctatgcatgtttaaatcacaatcgttattctctgtcacagttaggagttgtttctattagatttttgtggaggagtttcttatatcgtagttctcgtgaattttccccgtcatattccaaaacaatctacttttaaccattttgtttcggtgacatacgataaactaaagggaatcttgtaatgtgattgcagacctatataaacggtaaagttgcag

SEQ ID NO: 102286 - DNA, 458 bp, Mimulus guttatus
  Intron number 1 from transcript mgv1a005849m (locus mgv1a0 05849m.g) derived from phytozome v7.0 (chr-ID scaffold_1; pos 4438490 to 4438947 reverse strand)
agcctgctgttaacgttacacaggttgataagaaggtaacaactattagaagattgttctcttctgttgtttttgagctattatttccggatttttttgggttaattttcatcagattgttcttttgttcgcttttatgtgttttgttcaattaagccatagggttttggatctgatcggatttcattgaatgctttattgtttgattgttaatttactgtgcgatcagcactcaattatcaatttgtgatattattgggattaaatattaagtctgatttatgattgtgacgaaatcctcatcttgctatcacgaacgaattgtatctctctcctgctagaaacttagcctgaaagaagaatctacagccttactcttgttgcatgcaaattgtatttagctttgtttctaatgttgttgcatattttttatttatcagttagaaagtctcccagcg

SEQ ID NO: 102287 - DNA, 460 bp, Mimulus guttatus
  Intron number 1 from transcript mgv1a002081m (locus mgv1a0 02081m.g) derived from phytozome v7.0 (chr-ID scaffold_1; pos 1087914 to 1088373 reverse strand)
ccgcggttttagcgtttccgcctctacctctcaaggtatcagatattcttacaccgtttctgtggtttgtttgctttggtgtttcgtcgaacaggttgcgggcgtgcttttttttttgtttcgttcatgcgcattggatactgtaaatttacactcgaacttgtatttcaatttttaacggaaattggagtgatttttagctatgacattcgttttttgagacagacatttcaggtacagttgatgttctgtatgagctaattatgtttagtagccagaacgaagatcgattatggctatttttcttgtattctattatagtttccgtttcaatccgatgaatatgaaaacaatgtgaaatttctgatgatatcacacataagttctaactgtgagaaggagtacttaagctgtactgaaactgtttgtgcagattgcagtaatcacagcgaaacatctg

SEQ ID NO: 102288 - DNA, 910 bp, Mimulus guttatus
  Intron number 1 from transcript mgv1a007481m (locus mgv1a0 07481m.g) derived from phytozome v7.0 (chr-ID scaffold_66; pos 1023973 to 1024882 reverse strand)
aggactgtgaacagtcaactaaggaaacttccgaagtgcaacccggccaaccaaatctcaagtcgtgtggcaaatccacacctagtaaacagggggaggataacgatagccaaaatgaagacactttgccatttgttgagacttgtatatttaatgaacgagaaaagtttaaggaaactgatgaatacaaaagggcaatagaggtagagtgggcatcgaggcaacaagctcttcaaatccaggtttgcaatcttcactgttttcctattcctttattcttcagcatttggcttagttttcattcatgtagtgtttgatccgtgctttttcaagaaacagaggaaatctgcacgttaagtttaaggggttcaaagatgcaaggtttcagttgtaactaatagtgcttatctgagatcaattgtgctctgtgtggtgactgcgattggcgaatttccaacgttttgcgataacaagaaagaatgatatgaactctgtttatttttctttccccttgattcagaggaaactttagtttatatacttccagggtttcggttttcagtgttcagggtttcggtttcagggttttaggcttcagtccctttttttaagggtttagggtttagggtttcggtttcggtaaaaaacaccgcgagagatattcgagttcttttatgttttcaaatactcgttttcagtttaatttgcagttccatcttgatcgacattctaccattaacatgttattgcttttttcatggttgtcatttcctttagtaactaacatgatatcatctactatcttgtgctatctcgtgatgatcttatttcactctaaagatatccggaatataatttgcttgcgtttcttttatttgtataggctgaagaagcacaacatcagaagcgg

SEQ ID NO: 102289 - DNA, 776 bp, Mimulus guttatus
  Intron number 1 from transcript mgv1a018217m (locus mgv1a0 18217m.g) derived from phytozome v7.0 (chr-ID scaffold_436 4; pos 410 to 1185)
tacaaaggggttaccgagttcaagcaccactggtaagtcaaacttgatcctttgacctttttgtgttagcaattctttgaattcatgtgtttttcatgattcccatatgaaattcttggtaatgtgctttatctgtacttctggatttctttgtattctgaggattatgtgctgtgggttttttctttttttgaattttggttttgttgatctttgaagatacacatatcaattgagaatgcaatagatttatgtgaatagattggagatggaggtaggttgaaagttaattcgagtaatttcgattcaggaagtgggaaatgaaccaagtagatgaggatctcccttgtgtgaatttgctattaaaacatcgaacgggttaattttgtgagcaagattcgttttctaaatccagagtgtattagggaactcatttttgctatccgatttaactcccatcgtattaaggaactcgtagtatgctgctaaaagtattgtattgtagccgagcctttgagatatatggctatgctaaatctgaagataatgaaccgaagaaaaatatactagaaatgctcaagaacaaaaagtataaagcacctctttaaatataatttatgtcgactatcgtaaattcagcttatttcctgcattcaaatttgaggacttttatgcctgttatgcatctaactcgaatgtcaagtcttggtatataattcccatcagcttaccttattactcgtctttctaccatttttgcaggtcgattctgtgtc

SEQ ID NO: 102290 - DNA, 960 bp, Mimulus guttatus
  Intron number 2 from transcript mgv1a018080m (locus mgv1a0 18080m.g) derived from phytozome v7.0 (chr-ID scaffold_2; pos 2567695 to 2568654)
aaagagtggggatctttcctagaattcctgcagaagtatgaaagggtaagatcatagtgttccataattccttttacctaaagaaaagggcaatgcgtcattaaagctgacgttaatgaatttaactattatgcttttctcactttaatttcttgggggtggggtgggtggtgagccgagaagttttttgtgccgatggagaagcctaaatagctcactaactataatctccagctatttgccaaataaaatgaaacttggttgtggattgattacggcgagaatgtagacataaaatttaaaaacgattagcaaatagcttgttatgttctctcttatttcgaattgtttcaagcaaatgtgtttttccaatgtctttgcgcagagtataaaatctccttttgtgttccttctgtatattcttggtagatgtaatcatgttaaaaaataaaatagtatgttctgatatctctaatgcattcaattcctgaaggctgctgtatcaaagctgggattgcatgaagtgtacatacttccctgcagcaaagattcaaaacgtggcttcgcaactgttctatacaaagagaaagtgccaaacttgtctcctagtcaaaagtgtgatgcattgggtatgttttattatttatccctacccacagcatgcatggcctatattatcttcctaatgtttacattatattacggcaagattgtgtttaatcgtttttagaaacgagttcctagtttggcaagaattctttcccaatttctgtagaactatagaagaagcatcacaaccaactattagtattgtagcctgacattcttctcttttcccttcagcagaaattgttgcttttgaaacatcatctccacccaaaattattgctggtgaggctgctatgtcaaattctgacctcattgatagaatttctcctgagcaacgatatccagaagtaa

SEQ ID NO: 102291 - DNA, 882 bp, Mimulus guttatus
  Intron number 1 from transcript mgv1a001106m (locus mgv1a0 01106m.g) derived from phytozome v7.0 (chr-ID scaffold_150 ; pos 243326 to 244207)
ccggcgacgaagacaccaagggtaaagcgaaaaaggtacttttctacaattttttttttcttcttatggagaagtgtttagggatatgtatttttaaactctattaactaaatagtaggagtttgtaatatgtttggttgataagattcgtgcttagtttaatccgctactatatttaaagcctgcaattattatttggttaaattagtagcaactcttccccgaccattaattgtttaggggtgattaaaaaagaaaaaaaaaacaattttgtgcttaaaacaatattttaattttgttaattaaaagactttttagacaattcacatttaatatcagagtttaacaaatttagtgcaagatttaatcgaacgaatcaaatatcttactgacgatataggtaagcaaacgaggccttagtggatggagatatcgtaactgtgtcaattttgttttagtttgtgtcaattttgttttagttactgatcaatttcaaagttacgatatcaagatatttaatatcatgttcaaactactttttcgatgaaacttttaatgaactttactaaaattcaaagttagttgttatagtttgtcatgctagatccaaacttcatgcataaagtatgcacatacatatacaaaacatagaatttgtagttttggcaagaattaaaatgtgcttttagccttgtgttcattttctttctataaatcggcattgatccatttgagcattgagttgtgtcgctcgatgaaagtttgtttaggattacaatgttagctatttgtcttcactccatcggtttcagtttctgacattatacgattcttcattttcgcatagattcccctcctgagagaagacaacatagtaggttt

SEQ ID NO: 102292 - DNA, 469 bp, Mimulus guttatus
  Intron number 1 from transcript mgv1a001141m (locus mgv1a0 01141m.g) derived from phytozome v7.0 (chr-ID scaffold_79; pos 454473 to 454941)
aacctaattccgtcactttcacatctgataataaggtaaaagcacattgtcctctgtgtttttcgttttttttttctcgtcaggaagtttgatattgataaggagtttgttcatctgatatacatctgatttctacggctagatttcatggttaactttgtagttgaattatccttggtcaacataacctttgtgattttattttagcttttgttctcttttatatatgatccatttggatctaatattgacatttactagacgatagggagaaggaaatcagaattattcgttttattctgtaaataacttttgaatcattattgaacttggttattggatgtatttccttcatgtttcggtattagcttgaagaaataaatagatacattccaaaacacttgtttacattaaattttgctggaaactttcaggtggtggaagctctcgaagtggagttattcgaaga

SEQ ID NO: 102293 - DNA, 339 bp, Mimulus guttatus
  Intron number 1 from transcript mgv1a019077m (locus mgv1a0 19077m.g) derived from phytozome v7.0 (chr-ID scaffold_76; pos 438596 to 438934 reverse strand)
tcatccaagaatcaagaatcctctttttttggttagtcattttttttttaattttttttttttttgggtgatcatttgatgttaaaatttctgggtctttttttttattttaatttttcttttgaagaaaaaaaaaaaacagaaaaatcaaaatgggagggaggtcttcaaagcagagttcaacatcaaattcaaattcagggaagaagaagaaacagagggatatgaataaggttgtaataactccaccatccgtacaagaatccatagataagccaactgcagtagctcaagaatcaccaaaattgtctgctcagtattcaaatatcagcgataccg

SEQ ID NO: 102294 - DNA, 835 bp, Mimulus guttatus
  Intron number 1 from transcript mgv1a003032m (locus mgv1a0 03032m.g) derived from phytozome v7.0 (chr-ID scaffold_35; pos 1456403 to 1457237 reverse strand)
ttgtatcgacaaacaaccaaccacaaatcatcgtacgtattatctcatcccatttttttctcaattggagcttattcaatttactacctctgtgaaaatcgaaactccgggtttcccccctgtcataaaaaattagcaaaaattccctgtatttattttttaagactacatactcgactcatttaaattttctccattgaccggttgtaaaacgaccgaagtaccctgggggtttctgcaaaaaaactaggggaccaaattgaagttttgaaaaacttaatcaaataattcaggggacataattgtaattttctgaaaatacataatatttatacataccaaatattgctttgaaaatatttataatttaataaatttaaataaaaaaatgcaataaaaatttattaaaataaaaaataaacttattaaaagaaaagaagaaaaagatgttgggggcaattccgtcatttcacacaaaaaatgaagaaaaatcgcagaacccacaagtgagacacacgatatgtgatgaggggggttgtcgtctttcactaatgaatacggagtatttgctatttttttaatgacggggaaaacacgcagttgcgattttcataagagtaaatgcaataagctcttttattcggtatagattatcgtttgtctaaagaaatattttgcttgttggttacagaagcactgaagaagcgactgattgcaggtaaacaatttctatgcttttaataatattatattattctagtagatgggttctaatctaacttatgaattatgtttcaaaggttttggttgctttcttgccgtgataatcctcgtc

SEQ ID NO: 102295 - DNA, 628 bp, Mimulus guttatus
  Intron number 1 from transcript mgv1a027032m (locus mgv1a0 27032m.g) derived from phytozome v7.0 (chr-ID scaffold_87; pos 964431 to 965058 reverse strand)
cgattgctgccaaaaggtaattttaccatatttatttatttacaattgtgcttaattccaccaaattaatttagctttttttagttttggaagctgagatattggatgagttttgcacttattgcttgatctgtgtacagattgacatttcgcatttatcttatgcatctatgtatgtatgtatatgtgcgctacagtgtgtgtttctgtgtgtttgaccttgaattttggtcaaacttccaggcaatcggattctgtcaacaatcgaatattgctgattcgatatgttcttctttatatgtttgaagtaggaagatctatacattcgttaatgatcgttatggatttctaactaaattaagttatcgtttttcgagccaaagtaatgttcgttatttacgattttgttgagttatagtatcgaagatatgtttacgtttacgcacgtacactatttacgcaactgccactccctattttccctttctgtcgtcaagcaattacgtttctcaaaaggctcgaacgtatactacgattttttcattaccctatcatgttttatttctaagccaagtgaaatgtaacaaacacaggtgtactgtctcgatcaccgaagctacagtcggca

SEQ ID NO: 102296 - DNA, 431 bp, Mimulus guttatus
  Intron number 1 from transcript mgv1a003351m (locus mgv1a0 03351m.g) derived from phytozome v7.0 (chr-ID scaffold_122 ; pos 369554 to 369984)
gcttgcttcaatcggcgctctcaatttaatttcatgtgagtttgtttaataccctagtttgatttgattaccgccggaatttctatttgctccgattggattttaccgggtgtttttggatccgaaatggagccccggtaatcggtttccgattttcagttcttaagtttctcattgtattttttttgttcagtctgattggtttgcgttcttctctaacagtgggttttactttgtttgattgatactgctggttaattcgaaccagatgatttatttcccccaaaaaaagaaattcgaattttttaaagtgaactaattaatgggtttctttaattgtgttctctttatgcttgctgcattgtttatatccatgtttttattttgtatttacagaattctacacgtgattttatcgcatatttgccgag

SEQ ID NO: 102297 - DNA, 1043 bp, Mimulus guttatus
  Intron number 2 from transcript mgv1a003351m (locus mgv1a0 03351m.g) derived from phytozome v7.0 (chr-ID scaffold_122 ; pos 370786 to 371828)
tgaccatattccttgtcagacgtcgcaggtaatattaatctttttgttgtttgcagttgttggagaagcttaaactgcttatcggtactaacatagtggtaaaatcaatacggtctttcattatactcctgagtacttatatatgtaaatgccgtttttaacgttagtcgggattagtactagtggctgataaagaagactaataaagaaagttactagaaacagaaaataaaaacaacaaaaagagaaactcaattttgtctaacgcaaagttccgtattgctcgtaaaatctgaactatgttagcattgtgggcttcgtcccatttatttgccaagtaatgttgtaaactacgttgtctttttatgagttgtcggatgggttcacaaaaaggaacttatgaaactcatgccaacaaaacactgaatcttatgaaattgtatcaaaaaacgtcacctaattctagagtttgacctggattcttgggagatgatctgagaagggcgtggtgtttatatcaagtttcggattgatatattttcgttgattcaattgcattgcattgatttgcagattgcaattggttgtaaaaggacaacaataggtaaactaggattattttcactatttgtttaggtatttgaacagtgtaactttcgagtaattacatgattcttcactagataatgaggtattacttgaaatgtgtaatgccatttaaacccgttcttttagttatgcttttgtcctttttgattatgataaaatccattgttgtgattttagaatcttttagtgattcttttcctaaataaggtcaaacgaaaaaaatctgagactggaaatctgtttgacctattagcccgataaaccctctgttcataatgaaccttaattatgtaatcttgaaaatgttcacatttctgtagaaatcattgaaatgccgcagagtatcttctcaaaagttactattctattattactgcgaccatttacgatttcttctgttcgtttttggaccctatagatactacaagaacaca

SEQ ID NO: 102298 - DNA, 662 bp, Mimulus guttatus
  Intron number 2 from transcript mgv1a010578m (locus mgv1a0 10578m.g) derived from phytozome v7.0 (chr-ID scaffold_58; pos 749098 to 749759 reverse strand)
aggaagctgaaagcctcaataaaaggtttcgttgtaccaattttccagatttcctctttaattcttcttctgttctttctgattaggttttagatttcattttctatgttaattaaatctggaattttgttggtctgttgtttttatgtaatgcatcttacttttgtgtgcaattttacaagtgtgaaactttactctgttttttttactttattggatagtgataaatattttaattaggttataatgaatccgttgagcttgtttcgatagatccattctactgtgaattggaaccttatgtcttgattcgaactggttttttttgagttattattgtggtggatttgggatctactctatatggaaatcctctcgttgaattcaaatccttcgatccgtatgcgctcttatagattgtcttcatttcaattggtttccttttatttgcagtttcgtatttcactcttgattggtgatttgtggcgtcatagtgttaattacaacaagtagctttcttgtttttccacaaaaaaaaaaaaaaaaaaagaaaaacgagtttttttcttgtgtgtattaatgcctttccatttaaaggatctaaggaaatgttccgtttttcgactttcagaaaaccttgttcgggctataaactaaaggag

SEQ ID NO: 102299 - DNA, 479 bp, Mimulus guttatus
  Intron number 1 from transcript mgv1a001899m (locus mgv1a0 01899m.g) derived from phytozome v7.0 (chr-ID scaffold_100 ; pos 370078 to 370556)
ccagctctccctggtatgtaaattgtaatgttctaattttttattaattaattttattgtgggaatgtgttatttggcttgtttggtaaatgttgatgctgaattttgggcatttcttggttttgagttatatgaaattgaataaggatattagatcttcgtcttcttagtttagtggtgaagtcttggtcttttacgaaatgatttgtctcggtatgcacaacactaatctcgtcttaattacgttattaaaagacgaggcaatcaccatacttatcgttttagcagtgtctgtagtatatcactatttcgtttaacatgtgtgtcttttcgattgtctgccgtacgctcgatctttgtagtttctgttcattaatcatatgctcgattatcataataccttcattctccgattatatttcgaacgctttcggttttctttttgacattttgttttccaatatctgctgcccatagga

SEQ ID NO: 102300 - DNA, 853 bp, Mimulus guttatus
  Intron number 1 from transcript mgv1a006957m (locus mgv1a0 06957m.g) derived from phytozome v7.0 (chr-ID scaffold_89; pos 975000 to 975852)
cgccaacgggaaggtaactggttcctttgttcgttttaatttttgattttttgtctattttgttactgaggtcagctgaattggatttatgtttggggttttcgtgcatcggaaatcgggttgattggtttctttaaaaagtccaatttaagaaagtatgatggaatttgctattgtatgtatgtaatgtggccttgtttttagatacattcttcgaattttcgaagtgaagtatgaaaatataagtcgaaaagattcgaacttggtcataattgtggcgttgttcatggtgcgccggaatgttcttgtgcaaaacagtgaaaagacgagcataaaatttgaaaaaaacacataggcaaatgcaaatcttgaatatttattgtatcgtaataccaatattagtggtttattttagaaaaaatgtaatcttttagcattttaattaaacttattgggtggctcctagtagaaccccgtccaatgctcaagtcaataaaagtcgagggattttagagatacgagagactggagcattaatgagattgaattccattaagacgtactttgaaattaagcttcgccaagtattgttcactctttgcgtaaatgcagctttgggtttttaaaatgattcgaaattgggtttggcacgtaatttttaactacaactaatggtggcttttgggacttttttttaactcgtggcaataattatatagtggtgatgaatgccgaagcaggacgtaataaattcattatttgcttcaatttttgggagtcaatatataatttctgcgacttcattatttcccatttaccttgcaggtgcagattatccagcaaattaatcacg

SEQ ID NO: 102301 - DNA, 758 bp, Mimulus guttatus
  Intron number 1 from transcript mgv1a007371m (locus mgv1a0 07371m.g) derived from phytozome v7.0 (chr-ID scaffold_262 ; pos 5806 to 6563 reverse strand)
tatacttctttttggactcagtattgccagaggaggtaatcttttttttctttttttttttaatgttttaaacatttctgggataagaaatatgatctgggttttattaaagattgttctttttttggttgttttattgattcttgatattgagatgcatgtgcactggaattcagatagagggataaaagagtaatttaaacaaaatttgtatactgggttttgcttattaaattatttatgatctgggttttattaaagattgttctttttttggttgttttattgattctttatattgggatgtatgtgcactggaattcagatagagggttaaaagtgtaatttaaacaaaatttgtatactgggctttgctaattaaattatttatgatctgggttttattaaagattgttctttttctggttgtttttattgattcttgatattgagatgtatgtgcaatggaattcagatagagggttaaaagagtaatttaaacaaaatttgtatacttggctttgctaattgaattatttaactcttgtagtctaagtgttgatgattaggtttctggtgaagttttgaatttctagggtttatagcacatctttcatgctcaagaaattaccctagaacagagtaattttactgtcgaaaaatatcgatactttattggattttgtttaatttattgagttctttttagtgattaatatattttttcggtgtaaaacagatctttcgacagacggcaa

SEQ ID NO: 102302 - DNA, 813 bp, Mimulus guttatus
  Intron number 1 from transcript mgv11b020412m (locus mgv11 b020412m.g) derived from phytozome v7.0 (chr-ID scaffold_2 99; pos 371874 to 372686 reverse strand)
ttgccgcaggaatcacgcctttgcaggtatgtacgtacgtgcaaatggttgttaaatcgtaaaccaaatcgcaaatcgattaatgaaaaactcaaatagtaaatcgaaatgaatcgtatattatatagtgtaataacaaaaatctatatatggcttttagaatttatgaagtgaaactataaaaacttatcttcatcctttatgatcgaaattcaataagtgttttaacaaaattttcagcacgataaaatcaaaaagtcataacatctatatcaattatcatattcaacagtagatgaggagcagatggaatgcttagagtatctccattccctgagaaaaggatcttgtcaatactacataaatgatctttgaatcaaaatactatattgtgattttcatttaatgcttattttaatagtattttaaggggagaaactgttgatgacaagaacgtattaatcaaattaactattaattatatttaaagtctaatattcttttcattgaattttatcatacaaaatagactaaacttaaatttcattaaatcctaagaatcgaataaaaaatcgttagacttactagattttttgacatttgagattccatcatggatttgaatcgaattagcaagtacattaatccctattatatttttgtgtagaaagttataaaaatctcatgtataattaatagcattatgggccctaataaatatttttaattcattcagccctcaaatttaaaatcctggctccgtgaatgttttttacaggtggaattggcgattaaagaatcgaaaaacgaagg

SEQ ID NO: 102303 - DNA, 716 bp, Mimulus guttatus
  Intron number 1 from transcript mgv1a005713m (locus mgv1a0 05713m.g) derived from phytozome v7.0 (chr-ID scaffold_12; pos 2486524 to 2487239 reverse strand)
ccctcagccccagccatctctgcttgttttttccggtatgatttccgattttttatttatttattgtttttttaaataggaaatagaggggaattgggttttggggtgcaataaattgggaaatagggtaattggattttgacaatgcggggtagttaattttgagtagtttctttcattttctttaaattgttgattctctcttcctagtgtcttgatttgcaccgttcataaagatttaaagaaactactaatactatttcatcgcgtttaatgttgattataccgaatatgaatcattttgcttgtgtgaggcacttcaacatctgtgtgtcatgagtgtttcggttcggtttgtgtactgagtgagttttgtgatggttgtatacgtgttgacctcttcgtagcttcacctaacacgtgttcaatcgcaattatcaattacttattatatacgtcgctgctattaagacgacgtattgagtttgatagatttgatcaaatttaactgctgtcgtattttgaattacggttcaccctatttctaccgctgtttttagtggatcgtttcttgcatctttgaattacggggcacttggcgtatgtggaaagtctgataaccaattatacggaatgttaacatgaaatggaaacatgtcatcttttctttgtaagtatctaagaactttgcagtggtgcaggtggaactgccttta

SEQ ID NO: 102304 - DNA, 351 bp, Mimulus guttatus
  Intron number 3 from transcript mgv1a019892m (locus mgv1a0 19892m.g) derived from phytozome v7.0 (chr-ID scaffold_17; pos 1701090 to 1701440 reverse strand)
tgattttgagctatctcacaacttgaaaaccggaagtgtttacttctatggatacaaggcagagaacccctttgaaagagaatatcctttatgcattttttcacaattttaaatttctttgaatattttggtcacaagcaataactttatatgaattatcttccttgactctctctttgcttttcatcttccacggagttacccgaggaagaaacctttggtgattatctttctcttcatatccatcattattcacctattgattcctttagttagttctgctaggagccctgtatgttttttatttggttgaataacttgtatgaatatgtgtgttattttcaggtgaag

SEQ ID NO: 102305 - DNA, 435 bp, Mimulus guttatus
  Intron number 1 from transcript mgv1a019892m (locus mgv1a0 19892m.g) derived from phytozome v7.0 (chr-ID scaffold_17; pos 1701710 to 1702144 reverse strand)
gagttttggggtaaggctttctctctctacaacatctgctaatgatcgcgattcattttatgtatgtctactctggaatgaggacgatagcctttcaccatttgatatcttaatctctgcatcatctttgacagtgaacgctattttttttttttgctgtagaaaccgtaaatagatcgcactgaatatcgtttctattttgaatcacgtaattatttttctcttctcggtttggacactcatgcttaaatttgtatttgaaaatattggtcaatgtttttggtagatagttgtgttgtgttgtgtgtgtgtgtgtgtgtgtgtgtgtgtgtgtgtgtgtgtgtgtgtgtgtgtgtgtgtgtattggtggagattttatatatcagtttgtttctcccaggagttgaagtgaaaagcggagaacctctaaaggtg

SEQ ID NO: 102306 - DNA, 632 bp, Mimulus guttatus; identical to SEQ ID NO: 101575
  Intron number 1 from transcript mgv1a012288m (locus mgv1a0 12288m.g) derived from phytozome v7.0 (chr-ID scaffold_104 ; pos 784118 to 784749)

SEQ ID NO: 102307 - DNA, 500 bp, Mimulus guttatus
  Intron number 1 from transcript mgv1a003370m (locus mgv1a0 03370m.g) derived from phytozome v7.0 (chr-ID scaffold_212 ; pos 337481 to 337980)
acccctacaatgtaattatctcgttttaaaatataaacaaatattattttaattttcaaattgttcgatcgaaacatattttcgcaaaataaaataaaaaatataactctcaaaaggaagaatccaaacgttgttcttctttttcaagctattaattgaggaggtgtagatcaattacaagaaagtaatgcaattctagagttggataaccaactttgtttgatgaaattggtgatcaatgttttgacttgtcaaaatcaattccaattatcgtgggacaatatttaattacttatgcaaataaatatttaatttgattatttaataaaataaaaattccagctgacgcaaaaaaaaatacagtcacctttatttctcctcccccacgtgtcccatctcacacttgttccgtgcacccactcgtcactctatcaaaactcccttcccatcttctccctctcacagcctgtggttcgtttacactctctctctctctctcc

SEQ ID NO: 102308 - DNA, 827 bp, Mimulus guttatus
  Intron number 3 from transcript mgv1a011802m (locus mgv1a0 11802m.g) derived from phytozome v7.0 (chr-ID scaffold_108 ; pos 554434 to 555260)
ctgtctgttttgaggaggataacaattccgatcgggtatttttcttttttccctaaaccctagcataattctcaaatatctggggatattgaatttgttgtcttaaaaactatttggttgaaggctctagctcgtatggtgacttcagatgtgctctgttttataggtttggagtattttgtagtgtatacgaaataaatgagaaatttcttattggaacaaaatttggaaattttgataaaaaggacatttttttggggattcgattctgtagtttaggttttctctctctcactaatcattttgtttcagataagaggaattttaaatgtatgtttgtgtaaagaatatttgtctacgtttaaatttttaacttcaacgagaaaaaaatatcgttggagaagttacagctggtgacgtagctttatattttggcgatatgatttcgagtttcaatattactatggattatcttcttttcatcctcttgaagtataagaagtcacttggtatgaatttgcatttctatcatgtactatgtaattgtcggagatattcaaactttacgtttaatccctttacttctaatccaatttatctctattttgattgtgaggtttgcattttccgtgcactgtaaatttttcattacagatcatggatctaatggtttgtttgaatgtagacaagatatatttatggtttatgatccttgtcagaagtgcgtgagattctagttgatgttacaacttataagttgatcgcaaaagatgttatttaatggtattgcaggtgaaggagcttgaagctggtgttcttgaattagt

SEQ ID NO: 102309 - DNA, 986 bp, Mimulus guttatus
  Intron number 2 from transcript mgv1a005252m (locus mgv1a0 05252m.g) derived from phytozome v7.0 (chr-ID scaffold_101 ; pos 455970 to 456955 reverse strand)
cggatataacatagataatgtaagggcactaatatttcttcttcctttttattttaattgttatgttgtagaaactacatgagctttggcgtgttgctagtttaaggtttttatcttgtggctgctcgaactctttcgaatgaatattagtattatatccattcatctaagattgtcaaagcacaccatttaaaatgatcaaggtgtttatagagcaatatgtgttgtcctttttcctatcatttatagcttctgtttgcattgaaagacctttagtttgccaaataaataacacgagaagagattttgacgaatactgataaagataaaagcctggctcttgggaaactatacgtatgagcgcattattaagctgtaatatgatcatgtgaggaaaaaataatcaaatgaaaaaaaatcccctagacgagacggacggcaacagagcttaattaactgtaactattgattatcctatcaaaagtactgctgctacatttacattaatggttatataaaatacttagttttatgttcgctcctttatgagtgggctacggctgttgattgttagtgtgcctgaactcaaattggttttgatcatggaaatttttcgtttcactttaggattttgttttatcagtttttgatttagatttcggtttatactgagttataggttccttgtttaggagtagcaatgatgaattattaactagaatttgtgttttgcatgttatgggcgtaaaaaaagtattacaacttgtatctgctatgtttcatttgttaaaatatatgttatattagtattaaagtgatgcatagactttctacagttttgttttccttttttatgtttctcctttttctacagttcatagagattagagaaactaccgtgttttccttctaaagatgttggaaagagaggacctaagtttcaattatttatttggcttttgacgcatttattttccaggctttag

SEQ ID NO: 102310 - DNA, 387 bp, Mimulus guttatus
  Intron number 1 from transcript mgv1a024763m (locus mgv1a0 24763m.g) derived from phytozome v7.0 (chr-ID scaffold_159 ; pos 158728 to 159114)
aatttggggttggtcagtttgacgggaggaagaaattccaatttctttttttcttttttttcttttttttgtttttttattgtgttttgttctctttaattatttcatttatatttagtgatttttttcttttgtttttgtttaaaatggtggaaaaactaagagagatttagaggggcacttgcgtcttttcacacaaaaaacgcaccagcagtcgcgttggtagcgcgtgcatgacacgaatgagatagaggggggtttatgactttgactactaatcacaggggggttttagtcacttaattttacctagggggttttttggtgtttaggaaaatcacagggggtgtttttgcatttaactcttttcagagaggtgccacccaa

SEQ ID NO: 102311 - DNA, 861 bp, Mimulus guttatus
  Intron number 3 from transcript mgv1a020111m (locus mgv1a0 20111m.g) derived from phytozome v7.0 (chr-ID scaffold_3; pos 3366720 to 3367580 reverse strand)
caggattataccaaatagagaggtaagttgatatatatatatatatatatatatatatatatatgaaataaaacgtttattttgttaattgtattgatattcatatgatacaaattgatgcagcaaatagtgaacactttaatgaaaatcaaaactgaaaaggatgctgctatgcaaaggtgtgtgtatatatatgggtaatttacgtccacccctgaagtaaggtcaaattacgaaaaatcccttcatgtttgggtaattacaatcaccccttaactaggaatcttcttacgcgtccactcttgtagtgtcaaattcaatagaatcttttagtatccattgaatattctctagtttgtactcattttatgtagaaatgcagtttctgatgcaccattgatatttacaagccatacatcttatgatcatcttgtttcaatatgtgaagctcgaatggagtaaaacgagtacaaactggagaatattctacataatctaaaagattctactaaatttgacactcctaggatgaacgtgtaaaataatttatagttgaggggtggttgtaaattgtaattatccaaatataaggagttttttttgtaatttgaccttacctcgagaataacagtaatttaccatttttctttttgaggattttatttatttattttggataataacatttaatgatttggaacagtcctgcaactcctggctctgatactgaggtaaaacaacattgttctctgtaagagaagattttaattagcaactcattttttttttaaatcttttttaatattttttttaccattataaaattttattttctttttcaggaaatacagaaagagattc

SEQ ID NO: 102312 - DNA, 353 bp, Mimulus guttatus
  Intron number 3 from transcript mgv1a023900m (locus mgv1a0 23900m.g) derived from phytozome v7.0 (chr-ID scaffold_97; pos 28709 to 29061)
gcatctggtactttaagaaatttaatttgaaacgggccaagccgaaataaatttttgaatttcgtccactatggtcctgcaatatttgaccttgaaaaaaaaaaaatttggttccaaattcttttttttttgaagagaattggttccaaattctaataattttatatccgaaaactctgagagagtaggtcgatcagaattccgatataagttttcagaaattttaattttctttctgtctgaatttcattttcagaaataatttaggaagtttcgtactatttttcgagatatttatatttctatatatttcttatctaatggaataaacaacattggaagtccaggtagaa

SEQ ID NO: 102313 - DNA, 399 bp, Mimulus guttatus
  Intron number 1 from transcript mgv1a012606m (locus mgv1a0 12606m.g) derived from phytozome v7.0 (chr-ID scaffold_3; pos 3998516 to 3998914)
tctctgcgttggcctcactcgctcccttcccagtggtaccgtttgccctaatttcccccctaccttttcaattgttgattatcgagattaatttttgttttttgttttttaattttgcctaaataattgattttgaaggtgccctagattggacttccaacacttaattgaatacattttgtgcttgcaagctgtttcagaaatgaaaattaatttttttttggttggattgtgcattaagaagatcatgcatcatgacagaaataaattttgatatccattgggcttcgtcttcgtgtgcttaacttgcacgatgtcgatacgcattagagtaatcttgtaattgtgtttttgttgtttgaataaatagtgcctcgatacattgttggagaatcggag

SEQ ID NO: 102314 - DNA, 212 bp, Mimulus guttatus
  Intron number 1 from transcript mgv1a014474m (locus mgv1a0 14474m.g) derived from phytozome v7.0 (chr-ID scaffold_85; pos 470610 to 470821 reverse strand)
cctactcccgtcgataccaattccgttacccaaaggtacagttattcaattttaatatttcctattaaaattggttttttgggttttttttttttgtaattactaattgttcgtgaaattaccgaaaacaattaatcaatcaaagactagcacttttttcttcatggccttttgattttcaatatgtcttttgcaggttgcagaaggagctg

SEQ ID NO: 102315 - DNA, 641 bp, Mimulus guttatus
  Intron number 1 from transcript mgv1a004959m (locus mgv1a0 04959m.g) derived from phytozome v7.0 (chr-ID scaffold_64; pos 1339758 to 1340398 reverse strand)
cacaaattcgtcgtcgtcgaattttacgcgccttggtatttctcttgcttctcaattttttttttgttacgtgtttgttttgttcttttgtgtaccttcggatggcttaattagatcaactgtgcttagagtgtgtggatttgctttatattttgtgtttttggtctgctaattttcgtagatttggtatttgtttgtttctgtactttagatgctgtgattttttttttttgtattaaatagatcatattgaggtactgaattgatatacttgtccaatgaaatgaaattttgacgatggagttatgtcatatgtggctttcttcccgcagaacatttttaaatgtgtcgaagatcttcaaagatgaagaaactacatatttttcgaagaaaatgaaaaaaaaaacatttttgttaagtttgtgttgaaataattagtgatgttaattggtaattcggacatgttatagctaactagtagaagtgtattttgcttgtcgcattgttaattctattattacgaattaatgactgtcctatgtatagtaaatagaacagttgaggttaattgaagtttccatctgatatgttgatttggtgtaataggtgtggtcactgcaagaaacttgccccagaggtat

SEQ ID NO: 102316 - DNA, 337 bp, Mimulus guttatus
  Intron number 1 from transcript mgv1a014746m (locus mgv1a0 14746m.g) derived from phytozome v7.0 (chr-ID scaffold_7; pos 2340732 to 2341068 reverse strand)
gttacggcaggccctccatcaagcagttacccttggtttatttctttcttttcaactcttctacttcagtttttgtgtaataaatctttgtgtgattagggtttttttgtgggttttatttaatttaatttctaagaaaataaataatttcttttatgtgctgaacagtacagtataaataatttgggttggttgtcttttttttttctttatataatctgttattatcttcacttgtgtttttttttccaagtgggttttatttggttatttttgatttgtttttttttcttattatattatcctttcggttttttcgattttttgtctcaaaggt

SEQ ID NO: 102317 - DNA, 808 bp, Mimulus guttatus
  Intron number 1 from transcript mgv1a006575m (locus mgv1a0 06575m.g) derived from phytozome v7.0 (chr-ID scaffold_87; pos 595049 to 595856 reverse strand)
acgagttttcaatacgtcgaacgctgcaatataaggtatacattcattcggtttaggctctgtttggttcgtggattttgaagatgaggagaaatgaaaatgcaaaagcagatgaaaaacgaggaatttgatgatgatctctatatatagtgtttggttctaatatttaggaaactgattatgaatttgctttcgtcgaaaaaacattttctttaccctaattgaacatttgctttcgtcaaaaaacattttcttcaccctaattgaacatttgctttcgtcaaaaaaccttttctttaccataattgaacatttgctttcttcgaaaaacattttctttaccctaattgaacatttgctttcgtcaaaaaaccttttctttataaccataattattgaacatttgctttccacgaaaaacattttctttcgacgaaaaaacattttatttaccctaatgaaacacgtgtttgttgggattcggccatgaagatgaactacgtaccgctatggtgttttctcgaatgaagaagaattagatttgaagaagatatagaaaacctgaatgtgttttacgcggtgctttaattaatttgtttacttaacattttcgtcgatccaaacacaacctagagttttcaaccttctgatttgaatatcaacaaaaaatttgattcgcacaagtttgcctcattcaatttgcacgatttaatcgacaaatgaaatacgtgatacggttttgtttttttcttttttttttttttttttgttttgcaggcgcgtttacataggattcaacgcattttca

SEQ ID NO: 102318 - DNA, 972 bp, Mimulus guttatus
  Intron number 1 from transcript mgv1a010497m (locus mgv1a0 10497m.g) derived from phytozome v7.0 (chr-ID scaffold_4; pos 3014119 to 3015090)
aagttaaccccttctctgtaagtttcatatggtttatttttttcgtattatgttttgaattttagggagaaacaactttgttttcgcctttaattgctcgaaagtggaagcacattatgaatttagagggaagtatttgttgttgaagaatttggtatgattttggttgactctagggctaattataatgtaggtggttttgaagttcgtgtttaaattggcggaatgttgcttgtgaattgtgatgatcctctggttggaattttgatgtgctcttcatgtattcgcccgcgtggtattacttggcctttgacttgatttttattgtcgatttcaaaatttggttgcatctatgggtaaaatcatgattatatcagtaatgcatcttgtgggtgtgatggagaagctgttgtactttttaagtcgtgtagccgagggtttaatcgagttttaccacaattatgcttcaaaaattatggaattagatgaacatgtgaaaacaaatcttgctttcctcctagttttttggtgcatgcttgataagtgagcataatgaaaaagtgaaatattgttttgagttttagttgtagaagatggtgggcatgtatcgtggctttgtacgaacgggtggtagttaagaataattggtatttgtaatgtaatcccggcgggtatttcaggcaaggtgttgggatggcatagtagttgttcaatgtgttttagacactacgtgaacaagttacatccagcttattatgtccaacttcgtgaaatagagaattggcaatgcatccaattagaacaaagaagtgcttaatgaaaactggtagtgggttgaggttgatactttaatttcttggcgtgtgtagtttcgctgtactatgttcttttattctgctcggtaaaatttagtgctcctacttttggttctatattcaactttgaagcttcaatatacttcttgaatccagg

SEQ ID NO: 102319 - DNA, 629 bp, Mimulus guttatus
  Intron number 1 from transcript mgv1a020266m (locus mgv1a0 20266m.g) derived from phytozome v7.0 (chr-ID scaffold_132 4; pos 8886 to 9514 reverse strand)
aggaactcccacttctgccggaagcgccggaattcgtatgttccatataactgaatatattagtttcttgatttttcggtagcattttattattattttttatgtgttttgatgagagcataatttagtggagtgacttgcaacaagtattgttttgttaactgttatatagtatgaaaagcgggacaccgtgatgggaatgaacttgctgttattatctcagatattaggtttactcttttgagttaagtgagagagtgactgttttctggtttgcgagggttcagggaagcacatttggtttatctttatttttacatgccgacgtttattttgtgggggtttgaatatttagctggtgaagatagttgaaataaatgtgacctttcattctaatgcttgtagcaaaagttgaaattgaagttgtgcttctttagatcatacatggtaggtcaatgaagtcccactcttgagtcttgactgacgtatttaacctgtgcttacgactaattaatgatagagctgaattattcttagttaagcatcgaaatgtatcactaactcaatatagagctacaaaattcacttaagtaaatattttattgcaggcttggcaggggctactgccg

SEQ ID NO: 102320 - DNA, 1027 bp, Mimulus guttatus
  Intron number 1 from transcript mgv1a013416m (locus mgv1a0 13416m.g) derived from phytozome v7.0 (chr-ID scaffold_79; pos 340955 to 341981 reverse strand)
tctcttcatttcagcttcttcttctgctcttcaaagtaagatgctttccacgaaattcttctaccgcaatttttatgcatacaacctgcttgattatttgctgcagtgtcttttgagtatagaaagaaagtattgaaatctcacttgatctgcttgtgaacttgggtttgctttatgctctcattcattaattattctttggtttcttaattaacattatttactaattagagcattattctttcttcatttgcaaaatgagtaataaatgtgatggtacattggtggttactggagcaattattgagctttgctttgaatttattcattaatttgaatatagatctctagatggatacttgaatttttgcttgtactactgttttccacacacatttcaattagccatttgtgtagatttttctataaaaaagaagccattttttttaatctgcactaggaaggaatgttatagttagattcgtcgggcaacagtctcgttggctgacgattaaataataattgtgaagggcattgttctgaagcctaattataggagtatgtttttgtctccatgtagttggtatttatgttctagaaattttttaagaagagttaggtgggtaaatttgcccaaacttcacattcaaaatttagttgtaactcttgaatttccaaattaatgcttcttcaggactaaatatagagatggtacaatgcaacttttcttcatacttagtggagtttgtaatgcataagaagtcaattgtaaagtgttgtcgattaactatatattggctttagaaaatgtgatgtttctgcctatttcttttgtacgagtaagcattcgacattacttcaagctatggtagttggcacatcttcgaagctaaatatttcaagaattttaaatttccagaataatatctgcgcattctttttcccaaccttttttctattcggaatcgaaataaaacaaacgtattttgtgactgaaacacagataaagtgacaaataaccctgctg

SEQ ID NO: 102321 - DNA, 580 bp, Mimulus guttatus
  Intron number 1 from transcript mgv1a009246m (locus mgv1a0 09246m.g) derived from phytozome v7.0 (chr-ID scaffold_89; pos 981169 to 981748)
ccaccaaatatcacaacccagcaaaatattctccggtatgtacagagatttactcatattttatcaattcactggaataattgattaaattaaacaatcccagatgattttttttttctaatttttatgattaaaggtgacaaaccccatgtgcttatgtgctcatttgattaactgattaatatatttttttttaatcttcttttaccatttgatgggtatcaattttttttgtgcaattgggaaaatgattaatttaattttgattatctgtcgggttgcgtgattcttcgcttgtggcacgttgtttcgtgttctggatgtcttcttagcatgttatccgaatctcttttttgtaataataaaagtgggttgtggtgtatgtatctatatgtgtatgtatacttgcatctgaatcttggattgatttatatatattttaatattttatcttctaaaggttgaattttgttttttgcacgtataaatactatttggcgatggattttggtctgcacaaataattcttcaacttcgagatccagatttttgctttgttcgaattgcgaggtgggttttg

SEQ ID NO: 102322 - DNA, 991 bp, Mimulus guttatus
  Intron number 2 from transcript mgv1a009246m (locus mgv1a0 09246m.g) derived from phytozome v7.0 (chr-ID scaffold_89; pos 981704 to 982694)
cgagatccagatttttgctttgttcgaattgcgaggtgggttttgttcttcctttgtttttatgttgggttctgaataagaaaattgcggaattatttgccttcgtttttttccattcgttgggatatcgactgacgatgatttcgggtattactttcggttgatgattggggggattactttgttctttgagaaatgtaattcgtctaaagcgtaagatctggttaactatcttgtgtattttgttcttcttcgggaattttcttttagtgaatgatcattgttgaatttttcgataaagcttccgtcttttcgattatccttcttcccctcgaaaacccgttagtggcagttggtggtagtcgtttgcttcgtttgcataattaaattgcgagacattatttgcgtaattctgaagtttgtttgggtgaccgagcgttgcaaaaggataatcgatttatatttagttagaaattatagagaaaaaatcgtctcttgatttagcatatcttgttaacgcatctcttctgtaattggttgtataaatgtttcatttccaacgtgtgatctgcttggatatgaaggggagaaaaagaaaacattttcgtcctttcttgatgatcgttgttccgataatttcttttggagagggtgagtggtggtgggtgggaaagagtaatatgatttggtcgattttgttcgtctgtcgtgactttcgatggcggaatcttgcagaggcaaatgtaaataactgcagtgatagatgtgttatgagtatgtataacgatgctcgtttattctgtttaatcattgaaccctggtaggctgacatggtatattccctgctctataaacttatgaccatgtttttagttttaaatttggttcgataaacttacgattgtgttcgtatgcattatttttcgagtaaaattcgttacccatgttaaatagttccacatttggttttccgatctatctaggaaaaaaa

SEQ ID NO: 102323 - DNA, 664 bp, Mimulus guttatus
  Intron number 1 from transcript mgv1a014077m (locus mgv1a0 14077m.g) derived from phytozome v7.0 (chr-ID scaffold_163 ; pos 491912 to 492575)
ccgatacctcgtcggccgtctgcatcattccataagtgagtgtgtaggttttttttatttttatttttcgaaatagaatttggtgtttgaaataatcgatttcctgatcctaaacaaatcggggaaaaacagtccgaattttgacctaattttacgaagaagacgatcaaaaactgatgcaaaaatcggtgctttattcatttgtgaaattcggtaatgaattttcaatcctatatcggtagtaccaaatttaaatcccatctcaccggtttcttaaccctgcactactgattttttacggcagaaagagactatcggattcaactatctgcatagttgggtacaagtcactgttgtgatatatgtgtaattttgaaggtttctttatgagcaattatttggtagagtaagggtttaagaaaaaaacatgatgtatgttgtgttgagtttaagaatattcaaataagttcaagtggtaatatttccgccacatgcaacgggaaaggggttaagtcgaagcaaattaggtgcttatataattaagaaacgtagttatgcgttttgttctgtgctgtccttatctaagacctatccgataccctgatgttctgaattgtataattctccaggtgttggatattcactgaagatagttagtattgtt

SEQ ID NO: 102324 - DNA, 743 bp, Mimulus guttatus
  Intron number 1 from transcript mgv1a008679m (locus mgv1a0 08679m.g) derived from phytozome v7.0 (chr-ID scaffold_151 ; pos 314396 to 315138 reverse strand)
ccaggtatttctacgttcctcagtaactcaaaatacctgtaatttgttgttttttttctttttaaattttttttttgttgcagtaattacttgtaatattttatggcgtttccttaaattgatgtttgtttaaaatcagtagtttatttggtagaatatgatacagatgacaaagtgtttaattcaaatttagtattaaatattttatgattattgaagattagtttgagttatagtgaattattgtcttgcttgtcgcaaattcgcatatcgaacatttaaattagtgtttacttgtggtggattttaggactgtaagtctgtttaaccaacattcgactgtaataaatctcgtaaaattgaacttttcgatcgtaagagaatgcgttttaacaactgacttgttacatctatcaatgggtttgatgcgaatagtcgattcttgatgtagatttcgtaagaatcgggaagtttgtagttttacgtgtttttttaggtgttagtatatatgctttaagatttaggatcttgtttatgaaacaaatcgcgcaggattttcgcccgagttgcttttgcttttatcctcgtcaattgttgataaatttcgtctttctggatccaaactttcgttgtcttatgtcattacacatatactttcgatgtttttctctattacattgtctttacactaagctaatctaacgggcccacttttccactctacagatattcaagaacccgtt

SEQ ID NO: 102325 - DNA, 718 bp, Mimulus guttatus
  Intron number 2 from transcript mgv1a007220m (locus mgv1a0 07220m.g) derived from phytozome v7.0 (chr-ID scaffold_121 ; pos 231647 to 232364 reverse strand)
ctgctaaaacttcacccactcttgctgtcaaaaaggtacactatatatacacatgtttgatgtatgtatatatttcttttccctttttgcccttccctaatttgctgctctgaatgaaatgattgcatatgttaactgagccaattggggtttgtttgtcttgtggaaaaaaggatggttcggtttgtatcttgaaatctcgattgtggtggcaattatctcgttcgatcgaccttaggggaacgagtaataatgatgttgccgaatatttcgattctttcattctttaggatcttcttcaatcttggtgaaattctttagtagttatattactcgtcgtgtagtaaaatcatcgtaacatcgaaatgtgggtatatatgcgtgatacctcttacgaaaaaaaattaggaaggaaaattggaaaagtgggaaaaacgagccgtctagcatggttgtggacacattataaaaaaacgatggtgtgtatactatttgtaggtctacttgatctaaccgatgaaacttgcgatttttatctcaactgttaaaaaaacagctacacttatgtcaactctagatctactaaattattataaaaaaatcaattgatgaaactcgttaaatctcgattgtttgatttaatatcaagaaagttttgttcgtcttctttttcattttttatttattttagttctgcagaactataagcacaagagaa

SEQ ID NO: 102326 - DNA, 1031 bp, Mimulus guttatus
  Intron number 2 from transcript mgv1a013379m (locus mgv1a0 13379m.g) derived from phytozome v7.0 (chr-ID scaffold_2; pos 1214709 to 1215739)
gtttctgctaaggcactgtaattatgacttagttcaatctgattatctctatgtttgtttgtttgtttgattttattttctatttttttttagataaacatagattgatgattaccgctgacttgtggtgtttgggagatctattaattttatttatttttattgttctcgatacatgtctgatcgagaggtaatggctttggattatgtttttcaactcaccttcctcaggtatcgattacgtacctgtaggaaaagttcagatgctcgattcgtagatcctttgctgtagattctttttagagtctcgaagtttattatctaattgttgacggatcgccttgtcccggatagaatgacttaatatattcttttactaccgaatatttcaataggtattcagatgtttttaatcaatctcatagtcgaccagaaattgaaaagaacgattgtaagtatcattcttctgtaatatcgaaaaatatttactcactttttttatccataagaaatggcacaatgtggtgcgtctttcgagatcgctactcgctatatctagttgctaatcatgtgattttgaagtcgacgaaaatttggagaaacagcatttgaagctgcctcttttgactactgtcctaagctattttaggcattgtttatctgttaagagagagaaacttccttgtgtacaataggatcagtttagttgtttttgacgtttatgatttagacactgggtctagctcgtttaagatgaataaaccggcaatcagttcatgtgttgtatgagtagcttactgctcagcgagatacagaatcaagcatgttgctgcacagttttgatactacccaaacaatgaaagaaatctgttcttctaaaaattttcgagattgttttgttttattccattcgaagtgcctgaaaaactgaatagactgtttatttaaaaatatggtaaataaattttatgctgatttgatgatttgccctgacagtcactggctaaagaaattgtgagatctaggaaaac

SEQ ID NO: 102327 - DNA, 850 bp, Mimulus guttatus
  Intron number 1 from transcript mgv1a001712m (locus mgv1a0 01712m.g) derived from phytozome v7.0 (chr-ID scaffold_44; pos 908576 to 909425 reverse strand)
tgctgataccgtacccgagtttagcctgtcacaaggtaacgctataatacatgttttgcttatttacttttcaactttcaattttacttttgcaaaaataaatttaagaaattatttgatctatacaatcagaaatatttgatttgaaatagaaattaattttacataatttacaaaattcatctctaagataaaatttctccatattaaagccaattaatggatctgatcttaatatttgatctcattttagtccttcatatttcaatttgtctttgatatataaaatataaaacaaaaattaataagtactattatgatctataattaaaattttcaattaaaaaagtaaggctatgttttacaaaatattagattttaatatgcagagaatacattttgaggaaaagagttcaatatataaatccattcataattaattataatatatccttcacatatatttctctactttaatttacatttttttatgttaaaattgaagaagctagataaatttatatattacaatttatcaaataaaattataaaaacagaatattttatccaaattattttttctctctgtaaaaattaatgaaaaatgcaaattgggggactctaaggagaataacttagaaatgaaggggaaataagataaataaataaaaatgagggggcaaaaaagacaaagtaattgtcaaagttggactagcccatcaagctttaaagtttaatggaccaaaaaaaacaaattgaggggactattatgcaatttggaaatttaaaatactaacataatttaatcccatcaggtacaaaaattgtgcagagtatacggtgaaaacgc

SEQ ID NO: 102328 - DNA, 505 bp, Mimulus guttatus
  Intron number 1 from transcript mgv1a008742m (locus mgv1a0 08742m.g) derived from phytozome v7.0 (chr-ID scaffold_445 ; pos 25947 to 26451 reverse strand)
atacagcaccctattcaacgatcgcgttcatcaaggttccatttttcctttttcttctttttataattattaattcatttttttctgttcgcagtagatcctttattcatgctgtattacgtattttgattcgctgttgtttctgtttgtgtttgtgtttttcgtgattccaattttgtgaaaatgttgaacgagttgatattattttatttattaatttctgagtgtcggttgaattgatctgtgctgtgtaaatcgcggcttgtaggtatcggagagtgatgatctggtgtttacatgttgttgtgttcatgcatttttttctgtaaataatatttttttttacttcttgtttctatcgattttttttttcatttaattttttcatatgagatctgaaattcatcttattttcactgttttttcagcattacatcagttaagagaaggtgatccgttttgatttgttcagtgattagctaagggaaagaagaagaagaaaaaa

SEQ ID NO: 102329 - DNA, 288 bp, Mimulus guttatus
  Intron number 1 from transcript mgv1a005726m (locus mgv1a0 05716m.g) derived from phytozome v7.0 (chr-ID scaffold_90; pos 962398 to 962685)
ttcagacttgtcttctcgcttcaatcaaatcctaggtcaggtttcgctgcccctctcctctcgattccgccttcctcttcttcctctctgtaatttcttcatccgagatctgttctaatggcgcgcgccgcattccttcggattatatttttctatgtttttttttatacttgtttaatctcgtattttgtccttttttttttttttcattttgtttgtagcaattgacgttttgtgatggtaaatccgtttgtttttgcagtgataaaagatccaaaataaatcgcg

SEQ ID NO: 102330 - DNA, 583 bp, Mimulus guttatus
  Intron number 1 from transcript mgv1a008040m (locus mgv1a0 08040m.g) derived from phytozome v7.0 (chr-ID scaffold_60; pos 246126 to 246708)
agtcaaggctcgttaatttattttattaatttgcggtataactttttaaattcgttgaagtgcgcgtttcttatcttcgacgaactcttgtgttttatgctgatttttatgtggcctttgctgaattgtttttgttattctttgcttttggggatgatttgttttatatctattgttgtttctttatgtggatggtttacagcttaaaccttcttactccaattgagataactgttgattttgatgatcgagtttagctgatgagtgtaactttcatcaccgaattagaggagtgttcgttattatagtttagcggtgttcatgtgcatgattacttgttagagttaccgaggagacctattttttgtgcaatttattttgttcattaaaaatggtgcatcctgttacgtggtgaaaatagaggagagtgaggatttgaatcattgaatccacctctagtagtcgaaactaggtaacatttgtcgtaataagagttggtgaaatcttttttgtatcgggatatagtttttattgaacttctttactgcagtgaatgattgtaatgtgatacttttgtgacagg

SEQ ID NO: 102331 - DNA, 735 bp, Mimulus guttatus
  Intron number 2 from transcript mgv11b024103m (locus mgv11 b024103m.g) derived from phytozome v7.0 (chr-ID scaffold_5 3; pos 569390 to 570124)
aaaccgcacccagcaaggtttccttcaagcccagggtaccaagggaatcataatcgagtaacttgttaaatatatgacaagccaggtcacggtactcgtcaatgccgcaaacttcttaatatattcccagtgttatcgacaccaccaactaccaactctagtgctaatcggtcgtcaatgccaagaccacaggccaattacacctctcaatctccgaataacaatactaattggcttgtggtttcgggtgcatctcaccatgttacgtacacatgatctgcaaaacttatcactccattcggaatttgatggaagtgaaaaaataatgttggggatggtaaaaatcatcaaatttgacacacgggttctacctcattactttgttcttctcgtcctctttatctttcaaatgctctttgtgttccaaagataaaaaagaatcttatttatgtgtatcatttatgttctaccaataatgtttgagttgagttctcacccttttcatttgttgtgaaggattatcgaacgggggaacctctacttgcagggaagcctagagacggtgtgtacccatggcctacaaacttaccacataccattaaacctgtatcaccacaagccaatgcgacaaccaccatctctgccacaatggcaccaacgttttggtcacccctctactccaattcttcgtcaaattcttcatctcatgaatatctcttctccctccttagataa

SEQ ID NO: 102332 - DNA, 589 bp, Mimulus guttatus
  Intron number 2 from transcript mgv1a012012m (locus mgv1a0 12012m.g) derived from phytozome v7.0 (chr-ID scaffold_121 ; pos 178753 to 179341 reverse strand)
tcttttctccgggcgctgcaaattcacaggttttgctcttaatttgtctcactgaaagattcttattttattctaccatggcgatttttgtgctttttatttgttatagattattggatgaacgcccatcatgcgtaagtgaaatttattgtttcaagatgatgcttgtgtacaaacatgcaggtttagcttcctgattactgaattgaatagagtcaagaatggcgtttttaaataagttatactgcgttgataatgtcttatatagatgtagcataaaactgtaatttagtaatttagtcatcgaaacttgacttgcttattgttaagagctgtctttagaaattgcgtatagtagttatctcacctcttccattttagtgattaaaagagaaaacgtccctcacttgacatcaaaacataatttcactgttttctgaagaaaagtatgttttcttttttgttatggaattttatttgttttttttaaaaccccattggccaaatcacaatattgagagagttcacttttattgcacctatttatttcttttgaatgaaattaaactgcattatttgttacagaaca

SEQ ID NO: 102333 - DNA, 780 bp, Mimulus guttatus
  Intron number 1 from transcript mgv1a019968m (locus mgv1a0 19968m.g) derived from phytozome v7.0 (chr-ID scaffold_40; pos 172650 to 173429)
ctctcgccaccttagacaaattaaacgaggtacaaacattgtttcttttctttcgttaactcctttctcacattgattgtttatcgaagattattcagtaattacggccacccctgagttatggttaaatgacgaaaaccccccttctgtttgggtaattacagtaattacagtcaaccctcgactatgtattatcttacgaaaatacacctctagaggttaatttagggatgttaaatcggtaaaactgaaccgaaatttcggtacgccaacatttcataccgtttaccgaactgaatatacgatttgattcggtaaataaccaaattacataaattttatgtaaaaatatttaaaaggaagggtggctgtaattacccaaacaagtgggtatttttttgtaatttggtcatacctcaagggagtggccgtaatttgccctaaattatttttatctagataattgaatgcatgtaagatggtattggctttaactataatatcattgacctttgaccgagagaattctgatctctcggagagtaatgtgtagttccattaatggtcttctgtgttgttcttttgagaagaatggagtctacataatttagttctcgtgttcgattgagcgaatgaattttaattctgtacctactgctctgtttcagacatatataactttaatatgtattgatcgtaaaaaaatccgctacggtgaatgtagatgtttgattgccaacatggaataatcgattattttttcttgtgtagactcttgag

SEQ ID NO: 102334 - DNA, 973 bp, Mimulus guttatus
  Intron number 1 from transcript mgv1a009411m (locus mgv1a0 09411m.g) derived from phytozome v7.0 (chr-ID scaffold_51; pos 346996 to 347968 reverse strand)
caagaagaaacacaagctggaatttgcaagtcaaggtttgttttcttgttttctagatagatctgcttttaattttttttttttattctatttttttttttcttgcatggtggatgctctttgtttgctctgtgtgtttatgggtcaacggtgggttagaataaaatatttgacaagtatccaatttggaattgggacccttgtcagcaagtgggagttgtaagagaatcaatcacccccctttgtagtgtttggtgatgatgtgacaagacaaaagatctgtcttttactcaataattgcaagtatgcataaatggcaatcaaaagaataaagaatggataagggaataatttatgagaagatgatgtaactaacatgtgtgtgtatctatctctagatacaggtggactatgttaatactgaagaatttcgatgtgattcttgatcttgtctatgcatatgctaacatgcttcgtttatcatctccgagatcatgcattttttttgactcggttcttgaatgtagaatctatttgttaccacttccaggtggagttatcagatccttagtcgaggaaagaatatttgttatcgagaatctagttacgttgcatatgttaagttatattaactccgttttacatgaatgatatttcttttgtttttttttaggaaactgataaatgcatgctgaaagtgtatctaatgtttttttttcttcgaggggataatacgagcccaaaaactttggtgaatattgagaaatgccgccttttttcttttcttttttaacttcgcccctgataaaggtcttccctgtaatttctgcatgagcacgaaattgaagtcgagaaatcatatttgcaatatgctagtgaattttcttttatttttattgaattaattgagcaaatccgtgattcctcatgtgttttaggtcgagcgacagaatctgtcccggttggtggaagt

SEQ ID NO: 102335 - DNA, 264 bp, Mimulus guttatus
  Intron number 1 from transcript mgv1a008441m (locus mgv1a0 08441m.g) derived from phytozome v7.0 (chr-ID scaffold_39; pos 275060 to 275323)
gctacacacgcggatcgctcaagttgctcgatcaggttaggtttctctctctctctctctctctctctctctctctctctctctctgttaaataatatacgatgattgtaactgccggtgaagtaagataggatttatacctctttaacttcttctatttaattttgattttttgatatatgtggaagtttttgatttcgtgtgttctcacttatgtttctgtgagcagagaaagcttccgctcgagactatttatttggatat

SEQ ID NO: 102336 - DNA, 949 bp, Mimulus guttatus
  Intron number 1 from transcript mgv1a026663m (locus mgv1a0 26663m.g) derived from phytozome v7.0 (chr-ID scaffold_45; pos 707547 to 708495 reverse strand)
gagtgatctgtctaagaagaaattcagtcgggaaaaaaaatctgtcgggaaaacgtgcagaaaaacgtatcgtttggtcaatttccggctaaggggcgccatcggggtagcattttgtgtgggttgtgcgtgaaaatggtggaaagtttaaacagtaatgagataatctgggggagagggcgttttgaaattgccaaggactgaattgaaaattctgaaactttcattttgggtaatgaaaattttggggttaatctgtaattttaatttttttgattttaagggtatttaggtcttttcaggtcagaacacgcacccccagccgcacaatccgcgcgtgaagaacaccataacccgttagggaccttattggctttgactaactttcataggggggtccgtgctaatttttttaacacaagggatttttcagcaattagagtttacataagggtggttcttgcaaaaaaccatatatatatatatatatatatatatatatatatatatatatatatatatatatatatatatatatatatatatatatatatatatatatatatatatatatatatatatatatatatatatatatatatatatatatatatgtgcaaatctcaccttactatttgaagttgcattctatttttatattacaaacacatattttttactgagccaaaaacacgtacgccgacgagcactcttgactcagataatcgttcaccagacttacatttaaatttcatctactgagttacgataagtgaaaataaggtcggtaactaagagggcctcgttttcgatttttgcctcgggcacaattactttttttttttaataattaaaatgttgaaaccaatgaacttgtaaaagatatacaagctagcattattgcttaatcagctgactttaacatatcatatagtattatcgcagcgtc

SEQ ID NO: 102337 - DNA, 601 bp, Mimulus guttatus
  Intron number 2 from transcript mgv1a019210m (locus mgv1a0 19210m.g) derived from phytozome v7.0 (chr-ID scaffold_549 ; pos 33083 to 33683 reverse strand)
tcttttctccgggtgctgcaagctcacaggtttaactcttaatttgccttcgttcgacccgttgtttgttatgcgatttttgtattctaccgtggcgatttttgtgctttttatttgttatagattattggatgaacgcccatcatgcgtaagtgaaatttattgtttcaagatgatgcttgtgtacaaacatgcaggtttagcttcctgattactgaattgaatagagtcaagaatggcgtttttaaataagttatactgcgttgataatgtcttatatagatgtagcataaaactgtaatttagtaatttagtcatcgaaacttgacttgcttattgttaagagctgtctatagaaattgcgtatagtagttatctcacctcttccattttagtgatttaaagagaaaacttcccttacttgacatcaaaacataatttcactgttttcttaagaaaagtatgttttcttttttgttatggaattatttgtttgttttaaaaccccattggccaaatcacaatattgagagagttcacttttattgcacctatttatttcttttgaatgaaattaaactgcattatttgttacagaaca

SEQ ID NO: 102338 - DNA, 477 bp, Mimulus guttatus
  Intron number 2 from transcript mgv1a019857m (locus mgv1a0 19857m.g) derived from phytozome v7.0 (chr-ID scaffold_5; pos 2849568 to 2850044)
taatcagatttctggccattacctttattcgccaggtatatactattttttatgggaaaagtacagtttgcaccgtcatgtttgcaccgatttcgtatttttgtccctcgtgcacaaaaatacacatttgattcctcatatttaaaaaaaataaacagttttagtcatttccgtcaattttccgtttgtactaacggaatcaagtgtgtgccactaaaagtgttaagctattgaaacttgatggaccaaatgtgttttttatcaacatgatggaccaaatgtgaaatcggtgcaaataagagggatgaaaattgtaatttccccttatctttatctttctttttgtttcttctttttttattttacgtgttaattagtttgttttagtcctatagagtagtttctttaaattgtcaaggactactttttttttatttataatattatttggcaggaataacaagaagtttccaaaca

SEQ ID NO: 102339 - DNA, 755 bp, Mimulus guttatus
  Intron number 1 from transcript mgv1a022539m (locus mgv1a0 22539m.g) derived from phytozome v7.0 (chr-ID scaffold_199 1; pos 5217 to 5971 reverse strand)
cttattttcagcttcctctcccccattccaggtattttcagtttcttctacctgatttattttttttaggttaaattatcgatttgactcgaatttgtatcgaatcgctgtcatgaatttattgccacatctgggtataattaattccgttttgagtaggctgtgtggtgaatttttgtcttgattttcagagttcaatttcgtagaaaaatcgagtttgattcggtcgagtggtggaaatgtactaacgtgttaatgtaaaaactcaaaagtgtaggtttctaattttttttgataattaaaaaaataaaattataggttgactgtaattactatgaatttgtgtaaattgttcttattttacctactgtttggattaatttattcaaaactggggttctctttgcttattttaatgaattaaatctccccaagattcaatttttatcgtttaaaccacacagatacactttttcttttctttttttgtcgaaatgagttataaatgtggacgtaaaccgttaataatttcgtaggactactacgagacggggattatgggtaaatttttcgattctcgttctcgagtggaatgtaaagattggctgtattttatcccatattacgcaatggttatagggaaaatgtatatctaagcgcacaagtattttcaaaaactgtagtagtagaagtattgtgtcatgattttccggtgagtttgcagatcggtataacaccgccctcgtttgccgcag

SEQ ID NO: 102340 - DNA, 577 bp, Mimulus guttatus
  Intron number 4 from transcript mgv1a014709m (locus mgv1a0 14709m.g) derived from phytozome v7.0 (chr-ID scaffold_39; pos 841502 to 842078)
aggtgataaccctttgttgttaattgatttatattacattttgggattgaatgtcatgccatcactcggtacaaaaaaattatcagaaactatgaatttaattagatggttaggcaaaattaagggaaagtttgtaaattgaagggggtgttagataaatgagctgtgtcttcataatttctccatgatactcctttgacaatagttagctattggctctatgtaatgtctgtagtaaagtgagttgttggttaagagtaatcaaactacactatacactgcatcacatctaattgtgtctggaaagtttgtgctttcattttcgattttatgcaccatggaaaatcatgaactatcattaccagtgtgtatccatgaactatcattaccagtgtgtatctaaactcctttttctgattttatgcaccatctcattttttgctgtaatttgttttctataacgtgaatatgcaatgattgagtaatgtttgccctcgttatcttgggtttaagagattcttctgctcaccatttgttttatatttttggctggtggtcttacaggacgagctgagag

SEQ ID NO: 102341 - DNA, 951 bp, Mimulus guttatus
  Intron number 1 from transcript mgv1a003321m (locus mgv1a0 03321m.g) derived from phytozome v7.0 (chr-ID scaffold_11; pos 1419880 to 1420830)
gattcaaagtggaggtctcggaatcttcaatcaaggtgatttacgacgaaattatcaagcgaattgtagccatttgtgaacagatcttaatttttatttacagttttcgattttttcctgctgtattttgcttgtagctgtgaattttagccagatttcactagaattttttaatctcatcaaaggtatttggtctgcgcatttagttgttagcatataatgcagtagttaatgacgtaagttaagattaatccgagttgaccggttgtgtgttatgctaattgcattcgctggatgttcttagtatttagtagcaaattgttatgtgggcacaagtaatggcaatttagtgattgtgtttcaaacaaagatgtccaggaaaggtaatattttaagtaattgtacaagcaatatcaagaaaggatatgttttaaaattcattgtttaatttggatgatgcagtttgtgacatgcattagtgagtttgaagttgcataaagttgaaccaaaaattgagaaggtaaattcattttacaatgatttataggtaagcagcacgatggctgctccttttgttgacaaagaaaagttgcaaatttataatgcatttcaaagttgtttcgaatttagtatttcatgtattatgatactgtgagagggaaaaataactttgatatcaaggtaaaccagtcgtaagagtgggtatgttgttcattgaacatatctagaaagggatgcatctttgctattaggagaagatagacatttcttcagtgatttcacatgtgtgccattaattgcaatccgcatttgatgtttgatttaatgacatccttctttgaaatagttgcaaggttgtattggatttatattatttcagatctgcgttaaaatcgaaagttgaacctgacatctgttcgtgttatgctttatcttatcttggatatcaga

SEQ ID NO: 102342 - DNA, 859 bp, Mimulus guttatus
  Intron number 1 from transcript mgv1a001762m (locus mgv1a0 01762m.g) derived from phytozome v7.0 (chr-ID scaffold_53; pos 453051 to 453909 reverse strand)
aacacaccaaaactgtcggcattgtccatttaaaggtcggtaaccgataaataataataaaaaaaatatataaataaattttaaatttgaggtgtagaaagaagagaatggatgtttaggaggagagatgtatatgtggggagagtgaaagtgaaggattgtcttttatggtgtgcagtgtgtactaatagtctcaacacttgtacacatataaagtattttttgccactataggcaaaaaattgaatcccaattttttttttaccaagtctcgttaccatattttgttcatgacaattgacagcagaaacaattccaattgcacgaatagccaccaaatatagctttgatatctgagccatgatacacctttttttttttcctttctttctttgctggctgtaaattaataaagatttccctttaaaatgaattttgaaaacatttaactgggtgtgaatctaaagtgggtcacatcagcaggtgagtgtttatgagagaagccaaaaaccaaattatagggcaaaagtggtgtaactgtagtctagctattttaatttccttttttttttaattgatgtctggtcacatcaaaatcttctgggggttcattttttttttgactaattttgttactgtataacagtataagtttaaaaagaaatgacaatttctataataacatagtcggtggtaacactcttgatgtgtccggaaaacaaagtaaatatttaatttgacgggtcgacccaatccgacccataaggaatagttggtagtgaagaagttactagttgttgtttattgtgttgaagaatattatgaatacagatctcatcgttccgggagagcaagtcag

SEQ ID NO: 102343 - DNA, 660 bp, Mimulus guttatus
  Intron number 1 from transcript mgv1a022961m (locus mgv1a0 22961m.g) derived from phytozome v7.0 (chr-ID scaffold_131 ; pos 643800 to 644459)
tttcgatctatcaagtaactttaaattgtcttattattttggaaaactattttaatagaacattttagacatacaaatgagtatctgtattgttgtcaaattttcctattttagatgaatgatttaagagatattaattttttcaaattaatataataattaatctatttggttttgttaacttatatttgtttttctcacgtttgacatttatgtattatatatttgttcatgattaattgcaactaaattgatatttatttattttaatgagacattttagactatagcaattacctaaataaggggaaatttgggatacacccctagttttgaaaatatataagcataggtcctataaatttttcttctctagtcaaaaacccaaattctaatcttaatttgacagacccccctggacaaattgaaatacccattttgcccttttaatttcaatttaaaaccctaacccctctctcttaactctcgttctatcctccctcctcccaccgtctcttccctctttcacctcccacctgctccgctgctctgccaccggcgcaaaaccgccgctgctccgccactgctccgccaccggcataaaatcgtcgctgctccgcccgagccttgtgccgctgctccgccaccgtgctgctcggt

SEQ ID NO: 102344 - DNA, 761 bp, Mimulus guttatus
  Intron number 1 from transcript mgv1a014357m (locus mgv1a0 14357m.g) derived from phytozome v7.0 (chr-ID scaffold_17; pos 1199508 to 1200268 reverse strand)
tcttgaagaaaataggaatttctctcatcaatttggtagggttctcctcaactttttaaccaatcagtacgttttaggcagttgttttgagatttttctgcgaatttgtgtttcggagcaatatgttagggatttgttgtatatttgtctttgatattgtcttgcttcgttactgctaatattttatttggttgatatgtgtgtgtgtgtgcgtgtattagtgtgtgtgagagagagagagtgttggggtattttatgaagatgatttggaatgtgttttgaaaaggggaaaagtgttttgtgtggaaattgtatgaagtattttgttttgttttaagataatgaaaaatggggggtggaattaaacaaagctttccctatcttgctgtgttatggttatggatattgtttcgtaatacgatatgaagtatccgtgaaatgatgtggatatttaggctttgagatggaaaattttcacgaaattgaatagtgatatgatgtgtgtgtgtgtgtgctttccttcatataatgatatgattatctggcagattttgcatttatcgtggtttctcgttgaagttaaataatctcttacattagagtatgtacaattatgatgttcttgttgattactagctataagtagctattgtgtatgcagggtgatgggcttaaagaaatctcgtttctttgctaagtctttgtatgaaattactgataacctactgtatcgtctttgttcaggagcatttgcatcgttc

SEQ ID NO: 102345 - DNA, 810 bp, Mimulus guttatus
  Intron number 1 from transcript mgv1a017422m (locus mgv1a0 17422m.g) derived from phytozome v7.0 (chr-ID scaffold_195 ; pos 263007 to 263816 reverse strand)
tattgtcaaaagcaagagtgttaacgtcattggacgtgagtattcgaaccgtttattaaatagtttgcttgtttttcaccatttgtttgcttaaattgcattccatatcctttgcattgtaactatacagacatccaaaatacgtagatacgaatttgagtgtctagctatgtagtatgaaaaacttcaacttcttaaagtttctgtgtttcagacactcgaggacacatgccggacaaattatggaccatttttacatgtttgaatagcaaatttccaagtatctttgttgcttccctagttatttacatgatttaatgatcaattggaaattgatagttgatagtaaaatttattttgaatatgcttgtatgaaaaaatataaaagaatttatgtaattacacccctataattttaatatttacattttcccccgagctctcgtattcttattttttagatatgctgattcctcatgtccgttttcctgtttcccagtatcatcgtttccctatccgtgttacatatgtgtcgagtgatagaaaaacatgtaaagaatagttaaattttgatcggatttagattatgcttatcttgaatagttttgcttttgagtctattagaaacgaatgtctgctacaactcgctcgaacgaaatcctctattgtttatggtgttccatctaatatttcaaattcaacaatacacgtcatgtataaaacgacattatcactatgaaactcgcgtgtatgtgatttttttcgtcaactttcaatatttataatgttgaattcttcccagaaaatttt

SEQ ID NO: 102346 - DNA, 689 bp, Mimulus guttatus
  Intron number 1 from transcript mgv11b015225m (locus mgv11 b015225m.g) derived from phytozome v7.0 (chr-ID scaffold_2 25; pos 86055 to 86743 reverse strand)
tccatttgagcgagtgtgtttgtgcatgtttgttgatttgtattaatgtcctaggattgtagtttgtgttttcatgatccttcttgcgaatgcagttttgcgtgagtagttttgtgcatgattttgtacttttacttatgtgcgtatcttttgtagcgagtatttttgtgcacgtttcttgatgcgcattcgtgtcctcgaactgtagcgggtattttcatgatcgcttttggaatccaatgttgaccatgttcgagtccgaatttgtaaatttgacattagacaggaatcgtagccagctgaaatagctttctaatgccgccggaaccaactgatttggagtccggatgagaaatttatgctcgacttcgtggacactaccgaagatgttgagggatcctctcttctaattttattttattttcctaactgcaactcttttcttactctttgatcatttttgcttcatggacacctcattatcaatttgtacctatagaatactaaatccaccaattaaaaaagaaatataaattaatccataaaaaactccacgtaaacgtaaacgttgagtgttatttctacactccactgtatcttttgtatctagtgttcttgctgttgtttggttatgcgtattaaagtcctagtatttgttgtactccgtgtttttaagaacgttgttgcga

SEQ ID NO: 102347 - DNA, 593 bp, Mimulus guttatus
  Intron number 2 from transcript mgv1a008291m (locus mgv1a0 08291m.g) derived from phytozome v7.0 (chr-ID scaffold_92; pos 501853 to 502445 reverse strand)
tctgccacaccgacgcctacacctggagcggcaaggtactcccgatttttaaaggaaatttccaccattttttttctagatctgttaatttggagaatctggagtttttaggtttttttttttttgatctttaatccagattatgtttctgtaacttttaatcatgaggaattggggattgttcaaccttgacaatattaaaatattatttgaactgaacatttttattaattgatccttgaagcagggattagaatgtgtttgatagaatgtttttaatattgaatgcatttcagaatgagtcaccataggcagactggtttgagttgacctcaaccaacttgtgagattctgttgagttgacttcaagcaacttgtgagactaatttattattgccttctgtttttttttttaatctgaattgcctatctatctttgattcttgtaactattaattaatggaatgaaataaataagttcgaaaaaaaggagacagaaaataaataaatttaatgcttccgttgtgtaaggcattgcacagttttctaatcgatagtttatcttccttgaaggatcccgaaggtctcttccc

SEQ ID NO: 102348 - DNA, 694 bp, Mimulus guttatus
  Intron number 2 from transcript mgv1a005656m (locus mgv1a0 05656m.g) derived from phytozome v7.0 (chr-ID scaffold_89; pos 861437 to 862130 reverse strand)
cacaagttggaattcatttcgtttaaggtttcattctagtaattttttcgttgtgaaatcttgataaaactaatgatatgcaagcgattcggctgcgacgagttggaccatgtccctgtgtttgtgtcgtacgaaatgaatggttctttgaagggccctcgtctaaacgtattgattggagattgaattcactcattatatcccaaaatgactataacttcttctaaagggaaaatgttttttttttttaatcttctaattagctcatttacattggaaagaagcttaggttcatatctactttctatgggtacccgttgcatagagttatataacgaattcctgatgaatattgagaataaaggaatacactagacaatgttttctgtgggaagttgttggagttgcttccgatctgttattacgtttgtccatttgatttacagtattagcaagaactacctaaagtttcacatatgatattaagaagtacccgtttggattttgtcagaatgcgctctctgatagtatagttaccctcttacgttttatctggctcctagttatgaagattaagcaagacgagtttcatttttttttttttttcctgtttgtgtttgtatgccattctcaccaacttctaagtgaatatttttcaggggagggtgaatctaaaaaatcctgatcatagatt

SEQ ID NO: 102349 - DNA, 640 bp, Mimulus guttatus
  Intron number 1 from transcript mgv1a024191m (locus mgv1a0 24191m.g) derived from phytozome v7.0 (chr-ID scaffold_264 ; pos 61144 to 61783 reverse strand)
aattgagaaggacaaccctcgcgttgcttatttatgtaagattatcatttatttcatcatgcattcatgattcattatttgcttgtctgaaagggtggcttacgcttagcttttgaatttggtggtcttttaattttccttatttagaattgaatttaactgtcatgtggcttcttttcttagtatgccaagaattacgggttttgtatttttgatttttttttttttttttacgggtttctagatgtgaacggcttcaattgacgcatttcagtttgacgacgatgtttcttgttggtaatcagaagattaagaaattttgttgtttcagtgtatcgacagcactatgttgatactaaactgaaataatcttttatcgaatcgggataaggactaaatgtttgtttgattctgtattttctttttaagaaaaaatagataacatacaaacttaatacatcaaacatactgtctaactgtagccctagtatttggttgactctaactaccgtcgttttaagcagtaggacgtattttcgttaatttaagaacttgatattcgtttacactttgactagagcagtattcttctcgttttttttttttttttttttttgtttttttggaataggccgcttcc

SEQ ID NO: 102350 - DNA, 554 bp, Mimulus guttatus
  Intron number 3 from transcript mgv1a012593m (locus mgv1a0 12593m.g) derived from phytozome v7.0 (chr-ID scaffold_54; pos 760092 to 760645)
ggaggtttgattctgaaacctgcatcttattttgattataagttcatttaattgttggataaatttacaaatacgaataggaggcgtaaagtccctgggtttgaataagtgaactgtcttagagtatgtattttgattcttgatccatctcctatgatggatcttaagatatacatcttggttttttaacttagttttggtaatctcttttttcaaatatggggttatttttcaatgatataattgtctatcttatagtaattgtatattgcaaactgagataacataaaatggatgtctagacatcctattcaaatagtcgtcgtagctaagtgtttctttctgatggttcatgtattgaaatatgtgaagattttttgacaatgatatatattggtggatgtgcatcaagttatatcggttcactttcccaagttaacagtatttttaggtgaagagtgaaaataaagattactatcgcagctacaagtctaaagaaagaaaattttgcataggtttgagtcttatttaatgccttttgttaataggttcgt

SEQ ID NO: 102351 - DNA, 861 bp, Mimulus guttatus
  Intron number 2 from transcript mgv1a009544m (locus mgv1a0 09544m.g) derived from phytozome v7.0 (chr-ID scaffold_7; pos 2990021 to 2990881 reverse strand)
ctgtaaatatcattctccttttataatgctctgaatacatagcttaagttgttgtcactctgaaacaatttcatccattagaaatgatgtagtttttgtaatatgccgtatttgttatgatatttatttttctgcataaattataatatagcgcttcttatattataggaattcatttttatagtgcttgttatataccattggttataggactgtattgttcctttttaacatccagtagcatatatacgttctgacaggcttctatcgaacgatgggataatccttcttttttaatttcctcctggaaaatgttatattgaagaataacgtcaatgaccattggaaagtatgacttgatggcgcagtacgatatggaatgaacttcaacagttctttatatttgcagttaataattatatgtgttgtagagactcgcaatttgatttggagaagatgaatctaacactgacttgacgttctgtggtttttactggatctaacattgaaatatcttgagaagttctattttcttacgtaactggattagacgatgaatgagtgcatcactatcgaatagttgagtgattttaggagcccctgtatttaactcagaggaaaggacatatgatgttatatggttatgaatttagaagatgcatattagatttatctggtatgtaatcacattatttgctctatcagttgcttaacacttgacattatatttatcctttgtgagaaaggctgaatgctttgtggttcttagatagttcaatatggtcaattgtatttcatatctaagatcttaatttatcagtctcgtgttttttttcgtcttggcttgagttattctacagc

SEQ ID NO: 102352 - DNA, 1013 bp, Mimulus guttatus
  Intron number 1 from transcript mgv1a015873m (locus mgv1a0 15873m.g) derived from phytozome v7.0 (chr-ID scaffold_13; pos 1153540 to 1154552)
ccaccgccgccgccgccgccgccgagttcgtgaccgtaagtatttgctgattttatttataaaaacactctagtagggtttcttgtcgaagcagcgcctttgttcggcgataagccgtctccagcgtgcgctccggcggcactcgcctttaattgctatacaattatctgatttccggtttcaattgaataatgtatttgctgatctgctttcaaacactattattactgcttaattcgagaattttgttacttgccctaaaaaactgaatctttagggtatgtttggcccagttttatcaaattggatttgggggtttgagatttcaatcgaattttgtttttaatggtttgtgtccttgtgtatacccttccttcgatattgtatagagtcagtgaaatatttaattttgaagatgccataacataattcattgaaggctcagtacgaaacttggttttcgatgcgtttctttgtttgttcatactgaatgtgcagggattatttactttcttcgatattgtcttcaaaattatattgatagctggcattgccagtttgccacaccttactctgttaatcgaacaccatattcatatagagtgatgtctaatctaatgaaattaagggatacaattgacttctaaatcaacaacaatcaaaacttttaagttttaatagtaagtactaacatggatcgaaagttaagccaagaaaccgactatttattcaggcttccacggatcaatttagtctttcgaatgtagtgttttatgttctcctgctttgtgaaggcttccatgatttctaatttcttgattatttaaagaacttcataattatgaaataaaattattgctctatattcttgttcagtgttaacaagatatttttctgattcgtgaaatcttttgattggctgattttttttgttactcgataatcaactaacattgtctctttattttttgacttggttcagcttagagcctcccgtaaactgattttcagag

SEQ ID NO: 102353 - DNA, 597 bp, Mimulus guttatus
  Intron number 1 from transcript mgv1a010764m (locus mgv1a0 10764m.g) derived from phytozome v7.0 (chr-ID scaffold_130 ; pos 234584 to 235180 reverse strand)
attaagcaagacccatctaatcccactctttacaggtattaatcgctcaaatccatttctgtatgcaaatctagtgtttaattccagattgattatttttatttatttattttttagctggtatcgtgcaagtatagctattgggttgaagcttcaagtttgcaaatgtctattttcaaagcattgtatctatttttatttttatttatatttcgttttgtgtttagtgttttattcttcaagattttattgtgtttttgagtaattaatctttgattatcgactgtcggtggaaataatgaagtctgtgtgttttgttttggagattatgtgattatggttgtgtgtgtatagacagaatgtagtagatgagctcaaacttgagatatacgaattgtgttttgcttcaatagcttgtcggttgcttctagtaaatgaattgtaaattgtatttggacatgattttatatatttgaatcagcacaacgagatactgtgtttcgtattttcactaacgcttgttttcttgccctaaccgttttcatttatgatcttcgcccagcaatcgagctgcagcatttctaaatttggtaaaac

SEQ ID NO: 102354 - DNA, 911 bp, Mimulus guttatus
  Intron number 1 from transcript mgv1a002801m (locus mgv1a0 02801m.g) derived from phytozome v7.0 (chr-ID scaffold_16; pos 1313355 to 1314265)
ggggacgagcgtttttcgatcccgaaagtaaaaaaaggaaacatacaggaatttttgcagagtgctgacttaggcaacaaaggaaataataataataataggtgtgttgaagaggtggtgtagacgtgcagatagacgaacaaagggtggagatagattgtatatatacgatagtcaaatgttttcgacggtttgatctgttcttgcaagttgcaattatatataatgtcaacagaaatttgcttacaagtgaagcaaactagattgacttcagtctcagatttattacaagtcaactgtttcgattgtcttctgcatatgtatatgtgtttgtgtgtgttttacctgttccgtctcagaacaagcaaccggacccgatccattcctctctctccctctctctctctctctctctctctctctctctctctctctctctctctctctctctctctctctctctctctctctctctctctctctctctctctctctctctctctctctctctctctctctctctctctctctctctctctctctctctctctctctctctctctctctctctctctctctctctctctctctctctctctctctctctctctctctctctctctctccatatatttatatatgtgtgcgtgtttatctgttccgtctctcagaagaatattacattagaagaagaaaagcatgagttctgcagctcaagatgtaactaatttctgcatttttcgtccttctgttttcttgtgtgtgtgtgtgttttgttctttgatataatctctgcattatgttattgctcaaatcttacgtactaacaagtgaaatccgattattcgcagctatatgtacgtatatatactaatgtcgtagtttcgatttttcttgtttctgcagaagac

SEQ ID NO: 102355 - DNA, 423 bp, Mimulus guttatus
  Intron number 1 from transcript mgv1a009729m (locus mgv1a0 08476m.g) derived from phytozome v7.0 (chr-ID scaffold_13; pos 1239375 to 1239797)
gttctaatccttctcgcaatttaaggtacggccattctattttctcatgcgtttatgaaattgggggttctttttagggtatacaacccttcgttctttgctttgaatgtttatttatgaactagcactaattgtgaacattaaatagattgacacaatatttacgtagagacagactccttaaccctaatcccatgaactaatggattttcgggtttagggtttgataaaaagccctaattataacagttttgatttgatggggttgggttttaggggggaagtgactaaatctcgtttggttattgaattgtgatataaaatgagagtgatgtgatattgatttatattatgtttgtaggagaatttttttaatggattacttttcttgttgtatttgggttttagcgaggcggataaaaa

SEQ ID NO: 102356 - DNA, 929 bp, Mimulus guttatus
  Intron number 2 from transcript mgv1a004929m (locus mgv1a0 04929m.g) derived from phytozome v7.0 (chr-ID scaffold_346 ; pos 68723 to 69651 reverse strand)
acagagccaagtatttacgagccatcgctgctaaggtttttcttcctcactctaatttgaattttgttgcaaaatatttcagtttctttgtggactattttctcgaatgtcttggggtaggatataaactattttggtaattttatgtaaaagtataaaatcttgaatcttgcttcgtgaatttgaaaacggaattgtctaaacgtttatttcaattttattggtactgtttcgactttattttggacttttattatgtctggatttggcaaaactcgaactacaaaatttgttgttctttgagttggctttctgattcagcttgaatcagatagactgaatgtcgggtgagagagttatgcagaaatgaattacacagtccgaatgtggaattgctcaaatatcgatgttgtagccattgttcattcattcatgcataactctgtcgcccggcatcaatctagctgaagtcagttgggctggaaagccaacccaaaggactacaaaatttggtgccttcgagttttgccaaattcggacttaaaaagggtcaaaatcacatttgaagtcggaacggtattgataaaattaaagcagtattttatttaaaaatattatctctctcttgataatgggaagaaatataatctcaatgtgaatttcatgtctccatccttgcataaaaatgtggtttgttcatttcggttgataatcttatgacttatgccattattttcaagatgttgtttaagcgagttcatagcagttagacgccaccctatttgatatggagccttcttcccaaaggcataaaataaatagctaactaaactttcatcattcgtttcgtatgttggatgcttccacatgcttacactatctgattacgtgcagattacagaaaggaaactagaactagcaaaacttga

SEQ ID NO: 102357 - DNA, 749 bp, Mimulus guttatus
  Intron number 4 from transcript mgv1a015628m (locus mgv1a0 15628m.g) derived from phytozome v7.0 (chr-ID scaffold_117 ; pos 650970 to 651718 reverse strand)
aagaagaccaagaagctcccacctgtctggaaatagtaattatcttcctctctcttttcttctgttcttttcgtttattagctttactattgaatcattaacttatacagattatagagtggtgtttgctttttttactggggcataatgaattttacctttagttgttatagatgaataaattccgggtgttcttttttgacattatcgattaatggcacgaactaaattggtatgagtttattatagctaacatgagttggtataaagaactgcagaattaggtatttattttaggttttgctttatgttctgctattctcgaacaggttatgttaaaagtgatgtcatattagtgcagttcgaatgctatatatttgacgatacatttgaaattcctggagatactaatatggtggaatattagcttctgtaacatgaaatgaaatcggtatcattaataaatattgctagatttctactaccggagagagttgatgacgttttttgtttgtgcaacgaacttgtattatttccaagaaacagttaattcttttgaaacaactaaaggaataccttgtttcgtgttcgtttgctgttttggagtgcatatgtgtgtgtgttgttactaatcattctttgtaattttagatttatatgtaatgcaccttgtctcctttttcaaattcttgacgtgaacttaatctcgtgcagcgaatcaactacggccagcacactcgtggcataag

SEQ ID NO: 102358 - DNA, 723 bp, Mimulus guttatus
  Intron number 1 from transcript mgv1a006983m (locus mgv1a0 07000m.g) derived from phytozome v7.0 (chr-ID scaffold_63; pos 171305 to 172027 reverse strand)
ccaggattatattttaatttttcttttctctgaaggtgcgtctgttttttatttattgaaatttctgcatttagattatttttcatgtttatttcgatctgattgttggtgtggtgccgtttgttggcggcgggggtgaaaggggagaaaggtttgatttttatttttaatttaatttttttgttttggaaatttgaattgcgaatgtcgcgtggttgtggttttgcgtttttttgtggttgaatgctcagatctgcttttggttttcattttattttgacgcccggaatcttctagatgtatggttcttttggtatcttcgcccccatgtttgggttctgatttttatattgaaataatggtgtttgtttgtttgtgcagaggcaataagtaatcaaaaatcatgtgtttatgtttaattgctttgctgggcagataacttttgtgtatggtgttattcgtgtaccttaaaagcatatatctttacctgtataatttcttcgaattcgtttattttgtggcagggctgttcatgtggattttttcttgctaataatcatttgaattgtaaggggtggattatctgtctccattttccttgtcggttttcttctttctgttattctttgtactacggtatcacctcaactggcatattcctacttttacaatttcagtaaaatatattctgatttctactttatattgatctgcagagaggac

SEQ ID NO: 102359 - DNA, 498 bp, Mimulus guttatus
  Intron number 3 from transcript mgv1a020941m (locus mgv1a0 20941m.g) derived from phytozome v7.0 (chr-ID scaffold_370 ; pos 41548 to 42045)
gtcccgaaagagttgttgatactccaattacagaggtacgaaatataatttcatatttctgttttgttgagctaataattttgagtttgttgttcggatttaagaatatactctctccgtttctttttgtagccataattttatttttcatattaagtgtcactttaaaatttcaagataggacaatatttttttgtttaacgttacctacaattaatgaaagattaatgaactaataaagagagatttaaagtcagggttaattttgtcaaatatgaactatttttcctaaaatcaagagtatttatgaactttcttcgttgatagtgtgcattaaccttaaacaacacttattttgaaacagatggagtaattactagctaccatattgttttagaaattaatttccgcaaaatttctctctctacacgtactttaaacaattttctcgtttcatatataggctggcttcacggggcttggagttggtgcagctta

SEQ ID NO: 102360 - DNA, 406 bp, Mimulus guttatus
  Intron number 1 from transcript mgv1a014235m (locus mgv1a0 14235m.g) derived from phytozome v7.0 (chr-ID scaffold_137 ; pos 453186 to 453591 reverse strand)
gaaacttggacctcttttcgtttgccctcctccaggtttgtctctttgatttcctgctcatttaatttatttcgacatagttgacattttactagtttcctgttttgattttcatcacttcttcttaattctgatttttgatttattgctaataaaacgcatttcaacagatttatggtttgtttagttcaaaattattctggttgagtgcattaagaattgatttaccagcaaagtaatatatatatatataattttctgaattcttattcaatggtacttgtcttatttggttggaggatttattttttctattacttctttgctgatttgttggctttgatttttccgttgaacctgtttataattaggaaatctgtgtctggattaggtagtggttcttgtt

SEQ ID NO: 102361 - DNA, 498 bp, Mimulus guttatus
  Intron number 3 from transcript mgv1a005149m (locus mgv1a0 05149m.g) derived from phytozome v7.0 (chr-ID scaffold_270 ; pos 56306 to 56803 reverse strand)
ctgctttccgcttggtaaatttctccttttctacattatacacacacagacacacacggggatatattatttattctgaatgcatgtaacgttacatcagtcacaggcacgaaaaatgattttgaaacgcctgttatcaatttgttttcttcgtttctttctcttctccatgcatttgaattgtttgcaattgtgaatttctgggctactttctttgtgtgccatttgtttgcaccttcaactcagtatcacattgctactctctaaaacaagttaaagggtaaatgatgcttccatctaggtctcacattcagtaactctcgtatcgcatcccttcaagttgacctttgcaaaatgaaatgatgctcagatatgaataagattatacgtatcgttgatttaccattaggccatggatatgcctattccagtgaatcttaattcgtgttcttgtttcttgcagatcagtatctgggaggagcgaaaagtatttggctc

SEQ ID NO: 102362 - DNA, 872 bp, Mimulus guttatus
  Intron number 1 from transcript mgv1a005149m (locus mgv1a0 05149m.g) derived from phytozome v7.0 (chr-ID scaffold_270 ; pos 57424 to 58295 reverse strand)
ttttgtccaaaggcaccggctttcttcgtgagaaggtttgttttttattctatcatgcatttttctactgttaagggttaaatttgtcctaattcttgaagaattatgcttccttttgatgttccgaattgctgtgctgcttcaactaaagaattgagttccttctacttttccttgcctaaaattagtgtcctgttgatctttagactttagctatttaatcccactagttatttgaacatttttttggcaaaaaaggttgctgggaccaatttgtgttaacgatttgttttctttctatcaactgtcattagctgattttaactgtgaaagattcctctaggactactaaaaagttcgccttttgtgatcacttttggatttgcattaccagctatggcccagattgctctctgtatatggtgaggggaaagaggaagtgttcgtctttgaaacatgtggacaattgatataagtctttaagtctgtgatcgtagtttagttccattttatccgattaaccatgtcggcctatttgctttgagcaaggagatgaatgaaaaattattcatttattctgtcggtctctattaatgctccaatagctaaactggtaataatctaggaagtttgacttctcttgatggaatctacatcggtacaatctttcaagaatttgacagtcaaatagattttctatgaattgatgacggaaactccaaaaatctgctattattatgcaatataatgattatgtatttctatctggcattgtgtctgatgtagtgttttgcctttttgtattttctctgaactattttctgttttctttcttagtgggtctactaggaagtccttggttcaggcagacg

SEQ ID NO: 102363 - DNA, 793 bp, Mimulus guttatus
  Intron number 1 from transcript mgv1a002386m (locus mgv1a0 02386m.g) derived from phytozome v7.0 (chr-ID scaffold_39; pos 1367642 to 1368434 reverse strand)
cagctcctcgagaagcctgtctctgtatgtatttactcttttctcctctgttcatatatgcaaatgtgctttttccccctttcgttggaattctaatagctgtgtttgatctgggaattttatgtggtttgactttttgcggtggtgaatttgattttgacttggctctgctgtggtttaatcaacttgggggtgacttttgtagagcaccgttggaaaaaaaaaatggttttctttgccattttaaagaaatctggtttcctttgctttctgtaatgttttagattttcttagtagttctcaaattaaaaaaaatccaattctttcatatggttaatatttttttttattgataataaaatcagtttctgtattttttttctggtataaaattggagttctattttggcaattatctgttttatctggagtggggagagggatgtgtttcttggggtggattgttgttgaataatttgttgaatatgttagtgctctagtttgaattttgagtagaacattaatcgtttgggatgaagtaaatttagcggtaagtagcttgcggaaacctataagtacttaattgcatgtccaatttgtttctatagggttgtttgttctaatatttcaataaatttatactaaaatagaacaatttggattctagtgttatccgtactagttttacgactgatatcgctctgtgacgtcattagtcggtttgcgattttggattgatatgcaaattagtaaagttcttataaccattctaattcttgttttttcagacacc

SEQ ID NO: 102364 - DNA, 552 bp, Mimulus guttatus
  Intron number 2 from transcript mgv1a011475m (locus mgv1a0 11475m.g) derived from phytozome v7.0 (chr-ID scaffold_229 ; pos 153147 to 153698 reverse strand)
agcttatatttcatccgtttgctcaataccccaaggtaagttcaaattacaaaaataccctttatgttttgataattgcaatcatgtcgtcatagaaatattcaccgattatgtgaggtaaaaataacacttaatcctatatgtgtggttacaagtatttgtagatgatccatttgtgcttgtaatatcagctcataatctctttgttgttgatgggatagtgtccattaattcttctgtcaaacttaacagcgcgtgtcaaactttaaaggggtcatccgcaacatgtagtattttttgacgtccgactagcgcagttaattttaacgaaaaaactaactgaccccacccataccaacaacaaaaaggattatgtgttgatattacgagcataatgaagtcatcagcaaaagcttgtaaccacaagaggtttaagtgctatttacccatggcattaatcattaataaaaaccatatgatagagtacttacaataattcaatttgctgtaacaccagattgtgccaatatagttggggactccattataata

SEQ ID NO: 102365 - DNA, 893 bp, Mimulus guttatus
  Intron number 1 from transcript mgv1a004776m (locus mgv1a0 04776m.g) derived from phytozome v7.0 (chr-ID scaffold_39; pos 496935 to 497827 reverse strand)
gaccaccaatcaaagctttcggataaggtcacattttcaattatgattttgtttttgcttttaatttcctgtttttttttttttttttttttttaacagacatgttttggggattttgttccttgggttggctagggttcgtctcatgcatatacctgataaactagtgccatcagttagttgattaccgctacaaattaccgaattcatctttgatttttgaatagacagcaattaattatcaatgtttagcatttccggaattatttaaaataaaaaaacagcgtgggtaattggagttttctaggactgtgatcgcattgccaggtatatgattataaaatagacgtaattaaattaccgtaaacatcgaacaatgtttgaattgaaggatcattattgtttgggttttccctcgtagtttcttctcttccggataacagaattcagggttctaactagaataagatttatttaaccttatagagaatttggtccatgtactactcaattaagcagcactataattgataacgacatcataagggttttggttcttcgtacagtttcgatattgaagttagcgaccgagagtagagacacacaaaaagtggccctcgacttctaaaagaatgcactaggcattgatgagatgatattctatggattattcagtaatgtactaagatttcgtcctgtctaggcttgtgtgcagaaaacctttttctcaattttgaattatgacgtaaataattattttgccaagttttagttatgttcgacctaaatatttccttatgattccatcaattattgatcaatctcacttactatctttatcggcatatttttgctgtcataaatgcagttgccaagaatagtcgttggagata

SEQ ID NO: 102366 - DNA, 561 bp, Mimulus guttatus
  Intron number 2 from transcript mgv1a006693m (locus mgv1a0 06693m.g) derived from phytozome v7.0 (chr-ID scaffold_12; pos 1111436 to 1111996)
ctcaccagtcactagctcaggtgtctacattgattgaatactttcgttgtggagtttgatttcatgacaaattgtctttcttctgtgttttttttactgaattatttccatctaaaatttgacctattcgagaattaacatcaacagacaaaaagttggatcatttatactctaagaaccatgtagaaaccttttgatgttcagcaattatgagtatgttgccatggttcttgctctgcccctagatactgaagcaaagaagacaaatttcatgcaccctttgacttgtttcctctttgtttcttacatttcttgctgtagaagctaaggaacattctggttcaatgagttttattactcaaatgccacatgagatgaagtttcttgtacgtgtttaggtttcgtttttcatttcttagtgaaggtgtgtttatttccgtgtaagatatgtgcattgccatgttcttgactgatggccgtttttgttttattgatatcctcgcattaacaaccatgtttttcctttagtttttacctttcatccttttttgctgtaggagt

SEQ ID NO: 102367 - DNA, 604 bp, Mimulus guttatus
  Intron number 2 from transcript mgv1a019357m (locus mgv1a0 19357m.g) derived from phytozome v7.0 (chr-ID scaffold_258 ; pos 226875 to 227478)
agttcatcaaacgacgacgccgttttattccactagtaaggtaattcattaattttaatttgttactccaaaaataccttaaaaatgcagtttattgcatgtgtttatatcttgtttatttatttcattttattttattttttcaccttaaattatatgtttctattttatttggaaaaaaaaattcacttgatgaagtatgagtaaattactaggataaagctatgcctctttttcttttcttttccttttttaccctttacatgatgtgtgtgtgtatactgtatatatatatatatatatatatatatatatatatgtatatatatgcttaatttttgatctttctctttgcttttacaagaaaggggtgttctctttactcaattcaaaggggtttcttcagcttttctgcattatacatttaagcacctttatattttttcagaaaaattgagtcatctctttatttattactgatggattttgacaagagggccatgcattataataattctttgctcaactttattccctttttttaatttctaatttctaaattttgtttttttgaattttgaaaaggtatcatcaggttcgagta

SEQ ID NO: 102368 - DNA, 686 bp, Mimulus guttatus
  Intron number 1 from transcript mgv1a006139m (locus mgv1a0 06139m.g) derived from phytozome v7.0 (chr-ID scaffold_36; pos 1301387 to 1302072 reverse strand)
gggcctgaagatcctattctcggcgtaactctctctctctctctctctctctctctctctctctctctctctctctctctctctctctctctctctctctgtgtgtctctctctctctaaaattttcaagcggtgtaaatttatcgtaacattaaaatatacttacgcgaacagttgatacttcaaaacaaagaggagcttagaaattaattaaaccttttataaatttaaatcaatcgtgtttgttgatgatctccaacctcgatccttgattctcgtgtgtgtgcgcgtgtgtgcgcgcgtgtgtgcacgcgcttgagatgatttcgtgatgttacaaagactgttctagtttaattctgttatttccttttggggaagaggttttaatttgaatattttagatgatatatagtgctatttattacagaattttgtatgtaggatttagcaattgaaagtgaaaaggaaatctatattatatgcatttgtttcgttgtgatgagtatctttcgtaaaataactattgacgaaacaaatttagattatatggaaatttagtagtcgaaattccaatttattcttcctcgttgtttaagtacgaaaatatgacgaaaatatgaacgctccgtgaaacttttgaataaataggtcactgttgcatacaacaaagacccgagccctgt

SEQ ID NO: 102369 - DNA, 788 bp, Mimulus guttatus
  Intron number 1 from transcript mgv1a018106m (locus mgv1a0 18106m.g) derived from phytozome v7.0 (chr-ID scaffold_51; pos 511753 to 512540 reverse strand)
aattctcaagctccaagtaaccaacttatttattttccaacttataagtttttcattacattctttttatttatattatatatatgtatgtatatatatttgctttgaggttgctttagtactgatgataaatacagtagtaagctatatatatggtgattgatggaaattttttagtacacggtacgatttgactttagttacttcaggatcttgtgctttcaagctggacttgtaccagtataataaaaaaaaaaaaaaatgaataaattaatcaagggaagaaacttaattttgaatattaatttgtcaataattgttgtatttagtgataactaattgaagaacggttaggttaactgtacgaaatctattattttgatttgttgattaggattagtagctattgctttgaaaacagcttgcaaatgtgtgtaattatacaacctaaagtgtgttatttcaaattcagaaaaacaaaaccaaaacaattgcacaaagatttaatcgtggttcgagtcagattgcacaaagaatggttgaattcatgtactcgatttgaattgaggtataattaagtggagtggcaatagatttaattaatattctcttgcttcgtccatatccttcatttcaaactccccgtaacgagctttgaatttaatttatcaattgacataccttccatttctattatcaacatggcaattcttttgatcttcttgcaatttatgtatattgtatatatatgcttctagtgatgaatatcttgtctataaaatgtcagc

SEQ ID NO: 102370 - DNA, 684 bp, Mimulus guttatus
  Intron number 1 from transcript mgv1a020431m (locus mgv1a0 20431m.g) derived from phytozome v7.0 (chr-ID scaffold_41; pos 830170 to 830853)
gtgcatcagaaactgcgtttttgcacaaaacgagaacaaactagagaacattacacagaatgtagaaaattatgttgaattcgacaccataagaatgggagcgtaaaaaaattcaaagttgagggagctaattgtaattatcgaaacataagaagttttttcgtaatttgaccatacttcggggtggtagtaatatatatataattactatttactagttataaatactaaaattgccgtctgtattactatttactaggaaggatcaccgttaccaaaattgtaggtaaaaacgtaattacgtaacggctcattttagcctcttcgtatatccatccccattttttcaggcgctattcaaattattaattattaattttttttgaaacaacaaaatttttcacgaatcagaaaatgatttgtttgcgatagatagtcttttgccacagaacacaacattttgcagtaacactccctctgcaaccctttgttttttttttccaggttttctccattctcccgttaaccgaggatgacaaacccgaatcgaaaccaaaatcaaaaccagaacccaaaccagaatcaaaaccaaaaccaaaacaggaatcagaatcagaatcagaattccaacgcaaatgcaacgccggaggaggatttcaacctgcgggagacgcggccgagcct

SEQ ID NO: 102371 - DNA, 513 bp, Mimulus guttatus
  Intron number 2 from transcript mgv1a002398m (locus mgv1a0 02400m.g) derived from phytozome v7.0 (chr-ID scaffold_122 ; pos 236451 to 236963 reverse strand)
aatttctgaagatctggatttagttctgtatcttggtaagaagttgttatttaatttatttattttatttatttttttgttaaattctaagctcaaaatctgaaaatggcggttgaatgagtttttattgagctattgttagctagatcttcgattaatgggaacgtcttgctaaaattcaggcgatctgtttgtttttacttaggtttgaattcagatttacttattttgactagggtttgaattccgtaaaaggggaaagtgtactggaaatgaagtattaattcgtgttaattgtgcttgtagtgtaatcaaattgcttctgttttctgttttaatcgttgattcgagatttaggatcgatctgctatgattcgaaacacgaaagatattgtatttattgcgagtcattatattttaacaatctgttattacttttttgcagcaagtaataatggctatttttggattgttgtagttttcgaggatttgggttcgatttcgatttgagtt

SEQ ID NO: 102372 - DNA, 885 bp, Mimulus guttatus
  Intron number 2 from transcript mgv1a005180m (locus mgv1a0 05180m.g) derived from phytozome v7.0 (chr-ID scaffold_122 ; pos 400683 to 401567)
ttcttcaaggaccactcctcaagcgatctgaaacggtaatttatcttattttttcagtttcactgcttctgtagttctgttgcatacggctgcatttatttattatattttttctggatttttttttttttgtgaaattcgaaatcacttagatatggggtttgagcttccattgttttttttcaatgtaattttgctaattgactgattattttcgatcagtgaggcagaaatggtgtgggtggaccatggcagtgggggttgacttttttattttcggttattttcttctatatttattatgtgccatgttagagtttggcttgtagctttcgtcggcttatcatgtacacaacttggggtgctgaaagctctatttagtttttagctgacatgtgatagaagtacatcgatttagattgaatcaaagattgtggtcgggtgggagttttggaaaaaaactggaaaacttgggataaacatggatgaatttctgatagagctacatgcatatatgcaattcattttgtgataactggtaaatttagaaatcgtgtttactggaaatgtctattgattgacgcagagaaaacatcgaatgtttatatacaaactgatattgtaatgtcctatttcttgatggttttggattcagttagaagagaagttaaaaatgaaaagcctaggcgatgaatattgattttcagttaatgttgctttctcgggcactaggtagtcgattgtttggaagcatggggtggtcataatatatagagggagaacacgatgtagggcagcaagagagagataattaaaatgtgtgtgtttcttactttattcttgttaacagctgaggaagtggaacgagaggtgggtgattttaga

SEQ ID NO: 102373 - DNA, 512 bp, Mimulus guttatus
  Intron number 1 from transcript mgv1a014261m (locus mgv1a0 14261m.g) derived from phytozome v7.0 (chr-ID scaffold_51; pos 725126 to 725637 reverse strand)
actgcaaagctcttgccatagttgaaagtatgtgtttttttactctctacactcgctttctgtgcatatgttttctctgttatattttgtttcttttgaattggagaatatctaattttgaaattgaactaattaagtgaagaatattttgaatattggtgaaaagaatatatgatttgagtttatgttaattagtaaaaaaattatcacctatttgttgatacaataaaaaggataattgagttgcaggattcaagattcattttttattcttattaatccaccttgtctatttcatattttcggtgcaaaaaaaatcgaagaaaaagcgaaaaacgagtttgttaattgaacttttgagattgtctggagatgtatgtagtagttctagtgaattggttatatcatgtaaattactttgtaaagtctcgatttttacgtagcaagggttttgatgaattcggtatattattacagaagaaccggaagctgtcgaggagaagaaactcgag

SEQ ID NO: 102374 - DNA, 465 bp, Mimulus guttatus
  Intron number 1 from transcript mgv1a001577m (locus mgv1a0 01577m.g) derived from phytozome v7.0 (chr-ID scaffold_212 ; pos 179463 to 179927)
gccaaggtttatcccatcgagagcctcgattacgagtatgagtctcttttctcttcttttttttatttaattaggtaattaattaattaatttttccatgattatatgtagaattctcactgatttgtttattgtgattattagttttttttttgttttgtttttgatttggtaatttcttcaaactttggttggttctagaaattgatctcagattttggattgacttttaaattttggaatgtgattagttgatctgtatatgtaatatgtatctatatgtgtatgtatcatatgctagctcttttctggtggtgtaatctgttaataaaccgaatagagaaacgcaatcacgaagcgaccgaattttaaagtgttttatctactctgtttaaattattctgcaatctagagggaataattataataacatatgattcactttattttgcaggattttcgaaa

SEQ ID NO: 102375 - DNA, 1043 bp, Mimulus guttatus
  Intron number 1 from transcript mgv1a005125m (locus mgv1a0 05125m.g) derived from phytozome v7.0 (chr-ID scaffold_69; pos 1116361 to 1117403)
tcgaaagaaaaggtgaagaaacaaagaacaacaaggtttgtctgaatatctgttttcttgattatcatcggtattttctttttctttttagtttttttgatttctgattggtgtttgaagattgaattttttttttttgatttattgattgaatttatttatttatgaagtgtttgtttttgttgatgattctgaatgggttaattgatttgtttttgctctgtttattttttttatccaaaattattaaatttgatttttttttaatatgggttttgtttcttgttcaatttaaggttggtgaagtttgtctaatatttgtattggaaaaattgactttcttggagttttttatttatttactaaaatttgttcatcatcatctttattttgtgtgaattcataatttgttagtatttaaattcgagcacgtgcagattgtttgatatggaagaaagtgaggagtcatatttgcttcagcttttttggtgactttgattctgatgaaaaaagaaaaaagagtatcttttcattaatagaaagtgtgaagcaatcaaataagttattgcagaaaattttcggttacggaaaaataacaacgaaaacttgtgttgactgtatatacagatatagatatatctatatatatacatgtgtgtatatatataacacgaagaatatatggatactcgatgtttttatgtgtgcctcaacatctttgataacatcttggtgtatcgatttatctctatttatttccctttaacgttagctatttatatgtagtattcgtatttatcacttccctttcctcgttcgatgaaatgagctccgtcaggtgttttttttttttttttttttttttttaactacgtcaattttttctcgataatgataattttgttggtgttcggtttgactaagattcatcttatgactaaacagtctttcttattcgaggttaatgatgtcggttaaggttttttaaaggctaaaaaagatttgtttttttttgttttcttggaacagaactacgactaatc

SEQ ID NO: 102376 - DNA, 742 bp, Mimulus guttatus
  Intron number 1 from transcript mgv1a008187m (locus mgv1a0 08187m.g) derived from phytozome v7.0 (chr-ID scaffold_2; pos 814585 to 815326 reverse strand)
tcttcttctcctcctcctcctcttcgttttttcaggttattcttcttacttaattctgctattactcaatttcactgcaattccaatcaaattttagttttttttttcttctcaaatttctgtcgctgatttttatttttatttttgcgagaagaaaagggtttttaggattttgttgctcttttgtgtgatgttactcagctgtacttaattgggattttttattttaaaataattttggtgtagttaataagtgatttcaagattcagtatcttgtgattctttaatacgagcaagtgattccgtttgtaactcacagatttacataaatgggactttttttttttttaatatttttttgcctatttccatttctgtgttcgtttagccattgatgaatgatatagagtgtgctctattgaatattttgcttgttaataataaataataataataataataatataaacaatctcccttttttttttttttttttctttcttgtgttcgactctgttttccaattgcttatcagattcatttgctttcctatttccgtaaccatattcagttatcgaatgctcgaaattcgataccgctctctcgaatagctggtgtctttccttgttcttggttaaacataaaatcgcttgttgatacgtaaataatttcccccgattttctcgtttttcgactatgttttcagattcattagttagcacggcacgcagccaaggagtg

SEQ ID NO: 102377 - DNA, 666 bp, Mimulus guttatus
  Intron number 2 from transcript mgv1a011342m (locus mgv1a0 11342m.g) derived from phytozome v7.0 (chr-ID scaffold_2; pos 3074652 to 3075317 reverse strand)
acgaagtcgagagcttgaataaaaggttaagatctagcttctctcctttcctttcatttttcctcttttttttttcttttaaattttgaatgatttgattatctcttgttgggcttttgcttttgtttgcctttaagattatgtctgcatttttgaattgtaatttgtaattattcatatttttgtaccttttgtatgatttgattttgttgttgaatatgtatttctaaagtaatagggcagtcaagtttcaaaatttattgaattactggtcttagtcgtaacagagcttctagaagatcaggttctttatgtttatgatcacgagatagttatgacctcaagacataaatatctagatattttctttgatatttgttccatgtatctgtttgttgcattcagatgtatcagattctcagagttatctaaatacgttaaaaatctttgcaaaatcaggtcgtttgatatataatgaatcaaccaccttatacaccaattttaaaaaaaaaaaattgaagatatttttctctcaatgtgaactatgtacatgctagcaccatattcgaatgccagttaaatcgagaaagcttctaaaatatgattcaacttaaaaaaaatatcctttgtgtttcgaaattcaggaaaccttgttcgggctataaa

SEQ ID NO: 102378 - DNA, 820 bp, Mimulus guttatus
  Intron number 1 from transcript mgv11b016405m (locus mgv11 b016405m.g) derived from phytozome v7.0 (chr-ID scaffold_4 6; pos 1205368 to 1206187)
ccattcgagttttgagtcccctgcataacgacgtagcaagaccgaactgaaaataggccattcttggaatagtgccatatccatcggtctttaacgtatacacttccaatagggacttccaaaattctgttttgatcaatatcccaaaaatgctcccgaatgagctcgacattccatgtatttgtcaatggatctatcagatcagcaactttgtctgggaagctcgaataaatgggccgtctagtaataatctggaaattaccatcatctcgcaaccaaggatcggcccagattgaagtgtccttgccatctccaatacggcgacgaagccctctaattaggaacgggcgagccttgagcatactctgccatgtcgccgacggtcttttgcctgcatcagctctaaaaatatctccacttggaaagtatcgagctctgataatacgtgaaagaagcaaatccggggacgtcaacactctccataattgtttcgccagcaaagccaaattaaacatcctaaggtcccggaagcccataccaccattccgcttggattcacacaagttgcgccaagaaatccaatggatttttcgccttgagtcctcgccccaccaaaaccttgcgatagctgactcgatttcttgtagtagcccattcggaaggacaaagcagctcattaagtatgatgggattgcttgtagaacggatttgattagaatctccttccccgccctagatagatgtttctcgccccatcctttaattctactccacactctatctcggaggtgcaaaaagatctctctacgagaccttccca

SEQ ID NO: 102379 - DNA, 241 bp, Mimulus guttatus
  Intron number 1 from transcript mgv1a014945m (locus mgv1a0 14945m.g) derived from phytozome v7.0 (chr-ID scaffold_4; pos 837300 to 837540 reverse strand)
aaagccggcagaccgtggaccgaagaggaacataggtaaaccgtaaacttattgaagtgcataatcattattttccgttttttttttttcttctttttttttttttgatttttctaatcatccattgttacaaagtaaggatttttacagggagctttttgtgtaaaatcattgagaatgacatatttgtattttcctatgtgtgtattttacaggttgtttcttcttggtttggagaagt

SEQ ID NO: 102380 - DNA, 980 bp, Mimulus guttatus
  Intron number 1 from transcript mgv1a015963m (locus mgv1a0 15963m.g) derived from phytozome v7.0 (chr-ID scaffold_108 ; pos 880801 to 881780)
ccgcgccggtgccgagattgagaccgtcaaaaagtgtgcgtatttctcttattgtgtttgatttacggtttttagatgttcttgccgattttcgtttggtcttcattttctgtttaggttaactgtatgcaatccgctcgaagcttgagttgtggatcaattatctttcttttttctgttttgtttttttaggtattgcgatatcctcattttatttgtattttgtcccctaatttttagattcctgttttcctgaaattttggtatttccattgtaatatggtgttcatttttatgagcgactattcatataatcgtgctgttgtgtgtgaatttatgcttggtgttgtccgtttaattttaatttatggattgctggttttcttgttttccgggaattttggtattttcatagtcgtatgttgttcactcatttcagggactattcatatgatcgtgttgtgtgtatggatttatgcttggtggtgtccatttgatttcgatgtttaaaaatggaaatagtctgtgttgtttgggttaatcttttgatttagccatcatataggagtctaagagctgttggaagatttttttcacggttcaccgaatttgaaaatttcatacgtgataagtttttgacttgaaactacaaataacttatttctggaaaaaacaaaaatggggatcaagaaaggcaatatgtgtgtctgtgtgtgtgtgtgtgtgtatatatatatatatatatatattttctggactcattgtaaataaatttgacgtaagtttagaggtctaatctaagctgaggtcccagaatttgtgaattgttgcaaattattggccggatggaaaattataaacttactcattcaatctttgtcttgcatcactaagatccaacttatgtagctgattaagaatttataactatgttctatgctgcagcacaagctgggacaaacagagccgcttcaagcagc

SEQ ID NO: 102381 - DNA, 779 bp, Mimulus guttatus
  Intron number 2 from transcript mgv1a007044m (locus mgv1a0 07044m.g) derived from phytozome v7.0 (chr-ID scaffold_14; pos 2031550 to 2032328)
gcttccttccctcgctccagggtgagtttcttcctcttcttcctccttctcctccttctatctaatttaattgtacaaattcgtatttattctgaacgcgatcaggttttttttagggtttttagggtttggttttttctttcatatgtttgttatctgattagcacaaaattgaatatatcagttccgatctttttttcggccttgaatttcaatttctgttcaattatttattattttttgtttatttttttaattcggaagagctactgggatgtaatttatttacttggtgttgtctttctttcatttatagttactgtgggtgtaatttcgttcgcgtggtttgtgtttatgcggaggagggtttgtagtggacaaacaaatttgaatttgatcagggattttgattttgatttcgaaatcctttttggctatttagggtacctttttggatttggtgttgagttatttggcttcttctctttaattgaaacaaaaaatccactctgatgcaagcatgtttgcatattctgttcgcaggctgtggtgccctttcgattttcttgacgaattgcttctcgattttgtgcttgtttggttgttacccatgtaattaacctttgtttatttaagaaaatctccttgtggtttgatattagtactttcattttggttcggagattgctccctttaataatcgataagttggtgtggtttgttttgattcgcctataatattttttttctgtatttgaattgcagaaggggtcagagtt

SEQ ID NO: 102382 - DNA, 859 bp, Mimulus guttatus
  Intron number 1 from transcript mgv1a018879m (locus mgv1a0 18879m.g) derived from phytozome v7.0 (chr-ID scaffold_159 9; pos 3875 to 4733)
cctttgattccaatctttggtaccgcattggtcaggtaaattttaaaaaaataataataaataaataaataattgcgaaaatcaaattctatattatatgatgagaatttctttaatttattggattgagaaaataaatacaaaactgcagattctggaatgtttggtagatttatcgaattttcaagtatgattaaaaatttacagttaccgactaaatataatatagtgtaaattacgaaaatgcccccaaacttaggtcaaattacggaaaacacctcgtcctattcgtaactaccaaaagcccccgatgtttgtttatgtctttcatcgacccacatatggtatggttttccactgaatctatatgttactttttgaagatgaaaattacttttagggggatctttacacgaaatctttattattcttaaataatacactcacagttttttagtattaccgttatccatctgatggtgatttttgacttaaaatctaatattataaagaaatgtcacttctgcagatgtagaattaacatttttcacgtaagacataaacaaatatttggggtgttttggtaattacagataaatctaggtgtattctataatttagtcttagttaatgggagtttcgtaatataccctataatataagtttgttaaaaggggagttttcaagattgatttgatatatatacctaatacttgtacaaaaaaggagtaatttaactttactactctaagtaaaaatgtatatttaatggtacttaaatccatatgtatatttatttatatattttaatttgaaaataaaaatgtaatattaggctattggaaaagaggcacgagcg

SEQ ID NO: 102383 - DNA, 480 bp, Mimulus guttatus
  Intron number 1 from transcript mgv1a015060m (locus mgv1a0 15060m.g) derived from phytozome v7.0 (chr-ID scaffold_207 ; pos 394698 to 395177 reverse strand)
ctctgccactccgccgccgtctagtcaccgttaaggttaatttttggtcttcttttatttccccatttcttttcctacgcaatcgaacacacggacttgggtgtttggtaaaataaaatcaaaccctccattgatgaatttttttaaattaaaaaaaaatattgctggtatttgttccatctttgtaaatggccgattcctttactcgaaattaattttttaaaaaagttatatttttttagtatgaagttgatattcttgatttttttgttgtgaagttatgaatacatagaatgcagtagtggattattatgaacaaaatttggctatttaggaaacctttttgctctgttgtagtatgcatgtttcaatataaagatacgttttttttctttctaaaatgtaacgattcacatttgtgccgattcttgtattcgaaagtcgaaactaatgttgtccggttctcctccttcaccagga

SEQ ID NO: 102384 - DNA, 517 bp, Mimulus guttatus
  Intron number 1 from transcript mgv1a017255m (locus mgv1a0 17255m.g) derived from phytozome v7.0 (chr-ID scaffold_6; pos 1469625 to 1470141)
cgcctaaggccgcctcctgaacctccgccgccaaggtctgctcttcacttcccatcatatatatatatatatatatatatatatatatatatagtttctctttcccgtcttctttttcttgatttaatttatttctgttcttgatagttgatatatctcttgataaaatgttttttctgttcgtcatgtttgatttgtggtgatgaattaacatctattaaactgatctattttttaatatttttcacccgattaatacagatttgaaattcttagacccattaatgatatatatcatatatggatttaattaagatgtattagatctgtataacaacattcatatttggatctcgtattaatatgttttccgtcatcatttctcgattagtttgcttgcatgcagaagttcattggattgaatttacttcttccatataattatatatatatgatttatttatggacgaagtttacgacctctcttttcttttcttttttggtttttggcaaatag

SEQ ID NO: 102385 - DNA, 381 bp, Mimulus guttatus
  Intron number 1 from transcript mgv1a005959m (locus mgv1a0 05959m.g) derived from phytozome v7.0 (chr-ID scaffold_11; pos 538682 to 539062 reverse strand)
ttcagcttgcacaataatcaaaggtcggatttcttcttctctctctctctctctctctctatctcgaacgattgtgtgtcagccgatgtagagaaactattcgtgtattagtattacttaaattattatattatccatccgtggaaaacgttgcgtgcacaattctatctcttcatcttcattatatttactcaatttgtacatatatatctctctcccagctaccatatttccagatacagagttgttttcgttgttatttttagggtttgattttctgaatttgaattttgaattttttgtttttaaattgtattaatcaggttttcaattttttgtttgttagattttgaagagactgattctcatcgaagtcgtcga

SEQ ID NO: 102386 - DNA, 963 bp, Mimulus guttatus
  Intron number 1 from transcript mgv1a009960m (locus mgv1a0 09960m.g) derived from phytozome v7.0 (chr-ID scaffold_17; pos 2331915 to 2332877 reverse strand)
taatttggaattcaatctcattcaccctgattctggtacctttttttttctacctaaagtttcgttttttttttctagtgttcaattcttttgttgcgtcttctcttacagtatgctttccgttttgtaattatgttacattgctgtgattcgttctcggctttatggtgtaattttagattgtcatggtttagattctaattgtgatccaaaatcgagccctttcgcattcatattgtttgggagaatagatcgtcattgacccatatatattcaagttttaatgtagcttaaaaacagctggaaaatagcaactaggtaatgcagaattagataaaacttgcttacaagaaactgagccgtaagtcatgattgttattgattagatgaatgtaggggattatgctgatgctttgtcaattgttagtatatgctgcatgagtgatagtttgttcaaacattttacctgatttcgacttcggggctaggatttgtctagcttttgaggattttttgggcttcgatgttgtaatttggtatattcaacttctttcataagttgcttggtgtgtgatctatgcttgtccgcaaattttggccttcctttttttcgggtcataggtgataattaaggttaagtcagactataatttttgcaattagattggtccaactcttctatcaaatgttttccccttcttcttaaacctttattccgattgaaaggattcttttttttttttgtatggatctaatagctctaattttggccttacggtcctgctatacatagaatattttggtttgtctcttcatgctttaaaccagtaattgtgttctgagttcatatcggctgttacctaaatcagtagtttcagctttcaatatctgaaatcgttcttgatagaattcattgtacttttaccagatcaaataccctttgttgaatctggtgatcgtgtg

SEQ ID NO: 102387 - DNA, 640 bp, Mimulus guttatus
  Intron number 3 from transcript mgv1a019629m (locus mgv1a0 19629m.g) derived from phytozome v7.0 (chr-ID scaffold_42; pos 1416692 to 1417331)
atttctttaacaggaagaaaggcacaaaatctagtgtatgtgctgaacccaaagaacattcaaaagccaggagtgaagaaacacccgttagagcgacgaagaacgaacagtctgccaaagaagaaaaaagtgccgacagtaagcaattgtttctttctcgttaatgtatgccaaatttagaaaaatacactacaattaaattgaaaagtggtgaaagtaacctgtaaaaattaaattctacgtttatcataaatatttattgatatttgcatgcagggttaaatgtagcagctacttcaggtgggcagacgaagagtagtatgaaagaggggtctcgtcccgtagttaaaattaagttcaagagacctgcagattgcctttcggcaagcccgtctggtgtcagtccattgaagaaacgaaagcttcttctaggtatcttttaatttgtcttgtttaatcggcactctgttttgggatttatgttgatgccaaaaagtgtgatgtgtctagctgaaggttccggaaatgatggacaaccttatacttcactgtctcgagtttctggacttgagaaacgtatgaatgacaaagattctgtcggagagaagaaatatctgtctactggggtaagtttggacaa

SEQ ID NO: 102388 - DNA, 623 bp, Mimulus guttatus
  Intron number 1 from transcript mgv1a003547m (locus mgv1a0 03547m.g) derived from phytozome v7.0 (chr-ID scaffold_7; pos 2635167 to 2635789)
ggaaaaacaaggtttgtttttttttttttctcttaatttcccgtactctgcttttcgaaaagctgaaaacttgttctcttttgggttttttttttttttttttttaattatttttgatggattttttcttcaaggaaaaatgtttatatcgggaaaatcgatggtgattttaatatttaggagtagaatcatgagttttactcgatgaaaatgatcaatcgttcgtggattagagtttatactacagtgggtgatcttacaacccgtgtaattgatcagaaaaaattagggttctgttatttgtcgatcagaaatttttctgttgcagtgaagtttttagtcctaatctttcacttctgtgtttatttatttattttttcactgtgaaatatgattcaattctgcgcagagtgtaatttttttgttactgatcatgtgggttttctaatattcaatttatgcactgggtgagttgaccccgttgctacaattaatatctctatactgtttgatgaattaaatcgaagggcttcaccgaaatcggttcgagaaaaatcggtctacatgtacttaaacgaaacctcgaattgatattcattacgttctctaaattttacagggtg

SEQ ID NO: 102389 - DNA, 530 bp, Mimulus guttatus
  Intron number 1 from transcript mgv1a004464m (locus mgv1a0 04464m.g) derived from phytozome v7.0 (chr-ID scaffold_83; pos 531378 to 531907 reverse strand)
cattccagaggcaaggccaagcctggtttgttttcttaacttcctcgattttcttacatttttgtttgtgtctgttactttgctgtttgcagatttttttttattatcatttttagtcattgaattttctggtaaaatgtagacataatttaaagtgtaagaccccttgatttgagttgtcgaggccgttaaatgtcactgatccgatgatatttttgatcctaaacaagcttgagatgattaaatgtctaatagtgtggtcttaattgaagattaaaggcacactttggtagctaatttagtgatattcttgatatttatatggggtagctactttggtgatttgctctatatagattgcataaaacttttttagctgatgaataattgatccactttaaagaacttgattcaacgcaaaagactacgcatttgacttttggctcgtaaaagactaatacttgttgtttgtttaaaaccaccattctctcgtttaaactgtaggttttgcacaaccggtctccctagtg

SEQ ID NO: 102390 - DNA, 760 bp, Mimulus guttatus
  Intron number 1 from transcript mgv1a013297m (locus mgv1a0 13297m.g) derived from phytozome v7.0 (chr-ID scaffold_309 ; pos 87278 to 88037)
tcattttctggcgtttgacgtttcggctaaaaagggtacgattttcttccttcttttaattccgcttaaattaaataaatcctttcggttacaatcggttgtgtatttatttatgaatgctcgattgttgtttaagcatttattttttttagggcaattcgatttacttatgaagtctcttcatttctgccgtttcgggaaaaaaattaggctttgtttggataaatcctttcggttacgtttgttgtatatatttatcgatgccggattgttgtttttgtaattatgttttggggatatttgatttacatgtagatctactcgaactcgtgatattgaagccaggggatatgttgctctaattattaactgaagtctggttaattttgtgtttattaaggattttttctgttgttttttggtcgaaattttttgggtgagtttatttttctgttcataaataaaaattaaacaaggattggggattttagggtttaggttaattagaggagactaagttggaattagaagttagaagctttatttcaacaagcaggagattttaacatgctacaatttaattgtttccgctgcttttttgatatggtaattgcttcatttaagtgaaaaattgccgaggcaaacaagtattcgtgcagaagattggttttgaccatttttacatttaataattgaggaaatttattatgctttgattattgcaggctttgtaattttgtgtaaactcggtggtttaatc

SEQ ID NO: 102391 - DNA, 261 bp, Mimulus guttatus
  Intron number 2 from transcript mgv1a011780m (locus mgv1a0 11780m.g) derived from phytozome v7.0 (chr-ID scaffold_68; pos 91600 to 91860)
agaaatttgaggtatgcctttttctattgatttttttaaggttacgatgaatcaaataatctcgttttccagatacttcacttttaaaagttaccgactaattggataaacaaagagttaaaagttatgcctcataaaaatatacgatgacttatgcttgtgtgaatgcataaccgatttgtctgatgctttcttttccgattaattaaaaggctgtttgttgaagtccttttttgttgttcatttgtttgtaatttcagg

SEQ ID NO: 102392 - DNA, 361 bp, Mimulus guttatus
  Intron number 1 from transcript mgv1a019092m (locus mgv1a0 19092m.g) derived from phytozome v7.0 (chr-ID scaffold_351 0; pos 2342 to 2702)
tcttgccttggtacaccaaaaaccatttaaccgcggttgatttcaatatttagaatattagaaaaaaaaatctacagtttattgttaattattcataggtaaatattagcttgagttaaggccttaatgtatgttttaatgtaataaacaagcaggccttcttgttaataaagaaactatttatataaattatatatcatttgatcttttttcctaccggatgaatgctttgaggaatgatttataagaatagagtttgttattcgtcccacatcggttgtgatagtcaaaaatgctagagaaaagaagagggcctgttgttgtagaagctcatacctttctcggccttttggctaagatc

SEQ ID NO: 102393 - DNA, 753 bp, Mimulus guttatus
  Intron number 1 from transcript mgv1a006466m (locus mgv1a0 06466m.g) derived from phytozome v7.0 (chr-ID scaffold_121 ; pos 181259 to 182011)
ctctcgtctgtaagtgtgttatcgaaaaatcgacgctaatatatcgaattcgattgtccgataatactagttttatatgctccattacctgaatttgttaatttaggccttgtttggttacatggattggattagattagattggagtttaatctattgagtaagccggtaaactgattagttcgttagttggatgttcgattgtattagttctagaattaaaactgttaaaatctggtattacatgcgattttctaaccctagttcaatcgataaaattttcttttaatctctttggtaactacctttcaaaatcgattgcatggggtacggtaccgactaattttattatataatagcgtttaatagtgggcatcgacttttgctgtataagtttgaatctttacaaccgaacgagaccggaggttcatttactgaattatctaagcattttatgttgttcgaataaattatctttaaccggggatgaaattataagcctgttaaaacatatatgtagctactcgattccttagtttgaagggccaatgtttcgtagagtcttgattcgtagtgtataaaacaaactagttaattaatctgtagtgccatttacggtactgaaactgaaagataacgaaagacccttttcttcaaaaaccgagagtgtttattattttacccttttgtttggcaaataaaaaattgttcgcctctctcgtgttacaaaaaaaacagagcaaggcaaaggag

SEQ ID NO: 102394 - DNA, 962 bp, Mimulus guttatus
  Intron number 2 from transcript mgv1a005842m (locus mgv1a0 05842m.g) derived from phytozome v7.0 (chr-ID scaffold_24; pos 327518 to 328479 reverse strand)
aggcttcttggtgctgaggttttgtttctctccaatattttactcgtaaattgttatgttaatctgtatattctttttgcctttgtgtaggctgttaatttttttaaacttgtgcatcgtttttatactatgtgaaataatattggagtaccataggctagtaaatatgtgaaataaagtaacaaacattacattgtgatctgtttttataattgctagtagttgccagatccatgtgcctcagtggtgactttgactctgttggaatattattaggttttaatcttggattaagaatctattatattaggtaattcttgtctatctatgttagtaaatgtatgcctgccttagacaggggtggaagttagaacataaattccgatccgaaaatttctgattctggaacaataatttccactccagattttgaaagtttcgatttccaattttttcagaactgaaattggaatgcatattacattctgattctcgatccaattttaatttcagaaaatattttcaaaaattccgactttttttctttcgaaaattacacttataataccaatattgttatgtactttgtattataggtaactaaatggaattcgaattagttttccacttcaaaaaatggaatttttcttcaagtgctaattccgatccaatccgtccaatttccacccacctagtctaagggaagaagtctttcttagttaatggtcttttctcgtctctatgtaaagagagtgggttcattcaacattgcatgtttgtctgtctaaaactgtctggctattgtgtcggattgaatcttggccttttctacttttctattctaacaaactaatctaatccaggacagctacacattctctttcctacaacttcttcatttgaagcctttcttaatttcacatataggttagagcagttcattctggaaccgccacactaaa

SEQ ID NO: 102395 - DNA, 916 bp, Mimulus guttatus
  Intron number 1 from transcript mgv1a014275m (locus mgv1a0 14275m.g) derived from phytozome v7.0 (chr-ID scaffold_45; pos 1215551 to 1216466)
aaggctcagatttgggatacagctggccaggaacggtgattactacctctctctctctctcttcctcctttttttaataaataaaaaattattatcacacaattatttcctttcgttttcccgattcgaacaaatttgatttttttttttatttttttttattattaaagttgtagattgagtaatacgcgcctggatttagaaatttgccagtttttcgagtttttttttctcttgatgataacaatattttgggacagtgtaaaaaatttgctgtgttactgtggcaattattcctacatgtaaattgatgtagtagctattggctcaatttgcaaatctgcttttatatatatacatccacaatcaaaggggtttaatttagactgtaacaactgttctaattgtagtgttaagtataatttgtagtgttaagtacagttaaacctctataacttaatacagtcgggactagggaaattctattaatttagcgaattattaaattatcgagttcataatttaacatgttttcaccgagtcgggaatttaatcgaggttattaatttatcgaggttctactgtaactgcatctacaaagtcgaacaccattttcctcgaaaaattggaggaaaaaaaagaaccaagcaaactttgttatttaaaacccttcgtgtgttttttttttgccgtgggcttcaatcagaagtaatgctactttcttttggattacttgtaattctatttggataccgtgtgatgtacattcatctaaaattctactgtttgtcgagcaccacctttcttgaaaaagatagaaacacaaagcggaatttatttgttgagaaaactcaattgatattccggtcccttctttctaggtaccgtgcaatcacaagtgcctactatcgaggtg

SEQ ID NO: 102396 - DNA, 556 bp, Mimulus guttatus
  Intron number 1 from transcript mgv1a004442m (locus mgv1a0 04442m.g) derived from phytozome v7.0 (chr-ID scaffold_8; pos 1427519 to 1428074 reverse strand)
gcttccattctcgagccttctaagcctgtaattttactttactcctctctcactgcaacaactttttttttcttttactgatcatcatactgaatgttgatgcttgagctggatcttggtctctgcttctgtgattttgtacgattgtgatttactttgatgtttctgtgtggagattttcagtttagatttaaaaatgaacaagtgtttgatcttcgttttagtgacgatgaattcttattgcaattgaatctcgatacatacattatacagtagaacctcgataaattgataacctcgcttaaaataataatttattccggtcccgacttggtaaatacatactgaatttttagttcgataattcaatatttcgctaaattaatagaatttcgctagtcccggtggtattaatttatctaggtttaactgtatgtataatgtgtgctgtgtgtgtgggggggtttcatatgcctgtagtttttaggatgattgattaattagttaattaattaattatgaaaggaatttctgtattcagaatttcttcccggca

SEQ ID NO: 102397 - DNA, 711 bp, Mimulus guttatus
  Intron number 1 from transcript mgv1a001144m (locus mgv1a0 01144m.g) derived from phytozome v7.0 (chr-ID scaffold_122 ; pos 60173 to 60883)
atccctgctgctgctgcattcacatacaatctcaggtaaaactcaaacgcagaaaaaactcactatacatctccatgcacgatcatgatcatatacatctacacataattaatggcagcatctacaacttttttatttttattttgtttttttatttctcgttttcagaggagctcctttctcttccttcttcttcaattttttcttcttcttttagtaatacgtaggtaaccaagtaactataactactgttctgcattaatttctctatttgtcaattgtcgacgtgattctgcgtgtgtgtgtgtgtttttccttttcggtgggcatgtcttctctgcactagctagtaaaacgcgctctgatatcacgactgagtttttggctcaatttttcttgctttcccctttgcttttctggaaattaaaattcccgtttatggaagagggcttcgagattttacttattatttgtatatgtttttttagctctttccgttttgtaaagtgactttcagcagtagaaaatcccttttagttttgcataatttctctggctattctgagtttggttggaattgtgtaatacataatatggttatgtcattgtcttcacttgttttgagccttcagggtaaactgcattttggtgggaagttgataattgagtgtattgttgtcttgtctgtagtaacctgctgtattggaacat

SEQ ID NO: 102398 - DNA, 605 bp, Mimulus guttatus
  Intron number 1 from transcript mgv1a010644m (locus mgv1a0 10644m.g) derived from phytozome v7.0 (chr-ID scaffold_178 ; pos 413507 to 414111 reverse strand)
ctggaggagcacttgtccaagggtctgatcatccttttctttcttgtttgtttgattcaaaagaaacttctctgattcaactatttcttttctgttttctgctttttattttttttagggtaaattacaaccactccttaagtaggttaatttacgaaaaaacccctctttttgaattgttacatctatcttctcaactatgattttttcttacacctccacccttatgatatcaaattcaacataatcatctagatttcgtgaaatgtgctctagtttgtactcattttgtgtaaaaatacaatttatgatgcacaacaatctgatatatacatgccaaaaaacacatattatgatcatcttgcttccaaatgtagagttcgaatgggataaaacgggtacaaaaatgataatattccatataatctcgaaaattccactaaatttggatcgcaaatttatagttgagcggtggttgtaattaccctaataggaggtagtttccgtaatttgaccatacctcaggggtggttgtaatttaccctttttattttgttttattttttttagggaagctaaggaactggattctgtggttagggtta

SEQ ID NO: 102399 - DNA, 864 bp, Mimulus guttatus
  Intron number 1 from transcript mgv1a013435m (locus mgv1a0 13435m.g) derived from phytozome v7.0 (chr-ID scaffold_54; pos 1141576 to 1142439 reverse strand)
gagcaaccgtgacttcgtccctgcttccccctggggtaagtatttaattacttaccgtatatttttcaatttacatagaacctcaataaattaataacctagttaaataataatttattcaagtcctgactcggtgacaacgtacttaaattttaatttgatattttaatattttaccgaattaataaaattttgtttgtctcgactctattaatttatagaggtttaactagaggtggaaattggaacgaaatttttgaattccgccaatttcgatctgaaatatccaaatttgaaacacttttttcattctgatttctgataattttgatattcgatttttctgattatttttggaacggattggaattacatataaaattattggaaattccgattttcgatctgattttatttccgaaataaaaaattatatgtatattatttttggattgtttttctatttatgttttgcaagaactatgcttatttttttgtttgaaaatttgcaaggactgtgtttgctttgataaacgctttgataaactgattatgttatttttacaagtgtttacatttctttttattgacctatgttttggattctttcttgccttttgccagaaaattacgaaaataaattggaatggattttgtaatctcgaatttttggggacggaaattggaaactttttttatcttccgaaaaaaattggaaaatttatgaaaggcatttccgacccatttagtccgatttacacccctaggtttaactgtttttagactcgcggaatattcaaaacatctcgttgactttttcgacatgcagaactcttcccttctgggctgggaaacgcgctggtt

SEQ ID NO: 102400 - DNA, 752 bp, Mimulus guttatus
  Intron number 1 from transcript mgv1a004630m (locus mgv1a0 04630m.g) derived from phytozome v7.0 (chr-ID scaffold_289 6; pos 2362 to 3113 reverse strand)
gctgtaatacgggctttggacaggctgtccatcaggtaattatggtactcagttatatatatgtatgcgtgcgtgtgtgtgtgtgtgtgtgtgtgtgtgtgtgtgtgtgtgtgtgtgtgtgtgtgtgtgtgtgtgtgtgtgtctgtctatatatatgtgctctatgagttgtcattcgttttgctgttattatattttcttttaatgtccaactggttccatctggtagactgtttagagtggtgaaggtggtatgagaaagaaaggacttgagacctcgtttggttagagtgattagccatgattaattaaataattggactttgtttgatatttggtaaacccaataattttccgggtcgacccagaaatattatttgatcatgtcctatcttgattcactgagagattgtctattagacctcccatggtcaaaataatgcaattggggtttcatttagattatttagtgttatagtggctaatcttatcttaggaaccaaacgaggcctaagtaaatagggcgagggaatgggattttgggtgctcgctttttcttggcttttagttgtagaatatacacattcaagacgacacgcacacaaatgcatgtatattgctgaattatcgtaagctgatatatttgagaattttctgttatcgaggcgctaatttacttaaaatcttttgtagtggaatatttaaaaattggtttatgctaatatttttggaaatgttgtggtccagcaatc

SEQ ID NO: 102401 - DNA, 620 bp, Mimulus guttatus
  Intron number 1 from transcript mgv1a014131m (locus mgv1a0 14131m.g) derived from phytozome v7.0 (chr-ID scaffold_50; pos 1261047 to 1261666)
cccgcccggccaacgccagtccgtacagcacgaaggtctaaactttccgttttaattattattattattattatttttttaatttccgtttgattttctgtctttaaattgcttattatacccaatttgatggtgcttggtgttgattatgtcaattaaggtttgatttttttaatttattatttggttggttggaattacttgttgattcatctggattagggattcaaatagcaaagaaataaagaaattcattattttctttactccattttgtggtatgattcggcttcgattagtttgttataatcatcaatcatttacatcatcatctgaaataatatccgacaacaataattaattacttatcccgactctgatttcaaaaaaaattgaagtggcgtcgagttttagccaatttttcatggttatatctattgcacctaattgcatcgagtttttacgttctcgagaaacttgcttgagttacatcaggagtaaaataattgctgaagatttttttcgtcttcggtgtaaaaattatatgcaaaatatcttagtaatctttgttcatttaccacacagaatacaaagttcattcgtacaatcgggacggcttg

SEQ ID NO: 102402 - DNA, 1016 bp, Mimulus guttatus
  Intron number 1 from transcript mgv1a013029m (locus mgv1a0 13029m.g) derived from phytozome v7.0 (chr-ID scaffold_51; pos 892036 to 893051)
tcaagcaatcagcaataaatttctgagaattttctgtgagtattttctctaaaataatttccaaggaacattagggttacgacgtgtataaaatctgttggagattctgtttacgtatatgaattcgtgaatgtgtctattcgcccctgaatgctgattttgtttttgattcaaatttttggttaaattgatctgctgaattttgaagggtgtgtgcaatttaaatgggtgcactgaagttagaatgtggatgatcgtatgcacaatttgttaacatgtggcaaatttttgaatcccccaatttttacttgctgatgcattgaattgttgggtatcgttatgaatttttgatttgatttctctggtaaacaagtgattcgtctccgttgattgcaatgtgaattgatggtttaatttcggtgttctccaggaagtggtgttatttgaatggtttcagtttgtgccggttcttttttcttctgttgttactttatactgttgtaatgcttttcttttttttctcgtcgaatcaaaacctatatgttgtgtgttgttcaagtcaggaattgatttcttattaggaatgaaggtggcgtattttaaggttaattgtgcaaaagctatcttatcgtatgtattggttgtaacttttggtatatactttatttcctaattggtatggtgcgttaaccgattcttgcaataattcgactattgaagatagaagttaagttgtagctgaaattttgtgacacaccccgttttatacgattttctcgttccatgtaaatggagtatatgaatgttaaccgaacgtgtatgcaggctagaaactactgctctgagaacattatcttaccttaaaaaatggctgctctgaacctgaaactgagcctacgaatatgtggcaaaactactggcagtgatttattacatgtttcttgccatcttggactacgtttgtgtttattgctaatttgacatactttatcgatctgtgaaaggaacaagttgaa

SEQ ID NO: 102403 - DNA, 618 bp, Mimulus guttatus
  Intron number 1 from transcript mgv1a005663m (locus mgv1a0 05663m.g) derived from phytozome v7.0 (chr-ID scaffold_344 ; pos 31169 to 31786)
tctgcgagagggttccgtccgatttctcacccctggttcgtgcattttcttcccccattctcagttttccgatcattcaaatttacctcagatctgaaacttcttcgttttcgtcgcagtgtttacatttgaattcagaagttttctttgttaattaatttttagctgtttttgaatcgttaatatattgaaaaaatgaatcgttggacatattttattcgaaatcacagatctgccacgcatctgcatctgcatctgattgattttttttttttttttccttttcatgttagatctttttacatttgattttctgatcgcatttgtgtttttatttatcgttggtctggattgatgtttcgattcgtcaattgttcttcccaaaggggcaattttcaagggtttgatttatgtgtgtttgctgatctgtgtgaacgcttcaattcgacatgcagttttaattagcaaaattgatttatgtgtttaatgggcagttttaattagcaaaattgatcatattgcatgaattatccatgttcctttttgagttctctgttgaaggattttgctttacaatgtgacatgcagttgttgaaataaactaatcgaggaaaaaaa

SEQ ID NO: 102404 - DNA, 892 bp, Mimulus guttatus
  Intron number 1 from transcript mgv1a016387m (locus mgv1a0 16387m.g) derived from phytozome v7.0 (chr-ID scaffold_2; pos 2523372 to 2524263 reverse strand)
tccctgcggcctacgctctcagtccattttttccggtaattcagttcttctatagctcctctcaatctcttcttcttctgatttttgcaaaccccatgcgcaagtgtaactctgcacctctctgtgtgtttgtgtgtgtgtgagagagagagagagagagaggtaaaacgcgtgccttttaaatttatcgagtctaacgaacaagataatctaacgaacaagataatgctaattgaagtaccaatttcaaaataaaaaaataaaaaaaatagggaagattgtgctgtaatttcagaaaatgtatcagctagggctaaagtgaattttttttaatatttttttttctgttaatttggaattggaagtgttagaatttagggtgtgatttttatggaattgctttgaaattagttaaaagcaaatgaacatgatggttaatatgaggaaggtagattactggatctctgttttgaggactggtttatttggttttccgataggtgatagtgattttcttggctctatcattttgtatctcgttttcttcagtcgatctgctttatgaaactgcattatgcattgctacttctgaatgtgttatccgtatctacatgttgcacggaaaatcccttattgaaataggtatgccgtatgcgttctcttgagttcgatagtacctcactcacttgaaatgcttgattcccgtttattttacttctgagcaatgctctgctgtgtgttgttctgtcttctattttatctaaatttagctgaaatcttttggtaacaaaacgaaagttaataccctgtttacacgatcactacctaactttagctatatttccctttttgtccaggttgcatcaactaaaagccgagtgtgtgaactcca

SEQ ID NO: 102405 - DNA, 640 bp, Mimulus guttatus
  Intron number 2 from transcript mgv1a001286m (locus mgv1a0 01286m.g) derived from phytozome v7.0 (chr-ID scaffold_7; pos 722518 to 723157 reverse strand)
acgaggtgaaaagaaaaagagacaggaaaagagaggtatattttggtcatttcttcttttttcgttaccttccaaattcaattatgctcttcagaaacattatgtgatcgttttccgtttctgtttttttttttataattcataatcatcgccacgtcttcttggtcaaattttgttgctcattaaatagttttattgagatgcaatgctcatcttttgtgtatttgttttgcctataactaatacattgaggcctcgtttggttgccaagataggattaaccaagataatattatataatctaataaaaaccctattttttactggaccccgcaaggccaacaaaaaagctccctgaaaggaatgacaaagcatgataacataatatttcacagtcgacctgtgaagttattgggtttaccaaacatcaaacaaagtccaattatttgattaatcatggctaatctcaccaatcaaacaaggcctgaagttgtaggatactaagatgagtgaagtttgggtagttgggtttgaagttccagtgcttttaatttatatgttatataaccataaaatatgtatgagcctgccctatttttcctcagatttcagggtacaagagctacattgctgcagatcc

SEQ ID NO: 102406 - DNA, 677 bp, Mimulus guttatus
  Intron number 1 from transcript mgv1a001286m (locus mgv1a0 01286m.g) derived from phytozome v7.0 (chr-ID scaffold_7; pos 723132 to 723808 reverse strand)
ctcaatcaaggtccaatttctagattttttttcattcagtttttctctttcgttttttgatttgctgtatttgttattttgtgttttttatttacctatgtagtgattatgtgtgtttagccctttgccaatataaatagaatatggagagtgattatttggtgggcagttaggttagttctggagttgtttctttctggactgaattcttgcatgtggtgttggaactgtggttgtagaagagtatttagagtgtatggggaatgataattaccagagtacagagacaaattcatcagaagtgaaattttttaacaggaagtggcaatgtgctaggcttattaatacaattagcttcatttgctgatggtttgcagcatgaatcgtaaattcttaaccttcttatttgtgtgagaaatatttttactagacctctttactcttttgtttttagacccaattttatgcgtttctccagaagcttcacttttaagttatgcgcttaaatgttctgctttatagatcctcagttgattttctattatgtaaatcacaggttctgattttttcattctttttatccatttacttctacacttcactttgcatagctttataagtgcctatttgtttttcattcagatccatttcacgaggtgaaaagaaaaagagacagg

SEQ ID NO: 102407 - DNA, 663 bp, Mimulus guttatus
  Intron number 1 from transcript mgv1a013661m (locus mgv1a0 13661m.g) derived from phytozome v7.0 (chr-ID scaffold_64; pos 185138 to 185800)
tgctcttcaaccgttggtcatacgacggcgttgaggttactttctctctcttatctatttcgattcaaaacgttttttgtcgttgtgtttttgtggtgttcatatgttttttatacgaatctgagatttatcttcatcgtttactcttaaattggctgctaacctacatttgatactgttcaataaaattggattgctgtttgctgcttaatgaattcgaattgatacttaatattgaaataataagtttagactagtctgtattttccctatatttttgtgcatactttcataatttgctgcctatgaatgaagtttttatacgattagctacacatccactgaaattgtctacctatcagtttttactgcttatgaaattttatacgattcagtatcagtgttttaatacttgttttatatgtggtttttgtttagctgttcatatgtattaatcgaatgggaacatttattatcttgctgaaaatttgatgaggtgtttagatttgttacttatattgaagttcagtgaagaataagtatattatacacaacagtattcgtaaaatgattccaaattctcactgaatattctttcctgaaaatttatattctcggttctgtataggtgagtgacatctctgtggaagattacatcactgc

SEQ ID NO: 102408 - DNA, 380 bp, Mimulus guttatus
  Intron number 1 from transcript mgv11b021871m (locus mgv11 b021871m.g) derived from phytozome v7.0 (chr-ID scaffold_4 6; pos 174338 to 174717)
tgaaaggcttatatctcggtgggggtatcgtattaataaaatcggtattgtcttccataccgatttactatttatccatgttcaaattacaaaagaaagtgaaccaagagctataaaaacttcaaagattttttttgtggggaggatcagaatttggtaacaaaatagcatgggtaaagtggaagacattgtgcaaacctaaagaggaaaggggctggtattgtgggacttggaaaattttaatgttgctcttcttgctaaatggtgttggaaattattgacaaatggtggctggagaatcagggatacggttttttgagggatgttagaaaatagtatgaataggaaatcatacgaaattttggaaggacccgtggttt

SEQ ID NO: 102409 - DNA, 615 bp, Mimulus guttatus
  Intron number 1 from transcript mgv1a015496m (locus mgv1a0 15496m.g) derived from phytozome v7.0 (chr-ID scaffold_179 ; pos 265456 to 266070)
aggaagagaccagacgcctggctcaagtgtgggaggtaataattaattaattaattcactttgtaattttgtttagaaaatatgagatttatctcaagtatatacgaagaaaaacaaaatattgatatttgaactatgttgcttatttaaattcaaaagatgtaaaaaaaattgattaaaatgtttgtgataaaatcgagtcaattagttgaaaataagaatattattcacaaacataaaaatgctcttttcgttttattttaactgtcgctttggggaacttttcatcgatattgtttgtcactttccaatgatgaatgtgtcaaattccaatttcgccctcattattcctagattttttacaaaatttgattcttacaaaataaatcgaacaactaatggagagaattactggacaaatatatattttagtcatattgtattttttttcctaagatctatacatatttattgatttttttttactatgtgtgccgaaatcttaaacgacgtgtaatttaaaaacgaacgacgtaatttgatatattaatgttctttttttctttaacaattttgatatattaatgttaggaattggaagtattgactgatcca

SEQ ID NO: 102410 - DNA, 595 bp, Mimulus guttatus
  Intron number 1 from transcript mgv1a006939m (locus mgv1a0 06939m.g) derived from phytozome v7.0 (chr-ID scaffold_24; pos 1388256 to 1388850)
ccgacgctttccgccactccgatatctccaaggtgagtttttctagtgtttgaactcaatatttagctcggatcagctgttcgacactcagtattgcgattttttgttgttgttgttgttgataaatttcaatatattgatccattttttcggtttatttttatggttgttgaagaaaaagttatggcagatttgattagaacgtcttgcttgattttcagcttctgtactactgttaattactttttggctgatggtttgtaatggaaggaaacacattagcaaatgattgcttgtactgatttagaatgctgtttttcgattggaagtcgtcaacgtacatagttcaataagaatatgaccagagtgctgttgttcttgttgattttgttaaaaataaattaaaattaaaataaattcagacacatataaatgcaatgaggattgttgaactatatcttgaaagtggcaaagtagttcttcttgagccagctcgtcttcatttatttgtctcgattttttgattatttatagtagaacttggttttctcgaaatgctattaacgaatatattctactcattgtctaaggtatc

SEQ ID NO: 102411 - DNA, 836 bp, Mimulus guttatus
  Intron number 1 from transcript mgv1a004499m (locus mgv1a0 04499m.g) derived from phytozome v7.0 (chr-ID scaffold_83; pos 1020173 to 1021008)
gaacccaatttgggggtggcactctccatattaaggttttttatttgtcgccattcttctgtcttgtagatgtaattaatccttcttgtgattcttgatttttgttttccgaggttgttttacatttgatgattggtattgataatattggaattttgttgttcaagtttttattttgaatatgggagaatacgggagtaaggtcaaattacgaaaaacctcctcttggataattacaaccacccttttatctgatcttatacgttcatccttatggtgtcgtcatcaaatttaacagaatcatatagattccatggaatattctctggttttactcattttgtgcaaaaatgcagtttctgatgcatcatgatgcaccaccacaatcacaatctgatatttacaagtcaagaaacacatgttatgatcatcttgtttcaaattgtggagctcgaatagtgtaaaatgggtacaaattggagaatattctacataatctagaagattccactcaattcgacatcataggggtggacgtgtaagaagattcatagctgaaggggtggttgtaattatccaaacatgaaaggtttttttgtaatttaacattaccttaggggtggctgtaatttaaccttttgaatatttatgaggaaattgtgaaaaaaagggtgggcttaagttaatgcatattcttctagattggttgtcgatgcattgtgaaggtgtgaatcagaaactattacatgtggaaatagcaattaatgcttatttttgttacaagagtgttaatgtttagtttcgatttgccaggttagcaaagcacatagttggac

SEQ ID NO: 102412 - DNA, 336 bp, Mimulus guttatus
  Intron number 3 from transcript mgv1a012496m (locus mgv1a0 12496m.g) derived from phytozome v7.0 (chr-ID scaffold_1; pos 2107555 to 2107890 reverse strand)
ttcaggtaattatcgaaaatgttttttgatcggctttctagaatttccgactttcttcttctggtttgcttattataatgtaatagagtaatttaatgagctgtcgtaaaatatctcggattctgtcacaactatattatttaatggtctcaactagttaacaccgatctttagcatttttagttatgtttagaactcatgtgaatatactctcaatagatattgcagaggatacgatctattgtttgctttctagatcttacataacataggctgtaataaattaacttcccgtcttttcatttgtttacattggtctgaattatgcgcaggata

SEQ ID NO: 102413 - DNA, 512 bp, Mimulus guttatus
  Intron number 2 from transcript mgv1a009254m (locus mgv1a0 09254m.g) derived from phytozome v7.0 (chr-ID scaffold_7; pos 2030471 to 2030982)
aggtacatcaactttgtagttcaattttgctttgccctgttcttgtagtacactacttactatcttcatcattattaattggaatggcctttccgattccgatgcgaaattctcgattttggaactatattttcattccgaactccaatacgattcataattttgtttttggatcggttttggaatttagatgagattccgattgtcggtccgattttaatttccgaaaattcagaacaagtttttccctatccaatttccggaattccgaatttcaattttcccgaatacttttgaaacggaattggaattaattttacacttttgaaaaaaaatggattttttcgaaagggctaattctgatccgaaaagtccgatttccacccccagctattaagaaacaaagtaatcatatggattttaaagattaacaaagcatgttgattcatttttttcattttcttttttgcgattcaggagttccgttctcaacaagagaatatttgttccga

SEQ ID NO: 102414 - DNA, 1057 bp, Mimulus guttatus
  Intron number 1 from transcript mgv1a010427m (locus mgv1a0 10427m.g) derived from phytozome v7.0 (chr-ID scaffold_6; pos 2135716 to 2136772 reverse strand)
ttatacgatattttcccactcaggtattaattgaatgctgtacgtattcgtttattggataaccgagattatatataattctgattttttgttttgaaagcacctttggtatgtacttggcatagtacatttagtttgtgaggaagattttcggccagtaaatcttttttttgcatatgttttgctaccatatcaagaaccgtacttctcaactgtaactagtttgttttgaaactccgttttctttcgtttttcttattcgttacttttttcttaacaagaatatacctcactggataatgatgttttcctagttaagggggtaatacattttccagatttctatcagttaaaatttagcgtcggtgttgataccaagacatctgtaaactcattcgtttcgtcttctcatcttaatatttttcactatagaaataactaatgtttggtaagcttttgggattccgtttccattttattctggagaaaggtgttttggtagaagaatttagaaataaaataaagtttgtttatgttttgagaggagaccatttgtactgtagcaagtcaaatcatgtctgaaaaatgtattttggtcctttggaagaagaatttgaaagataaagtgattttagtgaagacaattttcactgtagcggtcgaatcatgtttgttcgagagagaaatatttgaattatttttgggggaaattttttgaaaatattgtagaaagataattttcattttggggaaagtgtgaaaagaatttgaaaaccttaccaaacatagccgaggaacagattctgattcttgtgtatttgttgctacttcttaccgaggaacagattttaaatttttaaataggaagaaatatcttctcataagtaacatacaggggacttcaaatagattttgtttttcacaattatgatgctttagcccgtatttcgttcgttcggtcgttcggtctgttttttttttttttttgatacccgatatgtgattttttaaattatcaacaggcgttcaactttgcgtttaaaggttacttcaaaag

SEQ ID NO: 102415 - DNA, 715 bp, Mimulus guttatus
  Intron number 1 from transcript mgv1a016130m (locus mgv1a0 16130m.g) derived from phytozome v7.0 (chr-ID scaffold_92; pos 932781 to 933495 reverse strand)
gatttctcggtgagtttcttatttagtttcatttgtactgttatgcaggcatagaggtggaagacgaatgtttataatccaacggctctcattactccgtggatctgtattttcaatcgttttgattgattggttcaatcttgttcttgtaaaatattgtttcttgatttcacggttctctctgtttttatctactactaaagattaaataatagactttgtgttatgagaaaattacaaatcaagtaattctaatatgaattactgttcttagcatgtttcaagattgaaatttgaaagtaaagtgaaaaatggtgttttcttgatttcgtagtgctcggcctcgattcgtcggttgtgttttcgtttatcgtttcctcgtatttttttgatggccctgtcaagtattctaatttgaattactattcttagcctgtttcaagattgaaagtaaagtgagaaatggtgttttctggatttcgtagtgctaggctcgttcgtcagttgtgttttcgtttatcgtttcctcgtaattttttcgatggccctttactcaaacgggtttaaagcgattaaccgtattgaatctgtctttgtagatggaggttttcgatggtttatatctgtatccagtgacgtaacatttgatctgcggttattttgtggcagaaatatcgaggacattagtgatattttttctcgattcgaagaaata

SEQ ID NO: 102416 - DNA, 676 bp, Mimulus guttatus
  Intron number 2 from transcript mgv1a025764m (locus mgv1a0 25764m.g) derived from phytozome v7.0 (chr-ID scaffold_607 ; pos 24917 to 25592)
agaacattgcccaggaggatcttaacactattgtctgattttcattagttaatgtgactgaaacttagtcttctttctattgtttgcttgtgatttcccgaattccgactcaccacttgttttttttccttgcatgacatcgatcattttctgcttatgggaatatgacagcaagagatcgatttgctaaaggtaattttggcgtgttatatttaccggtactgtgaagtaaatatatccgaagaaattagtataaagtgttagctgcgataatggtgggtctgtttgatgtgtatattaggtaaactttgtaattagtgctaattaaaaagtttgatttcaaaataacatcattcttgtggctcaaacccttgatcacaaataacagagtttatgtgggtcaaaagtgtgttctttttaggatttatgaatgtcaatctcgtgattgttcaagacttaatgcatgaaaaaaataatgaccacatcttttccatattgttgttatgttggtatcacattatgctgtatgctttcaactttctactttggtcttcatgctgcaacattttaaaatgagactgcactactgttaaattgatttctgcttttattcttattgatatgtggcttatctcttgcagaatttgaatcataagaacattgtgaaatatcttgg

SEQ ID NO: 102417 - DNA, 684 bp, Mimulus guttatus
  Intron number 1 from transcript mgv11b017559m (locus mgv11 b017559m.g) derived from phytozome v7.0 (chr-ID scaffold_2 68; pos 126334 to 127017 reverse strand)
tccatttgagcgagtgtgtttgtgcatgtttgttgatttgtgctaatgtcctaggattgtagtttgtgttttcatgaacctatttgcgaatgcacttttgcgtgagtacttttgtgcatgattttgtacttttacttatgtgcgtatcttttgtagcgagtgttttgtgcacgtttcttgatgcgcattcgtgtcctcgaactgtagcgggtattttcatgatcgcttttggaatccaattttgaccatgttcgagtccgaatttgtaaatttgacattagacaggaattgtagccagctgaaatagatttctaatgccgccggaaccagttgatttggagtccggatgagaaagttatgctcgacttcgtggacactaccgaagatgctgagggatcctctcttctaatttgattttattttcctaactgcaactcttttcttactctttgatcatttttgcttcatggaaaactcattatcaatttgtacctatagaatactaaatccaccaattaaaacagaaatataaattaatccataaaaaaatccacgtaaacgtaaacgttgagtgttatttctacactccactgtatcatttgtatgtagtgttcttgctgttgtttggttctgcgtattaaagtcctagtgttgtatttcgtgtttttaagaacgttgttgcga

SEQ ID NO: 102418 - DNA, 631 bp, Mimulus guttatus
  Intron number 1 from transcript mgv1a003948m (locus mgv1a0 03948m.g) derived from phytozome v7.0 (chr-ID scaffold_142 ; pos 140187 to 140817)
ttctctacaggttttcaacttaaatcattttgattgaaatttttattgtttatttatgcggagattgaagaacagtattcatgatcctgtttggtattcaggggagtttagggtttctggagacgtatggttaataatgttgattgatttgctaattagttaattaattatttggacagtgtagatataaattgagttattttttggtaaatttcacgatcctgtaattgggatgattgttctatgtaaatgaggttgggagcatcttagatttgcaaaacatttattctaaaattcaatttttataggctggtgaagacttattattgtaattttgaattatattaactgtctacaaagactaacttttataggctggtgaagacttatttttgtaatttttatatgaaagaaagctaattgcgctggggcatgatcatctctttcaagagtcaactaattggtgtaatgcttcgaaaagaaaaaaagaaaggatctttgattttattttcctttctttgactggcatagagtggttataagtttgttcgagttcatcgattgttgttgctgtaaagtaatgtttgttttttgatatttgatttttgtagatatctgaaatatttgggct

SEQ ID NO: 102419 - DNA, 516 bp, Mimulus guttatus
  Intron number 1 from transcript mgv1a017388m (locus mgv1a0 17388m.g) derived from phytozome v7.0 (chr-ID scaffold_113 ; pos 561230 to 561745)
gttatagtaaatacattaaaaataaatgaagaaaattggtatatacctttttcaagtaaccaactccaaaagccctcgtaactttaagcttccctttgacttttccacccactaccgtagaagggtcgtccggatgatcgttgataagtttgactctctcgatctcattatcaaccgtatgactatcggtgagctggaccgatctcagccctccattttcgttcatctcgattccctcaccatcatacgtagccaaaacagctctactatctccaagattgagcaaatacaaattcttcccgtgcagcaaaacaatcaaaacgcaagaaccgatcgaaactaagtcgggccggtcgtccatttcttgctccaccatgtgaagaaactcgaactcggcttgctcgacagctttttgaagactagttagaacattgttcttgaatgtagaattgtccgattcttgaaaatcgaggtcccaattgagtaaattcaggtgggacgcgattgtttcgtaca

SEQ ID NO: 102420 - DNA, 941 bp, Mimulus guttatus
  Intron number 2 from transcript mgv1a015721m (locus mgv1a0 15721m.g) derived from phytozome v7.0 (chr-ID scaffold_8; pos 67524 to 68464 reverse strand)
aggtaaaattttcgaatatgaaagcaaaataaattgagatttttcttcaaatttgtcacgtttgaggccgaaaattgtagatgataaatatagtcagctagacagttaatgataagtagagtaggagaattaattttatattaaaattgttaaaactaatgaacaatgtatattttgtccgtgtatccttctcaataaaggtatgagtatttatacacaaaataataagctaaacaaggaaatctaattaaatcaattccaaaattacattctaatcaaatatcataattatggtactcatatatattaatatctaattatattccataattatggtactaatatatcttaacaaaaatgactatagccactaaactaaaccatggttttaaaattaagggtaaatttcaatcacccttgaggtatggtcaatttacgaaaaaacctctcttgtttggataattacatctatccctacactatgattagttcttacaactccacccatatggtgtcaaattcaacataatcatctagatttcgtggaatgtcatctagtttgtactcgttttgtgtaaaaaatacagtttctgatgcaccacaatttgatatatacaagccaaaaaaaataaaatataatgatcatctttgttcaaaatgtggagttcgaacgggataaaatgggtacaaaagttataatatttcatataatctcgacgatttcactaaatttgaaaccgcaaggatggacgtgtaaaaaaatttatagttgaggggtggttgtaattacccaaacaagagagatatttttgtaatttaaccatacatacctaagaggtggttgtaatttaacctaaaattaaaaataaatgtcctacatttactaaaagtggctacgtactatttatcacttccctttgaataaatataaattacaaaag

SEQ ID NO: 102421 - DNA, 738 bp, Mimulus guttatus
  Intron number 3 from transcript mgv1a000052m (locus mgv1a0 00052m.g) derived from phytozome v7.0 (chr-ID scaffold_6; pos 684186 to 684923)
ggggcgataagagaattctggcaaaaaagtaaagttattttcttaattatctgttgataggaaaattaaaacatttacgttctcctggtagaaaaatatttttatgtacgatatgtttttgatattatatcgaagagctcataatggccatacgtgaatattgttttcgattttttttagcctcagttgtttctgaagtaagttaattcacactcatcgtggtatacttaagttgaatcaccctttttgacacataaaatgatatttttgtttgaaaggtgttgattttgtagtgcaaatggcgcaacttgtgattttatgtcagtcatatagttctagtgaacaaatagctatggccatggttcgatgacgtcttctgttttaggtcatttatatttctcttataaaaagtctggaactttcaagaggctgaaaagttcggaaacatgatggtgacaaagaaaaataaagggaaaaaaaatacaattgtttgaatgcccaaaaacatgattttccaggttgagatttgtcaacgtcatttggtctgtttgctgagtcagtcgccaagcgttattagtccttatatctccaatatttatgcatgatttaaagattaaactctcatttgagtatttctagtggaacttcgagtttggtaattatttttcccatgtttcatattgtataatttcatgtaattcaggtctgagtttcaaaaactcattggtcatattgttc

SEQ ID NO: 102422 - DNA, 976 bp, Mimulus guttatus
  Intron number 1 from transcript mgv1a003705m (locus mgv1a0 03705m.g) derived from phytozome v7.0 (chr-ID scaffold_102 ; pos 645691 to 646666)
gaacagcttatcaacttcattataaggccgcccaggtgagaaaccattgtttcttcgactcttcgtttattgcgtatgcatgtatttccatttcgatgtagtttagggttaatttggggtttgagggtttaggttttgcgttcaatttaatgaaaattttatgctattatttcttcgtgggttttttccttttcctaattgatttgggattctgatttaggttacttgaattcttcttttctctttatttgatacttttatttggggattttgatgtaaataactttttttgatttttttagtatttaggttgcattagatgattgttagaaaatatcgaaatctcttactatgttagtacgttagacgaaacttgaacccgaagttacgtgatagtgacataggttgttgctcttctaagatagttctcttcgtttttttgcctggagtggttggcaggctaactgaagaacgaagaaagaagtattagccaccaattttagttcatttttatttaccaagtagtcaggctcaatgacaaaatatgtcggtattgttttctttattagggttgttacaactacggctaaactaggaaagaacaaaaacatgaatctcgggatacggtattgttttctttattagggttacaactatggctaaactagggaagaacaaaattatgaatctggggatacgaaatttctatgaaagcagggacagaatatctactatatctcttattggttcggttggtatgcacaactctgttttcgtgtatttatactcatcgtgaatcggaaccatgtacgattattgtatctgctatggccatacttgtctaacactgccttgctttgtgtcccaagttcggacggacaaaaatgcatgtcatcattgttaatatcaaattatcaatcatacatatccaacttacttatattcttggattgcagagctgagtataatccaaaaa

SEQ ID NO: 102423 - DNA, 792 bp, Mimulus guttatus
  Intron number 2 from transcript mgv1a000127m (locus mgv1a0 00127m.g) derived from phytozome v7.0 (chr-ID scaffold_43; pos 1511310 to 1512101)
aatccaaatactagaattttggcattaaaaggtgaatgcattctactaaacatttctaattgactaatcggttacatattttttggtcatgttaactagcggttgttgccattttaaaagagtattttgtatgttgggtgtgcaatagttttaattatcccaaaagagtcgaaagtttttttgaccattcatgttttctgtgtaaacgacttagaaatttggaatcgtataaaatttgagaaagagaaaaatgtttggaagatgtacgttgtagtgagtacggaaaacaggaaaattcgtgctgcttagagaaagcgaaatagggaatgcgagccaggacaatggcagaaaggatttgataatggtgtctctaagctaggtctaagttttctgcaagctaatactatgtagagaaatccctttattcctcatatgcataataagattgcgtttctttgggagatgttaatttaggcactccgtgataggcgtcatagaggaaagtataaactctagcctcaaaatgatataaaaatgatggctgcttagttaagtcgatgctttctgcgaattgttatcttatggaaaattctccgacctttgtgtttaatatggtttattggtacggaaacaccagaaatcgcttcagtgtttctctaaaaattaaaggacagagtcaaattagcgtgtattatagttgatgctgcttcgcttaatcttgaccctaatgctgaaaatattagttttcttgatgaagctcaacttgctggaaccactcaagatcacttgcaa

SEQ ID NO: 102424 - DNA, 941 bp, Mimulus guttatus
  Intron number 1 from transcript mgv1a005157m (locus mgv1a0 05157m.g) derived from phytozome v7.0 (chr-ID scaffold_18; pos 848607 to 849547 reverse strand)
ataaaatcactgtcaagatcattcccaaatctaaggtctgtaattatttgctaatctcttgacttatttgctaatcctgattaattaactacattaaaaaaaccataaatgttcatatatatggtttaatgagaatgatcatatctggctacaatctagaattgccaactcagcaatttatatataaataaataaatgctcatatggcaagctagcatttaaaaaattcactctcctgattcaagaacatgtttcttcacctgttcgtttcgatgtttttggggtgacgatcagtcgtcgtcttgattatttgaatagtccctttcgcaagaaaatgtgatgtaacacttaaacctctataaactaatacagtctggactagcaaaattctattaatttagcgaaatattaaattattgaactaataattcagttggtttttaccgtgtcaggactagaagaaactattaggtaagcgaggttattaatttattgaggttctactgtggtgtgaattttcgattattaaaaccacttcttaagtacattgtcacggttagatcgattgcttcgacaaaggggctcctctgaaataatggtgaggaagaagtggttgagtttgcataaccgatagttttctcgagttcgactattcaaagcataaaacagctagatatttcaaccaagtgtgtacaaaataaaggaactaatattaaacgtgtagaaagtgtcacatataccgatgctcgtttagcataaatattaaaattatttttcgtttcttatatagttgttttggttgttaaaatcgggattttagcattataagcagacaaagcatctcctcacctctttttttttttttttttggtttttattcgaatatttggatttttttctcaacagattacgacagctattgctatcgaagccgttagaag

SEQ ID NO: 102425 - DNA, 938 bp, Mimulus guttatus
  Intron number 1 from transcript mgv1a022527m (locus mgv1a0 22527m.g) derived from phytozome v7.0 (chr-ID scaffold_16; pos 942474 to 943411)
cggcgacgagtgccactgggccgtgtgggccgacggtttctatctctcgggccagctttcgcaggacacttataaaaagaaatactattgggagagttcaaattaattgttttaaatttgaatggcattgtattatgcctattttatatgaagttttaaattttatgcttgaccgatttttacttatacggacgcttaaaaattataaattcgagatctaacttataaatattgacagaacttcgattatgtgggatgacgaatttgtaaataagttagagaagctatttattagttttaaaattttcatataaataatttccggcgactttgtaattaaaattcaaaattcaatttaaatatgacaaaaaatgctaaatttgtaaacttattgcatgtaaaagtgagatggtataaactagaggactaaattcataattaaaccaacttagtggaccaaaatttcaattctttcctctataatcaaatcctaaaaacacatactaattaaccaaaaaaaaaaaaaaaaaaaatcatatatgtattatgtgggatatacctataaattataatcatgacatttcaaacttaatttactacatttaatttcattttttttccctataaaatagacgaaattcatgaagaaaatagccgaattaatattattcaaagggctacactattaaaaactcatttaaaacttcatgtatttaaataattatttttttcaattctgaaatgctatcccgtgcatcgcacaaggataaatactaatcaaatttaaaagtcacatactattttcgcggtaaagaacctatttatccacattaaaattggacaaatttaattttgaagatttatggtatcatatgttcaaattcgataagaaaattatctttccaccctattgtaattcgataaatccgattgtttag

SEQ ID NO: 102426 - DNA, 448 bp, Mimulus guttatus
  Intron number 3 from transcript mgv1a007250m (locus mgv1a0 07250m.g) derived from phytozome v7.0 (chr-ID scaffold_87; pos 246141 to 246588 reverse strand)
atcctggtatgccttccagttataatttgaacattggttgacatttttcgagtcattcgatatctctttcctccttattcttcttaaacatgaagagacgcccctaagaaactatctgaatcaaacaatacaaatattgaaagagtgaacaagtcctgagtcatttattctaccctttattctttgcctctgttaaatcactgagctgaccagttacggtttccacattatttttttttaaataatctatgatgaattcaaataaacacctttttttttattattttttttaataagaattcaaataaacacctagattgttagggaaaaggtacttgtgtttagcaatttattagattattatttttataaccgttatacaatggttaattgtgctctttatatatctgcagttgctgcaatacgcaacgggaaagaagttatatta

SEQ ID NO: 102427 - DNA, 819 bp, Mimulus guttatus
  Intron number 1 from transcript mgv1a007250m (locus mgv1a0 07250m.g) derived from phytozome v7.0 (chr-ID scaffold_87; pos 246818 to 247636 reverse strand)
tgcgatcggttgattcaagagcctgcaaatttgcggtacgctttttttttttttttcacttgtgcaattttacttactagatttcgattgttccaacaattcattttgtgcattgttttgaatttttgcttgctttctgatctgacaatgcatgtggtattggactttcagagtctaatggaggctggtgttagctcgtttttttttttttttttttttttttgcatctaatatttgctcacttgtcgataatttggactttagacggtgttttggtatcggggaattgccgtctgttcaatttcgtatgcagagttttgacgaactcagtttcatgaacgaatctgtgaaatcgaatgcattttataaatgatggatactatttagttgtatctatatttttgttttgtgatggttgatgttggaatagtgacaaattgcataatacgcttaaatcgcagcttgaaaaaactatgatatttctttcatgtagtaagttcacttttcttgtaagccctttcttcagggaaggtatatggtgcatatgcaaagttaattagacacgctagaacactttgattctgcgtatcttgatcttgctcctggtgaagtggaattggtccatcaaagttaaaattcttgaccgattaatccaatttgtagatatgttatccgtcaatttccatgttataatgtttaattcctatcgtgctcaatttcttgattataactcgtgcattagctgtactggaccatgaccaatagtttttgttgttgtctgcaggggggcttcattgcctcggcaacctgacagttagc

SEQ ID NO: 102428 - DNA, 749 bp, Mimulus guttatus
  Intron number 4 from transcript mgv1a011882m (locus mgv1a0 11882m.g) derived from phytozome v7.0 (chr-ID scaffold_8; pos 1416633 to 1417381 reverse strand)
tagcacgtttggcaatcgaacattgtgttcacgaggtatccattttattatctcatcaccaaaaaagaaaagaatgggaaaattacacttttcgtccctccagtttacctcgatttcacatctggtcacccttgttcacaaagaaacagatttagtcctcaacaatttaacactttcggtcttctccagcaatttaccgtcagttatgtcagttaagacattaagactgatgggcacaagcttgattttgtgacaaaagggaccaaaagtattaaatttttaaatcatgagggagtaaatttattttttgcgaacaatgaggaccaaatgtgaaattgatgtaaacttgatgaacgaaaagtgtatttttcccaaaaaaagaatattgccaaccgaataacgagctctttcaagtttcatattattcatcgaattctttgagagtgcatttggatggagggatttgggggagggatttcaaatccataataacaaatccctcgaacttgtttggattgagggatttggaaatggatttcaaatccccacccctcctttttagttgattttggagcaatattgatggatttcaaatgactccaaaattggagtcatttcaaatccattccccaaatcaaatccctccccaaatccctccatccaaatggaccctgacattatttgaactttcgattatagttccgtttcagtaataaacagctatgtttattctcaggctagagggctag

SEQ ID NO: 102429 - DNA, 1060 bp, Mimulus guttatus
  Intron number 1 from transcript mgv1a012991m (locus mgv1a0 12991m.g) derived from phytozome v7.0 (chr-ID scaffold_48; pos 743228 to 744287)
aatttggattctctggaggaagttttgcctgtgaagtacgttaatttgagttttattttgtttaatcgtcagttttttttttaaaattaaatcctagggttttgagttagtattatgtttactgattgttgtataatttagctgtagcgagactttttgtggtttagggctttggatttttttttgttattgagggacattgggtatttattgcaagcttttaggatatgttttttcacttaggaagcaaattataagattgctgcattgtttggtttcctttttcatttgagggtgtttcattgaaagacattattttggattgcgtacgaattttttttggggtcaatggaaacatctaatgcattgttcatttaaaaaaaacacttgatgtggggatggtatttcactatttcagaatgtttgactttctttaacaatttcttcagttagattttttatttatacgtctagctccttgtttccacaatttgggtggattgtactacttcgttgttaatgaacttgttgtatcattaccattcctttattttctttcttgagttacagataaatgataaatcgatcagtcgacactaatcttgttgttattatcctattctgagtaatgaaaactgtattgccttacctctttgagactgggtagtgttgtacgggctttactcgatttacttcattttcttcacccatgtttcaagtaatcaaagtttctgacatctaggttctaaaattagcattcatatgagtgttattgtttcaaaatggatgccgggagttaattcatttgttttttttcctgtgtattgtatcatgctgtttcttttttatctatgtttgtcattctgaatgttggatatgtatgtgcgttagtgtcatcctctaggttattatgccggctctatagtgacatggagctttcttacttttaagttgccgttcattttttgttgcacatttctgagataatacctctgttctgatattatttgtgaaatttatttcagaaaaagcatatcgaagttctactgcggtaaatcta

SEQ ID NO: 102430 - DNA, 354 bp, Mimulus guttatus
  Intron number 1 from transcript mgv1a006349m (locus mgv1a0 06349m.g) derived from phytozome v7.0 (chr-ID scaffold_18; pos 1859383 to 1859736)
gatatcagtcccgagactttaacaagggtgaaaaggtattgttattagctttttccaagcatttgattgttgatcatcgatataatttgtttacgtaagtacattgctaatgtttttgtgaagattaagattatgtgtttaccctattgcagcattgactaataatcagaaacgataaatgttcgtcgggttttcattatgcttagctgtattttgatgcactaactgatttactcatttagatatgccttttgagtctgttcaaatctgtgggaagttattacatcttttttgttcttgaaaatattttaatgttttatttttaattgttgctattaccgtagggttaagcaa

SEQ ID NO: 102431 - DNA, 738 bp, Mimulus guttatus
  Intron number 2 from transcript mgv1a008388m (locus mgv1a0 08388m.g) derived from phytozome v7.0 (chr-ID scaffold_20; pos 2255254 to 2255991)
ttagtaatccagctacattcagcaattggtagcaggttagttgatctattcaaattaaaagctaattaatttcatcaaatatttctttttaaaaatcaatttcttttttcaacgaaaaactcggatttttttattattattataattttattattttatgtatttaggaggcttgggggcaagattataaattgtaccctaaattaatatgggtgttcaggagtagcgtcctcgattttttttaatatattaaatgatataatatacgtgattatatatttagattaatgttttttttaataaaagaagtaatataagataaatatgtaatagcatttaatctaatttaagaaatatattcattaaacatatgttctctattgattaaataaaaatataatttttaacatcatatagctagactataattgaaatatttactaattattcaaatatactttgaattttgagaaaacaatatttagtcagaaaaaaaaatagtatgaagatctgatcatgtttaaaatcaagcattaatattttaatgacataactaatttatcataaatattttgtatatttgaatagcatttttttatattaattaaatttataaattataaaataatagaagttatataaaataaaattttacatatatgtatgtattaattagggttttttttttttttttttgtatcaggtggcctataatagcacaacaactcccaggaagaa

SEQ ID NO: 102432 - DNA, 1052 bp, Mimulus guttatus
  Intron number 1 from transcript mgv1a003945m (locus mgv1a0 03945m.g) derived from phytozome v7.0 (chr-ID scaffold_58; pos 1060612 to 1061663 reverse strand)
tcaattgccgctgtcgttgctcaggttttcctttattattattatttttttttaattcaattgtgtttttattcttattgtattttttcttgttgaagctgggaattttattaattgggtatttaatattttttttcatagataaattttttaattggtgcattgttagttttatggtaaaagactcgatttttacgatgtcgaattcttggctatattgatatactactgatgtttagtgtggttttacagattttgtattgcttcaatgtgagttcttgattttgtggtaaaaaagttttagtctttaggggcaatcacataacttccttagctcagatccaattcccacattgttcttctcgagaaaaaaaaataaaaagaaaagttttcaccttttagtaaagaatcgacacgtcgttttatgagaaaaaatggctttatgttcttgaaaactttcgtcttttaatgggattgatgatcatatattatagaaatatgaatttggaaacttctaaagtccaaacgatgagagtagaaaaacgagaaaatgaatcccgaaataaagtgcctttgtttcttgaaatggaaaattatgattaacgggtcactttatgttttggatatagcggttctaatttgggtgctaaaaccaaagaagaaatgtgtgacaatctagtttacgtttgtactcaaatgttcgatttgcttgatattgcgtctttatccacctatagaaggtgatttagttgccgagatatctataagtatgtctttcttaaccgggcttttttgcagagtgattttataccgcgtggtttagttaatgaagtgggtttttttaaaaccgtaattaaaataaaatcataaactttctttatttgtccgtaaatcgaatatttggaagccactgaaaaaaaaaatcgttttttgcatgttgatctatatctataaattttgatctgtatttataatgcagccatttattgaagtgtatatgttgcatatcgattttaggttttggagcgaaaaagtgcagctggggggacgat

SEQ ID NO: 102433 - DNA, 1024 bp, Mimulus guttatus
  Intron number 1 from transcript mgv1a012168m (locus mgv1a0 12168m.g) derived from phytozome v7.0 (chr-ID scaffold_66; pos 1270596 to 1271619)
ctaagctccgaagcttactccctagcacaaccaaagtaagcatcatctatacatacacacacatatatatatacacacaaaaactctaaattattttattagttcatatttattatttcctcttaattgctacattcacatgaaatcatgagttgtgtttacacctaatataaaccagcggagccagaattttaagtcttattagggacgttttgtttttaaatgtatacataaaacataggaatttgagaattgttgggaggtcacggccccctcggaatctatactggcttcgccgctgctactaataacaaccttaaagtttgcaaaagaattctttagaatatgcccaaaatctacaaatactcattctataagatctttcaacttttcaagattgagtatatatgactagttattattaatgcattttaaattttggagctcatatattcttaatgtgacatcaaaatacatgtgtgtatataactagctacccactttttacacacacacatatatgtatatatatgtatgtatagatgtatatatatgtatgtatgtgtgtgataatattccaagtggtaatttctaggaaagaagaaaggggggccaaaagaaaaggggaatgaatgccctaggcattgataaaagtgaaacaaatgagcagtcgaaaagcttctattagaaaattcttgcccaattttgcagtaattaatattacaaataccctaaaataaatataaattaaattaaataaaaaagacagagagacaaagaagcattcttgtcagtcattgttctcattgaattttcagacagaattatacccacgccgatatatatatatatacacacacatatacataatatatacgtacacttccccaaaccctattgtttccaatgaataattaaaaaccctatcttcctcctaatattcaatctttttatttatttatttattataaatttatatgaatttgcagacggacaaagcttcactactggcagaagtgatcca

SEQ ID NO: 102434 - DNA, 173 bp, Mimulus guttatus
  Intron number 2 from transcript mgv1a015949m (locus mgv1a0 15949m.g) derived from phytozome v7.0 (chr-ID scaffold_70; pos 1234595 to 1234767)
acaagaaactacaacaaatccctgtcatcagtaagtaattattaatcaaatactatatatatattctttattttctttcttctgacaagaaaacgaagattgtgatacgatcgatcgtgttttttcgttttgattaagtaataacgacgcaagaccaggtgtcgataacgata

SEQ ID NO: 102435 - DNA, 751 bp, Mimulus guttatus
  Intron number 1 from transcript mgv1a009343m (locus mgv1a0 09343m.g) derived from phytozome v7.0 (chr-ID scaffold_64; pos 150111 to 150861)
tgctttcttgacccaattttctgtcttcatcgaaggtctttccttttgaactctgtctccccttttgatttgtttttcgtgaattgttggttcaaaatgtcagctttcttcaacatgagatccaaatttgatatttctacaatcattttgctccgttgatccaatgttgttttcattttaatggtagtttaaattttaaagtgaactgaaatgacttgctaccactaagatgatgatggaatgagaagcactttctaaacttgtacaacttataacctaaacttttgggcaaattttacaagataaatctattctggaaatttctatgttatgttcacatttgatgttatcttattcacaatgcaccatagcaagactatcatattattctttatgtcgattttgtttaggtttaagtattgcttccattagcgtgtctctttctgcttatataacgatacatgaaaacgatcccaatccaaattgtttcaactaacttcaccgggaactacctattattggacttgaagaaatctcttattgtatataatgtgctttttctgaagctgtccaattatcttctcaattacttgtaatacgttgcacctctgcttttcattgactgaatgtttgaccatgtaatctttgaaattcttgaacatgggactaatgtttgtgcccttaatctgtttatctcaagaccttgcgttctgcctcaaatttggcttttttatttttttttcttcaggtt

SEQ ID NO: 102436 - DNA, 757 bp, Mimulus guttatus
  Intron number 2 from transcript mgv1a021226m (locus mgv1a0 21226m.g) derived from phytozome v7.0 (chr-ID scaffold_37; pos 938602 to 939358 reverse strand)
taatcaaattttagacaaatatcactgttttagaggtaactagtttatcccttacgttgttccttatataattttacccatgaaaaaacaattagtttgagtgtaaaattcattttcatccctaaggttcgcactcaattttgaattagtccataaagttttatttaacttcaattttgtcctccaacccttattttagcgccaaatctcatggaaattcagatactccaagactaactttactcttcaccaacaatttctgtaagacggcaaaccaatccctatagaacattatttttatgtattttttttttatggttttttgtgatgaacgcatagtattttttttttattggatatagtatactggttatttaaatcaagacgccaataaattaatgatgaatcatggttataatatgttgcttgaaataaaaaaaaaatccaactgcagtttttctcccaataactattttttccaactgcaatttttttcccattgaatgcaactgtcattttttgttgaagggcactattgatatttctttaaaaaaaaatcttcaaaattgacgatgaaatgaggtgaatcatgggctcgaacgaagaaattgaagctaaataaaacctccgcgactaatttgaagtttagtgcaaaccttaggatggaaatgaatcttacccttagtttgagatgttgacttagtttgagatgttgacgttaagtactcttattctccagtaaaggaacggcgcttta

SEQ ID NO: 102437 - DNA, 476 bp, Mimulus guttatus
  Intron number 1 from transcript mgv11b016580m (locus mgv11 b016580m.g) derived from phytozome v7.0 (chr-ID scaffold_3 34; pos 124603 to 125078)
ctcattctttttcctactgcctttctctttcacaggtatgcttgtttgtttgtatattaatttctaccctgctttatatttcttgtgggcatctctaattttgctcaattgtggttaaagatttgatttttattgggtaatttggtaattttgtggcaggtcaaagcgtccgccattgtcgttccctgttctttggaggattttcttgctttcttcttttgggttagttttaaaaattcgatctttactgtttattaccattattcagtatgttgcattttgcctttttaattattgggattttagtcgaaaagctatagcatagaatgcataattgtcgatttttttccgagcttccgaggaaacatttaatgtaaaactcgatgaaaaaaatgtcggcagatcgatcatcttgaagtttattgcttacagaatgtgaataataagcaacaatggtttatgaattttcttggtag

SEQ ID NO: 102438 - DNA, 1014 bp, Mimulus guttatus
  Intron number 2 from transcript mgv1a010174m (locus mgv1a0 10174m.g) derived from phytozome v7.0 (chr-ID scaffold_64; pos 362698 to 363711)
tggtcctgccgcttctccccttccccattgatcaggtgacgattaatttatttttgttttttcagtttcgattcgtgttttatgtgttttgattttgaagtctgaaaagatttgatgaattttgcgttatttttggttgttttgtgtacttacgatggactagaattttaatctaggttggtttgtccgaaacctactgaattttgttgttaccaaatgttaaatgtggatgggtgtatatgtagatgtactatcatttgtagatatttttttgcctatatacatgcattcattggaagatgcatatcacttgctggtggtgtatataggaattgtgtgtgtgtgtgtgcgcttaattataaatgtgacgatagctatgtgaatttggggtgtattggatggaaataagtgcattcattggaagatgcacatcacatgctggtggtgtatataagaattgtgtgtgtgtgtgtgtgtgtgtgtgtgtgtgcttaattataaatgtgacgatagctttgtgaatttggggtgtgttggatgaaaataagtggaagactaaacccaagggattaaaacctcctttgactgtatgatatatcttctgtgtttaaaaaatgaatgtttgaacacatgtgtgttccaatgcgtctgatgtatttccaggtgtggctgtttactgcagcatcaagacatatataatgacaagccgtgaaacacccccaaataaaaaaagacagacaaaaaggactgctttgtatgattaaaagagtagttatatttatattattgaacgtaaggctgggtacagaagcgtataaaaccaaatccatgatatagcaagtgtttgctgtgtcatcatctggaatgaaaaaccatatgtattttttcctacgtatataggattattggttatactcattgtaaggttgttgatctgacatgtttttttatttctttttatatatattttcttggttaggtacttgttccatcagagggtaaaactcttcatct

SEQ ID NO: 102439 - DNA, 872 bp, Mimulus guttatus
  Intron number 1 from transcript mgv1a003696m (locus mgv1a0 03699m.g) derived from phytozome v7.0 (chr-ID scaffold_4; pos 1682039 to 1682910 reverse strand)
tgattatcagcagctactattgaggtaagttgttaattatcttttgaattttgttttagacaagcgtacgaacgatcgataatgtcacccgatgaatcgtgttgcgtcgtgtgctatatgaattaaaggccattttcggtatctctttccgaagaataaaagctcaatgcactttatatctttatgtttctgttctgctattctttgcaaaagaaaagagagaaaaaaaatgaatggtgctgtcaacttttttaatgcaattccaatagagtatggacaaatgtgaaagtaattttcaaattaaataaataaataaaaaaacttgcattgcagaaatctgctaagcttccttatcagttccaaaagtattacacccaaatttagctaaactaccacatttacatatatattgtaaagccactcagacactgtgcttttctctttgctactccacaattttgcattttttaaatttatttattttatttatttatttatttattttaatttcttctagagtgattaaacaagataacactggtttcaatttgcaccatccactattattccattcaccatctccttcccaaaagcatgggtctttaatcaagattccaagtacaccaataccattacattatatatgtatatatatatgtttctttacacatgtgaatccacgtgcgaaaaatacgtgtgaagtattttcagttcagcagaattaatatgtatatgtatgtatgttctttcttcaattttcattttttctccactgatgcatagaattagccatctttgttatataatttaatttgctgttgtttctggactaaaaagtttcttgcaagaacgtaacgaataccttcgaggat

SEQ ID NO: 102440 - DNA, 491 bp, Mimulus guttatus
  Intron number 2 from transcript mgv1a003277m (locus mgv1a0 03277m.g) derived from phytozome v7.0 (chr-ID scaffold_87; pos 504983 to 505473 reverse strand)
cccgcaaaatcttggtcggcttcatcatcgtctctgtcgaagaattagctcactcccccccaataattgaaattcttaatcaaaaaaacaaaaatttaagattaatatatatatattaaactgtctgtgagacagctgcacaaccagctcggctcgagccgagccgagccgagccaagaacgatcccctcctttagaacagatcctaagcagtctaaacagagctccaagattgaaattgagtaaaaaaaaatccacgagaaaagctgaaattcttcaatattcgttctcttcttcgattcaatggcttcgttctacgtcaattctgtcatgtacgctcatcttcaagccatggttgtgcgtcatctctacgagtattcaattccagtcacttgaaaattcataattaccacaatcccccacaaactttttcgtctgctgccatttcattactggattcatgcaggagtcttcgaaatttgaagcgaatcc

SEQ ID NO: 102441 - DNA, 1062 bp, Mimulus guttatus
  Intron number 1 from transcript mgv1a004733m (locus mgv1a0 04733m.g) derived from phytozome v7.0 (chr-ID scaffold_122 ; pos 568171 to 569232)
gtcttcttcgattgactctcaggaacgccagccaggtttccaaacgctacttctctctctctctctctctctctctctcttaattttcccaacatatatattcatgtttctgtgtgtggatacgccgtcgtattgtatctagtagaggtgtatctatctatctctctactatctgtctgtgtaatatgaattaaatttttttcctgcattttttcgtagtttgtttttctgctatagagattttgttgctgattgttgatcgatgtttacacgcatatgaactcggttttctttgctttctaaaatgtacaattataagtgaagtgtatcgatggatttcaccatgaaattaatttatttgggctttttacgcatatgaattaattgtgtatgctaggttatttgacagtaccttaacgctgcagccaccatttttctccccaatttaaacctttttttggggtcaatttacgaaaaaacctctcttatttggataattacatctacccctcaactatgattttttcttacacctccacccttatggtgtcaaatttaacataatcatcatgaatttgtgcaatgtgctctactttgtacttgttttgtgtaaaaatacagtttctgatgcaccacaatctgatatatacaagccaaaaaacacatattatgatcatcttgcttcaaaatgtggagttcgaatgagataaaacgggtacaaaagtgataatattccatataatctcgaagattccactaaatttgaaactgcaatggtggacgtgtaagaagatttatagttgaggggtggttgtaattacccaaacatgatgggggttttcgtaatttgaccacacctcaggggtggttgtaatttaccctttttttatgacagtttttccattaatttcatattatagtttctgaatttttaaccatgtgcattaacatcctgaatacattcttgtgctgcttttttctggcttttaaacttagttttctcacattcgacactgcaattttacaggctggttactgcgtgaaggaaatttcagccggtaa

SEQ ID NO: 102442 - DNA, 664 bp, Mimulus guttatus
  Intron number 1 from transcript mgv1a005964m (locus mgv1a0 05964m.g) derived from phytozome v7.0 (chr-ID scaffold_39; pos 558012 to 558675 reverse strand)
ccataagtggtcttgaagttagagttctgtttctggtgagtcaccttttacagttttgagatagattcaaaattgctttgttgcttttactatttctatattgtctggatttttaattaaatacatgtgggttttgtgttcttgataatcgatatggaccgaaaagtagtcacataatttacgtaaaaacctatcggaaatatgaatcttcgttactttgttgaatatatccgcctttgattcgaagttcaaatgtattttctgcaagggttagttaatgtttctttttcatgtattaagctatgttttatgtttatgtatatatacggtggctatttcatgaaaagtcaactcccgaaaagggtatctttaattatttggatagcgttagttgaacctaccatttttcttttatatatataaacccctattgcctcaattaatcaaatgaagggctccccatcgttttcattatagtgtagatggttttgtatgattgaatagggacttgatcgtgggccgttaggttggtcaaagcattaatatctacagctgtgattgattctacaatttaagtatatttgtaattttaaatttgattccgattgctgatttatatcgaactgctgcccaatttttctaggatattttttttctcgtaccg

SEQ ID NO: 102443 - DNA, 411 bp, Mimulus guttatus
  Intron number 1 from transcript mgv1a003440m (locus mgv1a0 03440m.g) derived from phytozome v7.0 (chr-ID scaffold_22; pos 1133413 to 1133823)
cttcatcggccttctccttctcggcttcattaaaggtctgttttttttttttctttttttttttgtaataattgttttctctgaggttttttttttcatgtgtgttctgtaatagagatgtatatatcctgtctttgttgctacaattagtaatttttttagtcagatttctgcagtgatgtttatgtttggaagtgggtaaaatttattttaacttaattttatctcagatttttcaaaaattatgaaactataattgttaaatttagttccattttagacagtttcccagttttacagtttgatttacagatggaccttttagggtaagttttaactatggttagttacagcaatgattggaatttttaaataaattatttgcaatttcttcttgttacaggtataatt

SEQ ID NO: 102444 - DNA, 614 bp, Mimulus guttatus
  Intron number 1 from transcript mgv1a002795m (locus mgv1a0 02795m.g) derived from phytozome v7.0 (chr-ID scaffold_108 ; pos 673951 to 674564)
catcggctccctcccggaggccctcattcttctcggtacgtttcatattatataaggtaaattacaaccaacccctgaggtatggtcaatttacgataaacccctcttatttggataattacatctacatctctcaactatgattttttcttacacttccatccttatggtttcaaattcaacatactcatctagatttcgtgaaatatgttctagttgtaaaaatacagtttctgatgcaccacaatctgatatatatacaagccaaaaaacatatattatgatcatcttgcttcaaactgtggagttcgaatgggataaaacgggtataaaagttataatattccatataatctcgaagattccactaaatttgaaaccgcaagggtggaggtgtaaaaggttttatagttgagaggtgtggttgtaattacccaaacaagagggggattttcgtaatttgaccatacattaggggtgcgtgcatgtaatacaatcagacttatttatttaaatttaatcatcaaaaatataattaattattttttattcctaattattatattattattattacagcatcagggttgaccaatagaagcaacgaaaccgcc

SEQ ID NO: 102445 - DNA, 699 bp, Mimulus guttatus
  Intron number 1 from transcript mgv1a012711m (locus mgv1a0 12711m.g) derived from phytozome v7.0 (chr-ID scaffold_6; pos 3878961 to 3879659 reverse strand)
gttgtcacctttatacgtgagtcattttaaaaaaaaaaaaaaatttttttttttaatttgagatgttgttggtttttatgtatgtatatatgtatatatatggtggaatatgttcttcagttaatttctgtcgtggttaaatgtgtatgtggaattgtaccttattgatttttctaaacgaaattttaaaatttgttgcatatgttgttaataatttgttgttaaattttgaaattatatgaaatcataaatctcaatgttctgtacatgagaaaattgctgtacattctattgatacatttcgatcgtaaatggaaaatttctgctcgtatatgatccgttactccgaacattccaataatatattacttggtgtatgtctggtttatgtaatccttcaattactgacatgttattttatattgtcttgttcatttcgattagcgataattgatttggtattatttaccaaataataccctctgttcttatgtacaagtctatttcaattcattacagagttttgaaatggattagaaatggtgttattatgtttcgtttattgtcctgaagtttttggttttgcattgtctaaatcggcagataattctgaaccttaatttattattttatcgaagaaacgggaattactgaacgaagttgatgatttttctaactggtttaatatatgtagtgtgc

SEQ ID NO: 102446 - DNA, 751 bp, Mimulus guttatus
  Intron number 1 from transcript mgv1a004162m (locus mgv1a0 04166m.g) derived from phytozome v7.0 (chr-ID scaffold_44; pos 1494410 to 1495160)
cttgaaaacccttgcttcacaatcgctccgctcaggtgagtagcttcactcctaaccggctcaattctagggtttttgatttgttaattcaattcacctgcttcgtattggggttttttttgggggtatccgtctcagttcgttttctggcgtttgttgtgttcaaaattttgtttcgattggtgtttgtcctccgggaattgcaatcctgaagaattcgatttataggtgtcactaatttctagcttgaattgatttgtaggtcaataatcgtggaattactttcttggatttgggcttggtctatctgttgatttagaagttttctgttttttttcttgaattttgttgatgttttgtggtgaaaattacttcttttagctgattttgttctacgctatttgataattttggtggcgtattgcttgttctttttatgagatattgaaactcaattgtgtgtcttatgttgctgtatttttttcttctgattttagatatatatttttttctgtagtcgatgtcgatatgctgttatgatttatgcgctgctttcttgtatctaaattgttgtttgaaattgtggaggtgatttttttattatctagggctttatcacgggtaaattcgagtactttttctcaaagagggttttgtagtttaagaataaacgatttggaggtcaagctctgatgagaattgataggggaatgcagaaattgaattgcgaggaacagagcttagtcggctg

SEQ ID NO: 102447 - DNA, 628 bp, Mimulus guttatus
  Intron number 1 from transcript mgv1a013401m (locus mgv1a0 13401m.g) derived from phytozome v7.0 (chr-ID scaffold_266 ; pos 42051 to 42678 reverse strand)
gctattgaagctttggagcaagttttgcccacaaggtttgtttgttcattctttatatatatatatatatatatatatatatatatatatatatatatatatatatatgatgagtgtgttttttatttgggatttagctgaaactgcatgcttggatcacttcgtgatctgttttatctttagtatgtagatctaaccaaaccaatttgaatcttgttgtaatatagaaatagatacaatgatgttgtatctaattgtcccaaaaaaatgatttgttttgatccattctcggcggcaattatctcgatttcggttttagtccaagtattttagtattctttgttcgtattcgcagaagaagaattcgaaattaaacgattgattcatattaatttagtagacattttcggggacgatcgtttcaatttcgtttttagtcgaagtatttaagtaaaagaattaaataaagtgttactctttattcgtatttgcagaagaagaattcgaagttcaactaaaataattcatatttagtagacattttcgaactagcaattttctatgttttgagacgaacacgagttttaacaatggcacgaatgcaggaaaggaatttcgagattctaca

SEQ ID NO: 102448 - DNA, 1031 bp, Mimulus guttatus
  Intron number 3 from transcript mgv1a013930m (locus mgv1a0 13930m.g) derived from phytozome v7.0 (chr-ID scaffold_257 ; pos 142032 to 143062)
aggtccaatttgaggacaggattttcaccttgcaggtcagtcttcctacatttcttatcattcacgagtcacctttctttcatccgtcggttgttcgttttttttttaatattcgatttggtatcattgttttcgatatcttggtttattattttcgtttgttgacttttgtagaaaatgatgcttttcttcatgcgtgtagtttcattcataacgactacgtttattcttctatgaaaagtctgcgattcaattaatgcttaatgttaatttagtaattgtaaattgaattgaggcgagtgcgatgttatccgatgagctgcatttatcggaataaaatcaacttctatgttatacgagtttgttgcaaatcaattagtcttggggacattatttttcaacaaatgtaatacagttatatgtcgattatcattgctcgttttagctagcaagatttttgaatgataggcctaaatatttttcaaaggcgaagatatccacaaattaactaattaagaaaaaaaagccctgctactttcagaaactccatcttactacatataattcgggtaatatgctatcagttcctgaaaaatgtacatttttatgttggttttctcggttttggattagacaaaacatgtattcttgctttctagttttactcgttttccattatattagatttagtgcatttggaatatttataggtaagacgtcataagtacaattgtcttattccataatcttgagtgcttatcacatatgatttcatgagatatgtcttcttcgacgtaaaaatattgttgatatatcaggagacaacctcgacttacttttattgatcaaaagatctttcaatatttaaataaaataaaaaatggacttgcctacacaagtgctatttattgggtcgacaacttttgaacttggaattcttattcaatttctcttcttttatattcactgttgttattactattattttagttaaatctaaatttagaagaactttaataccgatttcagat

SEQ ID NO: 102449 - DNA, 412 bp, Mimulus guttatus
  Intron number 2 from transcript mgv1a009922m (locus mgv1a0 09922m.g) derived from phytozome v7.0 (chr-ID scaffold_132 ; pos 237228 to 237639)
acccttcgtacaaagacacggttcattcgctgcctgtgggttttttctttctttgaactacttttgaattctttttcttgttcgcgtgtttcggtttcggtttcttggaaggaaatgggtagattaaagtatattgaatgttgattactttggctgaatttcatattgttttgtgcttcaaaacacgaattgattttttcactttttcggtgatctatttttggtgcgtgtttgctttatctaaaatgcaaagaatgtatagaagaaagagtcgtattgtgattgtatgtgaggtctctttggaaataattggtaatgattgtttttttttgctgttgtactaataagcgaacgttttattttacaaactcgtgcaggttgaagttgaaagaatcgagatcggagaaatcaa

SEQ ID NO: 102450 - DNA, 612 bp, Mimulus guttatus
  Intron number 2 from transcript mgv1a026789m (locus mgv1a0 26789m.g) derived from phytozome v7.0 (chr-ID scaffold_4; pos 1172083 to 1172694)
ttgcctgagatttaagtgttggcttggagatgttaagccagcatgatttttacgcctgtttgatcttgatcaattctctaacatcagatttcactagtttttgcttgtgagtggcgcaattttgcagatcatccataaaattcacagtactcccttagatgatgtgatgaaatgattgacatatttatttctcttaatgagtatacttgtgctaatttcgttccgagcagtatgcgcgatcgctctttattcagactcaaaataatactgcccataccaaacatggctaggtttttctatcacgaacatgattaagtttttatgtcaggtatggaaagtggaatcttttctccttcttctaggtttatcagtctccatgtatctccatgccatgaatgatacagaatttatgacattgtttggtagtgcagtggtgttaaaaggacaagtttgttaacaattttgactatataatgtgattacttgagaaattactgagtgtgatgtgcattaatttcttaaaaatcaactttaaaaaaaaaattagctctcaactgtgactttcttcttaattgcctcccgtaatttcagaacctgggtgaacagaaagaa

SEQ ID NO: 102451 - DNA, 539 bp, Mimulus guttatus
  Intron number 1 from transcript mgv1a015770m (locus mgv1a0 15770m.g) derived from phytozome v7.0 (chr-ID scaffold_21; pos 670337 to 670875)
tggttactttgcactcgttagacaccatactgaaggtatatatatattttttaattgcatatttttatttttattaatttatttattttgaatacatgtttaattggatgtttaattaacctttcaaattttaatatatatttaaattagtttaattgaaagactttagtaattagaagataaaaaatagatgatccatttggtgtttatggatgtggtaaatggattttaattggcaatttttatgattcttgattttgagtgagtacgatatgtgtttcttcgatgaaaattttgaaaaataagacgtaacagtttatcagctctttaaatcagacgtttaaaataagcttacttagtcaaattattgtctttttggattttttttgttcggtataagttttcttcggatacggatgaaactatataacgaattacacttgttgatttgattgttggagaaattgtgaccgttcgtttttcttttcaactcttgttttgcagagtagaaataggtattggataggcaaacaaatttg

SEQ ID NO: 102452 - DNA, 641 bp, Mimulus guttatus
  Intron number 1 from transcript mgv1a011515m (locus mgv1a0 11515m.g) derived from phytozome v7.0 (chr-ID scaffold_21; pos 1706183 to 1706823)
ttgttatctctgcagataatttgatttaccgtgaggtaacaattattttttttactattttctggttaattgaattgggttggcgttgaaagtttctttatttgtttccatcatttatttatttatttagatgagacgttttgttggttgttaattgtttgttggatgttttgactttgatggtacggtttgtttgttgaatgaatgatagatggcaagtgatttttgattttcttcggattgagccaaggtttatccaatatttttgctgtgggttttgacttttgattgtttctgtgttcttgcatatgaaattcttagtattattgattgaatttactcgttttccgaccaaaaacaaaggaacaaagaaaagattagaataacatttaaaaacaaattcacacaattgaccgatattcgtagatttcttaatgtgtgtacgagagggatcaaattgtcatctgttttattttcatcagtcgatgatcttgatttgtagtgataaattcgtcttctacgtatttatttttttcgttttgggatttccttaaatttttgttagtgtcgaatggtagtagcgtgaataagcttctttgattacaggcaagggtcgttgattttcaagctatctttgcttg

SEQ ID NO: 102453 - DNA, 1061 bp, Mimulus guttatus
  Intron number 3 from transcript mgv1a011515m (locus mgv1a0 11515m.g) derived from phytozome v7.0 (chr-ID scaffold_21; pos 1707264 to 1708324)
attcaacaactgtgcgatctctgcagtacaacaaggtatattattcttttcaccacacttttgaagctctcaccgattcattaatacccttttaacggttttgaagcttattatgtttcggcttatatgtttaggagcgtagtagtctagaaaacgatgccttttaagctggtgtcttaagttaaaacatttgagtaaattacggccacccctaaggtaaggtcaaattacgaaaaccctcctcctgtttgggtaattacaaccacccctcaacaacgatcttcttacacgtccatccttatggtgtcaaattcaacatggtggaatgttctctagttcgtactctttttgtacaaaaatgcagtttttgatgcaccacagtctgatatttacaagtcaagagacacgtcttattatcatctcgtttcattatgtggagctcgaatgggataaaacgggtacaaactggagagcattccacatatgtagaagattccgctaaatttgacaccgcaagggcggacgttcaagaagattcatagttgaggggcagttgtaattactcaaacatgagggtttttttcgtaatttgaccttacctcactggggtggccgtaatttacccaaaacattttaaaccttagttcattagagtttggacatttttatttcgtcgaatcatatttgctctggcaatgtccaaacgtcaaagtgagtttgcattcctttaatataaattcaaattaactataggtgctcaaaaaaaaaaaagaaaaaactgatttggaactgctagtaatctttccgactgctattaaatcgaatgtcttaatcaaatgtgtataagctgtgtttgtcatttttacttctgtcccgcgctaatattttgtgtattcaagatacgagcaagttgtgccttttttgtttattcactgattatagttatgacatgtattgaagtctgttgtgctaaaaagtttggtgaatgaaaggttctgatagtgtactatactgtgcatgtttcagtatttggactgttgatttggcttacttgctgcaca

SEQ ID NO: 102454 - DNA, 707 bp, Mimulus guttatus
  Intron number 1 from transcript mgv1a016093m (locus mgv1a0 16093m.g) derived from phytozome v7.0 (chr-ID scaffold_206 ; pos 414215 to 414921)
ttccagaggcatagcttcgaagctcttcgtcggaggtaggttacctctgattctgaactcgcacaaacaaaatcggatttctgattttaatttcttcttcttgttcaaatattcaagtattaattaattttctcagcacctcacttttgatttcgccctcatgtgtttgatttgattccccccctttctggggtttatcaagggtttatgacatttaaaaattggggtttgtatatcgttacgtagtcatgaaatctacattgctttgctctgatgatgatattaatacacgcacgtgactgtaaatttgagaattgcttcattttaaaaaaaaaatattgtttttttttgtttaatcccatctcagtactgtgtgttgggcactcaatgaggggtttgtgttatgttgaacttctttatataacagtgtatttcaatctagccgaagtatcgattcattgcccatagctcgtaagatctcacaatatcagagcagccgtgataaaattgaacaaaaatgtttgtaatcgaataatcgatggatcctttttaactctctgaattaatacacagtaagttatgcatttaaatcgtgtttccatgtgagttttacagttatgttatatattactttgatttttaatttccacggaaaacgaatcccgtttgcaggtctttcgttttacaccacggagcagggattgtcc

SEQ ID NO: 102455 - DNA, 971 bp, Mimulus guttatus
  Intron number 2 from transcript mgv1a001379m (locus mgv1a0 01379m.g) derived from phytozome v7.0 (chr-ID scaffold_2; pos 1542440 to 1543410 reverse strand)
tactgtgaaatttgtcggctgagtcgggctgatccgtaagtgaatatgtttgttgtcgctcagttggtttcatgtaccatcagacccattgcttgctgttttttttttattttcatatgttttagaagctatcatatctttttgttaatttggcaagcttctttatctttttggtcactaaagacagataaacactgtgcttttactgttttcgcgtcgactaagcttttttgtcttgctagttgctgtacgatttgcttttcttgtaattcataaaaaaaatgttgttttaatctataaggttaaagttaccccaagcgtaaaccataaaaataattagaccatagagtgaagtattttgctcaagcatattcacataggtaaagcagttaatgggtcttggtagtactaggtaactaagggtgtcatagtaactggttttaagatttttcttttttcccccatgctaacagtttgctattgattgtttattaatatgtagaatctaatgaaaagaagcccaagcatactttaaaaaaaaattcatgggcatggttataagtaggttaggaggtttttggttttagattcacaaatgccgcgtcattcttaattcatctaactagatcattttctgtgaactttgccttttttcttcctgttgtggctggcatttagatagttactcattgaacaaatattctagtggtcaagagcttgcatatgtttgatgcacgttataatatcagatatgacatggtaaaagatgaatgtttttcatactgttgtatgctacctatgtgaaacaaattagaaacaagatctgtgcctctgcattttgaggcccatgattactttggtttctttcattcttggattaagatcagcaaatcctttagatgcctgatgattgattattgttttgtgctaatgtagcttctgggttacaattgcgcatcctctttatccag

SEQ ID NO: 102456 - DNA, 953 bp, Mimulus guttatus
  Intron number 2 from transcript mgv1a013012m (locus mgv1a0 13012m.g) derived from phytozome v7.0 (chr-ID scaffold_398 ; pos 788 to 1740 reverse strand)
gagtccagttccggccaatcacaatcaccaacatagtcttctcagttgaccagatcaagaaagtcaaggccagtcttcatgtggtatgtatttatattcccattcaccattccatatttttattcattggaggttcaataatgcattttttccttgttatacgttagtaattcaactttattactaacattatagttaaatacactttgtaacactgtcgcatttaccgtatgtgctatgaaatgcgacaaaacagccccagtcgtccatctctgttaaaaaattgttcagttgttgactattcgttacattatcccttggaaattttcagaccaaaatacccctttattgtgtaaaaaaggtgtacaccattcttcactcatttgtactcaatttcatcccgacttcttcctattttttgttcccaactttttttttacccaaaagttctgaacaattttttatattatagaaattaattttaatttctttttaaatttataatcactcggtttaaaaatgtcttccggtagttcaaatgtagcaaaagtaccaaaacaggcatccaaaatataaaaacataattcaaaaccatcaaatatatcaataaaaaccttcaatatcatctcaaaataaacctacacaagcttcaatgatccccaaagtcaatagtaaaagtgaaatcatccaaaccaatgttcaaaatcactaaaggtgtcaaaagtagcaaaagtaccaaaatataatggcaaaacatgccaaatctatcgaaagaaccaaagcgaacatccaataatttcaaatcatcaaatatcaaatatatcaacaaaaacattcaaaatcatctaaaaataaagctacacaagcttcaatgattcccattatcagtagtaaaagtgaaattgttggttggagtaggttgacttgggaacagcacattcccaaatcttgtg

SEQ ID NO: 102457 - DNA, 795 bp, Mimulus guttatus
  Intron number 2 from transcript mgv1a022183m (locus mgv1a0 22183m.g) derived from phytozome v7.0 (chr-ID scaffold_57; pos 221738 to 222532 reverse strand)
tctattccttcaactgtttgcactggctatccagggtatgtatgctttcttcttctctctgtttttttttttctgtgtgaattataaaatttactttgcatatttgaagtattatccaaaattaatacacatatccagatttgtttttagggtaaactacaaacaccccaataacgagttatagactaaattagggaaaacacaaatccctcttatttgagtgaaaaaaactgtttatttaggcctcgttgacaagataggattagccaagataagattaaataataattcaatgaaaatcaattattttatctgaccgtcgaacgcccaacaaaaaaaactccctaaaaggcaagataatgcaagagaagacatgttaatataatattccaaatcgaccaggttagtcattgaggataataaacatcaaataaagtccaattatttaattactcttggttaatctccccaatcaaatggggtcttacagtttagttaaagcgtaaaatactaaaagattttgttagtgttcggacgataagaaaaaaaaagaccattattaggttttgatgtaaagttaaacgtaattactcaaacaagaggcatctttgatatataatttagttcgaacgtaaggatatgataataatttgacctagttttttttaattattattttcttaaatgctagtcaatcaagttctaaaaattaaatagtatacaatttctacaaactatcgaaaattttattgaattgcaggttcccccaggattatacgacgagagaggcacctc

SEQ ID NO: 102458 - DNA, 577 bp, Mimulus guttatus
  Intron number 1 from transcript mgv1a026063m (locus mgv1a0 26063m.g) derived from phytozome v7.0 (chr-ID scaffold_521 ; pos 4516 to 5092)
tgctattaggaatattggaagcttgactgccggaggttcgtctctcttgatcttttgctatcatatttactaaaccatagtagtaatctgagttttaacttttgtgtcatagaaacttttatttgtatttgaaattttatttgaaaactttcttgcacaactaaaaatttgtcttgtattcttttataaaattggttttagtatattttcttactcccacttttgggactgcaaaatcactcatttgctctttgttacaatcaaagttttcttcatcatttatgattacaaattctagtacagacatgtgtatgtcttgtttgcttgctgtatcaatcagactcgccattttgcttcttgcgatggaaactctataaaccaatgaatcattaactttgcgttggtttgagaaaagtagtttgtttataagtggtaataggaattatgtttcgtagatcaggattagcatgttttgtacttaggcgatgaattaggacaacacgtattcggaattgaatgtctaactatgaatttgggaacaggtttaggtccaggaacacttgtggggtctgctgca

SEQ ID NO: 102459 - DNA, 851 bp, Mimulus guttatus
  Intron number 3 from transcript mgv1a011554m (locus mgv1a0 11554m.g) derived from phytozome v7.0 (chr-ID scaffold_37; pos 237973 to 238823 reverse strand)
tcacaactgacgtcaaagtcgataccaactctaatgttagtcgtttacttttcttatttgtttatacctgcgactttgaatccaaatcctagttgcaatatttgctttttgatgtgtactggcgagacgatagtgtgttacgtgcgtatatgtttcggtaatgtataaaaaggtaccaaaaggcaaaagaagttgaccaataccgccgttgagctctaccgttaaaagaaaacagtaccacaaaaatttaaatcctctagtgattttcaaaccagaattttgcgatttttcaaagtttagaagggaaatatgttccatgagagtactgtgtgcaaagaaaatcgtacgatgtatataaacgattgatcatgtcatccgtggaccaaagtgtaacttccatttttttttcggtcttgaagcaattgagaagtggatttaacttttgatttggattttcttggtaattcttttatcctctcgttttagatatctattttattttagtttcttaatagtggttgccgttatgtctacaaattagattagttcctgatatacattggaaacgtttcttcaatttggtttgttgtgagcgccgaacggtggaatcattcttcaccatcttatgtttgtcatttgttcgaaaatcactttaagtcggcctttccgtaattactccacataaatctggtagtgtgttgataagtcggattgcgtcagtaattaaagtatgtctgaacattctttacaaaaccaagtatatggccatttataaccaccatttaacaaaaacgatgtcatgttataaatatataggtgtacacaaccttcactgttgacgagcctgctcc

SEQ ID NO: 102460 - DNA, 360 bp, Mimulus guttatus
  Intron number 2 from transcript mgv1a011554m (locus mgv1a0 11554m.g) derived from phytozome v7.0 (chr-ID scaffold_37; pos 238865 to 239224 reverse strand)
gcgtggttagtgtttgtatttgtttcttctgtgtagtaatttttatttatttttaatgaattggtgtttatgtgaggattaatgtttcggatttattaggttttatgacgagataggattcggctgtttaaactattgattaacatatgaaaaaggaaattaacatggattagataatgattttcgttgtgttatgttgatcaattacaagtgttgtttgtttcattgtcgttttgatggtgtggttacgaaagctaaatagtcacgtgtttgatttgttcgctatgctgcttcgtgatcgttcgattcgtttttcggttttcaggcaattacttcgtctggaactcagaaaggcgatct

SEQ ID NO: 102461 - DNA, 734 bp, Mimulus guttatus
  Intron number 1 from transcript mgv1a009975m (locus mgv1a0 09975m.g) derived from phytozome v7.0 (chr-ID scaffold_1; pos 467921 to 468654 reverse strand)
ctccttctccgcttcggaaaatcctgattttaaaggtaacggtcatttttttttttggtactgatactgatttctcttgttttggtttatgtttatgatttgttgactttgtttagagtgctatctgattggttagggtgtaattttgattttgatttactactgtattgtttaattttttggctgaaacctaaatattgggtgaatttatttaatacctggtttgatgatctatgatctgggtactttttttggattttgagtagcttcatatgatatttggggtttaagtatgaatttcgagatttatgattgaattaaacgattgaaattgttatcctgagttctggattttagtatgctatttaaggattgaaaatgtaatttatgatttattatcatatattatggctctgtttaatttgtttgatgaaacatatattgttatgtggattccattaatgcttcactaaaaccatattacctgcaagttcacaattgatatatggaaattcgatttgtgtgtgtgtgtgtgtgtggtaagtttcaactctcggagtcgattatttctttcccaactcgcattttcgacctgctttacggttcttgttttacagaatacaaaggttatttataattaggacttacctttgcgtattgaattatatttcggctcatcgttttcatgtatattcttcctgaaggtttgaaatctgttgactctgctgaatccc

SEQ ID NO: 102462 - DNA, 1021 bp, Mimulus guttatus
  Intron number 1 from transcript mgv1a012596m (locus mgv1a0 12596m.g) derived from phytozome v7.0 (chr-ID scaffold_19; pos 414165 to 415185 reverse strand)
ctttgcattccaagattcaataataatcaggcatgtatttttttcttttttcttttggtctccgattgagaaatataggttggctttatgatatgagcttgtaattttgttgctgtgtgtgtgtgtgtgtgtgtgggatattattttatatgtttgatgtgacacaattacatctttttctttatatatatttctttttgagagtttgggggttgaattcttgatattttttatttttttcacatttcatttgcttacatcatttcattccaattgtttcttcttggtaaagcatgctgaattcagatggattagatgaattagggtatcagttgatctgttttttaattagagccaacaattttgcaatgcagttttcatcaatttttaaaaacaccacacttttcgatctggtttacttattccatgttttcggaatatgactatttgaaattcagattcataattcgtgtcgtttcataactcgtcagcctaacatttttcacaaacaaattcccaacaccggggttcttttattctggattatctgatttcggcttggaagaaagctgactaaatctgtttttaactataaatgagtacatttcggtctcggttctgtaataatgttatagccaacatgggtatattcatgctcgattaccttctgttctgctaattgtttgaaacccacaaatttatttactgaattccacaatttcaagaaatcgagttgaataaataggaagcaggccacatatgtgtatacattcatcatttctatcatataaaaggacttacatcaccatttaaagcccaaagtttatgtaacggaagtttattgccgaatatatttctcaacaattagatcttaataaaatattactactgctcattatgttattgtaaaggagtttctcatgctatgcatctttataccgtcgtgaattttcttacaatatatatcccttcaacatcttctgcagattaagatatttgtatttgttcgctgtggtggatt

SEQ ID NO: 102463 - DNA, 835 bp, Mimulus guttatus
  Intron number 1 from transcript mgv1a012548m (locus mgv1a0 12548m.g) derived from phytozome v7.0 (chr-ID scaffold_245 ; pos 39703 to 40537)
cggagtttggccgcattctaaacatcggaaactaggttacgctctcatcatttcaattgattttctttgtttttattgtgtaatttcatgcttcttactgctgcttgttttttccgttcattatgtgaaaaatattgcatttttttttttctttgggtgaatttcttgcgtttggtggagctactgtgactgttacaagctgaatgtatagacagggaagatgattaagaatatgagagttggaatttacctaattttgaaacctcccaaactgaaaatacacgaaacgtcgaatgggttcgtaacacattgattaaattgggagttagagaagatagcggaacaaaggagaaccgagtgaacaagattaagcaaaaatatgtctgctttctgcattcactttgtaccccttttcgtcatgttaattttcaggcaaatgtctggtagtaccgacattatacgattgcctacgcacgtatggaagtactctggtactccttatatattgtttgttttaaaatggcaaaattgcattttaatttcttgttaatgaccatctcatttgcctgtgttgtcagaatcgattttctttgtatattatgatatgtatgttaaaagataaatgatcgtgccctctgctctatgagaattatacgaaatgatttcattttatttaattcaaatatcttgcaaaccgaggaagctgttggtattggttgttcatacaattagataatgtagtttgctgggctaaaattacgccacgattggcatcaattattagttattatggtttaaatatcaatctttgatttggtttgtaacaatggtgcag

SEQ ID NO: 102464 - DNA, 416 bp, Mimulus guttatus
  Intron number 2 from transcript mgv1a026391m (locus mgv1a0 26391m.g) derived from phytozome v7.0 (chr-ID scaffold_8; pos 2785113 to 2785528)
acgatttgcgctaccttcgcgtttggttgcaattggtatctctttcttttttggtgccctaaatgtttgttttttatttttgttaaaccttcagtttgctgttgtggattgatttatgcactatgttacaagagataaatgtgttttgttagggctctggaattagaaactgagagatgtttttactgcaagtatcacagtttaatgttatttctttcgatggtgattttgagtctgtatcgttgagctagtgaaatcgaacttaattgaagatcttctactcatattagaatggagcatttctaaatcagaattttttaggatttcaatttgtgagtcagaatactgtactgtacaatatggtaaatgatttattgaaaggattcttatgcattttctcgtgtcctgtcatgtag

SEQ ID NO: 102465 - DNA, 815 bp, Mimulus guttatus
  Intron number 1 from transcript mgv1a015712m (locus mgv1a0 15712m.g) derived from phytozome v7.0 (chr-ID scaffold_4; pos 286312 to 287126)
aggtatggttaaattacaaaaaactcctcatgtttgggtaattacaaaaacccccctcaactatgaatcttcttacacgtccacccttgcggtttcaaatttagtggaattttcgagattatatgaaatattatcacttttgtacctgttttatcccattcaaactccacattttgaaacaagatgatcgtaatatgtgctttttggcttgtatatatcagattgtggtgcatcaaaaactgtatttttacacaaaacgagtacaaactagaacacattccacgaaacctaaatgaatatgttgaatttaacaccataagggtggagatgtaagaaaaaatattagttaaggggtggatgtaattatccaaacaagaggagttttttcgtaaattaaccatacttcaggggtggttgtaatttaccctaaaagtaaagaagggtcatgtgcacaaaatttaaactaaagaggatcatataattatattaaaaaaacaaaggagttatgtacaaaacttaaaatacaaggggcttaagtactaacataaagttcccatatccaaataaatcaattattgccgcaaccctacgcaatcgaagagagaagaaacaaacgcataaattattgccctcaatatatatatatatatatatatatatatatatatatatacagactctgctcaaaagtaaactctatcgtttccttccccaacacgtatgtatatctaatttatccttatatatattcgattttatttctttgccctgtatctctagaaccctaattttgttttcgtgttttctctttgatt

SEQ ID NO: 102466 - DNA, 844 bp, Mimulus guttatus
  Intron number 1 from transcript mgv1a008212m (locus mgv1a0 08212m.g) derived from phytozome v7.0 (chr-ID scaffold_18; pos 1155613 to 1156456)
aatctgaggtaccttttgtcaccgtttttttttttaactgatttgatgcacaagaggctctttcgatttttcggttaaattgatgtttattttaaaaaaaatctgcgaaattttaattttggttttccgatgcaatgtggttgtgttttgggtttggttctgtttaggtggtgatgtgctatgggtaattttacagtttgcgatgcgtcgtagtacctatttggatctatttgaatcggatatcaaatagatcttatagagtgggaatcatctggaaatctttgatatttgctgaattttagctctattctgtaacaatacataagaacagagagaaagaaatacgagaattctgttggtaattaagcacatttatgccttaatgttttaattttgatgcatcaatagtgcttactctatttgatcaggaacgcgtatataatttatcgaatgaaaccatctggaaatctcggcattttctggatatatgttttgattgattgtatgagaggatacaaaagaacaaagagagagagagagacataagaaaagtaaccctattccgtttctttgcatttatagtagatgaaagataacgagtttctgaacattgagtatgtttgtcgtatatgtctgctgactttttaaaaggagaaaatgatgtaaattgatcaaatgaagctttccccggttagatttcgataaataactcaaatgtttatgacaaatggttaatcaccagtaatagctaaatgtataaaagcttttatgattctcgataatagctatactgtttcggattgtctttataatgccagagctctatctgtgtaggccaggcaat

SEQ ID NO: 102467 - DNA, 1063 bp, Mimulus guttatus
  Intron number 1 from transcript mgv1a020307m (locus mgv1a0 20307m.g) derived from phytozome v7.0 (chr-ID scaffold_426 ; pos 16840 to 17902)
tttcccgtgtcggacgagaattttgtgacgaaaaggtatgtgtacggtaaggagaaactagtagttagttataatttttttagaatttcaaaattttggatttttttgggattatttattaagtatgaccatgaaacaatagttttattgtgtgtttaacggggttgtaggtaattttatcataaaaattagggtccccttaaataatacatgttgaatgggtgtgtttatgcgaaggagaaaaaaatgaattttttcttttatttttttaattaagttcttgtgtcaggaagatccaccctcattaacccataactaatttgaaaaaaacaaaacacttttggtccctaatgtttatgacaaaaatacttttggtccctcttattttcaagaaatactttttgtccctcgatttattgctttatcacacatttggtccccactgttaatgagttttggtagttaactaaacatggcatgtgctcatgtcaaattagagcaaacccatggagagatcaaagtatgttgttttgaataagagggacaaaaaaaaaatttgtcgtaaatatgagggacgaaaagtgtaattttccgtccttaatttctcgttcagattttgttaagtaaggtatttttttggaacaatagggacacaaaaactgttagtcgtaaagtcgagtgaccaaaactgtatttcccggttctttctccagatactattaattaattactaatatcgcattaacatgtgggaccaaatgtgtcataaagtgataaatccaaggagcaaaagtattttttctgcaacaagaggaaccaaaaatattttagtcgtaaacatgaaggactaaaagtgtattttgtcccattaattgggattcgaaacatccaaaaaagtgtcccaaaacacggaaattaaagtttcaaaaaatggattaaaaataaatccttacaaaaaaatattatttcagaatcagccggtccgtatctgacaagaataataattttcatgattaaaaaaattaaaggttcgtgttcgataaggaaaagttgagagctctta

SEQ ID NO: 102468 - DNA, 628 bp, Mimulus guttatus
  Intron number 1 from transcript mgv1a019417m (locus mgv1a0 19417m.g) derived from phytozome v7.0 (chr-ID scaffold_415 ; pos 33256 to 33883 reverse strand)
cagatcggttacaattgtaactggatccagatcaggttgctctatcaaatttaagaacaaatatcattgctagtgatttatcgttagatttttctgaagaacttcaatgtttgtgactctgtgttccttttggaactacatgccatgtgaaatccatatactacatattttgagtgcttcatattttattgtgacctttaaatttctccacttcctctctaattatgtcatgtgacagagccttttgttttctctttctcttgatccatcagttgaatacatgcatcaaaatcctacaggcactattgtgcatgaggggtcattgattccctcgacatttgaatgttggtgcttattttcatgaaagtcccaatgttttttcttctttattttctttttctgtttttggactagcttaattctgtgtaaattactgggtttggttgaaacatgaaatttattagcaatgtatcggtaatgatggatgttctttaattaagaaaacaagtggccttgtttaaagtgccaagtatgcatctaggtgtgttttgcttgcccttatttgtttttgggtaataatctatgtggtactaacatcttgtcctactttttacagcatctggcaaat

SEQ ID NO: 102469 - DNA, 526 bp, Mimulus guttatus
  Intron number 1 from transcript mgv1a017621m (locus mgv1a0 17621m.g) derived from phytozome v7.0 (chr-ID scaffold_164 ; pos 290518 to 291043)
aggtaagacttattagttattacaacataacgtaattcttcgcttcggtcttagtcactcgcgtaaaagttacatggaaattaaatcaatcattttttgaaaaaataaattaattaattttttttttctagttgggcattccgataatgaataaattttattggtcgataatgaaaatctacggggagaaaattgtatacgaaatgctacgtacaaaaaaaaaagtggacttacttgtagctttcttgcaaatattgtagctgctgcctcaaattcgctgcttccatttcccaaaactatcgaaaaacgagagtaaattatattaaatcatgattaacaaacatactaaatcttgataatcgaccgttaatttgtttaaatattttaggtccacaatcaaatatatacttgtcgaaaacgatccacgaaataagacacacaaacatcttaaatcaggtttgatttcttacaaagtatctttttctctgcagtgaaattacattcaagaatttcgagaagcataaaa

SEQ ID NO: 102470 - DNA, 849 bp, Mimulus guttatus
  Intron number 1 from transcript mgv1a006701m (locus mgv1a0 06701m.g) derived from phytozome v7.0 (chr-ID scaffold_102 ; pos 812992 to 813840 reverse strand)
tcgatctcaggcaagttttttctccttattacgaattttgagctttctgatctgggtttttttttgggggggaatttgaattaagttttttttgtggatttgatttgacgatggagagattgaatgggtgttgactaatttgttcttttcccctcttgttgagttgactagttttcttgctgtgtgcataaattgtttgtatggagctgtagatgttaaattaacatgtgcattgttctaattaggatgtactttattagggattttgtgtttatccagaaaccaacacacgcacacacacacactcttgtgcgtgtgtgtgtgtgtgtttatccagatagctgagttttatgggtgttgtttcaaaaaaattgttctggaagtttgaggaatcgtgtagatcgatccacgcggggtgtaacgataaggtaatcgcagatttggtccctctgcgaatcgattcgagtcctaatagcgacaagcccatactatgagttgcaaatcgagattttaattggtgccatttttttccgattttcgatattttccccccgatttacttgttcactttatgtagtaaggttttagtcctcaaatcgcattatgaccgtcgctcgatttcctttggaaaggagcttgaattccatacattttacaatcatgtgtcggttgcttattaccgacaaagtactatatcagcttgtatacttgagttttagcaatttttggtcgcccggataacgatttcccgatctctattcaagaatcttattccgtttttcttgtaattttcaaaatttacgctcttttgcaggacttcgtttaaagcaccaacaagaattagaaaat

SEQ ID NO: 102471 - DNA, 427 bp, Mimulus guttatus
  Intron number 2 from transcript mgv1a023670m (locus mgv1a0 23670m.g) derived from phytozome v7.0 (chr-ID scaffold_66; pos 98809 to 99235 reverse strand)
cccttgttggcaacaggcacgtatatatatttatattaattaacaataattaataataatctcatgaatatgattatattaattaattattatgtatatatgtagcttgttatcatcatcgatcatcacatttgttttatcctctgcgggcatgcagaagtcagccatgcatgaaaacgacgtaactatatatgaagagttatcgttactgaattttgatgtttttgtgtactcatgaaagcaacagctctacttatattttgaacttgtttttattcttctctatgagtgtgtttttttttagttctttacatatatttatatttagcctgtcccaattttatcttgtccgctcatatatatatatatttcaagtgtgtatgaaatgataattaaaataataaaaaaaaaatgtttaatttgacag

SEQ ID NO: 102472 - DNA, 700 bp, Mimulus guttatus
  Intron number 1 from transcript mgv1a023206m (locus mgv1a0 23206m.g) derived from phytozome v7.0 (chr-ID scaffold_20; pos 1285689 to 1286388 reverse strand)
ttaaacgttttgccaaacagtcctcctggatttaagtaagtgtacgcttaatttcattgccatatatatcaactattaatattaataccttttcttaactttagcaaatttaaattaaactacaatatttaaatttaaattaatttttttgttaattttcttttgtttccaatgataatttgtataacaagtggaggatcaattagatccattccattcgacttaacccttaatatagcttatccttttctcttcatactaattatatattaccggatattcaatttatccaccccaccaacttattgtatttagcccattcaaaaaatatctaagaaatttatttttttgcaaattttaaacatattacgctttggtttaaaaaacttgaattagattccaccagtatgtatttattttatattttattttatataattacatctaaataaattgtttcatgtcatatttctttaggtaagtagcacataacccctgtggtttgagctttatgcacatgatatccttgtactttcaatacaggcacatgatttccctgtagtttgaactttgtgcacataacgctctacttaatgcaaactattttatccaacagtccagtttttcacataacattattgatcactatgtgtggtgttttttagggacgccgtggaagagttgtttgaaaatttcacaa

SEQ ID NO: 102473 - DNA, 815 bp, Mimulus guttatus
  Intron number 1 from transcript mgv1a013360m (locus mgv1a0 13360m.g) derived from phytozome v7.0 (chr-ID scaffold_79; pos 875740 to 876554 reverse strand)
tgttctccacaacccacgaaacaccgcccttccaggtaaaccctagtgtttttctcgatcttatttttggagttattgttgctcaatctacgcaattattacacttctgccctttggattgatgttctatcctgtaaccaaatgaacgagctcttgattttgtttgctggtttgaaatttaggaaaatgatcgtttcttctgaatatttcctttgaattttattcctcgcagtatatttatatgataggtattatattgctgaagtattgaaaaaacggcaccgttttggcatggttcgctgtattactcctgtattgatttattgggtaattaattttagtggagagagagggaagcaggactgcaatgaattcctctctcaaaataattcattttaaattccattatttgcgatttttccgattttgatttttttgcccaattaatttgataggtatctgatattgatagtattgcttctgtatcgatttatatgctgggtgatgaattaataggggggagcagtaatcagtaatgcatggtatacgtatttcttttggtggtgtgaaattcgtgattggattttgagatcatagttatttatgtcccgactcttgtcacaaattgtatacaaagttgctgtcttttgtactcatattcatatgtgagtttatttgcgtgttcttcacattgaataagtatccgttttatgattcaatagtggggtggccaagatcagttcgaagtctgcttaccctgagcaaacgctaaaaagaaaaccgttttgtctcgactcttgtgtgggctgtgatca

SEQ ID NO: 102474 - DNA, 862 bp, Mimulus guttatus
  Intron number 1 from transcript mgv1a014897m (locus mgv1a0 14897m.g) derived from phytozome v7.0 (chr-ID scaffold_1; pos 2184951 to 2185812)
tttatttcctcggtcaatttcttatttattcctcggtcagtttcttatttatttattttttaattttttttccattaattaatttctttgtgtatttatgttcttcttatgcgtccacagacggtggatctgccgtttcagtaaatatttcattttgggggttttattttatattaattaatattgtgaaaaaaatgattattaaatgaacgtttgtgtttattttttatttattggagaataattttttttctatttaatttttttttgtatattttgcaatagggaggattttatttatttatttgttggagactaattttttttctatattttttttttgtagattctgcaatagggaggattttattatatttgaatgttgttttgattgtgtttgaggtgtgttggtttgaatttttcgggtatttttttttttttggtatattttgcaatagggaggattttattatatttgaatgtgttttgtttgggtttgaggtgtgttgacatgagttggtttgaatttttcgggtaatatgcgaacgcgatgaattttgtcgatgatgtcatgtcgttttacaccgtagatataggcacaatcacaaacatacacatgcgtgtgtgtaaaagttagtagcttacacacacgcatatatatatattacttgatattatcttgctttcaatgtgggattaggtgttataacaatacacttgtggtatattcttttccggacatcgttgatttaaaatgtacgttagcacgtattgtttgcgtttctttgttcttttccttgtctatacgtacaagattatcgcatcaattagtcgtaacaaaatttattccagaaatcacgaa

SEQ ID NO: 102475 - DNA, 734 bp, Mimulus guttatus
  Intron number 3 from transcript mgv1a016021m (locus mgv1a0 16021m.g) derived from phytozome v7.0 (chr-ID scaffold_126 ; pos 488544 to 489277)
atagagttttggttcgtcttgaggagctagctgaggtattttttcctttttcttctggtttgaaattttgttgttgccattcgtttcgagttttctgcttttcgatctaccatgattttatgcattttttttacgattcagtgatttgcaatttgttaatttagtaaaatgatttttgtttttttttacgatcctatttgcaatttaacaaccatggttttacttgtttgaagcccgacgacggccttcgtttttgtttaatttggtgtttgatttatggtttaattactgcttaaagtttgtcgcatttatgatgtacgtttcagatttctcttcgttgggactctgtaactttgttctagtatcgaattacagttaaacctctataacattctattaattcagcgggacattaaattatcgaattaataattcagcatgttagtcaccgagtcgggaccgggagaaattattattttatcgaggttctactgtattgaaggattctttttgaatttcttgttatccttaagaattatgtctgttgttgatattaatatcctatcctcgatgcagactttatcgtgatgtattattgccaaagtttatacaaatgctcaagcagatatattttagcattagtcgtcaattttatttttctttagtttctaatttaaatgaagagaatttttattacagaaatcagctggtggagtcttgctgccaaagtcagc

SEQ ID NO: 102476 - DNA, 883 bp, Mimulus guttatus
  Intron number 2 from transcript mgv1a018115m (locus mgv1a0 18115m.g) derived from phytozome v7.0 (chr-ID scaffold_40; pos 994224 to 995106 reverse strand)
gagtgtttgggacacctacaccctaaccaaacctggtgatcttttctctctttctttaacatgcatattatatacatacatgcatgttatatattaattcttcatcatccttttgttttactatacaatatattttctcaattagagaataaattaaaaacggatggcctttttttttatttgttggaaaacggatgtgattacctcgtgacacgtggatggatttaattatttttaatgtcttaatttaatccattttaggtcccagcttcctttataaaatctggctgttttttttttcctttgaccaaataaaatcaggctgtcacctcaactttatattgattttttctttataatactacgattgaaagttatataataatattgatattaataaaagtataattaatgatattgatgttataagtgtaattttgcaaaacaaaattgaacttttttagaataatttcggaaattcaaattggtcgaaaatcagaatctcatttatgttttaataacaagaaattgaaaaatcggacattgagatttctagagatttaaaaaaaggactgatccgtagttggaatttttttaaagaaattggcaaaattcgaacactttgtttcaattcatacccgtaaaattaatctaacaactcattattacttaaaaaaaaacccataagtaataatttagcaaatgttgatcattagtatatatcatattattttcaaaattgcacataaattatttgtataaaaattgtttttttattttcctgtcaatataaaaaattagttactaaacacacacatatatttgtttttataattcgtctcttaattactattgtgtatgggaatggcagctagaatatccg

SEQ ID NO: 102477 - DNA, 472 bp, Mimulus guttatus
  Intron number 1 from transcript mgv1a000243m (locus mgv1a0 00243m.g) derived from phytozome v7.0 (chr-ID scaffold_4; pos 2396957 to 2397428 reverse strand)
ttgccgttgtcagcctttgtggtcttggattaaccgtgagtcctttcttcctttaacgctttggagttaaattgaagatttgaacacattatagagcattgtggatagtatgatatatgtatctgtcgtattatttgttcactatgtgtatgagtggttttcacgtgatatatctctgattgtgctttgtttgattgtttatctggtgacttcactttttgaactgctggtgtttagtttttcttagttctgaaaggctgttcgtatattgtctaatattgagatgggcaggtttctatctctttgatgtttctttaaatttagaatgcttaaatctgactgactgatgagtgtcagcttccgattattttatcaagcacgtagagtatttcaacaatctaattatctgtttgtatttgtgtttttgttgtcctcaggcattgccagttgagataacgggtcttccccttct

SEQ ID NO: 102478 - DNA, 875 bp, Mimulus guttatus
  Intron number 1 from transcript mgv1a021659m (locus mgv1a0 21659m.g) derived from phytozome v7.0 (chr-ID scaffold_213 ; pos 5976 to 6850 reverse strand)
caatatctcttctcaatcttcgtatcttcatatttgtaaaaaaatagattctagttgcagtagggtgcaatgtcaaaactcagcagatacaaagctcggctgatttttttttcccggtttaaggtcttttgtcactcctctaggcatatgcaggactcgaggaagtgtaaattagtcattagttaatgaaatttcttctcaaacgcatctcggaacttgattattacatagaacagagttaccagtttaatagcaataacaggtattagtatgaaaataattattaaaaaaaactccaatacagttcaatgtgataacagacaaattcgtttttcgtacaatgttcacaaaagattcttcagaaaaggtgataacaaaacaaaagactaagactatttaaatataaagttatgctgttggtccaacctatgaattagttaactatatcatttatatcaaggttctctttagtcaaagattctctaatctttgcaaatatcttaattccaaaaaatacaatgcaaaactaactgatcctacagtgtgatgcttggtgtgaaaaatatgcctctattcgactaatctgacttcctataagagataatccggtaaatcaatattgaagtattgcttgattactagtacgtataaacattgaaaagaaccggtattctgatttttaaaaaaaaattaattcgccgtttttccaaacgccattcataaattggatagctaatgttttcgacatcatgaaaaaaaacaattaaaaaataaaaagaccctaatgtactgcagtatttcttgttatctcatatgtggggccgtgcgtgacaaatcaagtgaagacacaacaaagaacaagaaccttaatcccc

SEQ ID NO: 102479 - DNA, 434 bp, Mimulus guttatus
  Intron number 1 from transcript mgv1a020283m (locus mgv1a0 20283m.g) derived from phytozome v7.0 (chr-ID scaffold_41; pos 752572 to 753005)
ccggcaaagcagttctcctgctggattcttcagtactaccttttttttttttttttttaatttttaataatttaatttgattgagtaattggtaagaaatgattattgattcgagtagggttgactttatttatttttagccaatttttttggatccggaatattaggaaagttggaaacaaagaaaagcttaaattagtttcttgatatttttggatttaataaatctcacaaatatattcttttcatacctccaaattaattgatgccctctttttattcttgagaattaaggatatattccatttgaataaataaaattaatcgcatataatcttagcttcattcttgggagttatgttttttttttttttttttttaaatggaataaaattggttgaaacaattgtttgtgtaccacaggatttggtgta

SEQ ID NO: 102480 - DNA, 708 bp, Mimulus guttatus
  Intron number 2 from transcript mgv1a014169m (locus mgv1a0 14169m.g) derived from phytozome v7.0 (chr-ID scaffold_16; pos 425585 to 426292 reverse strand)
cggtgccggagcctggtgctattgtccttgcaagagtaagttccattttcattttgctgatgctttttttttttattatttgaattgtttatactatctagttattagggtttggaatttggattgctatttggagaatttgtgaggcaatttttatcaaattttaagatatatagctgtatgtatagcggatccagggtcgatttgcgtagaaatatgtcacaacagttgtaggtaaggaatgaactcttcgtctattgctctcgtgtcaaagttactcgtgcttcaaattttatgagtttgttgcagtcgagtgaagttcatgattctcatttcggtgcaaacttgtggataaatgtagtgccgactgattgagagctgtaagaatagaaaaaatcaactagagcgaacaaacgttcgatgtaactggaaagggattcaaattttcgtaatattggttgcgttagcatcttagtaatcaaatctataaataaacttgaattcgttgttaaatacgaagcaagaaaagagaaagaaaatatcgaaaatcttgaattgattgcttcaattcgatgcccaatagtgtttttctccttgtaatacctgcaaaacgcgattagtcgatctcaatgaagtggtgcaaaaccaacttaatcgtcttcccattgtgttaatttgttctatttgttgtaacaggttaccaaagtg

SEQ ID NO: 102481 - DNA, 502 bp, Mimulus guttatus
  Intron number 1 from transcript mgv11b021092m (locus mgv11 b021092m.g) derived from phytozome v7.0 (chr-ID scaffold_2 468; pos 2755 to 3256 reverse strand)
cgcattcgtgtcctcgaactatagcacgtattttcatgatcgcttttggaatcaatttttgaccatgttggagtccgaatttggaaattggacattagacgggaattgtagccagctaaaatagctttctaatgccgccggaaccagtcgatttggagtccggatgagaaagttatgctcgacttcgtgaacactaccgaagatgttgagggatcctctcttctattttgattttattttcctaattgcaactcttttcttactctttgatcatttttgcttcatggacacctaattatcaatttgtacctataagatactaaatccaacaattaaaaccaaaatataaaataatccataaaaaaatccacgtaaacgtaaacgttgagtgttatttctacactcaactgcatgttttgtattcagtgtttttttctattgtttggttatacgtattaaagtcctagtgttcaattttgtgtttttaagaacgttgttgcga

SEQ ID NO: 102482 - DNA, 1029 bp, Mimulus guttatus
  Intron number 2 from transcript mgv1a015735m (locus mgv1a0 15735m.g) derived from phytozome v7.0 (chr-ID scaffold_148 ; pos 480700 to 481728 reverse strand)
attgttgtaccccgccacagagtaagccccccacactagttcaattgttcttttctttctttttatattttcttgatcataatccacaagttttagtataatttagtgcaaattacggtcacccctaagatacgctcaaattacgaaaaatttcttcatgtttaagttattacaaaccactcatcaactatgtattttcttacacgtgggcatccttacaatgtgaattacctactgcataagaatttttttcgtaaaacaatacataattgaagggtatggttataattattcaaataagagatttgtttttttttttttctcgtaatgtgaacttatctaaggagttaccctgaaatttatgtagtgaataagagttttttttggtctgagtatggttgtaatttttcaaacaagatagattttttttcgtaatttgaacttatctaaggagtgttcgtagtttcccctaaaatttatatactgaataagagttttttttaaggcaatacataattgaggattatggttggaattatttcataccaagggaggattttttttctttcttaatttgaatatgagtggtcggatttgccctaaaatttaataaatgtcacgcagtacggtgtgtaatgatgccggtggggcgcgtgcattcatttcttttttgttgctgtatgataaattttcacaggtacaaaaatcatgaacatggggtggggtgggatggtttggcctggggtggggtagggtagggtacaagaggtacaatatcacattcatggttttctctagggacatattttttaattatttctaacataaattaaactattattacactttcgaaatcattctgtattcattggattagccactcttatattagcttaattgtgatcttaattagttctttattatgtgggaattaattaatttgaaatattatttgtatgagtacgagttatgattttatctatatttgatgaagggatcaaaaacaagaaattcaaaggagaaagaagg

SEQ ID NO: 102483 - DNA, 928 bp, Mimulus guttatus
  Intron number 1 from transcript mgv1a002647m (locus mgv1a0 02647m.g) derived from phytozome v7.0 (chr-ID scaffold_335 ; pos 45824 to 46751 reverse strand)
tgacccctgctattctcctttccgagctttctcaggtatttgcgttttacagttcgtctgaagatttttttaattttgatgaagagaatttgatttgtatggagttttatttaggaagtaactaattattcgatctacattttctctatattagaatctccttgttaattaggtattttaacgctagagctgtatctgaatctgattttggtgattttgcttatcacaactgcatatctctccaaatttgagtgaggatttgctcgaagattgatgtatttctgctgtagtgctacctaaaaagttataatctaatttattaggttttggtgattttgctcatcacaactgcagatctatcctaatttgagttgagaatgtactagaagattgacgcatttctgctatagtgctacctaaaaacatatcatctagtttttttcccttaaactttgactaagataatttgatttccatggatttttatgtatttttcatgttaggaagtaactacttaacctatgtgcatttcttcatgtcagaaactcggttacactggagctgtatccggatctgctttagtatatagttacttatgtttctgtttgtctgttcacaattttgttgaaaatacaatagaagattgatgatgtatttctgttgaactgtccttgtcgtgatcttttagtttttcggttttctgatgccactttgaagagtttactttttaaactgagggattctcttagctgaatcaattacaccttcattgattctcgtgtactagccttcattgaatatggagataattttgagactgttgtctgtaaaatcacgtgtcaattacccaactagacacagacataatctatcttttttgtgtggagatacgatacttatgtgccgatacatgtcaaccaggcttgga

SEQ ID NO: 102484 - DNA, 913 bp, Mimulus guttatus
  Intron number 1 from transcript mgv1a019682m (locus mgv1a0 19682m.g) derived from phytozome v7.0 (chr-ID scaffold_1; pos 2879376 to 2880288)
cgaagtgtgactctgaacagtccaacgttgacgtccttctcttccctcttcaagtacatatttatgaaaagtatctctaaagtttttttctaaattccttcatggtgtgaccatttggttttgagtaatatggctttatttgttagttgacgtcgctgttaggttagcaacggacgaagaaatggaggttttcggtaactagtaggtttagcttagagatccccgagtgatctgatttttctcatgtagtttaatgtaaaagtgagaaatatgctcgagttacatagatggtagattagacatgttatcacagaacaagtagttgacgctcttgcaaactccttagttgcaggtgggattctgacgtatggctagaataaaagaacaaagctagggacacgtctaacacagccgtaattcctacaagatgcgtctaatgaggttttatactaattatatggcaagtaaaccaccagacatgttcatattgtttcgattttatgactaaaatgaggcttatttgtcaattttagttgattggctgaatgcctgaatcagtttgcttatgtagtacattatacatagttgaggtgttttatggaggacttgtatctgggcaaccatgcatatagtttcttgtctcgtaacatattttctatctcgctaagtgcttacacttggttacctgaaagtaatgaatggaatttgttctagtttccagtagtcacagttcatgggaaaaaaaaaagaaaattagctactcaagcagttttgctgtttttatttgtttgattgctctttgacataatggcaatgttagcctctctgtcgaattggattttttttatagtggctgatatttaagtatttttttccagaaagatccacttacttcttcccttcccaaaggagt

SEQ ID NO: 102485 - DNA, 781 bp, Mimulus guttatus
  Intron number 1 from transcript mgv1a002932m (locus mgv1a0 02932m.g) derived from phytozome v7.0 (chr-ID scaffold_113 ; pos 763033 to 763813 reverse strand)
tggctttcggaattaattatcttattcggaggcaggttaggattctctctctctctctctctctctaggttgtatatggttcgttatacggtgtttttttttagcattaaacttgattattaaagtgtttttttttttttgtgaataatgtgaaaaacactaaattccttgagttgctttacttttgtgaagttcagagtaaattgagatgatttgggtaaattcttgggcatgctaaagtaatatggattggatattttctgtctactgttgatttatcttcttaggcctcgtttgattggggagattagtcatgattaagtaaataattcgactttgtttgatgttcggtatccccagtaacttgcttgtttggtcgacccgaaaatattatgttatcttaccttctgggcatgtttttgttggatcaccgaaggtccaataatataatttggtttcattagattatttaattttatcttggcaaccaaacgaggccttaagagactgtaaaatgcagttacatataatatttatgttgtttcttctcgagaaattggattcgtagttacaacttacaagagattttatgcagttatgttaagttttcgtttttcggtgcttcctaatgcattctcttttggaggaattgacttacaaggatgtgactgagacatttgatagtgattcaatgtgtgttacgatcaattttatcatagttttgaatacgatgtgtgtgattgcagggcgatttacaagttgcaagtgtatacgccggcga

SEQ ID NO: 102486 - DNA, 1053 bp, Mimulus guttatus
  Intron number 1 from transcript mgv1a003377m (locus mgv1a0 03377m.g) derived from phytozome v7.0 (chr-ID scaffold_169 ; pos 174092 to 175144)
ccattctcagtcatctgctgccttatccaccaactgtaagaaactcccctgcgcctttttgtttgaggtttacgagtcgtgaaaattgtgacacaaatttcgtgtttgcaagttgaggatagggtttcctttaggttttgtatttgattttatgagcatcgattatggagttagaatttatttttttagggaattttccattttctatttgaattttgttttaattaataatttatttatttatttaggttttctgtagagcagcataaaaaagattagtgtagacagagagcaattaatgggcatatattttttggatgtttaatggggaggaattgtgtgctaataaaatactttatcttctatttgtgttggtagtttaacctagtttcagtttgcaatagcaacaattgctgatatattcaactgtgaggaatgtacataatcaatgtcgtagaagaggttcatctattatggataatgcaatttaggaaaagctgataaacaactaatgcatcaattgaaaatgtattatgtggaagagaagtcggtaatgatagagtaatatcgcgagttctcatgttttatatgcaatcacaatgaaatatggtcatgaaactgtaaataagaggaaagagtagttgtgacgtttaagaagatcggtttaactaatgaaggaagtcgccttcgttagttctctattttgaaaaaagtttgaatatcttcagttggttagttcaatatcttcagttggtaagttcactttttcctttttcaaaatccatgcttgtgaattggcattttgatgtattttatctgtttattcgacatttgagttcttatacagtcaccacgattacaagtaatacagaaataggctaattgacttctgtggattttagatatatttaatatgtttgtgctatttttcagtagcctatcctgcttaattttcttacatcagatgctatatcgactgctgcttttggtaatttgcccgtgattctcatgaaactagacaggtattcttagaacttctcgaagactttttct

SEQ ID NO: 102487 - DNA, 709 bp, Mimulus guttatus
  Intron number 1 from transcript mgv1a024287m (locus mgv1a0 24287m.g) derived from phytozome v7.0 (chr-ID scaffold_217 ; pos 122436 to 123144)
ggttctggtaattttttaaatctgtgaactgaaatttatttattatttttttttatatttttttataatatttatgagatttttataataatggttttctttatatggaatagtaggctaaaaggggtaaaattgtccagaaaattcgacaaaatgtggtcaacttgcaatattagctttgactagcggaatggttaacaacagtgggttgtttgtagttttcgatactacgggggtaaatgcgacattttccatagtacaagggtgaaaagtgtattttaccttaatacaaatttcagggaaataaaactaacaccaccaattcgcaagtggccggcagcaaatgaatattaaatcaaaagattcttcttggtgatcagctattgtcatgacacagctgtaaggctagttgtttttaagaaagatgcaaaatgtctcaaccccaaaaatttagtagctagtatatttcttgcaaattaaatgatataaaattgagcctcagtacttttggagaaaatatatataagataatagaaaataaagagaaaccaacaaatattaaatttttacaattgaacttttaatgtctattttgtgaattttgaaacaagggggccgaaagtggaatcgggcaaaatacgagggacttaaaatataattcccagcagcaagatagttgatgcggcagctcccgaaagacgagtgatag

SEQ ID NO: 102488 - DNA, 1026 bp, Mimulus guttatus
  Intron number 1 from transcript mgv1a015759m (locus mgv1a0 15759m.g) derived from phytozome v7.0 (chr-ID scaffold_8; pos 1169491 to 1170516)
gttttgtttgcagtccggttttccttgttaatcgtgtaagttttctctctccccttcggaaatctctggttcgtctttaattttttattttattattttatttctatttttccctaatttacaattgtttttttttcagctgtttattgtttatgcatgtagcattttaagcttctaattgtgtgtgtgtgtgtgtgagaatctggttattatttgagattttcttgtgaaatagacaaatgtgtgatggcggtagaatttaggggtagctaagtcaaatacgccatagaaaaaggttcttaagtgaatttataaattttgttcgtttagaatttaattgattgactagatttgtagcttggttcgttggattttacatcagattaatatgcatctagaattctgtaataatttgtgctttatagatctgtactttgtaggtaattatgcgtttaaaaaataatctaaaaaaaaattgaagtggtaggtgatagattttagataccctaaacctagattagttaggtagctcgatttgtggaatcgggtgaaaaactgttgaacctttgaattgattgatatttgccgtaggtcgtttatcttgattattgatgtacagttctataaatgctatctttcgcctctttgctcacctacgttacttgttcggagcagaaagatctctcaatgttgctttgagtttgagataattgtgcatgagtgtgttgttatgtgcgcgtggtggtagttctgcttgtgtgtgggaaactgagaatccacgtaaatggggtgaagagtgcaaattgattcctcgtctcaatacttactttgtctatttcaaacttgtctcttagtcttctcttcaaaagattcttagtagtagcaaacttacattttctacaaacaagacttccgccgcatccaaattgctccatagtttcgagcttcttccatcgaacctaatagtccacattatgttttacgcctgcagactatctgtgtcagcgagctgggaaaatcgggatt

SEQ ID NO: 102489 - DNA, 564 bp, Mimulus guttatus
  Intron number 2 from transcript mgv1a018954m (locus mgv1a0 18954m.g) derived from phytozome v7.0 (chr-ID scaffold_108 ; pos 200292 to 200855)
tagttgattacttatccgtgcgtatcgaatccggggcgatgaactccttaattggagcagatatatatcttaaccatgttaacagaaaacaagaagattttccttcttctcggtctgtgttggaatttattgataggctttgcaatgtcaagtgcctgaggttagatttgtcatattgtaaagaggtacgtacgtaattatatttgatccttcgtcggctcattttacattttctttagtaatagcgcagctttgcataattagcttgtgtatgaatgtgtttgtttgcagattcttgactctgtattctctgcttggtttataagtttcaataacttaaacaaactcgaattgactgctgattgccgttttctttcaaagttcatcgaaagtgctgataatcttgaaatcctcgtcttttgggaggtaatttgttgatacaaaaataaagtagcttctttatatatttttactttgtttcacaagtgataactttattatttcctttgtgttgctaaattaaaatcaggttagtgaagatataaaaagctggatagaacctcc

SEQ ID NO: 102490 - DNA, 512 bp, Mimulus guttatus
  Intron number 2 from transcript mgv1a008893m (locus mgv1a0 08893m.g) derived from phytozome v7.0 (chr-ID scaffold_113 ; pos 376824 to 377335 reverse strand)
tagaggtaataaactgctttagctttaactgtatgatcattttttggagcatctggagtttgttgataatggtgattaaggttgtcggtaatgtaggaaccgaataagcttcagtttgttaattgcttgctgaattgactttgaagtatttaattgaattttttttttttatttattcattagcttttttttccttcaacgcataaatttggtgggggtgttttcgaatcttttgatttggaaagttagggcaatagaagattgtttgagtttaatttttcggggaatgtataatttgtttagttattcggggactgaaaccaaatgtttccgtaatgtgtggtgttgtgaggcaaagtttgttagtttgatagtgtttcttaaatatgcgggctcatctattaatggttcatatatattaaattttgttatgtcctcgttaatcgattttgtcagtattgatatttccggttgcagaattgaaggtgaaggtgaagcaccatcaaattcag

SEQ ID NO: 102491 - DNA, 817 bp, Mimulus guttatus
  Intron number 2 from transcript mgv1a000466m (locus mgv1a0 00466m.g) derived from phytozome v7.0 (chr-ID scaffold_255 ; pos 117414 to 118230)
acggaggtgtgcccatttgttaccgtatactgattacacaacggcgtgatatttttttgaggattgcgtaaatgtgtttgacatgtgtcgaaacagtatcgccgtatttattatctttactagtaactattttagaaatataggtatcatttaatgtcagatgggttatagaagacgaactaccgcccacttgccaaaagatgggaaaagaaaatggaatgtaaggaaaatcgaaacaccagaactaatccacgagtatttggtaggctcgtatactggacaagtgagattgtagcatttatatagctagcgactcttaatttcaccactttggtcggtattttgtgtagctgcgaagaaagtttacaagtactaatgccgcaggttgtcttaacagaaatcaacttaagttgtaactgttttctatgatctcatcgagctgttcaatagttagggaattttgtggttatgtttttggatccaaaaacagtaaattaatcataaaattctgctcatttacaatttagctttacatcattattcatggctcaattagtgaagtattgaagtttgtagtctagtcgcctatctctctcctttttgttcccttaaagttgaaattgaccatgtttgaagaaaacgcgtattcgtgaaattttctggactttgaaaatctctgttccaacaaggatttatataacttttgtcatatttatttcactttattgccttaatcctggtgcaattttatttggtgctggcatcgttgttcattttggtttctgtcattttgcagggccgaaaccttccgacttgt

SEQ ID NO: 102492 - DNA, 572 bp, Mimulus guttatus
  Intron number 1 from transcript mgv1a009941m (locus mgv1a0 09941m.g) derived from phytozome v7.0 (chr-ID scaffold_36; pos 1671044 to 1671615)
ctgaatctatccaagcaactctataatctctttaggtaatctcttttcctttggttttttagtatggtcttttcattttttgtaatgatttatttattttttgtaattggaaatatgatatttctgcaaagtactaatttttatgctaattagtgatatgttgtatgattatataaacatgagtttttagttgcccttgtcaacttttgtaaataaaagaagaatctttattgtagttgtttcatttgatcttgattgtcctatttgagttaagatttgatgctatggtatattttgatttaccggggggccgtggccccctgaccgtttcgaacatgttatgtagaaattttgttgtttcttgattagtcattttcttgtatttgggtgtcgaattcaggttagtgattgcttagggtatgaatttatttattttagcattacatgtataaagaatcgaagttatcgattcgttttgtgttagaagaaaataattgattcgtttttgtcttattttttccttttctgcaaaaccaggtaaatatttgatcaagaatagccttcgacttggg

SEQ ID NO: 102493 - DNA, 632 bp, Mimulus guttatus
  Intron number 3 from transcript mgv1a017896m (locus mgv1a0 17896m.g) derived from phytozome v7.0 (chr-ID scaffold_14; pos 2164703 to 2165334 reverse strand)
ggtaactacaagaggtataacacataatgacaatgaatatataataaataattgtgaagctaaataattgtgaacatgcgaaacccccaagaatgtcacaatttaacatttattctagaatattctttcttgtttatacgaaccgagtggatcgaacaaaaaaaaaagaagaagattatttttcacatttcatttcatcaactctaacaaaaaaattgttattattttttgtcaaaacctgtctaagctacttgttgtttaattgtttatgcttaatagtttgacggaaaggtttagtattacgttttgggttttaggatgagcgttaactttttgaaatgaaaaaaacaaaatcagaaatttgtcgtacatggatcctgcttcaatactaccggaaaattatgttagtctttggtcatctttgagatcttttacgtcttgcaactaggaattccacataaccaaaaagaaaaatccttcactaaatagttcaggaaattaaaatcatgtttcagagcttttttcgtttttgtgagaattttctaaacttctatatttttatgccttgtgggtatgtcgtgtcttatcgggtggtagaatccaatctggacatttacttctcttcaacaagt

SEQ ID NO: 102494 - DNA, 347 bp, Mimulus guttatus
  Intron number 3 from transcript mgv1a019862m (locus mgv1a0 19862m.g) derived from phytozome v7.0 (chr-ID scaffold_124 ; pos 60454 to 60800)
attcgatacatatatttaccggtcatacaggtgagccattttattccagtgtgttcaagcttttattaaattgagtttggtgatagatagtggaggaaaagaaccgaaaccaaatcgaaacccgaaaacccgaaaacccgagaaaaccgaaaatcaaaatagatttgtatattttaatgccttattgtgaaacgaacggagagaatagcactggctgaattgacgtgtttttactcctatggcatcattttttgccggtttcattaacttgcatctttggaattaaattttatgtaattttacgtaatatgtttaaaaagtttctttattgcatgtaggcgaagtat

SEQ ID NO: 102495 - DNA, 620 bp, Mimulus guttatus
  Intron number 1 from transcript mgv1a003755m (locus mgv1a0 03748m.g) derived from phytozome v7.0 (chr-ID scaffold_233 ; pos 209829 to 210448 reverse strand)
aaattaactctctaggtatgggcctttttaatttttccctgcatttatcttgctattatttttacttccttctcaatcaatcttttcactttgaatttactttgcatttattatttttttttcctttttgttctttatattcctccgttgggtctatctctttcctttgtgatttgtcggttgttcaaagaatgtgttgagttggaaaaggaacccctttcttttcaggtatagaaaatgctagatctgaaaccacattgccctaaaacccacttcaattcatgtattttttgagcttctttgattctgcatttctgtatatatagttgttgggctttgctattctgtaaagattctgttgtagatcttgctacattttctgaattttttttttgccctgcgtactctttgtttgtttctagaaggtgtttgggtttgattctgcattttctttccctttcattgtgactatagttgttgatttgtctttgttgctttgtttacacaccaattcttttttaattacacctttgctattactgttggatattaggttttacattaatttctgcaaatctatttttgtgtaagtgcaggagttgaattttgtctctactact

SEQ ID NO: 102496 - DNA, 412 bp, Mimulus guttatus
  Intron number 1 from transcript mgv1a013710m (locus mgv1a0 13710m.g) derived from phytozome v7.0 (chr-ID scaffold_1; pos 4293225 to 4293636)
ccctagctttcttcgccctaaggtacaatatcttcaattattataattttattttaaatccctaattttatgaacaattggggctgattttgattgttctgatcagtggcgtagcaatgaaggggcagggggcagccgcccctctaagaaaaaataatattttttttaattactttttgacattatattttgtaaatgtgtgtttttccccccaaattttatgttcttctcaattctcttatcttatgtaaatttagatacatacttattttagcaacttatggatgtgtagaaatttatataaaccaaaaaaatgaaaaaaaaaattcaagattcaatatttttaatatgtaatttgcttcccccattttatgcaggtttgtagaagatcacgcagttaacattactacag

SEQ ID NO: 102497 - DNA, 662 bp, Mimulus guttatus
  Intron number 2 from transcript mgv1a015498m (locus mgv1a0 15498m.g) derived from phytozome v7.0 (chr-ID scaffold_7; pos 2981893 to 2982554 reverse strand)
aagcatacgatgtaagtaattaacctcataaatcaacttttatttgtattttttgcttgttattaaattaatgataattaccttttaatctctctcttaattgtgtggattagaaatattatagttgcattattccaattttgtattctctatgataagatcgaagcctaatttgtgtcggtggggtgaatatgatcctctttattggcttggacctttcgaaaaattgtgaaattaactgccaaaagatgccgattaattagcctaatttggatttaatatctcgattatttgggcaatatggagttatgcatagtctatgagtgtattgtatatatgttatatgtgtacaaatatttgtgttaggcctagtttggttgggaaaattagccatggctaactgaataattggattttgtttgttgtttcttttatcatgtctttcattgtaccttttcttggcaaccaaacgagaccttagtgtacaataagatacatatctagcgcacttcaccggatatagcatctataagaccgtaatatatatttgatttgaatataatcgctcatcgagacaacttcttgatttctttcgatcaaactagttattgagttaacgaatctaacatatgtttgtgatggtattaataatgcagattgtg

SEQ ID NO: 102498 - DNA, 856 bp, Mimulus guttatus
  Intron number 2 from transcript mgv1a009881m (locus mgv1a0 09881m.g) derived from phytozome v7.0 (chr-ID scaffold_1; pos 576466 to 577321)
cccttggtaaaccgggagatagcgttgttttgggggtaagaagaaatatttgtcagttttttcattctttgattttcttgagcttgaattttactgcatcgagagtagtgaaggcatcgtttgagaatgtcgttgggattgatgagattgattgaattggataggattacattgcccaccatgtaatatgtgattaccttatgcttgtggtttatgattatagtattatacaattcggcctcgtttggttggggagattagccatgattaactaaataattgaactttatatgatgtttgttatcctcaataagtcgtcgggttgacccacaaattatgttatcatgacatattttgactaatcttgcagttttttcgttggacgtcccggggttcgataaaataattcggttttcgttagtttatttaatcttatcttgacaaccaaacgaggtcttcttgtattagataatatccttcgtatccgggcccgctttttaactacggacttcgaacaaatcatttgatacacttagattatattgtctatcaagccctttccttattcccgaacaaggccttcctagattatttcatgcggtaaaaaattggctaagacatgtactcatgctcttggctgtgtattgaagtttaaaaaattggttaagacatttatggtttatgcgtaataaagtctcgatatattaatgaaaaggttaggcataagcatggtatcgacaataatataatataatatcaaccaaagaaatttctcgtaagtcgaattcttatttggttttttcaagttcccttcttaacagaaactctgttcagcgtggaagaagcggtttaacga

SEQ ID NO: 102499 - DNA, 949 bp, Mimulus guttatus
  Intron number 1 from transcript mgv1a007628m (locus mgv1a0 07628m.g) derived from phytozome v7.0 (chr-ID scaffold_2; pos 4213177 to 4214125)
ggattacttgggcttcagatcttaatctttgtcaggtatatttcgttgtgatgatcattaattttctttagtttttgttggatatatttcaataactaattatatagacgattctaaataaatggtgaagggtggaaattgcagaatgaatgaacgttagggggtttccatggcgaaactctggaacagaagctgaatggaaagattgatcattgatcattttaattattattattaattaataagaaaatttatattttaatccgaagacaaattttaaccatgctcctctcttgtagagaaaagtataaattcgagttattttattgtcaatgaattcaatttgtaattaagatgatggagaaaaaaatagaacaaacgttacaaattgtggttggtttcgccatctttaatcttgagttaaaagacaaccagaactcatatcaagtagttgaaaatttgtctttacaaacatgttagagaagtataaaccaaaagcgcactaattaatttcgattttgtagagtcgtggacacaattagcatcgatatttatcagatttccattgattttatttgaattacggcctcccttttattaaaatgttacacaaaatcaagttggatggaaaatcgaaaaggatgtaaacatatgttgaattgtatgtttgctctcgattttcaatatttggattcagtcatctaactgatcaatgttttcagtgtgttcgttttatttctttagttttgaactcgtatcaagtttatacccacgttttaccgcgttgtcttattttgtgtttctagtttgttgtattttatctttaattgtgcctctaaacttcctcactgtttctatttacgaattcagcatatcttgttttctgatgtccgattcaattttctttttatcagataaagctgtttttgtctgaagaacctccttccca

SEQ ID NO: 102500 - DNA, 749 bp, Mimulus guttatus
  Intron number 2 from transcript mgv1a005216m (locus mgv1a0 05216m.g) derived from phytozome v7.0 (chr-ID scaffold_108 ; pos 50261 to 51009)
tgctggacctctcctggtcgaaatcttcggtcagttgacattttttttttaaataattctctttgctttttcaccaccatagtgttttgatgtacattaatgttttgggtaaggtactgattgcatgttgaattctggttgagaaagtatgaattatgggtaataggtttgctgatggaatttgggttctttctgtacaaagaaatttaggagttgaccttaagtaaagtattgaaaaagaataagaatgagtcttaaaaatgttttgcttgtgatttggaagacacgcccttgaattaatacggtcatttgtttgaattagaagcagtcaccgaacacgattagtaaagttaaacaactctcttatacattacaaagctgttagttttcttttattgtataaactatttgcgagggttatttaatgttggacatgaacaagagaaacattcttacgttttaattggtctgcagcttgtaatcttacaacattggcaaccgtatttcaattttcaatcttcagtgtcgtgttgattatttgagctattgaattgtcaatatgttgggacatcgaaacatgagctactatgccaatgtatattgtatagacattacacgtttccatggcaacgttcttaagttctattttatgtttcgtattccaaattttgtcggtttcagttaaattttaagcacttaaaaatttccttacagttctctcttctctccagcaactgctctcatcttca

SEQ ID NO: 102501 - DNA, 757 bp, Mimulus guttatus
  Intron number 1 from transcript mgv1a005610m (locus mgv1a0 05610m.g) derived from phytozome v7.0 (chr-ID scaffold_21; pos 170207 to 170963 reverse strand)
ctcaagagcggtttcggaatattcgcctgcaggttcaattcgattaatttattgttttcatttttctcttgtgcctatgaaaatgtttgaattttctagggtttgttgttgaattgcaaaattagggcttttggggcttcaattaagtctgccctagatttccctgagcgaaccccctttcgaattttctagggttaggcttattaattgaagggtgtatatgtttatattgaatagtatagatctatgtgtatcagaaatgggtggatagttgctgatcagacaacacaaagtcgaaacggaaattgttcaagaaatatttaaaacagcaagaatgcattttttaggaaaatgggtttacatatatcatatgggtcaatgtgtccacaaatttcgaaaggaagccgagaaatctggtcaatttcttttgggtttggctacacctttttaaactggcatggggtgcacttggtttaaagagttattaggtcttttgaatataattgaattaatcgaatttatagttagcaaaataacagtctggttttgcacacgtcggaagtaaagcatgaaacgaaaagggtttagttacattgcaatattatgtttaatttcttttaaagtttcgatttttctccactcgtctattttcagagaagaaaaattagctgatttttttttaataatcggaagtccttttttttttttttatctaattaatggttaaccgggtatttttcttttgtccaggaagaat

SEQ ID NO: 102502 - DNA, 217 bp, Mimulus guttatus
  Intron number 2 from transcript mgv1a012567m (locus mgv1a0 12567m.g) derived from phytozome v7.0 (chr-ID scaffold_327 ; pos 82993 to 83209 reverse strand)
tcagataaaaaagccggtcgagtcaataaaaacaggttctttttcttttcttttttctggttcctttttttccaattctccgttaatgtttcttgattttccgttaatgtattgttcggtcgagtgaataaaacaggtttttgttacttctgcttactttttccaattccccgttaaatgtttcttgattttccatttttttgatttgcttaggcca

SEQ ID NO: 102503 - DNA, 535 bp, Mimulus guttatus
  Intron number 2 from transcript mgv1a022969m (locus mgv1a0 22969m.g) derived from phytozome v7.0 (chr-ID scaffold_27; pos 42226 to 42760)
cacttgtcctgctcttgtcaaggtttcttgcagaggtagttttcttaacttttgatgatgtctctccctgcagattacgtatttgaatcttgtcaaaaatatataagtgttgttcgaaaacatccgctagatttaaattcctgttgttggcggaaactgtccggaaagaactgagaaaacagtttcttagctatagataacatcaagatttttggtactcgaaatgaaaacaaaaaatgaactcaaaatcagacatatatgaatagttttcttcttatttcttgcgtgttttgttaattatctgagaatataattatgccaccgtactaccacttagtactaatcgcaagtcttaagcatatgaaacaacatcgccaacattggctacagatgcagttgataatatgacaaatttgtcgtataatgggtcctacatgtacaaattcggagattaatcaataatatcgattttcttaagactaaagttgctgctgttgcaggcaaaaaacatcattttggggaaacaaaaagaggc

SEQ ID NO: 102504 - DNA, 397 bp, Mimulus guttatus
  Intron number 2 from transcript mgv1a004455m (locus mgv1a0 04455m.g) derived from phytozome v7.0 (chr-ID scaffold_18; pos 1344831 to 1345227 reverse strand)
ctgttctcatcagagaaaccgacaacgaaaccacggtcagcattttcccccatcctctgttttctttgtttatattctttgtttcgcgtttggggagttaatatttatacttaaccaggtgcatttgaaccgtatatttgattaaataactactcagtaagcacacacatacacatgtgtgtgtgtgtgtgtgtgtgtgtgtgtgtgtgtgtgtgtatgtgtagatttacggttcaaattcacccaatgtagatcaacaggtgtagcatctacatctaatttcccgttcttcgtgtgtgtgtgggtttttttttttttttttttataatttataatttttaatttgttggagtggttttcagacagtaaaaacaccaagaattgagagaaaaagggc

SEQ ID NO: 102505 - DNA, 743 bp, Mimulus guttatus
  Intron number 3 from transcript mgv1a011646m (locus mgv1a0 11646m.g) derived from phytozome v7.0 (chr-ID scaffold_16; pos 340349 to 341091)
acttgaggtatttcttcttttttcgccccatttttcacgcctttcttaactgttttaagcaatactccttttcaagagctggagcatatcaatttgactagaattgaaaaaaaaagggaaaaccaaactgcttcctaaaatggttttagaggtttagatgcctaatgtacttctaattgtaccaagaactgcttcgtaacataatttgaatagtaccggttgttattaaatgtttacttgtttgcaaaatatggctgaattacttgttactccccttgaaaaatagtctagttgactgatcatttatcatagtttctgaaacagaggaatatgtcatttaagccatttataccatttgcaaaactagtcaagtttttactcattaacaaccaatagagctgttcagttactttgttatgagaacatacggcaagtctctggatttagatttgtgggttcggtgtaagatctctgtaatctccagatttcccagatgagtgacatgagtcagtttagcctctccactagttaatctatgttggttttggggtagtcattaacatgtgtatctcttaagctggaaaatgtaataaagactaagcgtacactacttgaagctcgaaatctctcatttatcctcattagtaattaaaaactataatcttgatacatctcgaaataaatatgttcttttcatctggttctcagccaagaaatagcagacggagtcaacaaatcttctc

SEQ ID NO: 102506 - DNA, 642 bp, Mimulus guttatus
  Intron number 4 from transcript mgv1a013220m (locus mgv1a0 13220m.g) derived from phytozome v7.0 (chr-ID scaffold_8; pos 2240833 to 2241474)
ctgatttaacaggtacttcacttaatcacattcatcgactttcttttcactttaatccatgcttacctttgaaatttgagtcgccgtaagtctaacagtatcgtggatacaagattttaggatggaatatttcgacatgaattattgaacacggccttgctaaatattcgtcttcttgtcttagacttttcagactttgtacaaattggaaggagtactgaacttcataatcccgtaaacatttaaagatgttttattcgatgatagattagaaaaaaatagttgtgtagtttggccaattcttagttaaccagcagcaggggttggattcttttctccatggatttgtagctcgaatcatgtggaatatccgaattatggttttatgatcttttggactttattatgcacaatttagccttatgatttaccgttaatgtttcaaaaatgattatactgtcatatctttatcttagacaagctcagtcgaaactgaaattttagaatggtgttctgtttgtagcaaaaaagatatatgtttgatttgttttttatttatgttttcaattttgttcatctttgaatttatttatttttcgtgtttcaggagccgatctttctgatactgatcttagaggtgca

SEQ ID NO: 102507 - DNA, 787 bp, Mimulus guttatus
  Intron number 1 from transcript mgv1a015052m (locus mgv1a0 15052m.g) derived from phytozome v7.0 (chr-ID scaffold_59; pos 662985 to 663771 reverse strand)
agcctccgcttctctccaccgctctggtcgcggcggtacgcttacctctctctctctccatttttctacaccttgcgttttttcttgcattcaattttacatttttttggtaattatttggggatttttttaatgcatttatatgtttttgatagaggagtctagcttcatttaacttcctggttgatgttcgatcttgttttttgaatggataaattgtcttaattgttttttttttggaggaaaagtccgctgtttcgagatttaggtttttattttcaacttttaatggcgttgttcatcgtttagattgatttatggtttagagaaattggattgctgatttaatcccaaaaaaaatgtcttggcagattttatttgcacgaaaattattttctataattttgtgaacaaatgggcgtccattttcctttgatttgtattacttttctaattgtaagaccatgggttattattccttttattttagtgtattttatcgaggctggtctggtcttaggtggcgatgccaacttctttatccgtagattcgttttaaattgcaaggatggtaaattgttttgtagccatttaccctcataatatagttcttatacctaagggcgtcattagcaattaataaaaaaattatttcatgggctatgtgtaatgagtattactacatgttcatttctggagaaaacaacaattactatattaaagattactttttttttccaatatgtattagaaatttctgaagagtttcggtgctgtttgattacag

SEQ ID NO: 102508 - DNA, 645 bp, Mimulus guttatus
  Intron number 3 from transcript mgv1a012225m (locus mgv1a0 12225m.g) derived from phytozome v7.0 (chr-ID scaffold_11; pos 2797349 to 2797993)
actcgcccgatcgagcttgtgcccttgcaaagcaggtatgttaaggatcttatctttgtgttttattttctttttgagctgattctctagtcctatttacacccgttgatgttgttagtttccagttttgtctactttgatctttcctgtcatctattgtcttggtttactgattttgttttgagcatgttttttggtcttatgaattaagagttcaagtttcaaaagcatgcattttttcctattttctagctagagcctatggcatttttacatgtgttgttaagataaatcgtagaatacgagctgatacaattgtaagttttatgacccaaaacttgatcaagatattagctctttattttttcaacgtggcttcatatttggctgttttattttagatcttatgatttcacactttctcaagagttgaatgtcgagttgtaccttgctagaattcgacaatgttgatatttgtatgatataaaagctttacgtattgaatggcttcttttttcttattttccatgtcgagaattttggttaattttttcgttgtttgggctcgtcttgcatttcttcacttatggaactgggtgcaccttttcaggctttcgacgaggccatctctgagctagatacgtt

SEQ ID NO: 102509 - DNA, 320 bp, Mimulus guttatus
  Intron number 1 from transcript mgv1a000682m (locus mgv1a0 00682m.g) derived from phytozome v7.0 (chr-ID scaffold_100 ; pos 476813 to 477132)
cagggttattggtgctttaaaaaaaatagcttaaagcagattattttataagaagcaaaagtaaaagttaattttccaaatacgtgaaaataaattatgagcaaaaaaaaacctcataatcactttcaaaaagcttttcgaaacaccattttagttttagagagagaaaatttctaaaaaatgtaaattcaaattactgaaataaagcccaattgagtggaataggcccatttctcttttttcccgcttcaaattaattcagtacctatttcaaaaaacagagctcttccgagaaattccgatggcgatatccgaagaaa

SEQ ID NO: 102510 - DNA, 658 bp, Mimulus guttatus
  Intron number 2 from transcript mgv1a000682m (locus mgv1a0 00682m.g) derived from phytozome v7.0 (chr-ID scaffold_100 ; pos 477442 to 478099)
ctccgagatttagggcttgccagatcgtttcggaggtatgcaatttttatttttttttaatttaattttttttttccagtattgacttctggcttcatgaaattacgttggattagcatttgtgaagtctgatataagcttcttcttcttggaaaaattaagtcttgaataaaaaaatgtgaggaatactataaattggtactttatggtttttgttttcgatgtatcatctagataatagtagcattggagctgagtaatagctggcggtaactgcagggagggatctaattttcgtttcttttgcttttaaaaaaaatccatttgaaagttgagggaatgcttaggttggtaattaggtatacatttgattttcatgtcaggaataagtgatggatgagaaagttatggacctcgtctatttttggttgtcgttggggtttatattctcaaagatttgatttcaagtgcatgttattcttccgtgtgttggattttaagctctttatgagattatcaaattattttctggttaaccaagcaactaggttactagattttggtatcttgtcatgccagttcactgagtcggcacctgggcctgatgtgaaataaaaccaggcagtaaacttacatatttctttctgtccagatcatt

SEQ ID NO: 102511 - DNA, 711 bp, Mimulus guttatus
  Intron number 1 from transcript mgv1a009921m (locus mgv1a0 09921m.g) derived from phytozome v7.0 (chr-ID scaffold_102 ; pos 721657 to 722367)
tcttctcaggcgggccaggtagaacatgaactaaattaatcaccaagcaccaaaatgtttttgattttaattttctattttattgattatatggtagatcagatccaattgttcgagattagggtttcgaactttgatttcagaaaatttgggggattttagtcgattggtgcattatatctattcattatcgaaattcgaaacgcaattcgaaagagtgaagttaaatataaactagtttctggttgatacacattaaacgaggctggtgttcgtcttgtgagaatcgttggttgcttaggattatcaagggaagacattctttcagacgatgacataacctatttttcaatctgcattagatggcaaatttacgtgtttgatttaatttgttatttgtagatttagatattcgattgtagcttgaaagttgaaagtcattgggttatgtatttgggaaaaacggtattccttatccaatttcaagaaaacgcaggaaatgcccacttggacgatgttcggttttgtatgcaaatgcataagccagtgacgtataatttgcattaatgctattttgctcgacttttgcagtagtattcttggttttgtggatttcttctctatctgaataatatctcgtcttttctggattaatttttggttaatttggtacaaggttggtatatacggttatacagcttattcagctag

SEQ ID NO: 102512 - DNA, 696 bp, Mimulus guttatus
  Intron number 4 from transcript mgv1a006253m (locus mgv1a0 06253m.g) derived from phytozome v7.0 (chr-ID scaffold_179 ; pos 29022 to 29717)
gagttcgagaaagcaattcgatattgtcctgccaggttaagacctcgtatttcttagtttgcttccgcatggtttactgatgtaatcaaatttccctcgtactcgttctatttactgttaagatacttgaactacttgcttagctcactgtcgtctcatgttactggatatagtaccgatgtagttgggctcaagagaataaatttagattgtccaaaaacagaaacacagagaaaataaaacagttctgtttcattggaaaaaggtgaaaccgatgcaagatttctactacatgtagtataaatattttacagttcgatatgtaagcattttataggttgattttctcttttaagcctttttcatgtttctttattggctaagaagtagttaacggttatatgatcaatcccatacctttaaaaggtgtgactcacttcctttggggaaataccatagagtttatctatacttaagtgccgtacgactacaaataactttataaattgatttttgctgtcacttcatcaattcctttggctctgtgagattatctgggtttcctgtctctttctcgttgttgtcatccatttacagaagaaaaagggaaaagttcggtataggcttaattttgttcgttgttcattcttttaatgtttagaaatatatttattttcagatcttggtccatacaca

SEQ ID NO: 102513 - DNA, 940 bp, Mimulus guttatus
  Intron number 2 from transcript mgv1a007285m (locus mgv1a0 07285m.g) derived from phytozome v7.0 (chr-ID scaffold_142 ; pos 166183 to 167122 reverse strand)
ataactcaggatttgaggtattctttttcaagtgtctcatggttttttttttctttttttttttctttcatgtttaatgtttggagcaattatagtttcaattttagcttatccaacactgaagaatagcgaagtggaagtattgacattcactacgaaatttacagcctgacctattaatatcttatgaaatatgcaaaggactacctatcttaataatcagtacatggaaaagtatactataagaatggatttgattctcttgacttagggttcatttgtccgttgagtgttgaaacacctcatgaatttgcctcacccgattatcttgtgtagaataatctgggattagttatgcaagaagctttgacctttttaccatgttttttgcataagttgcctgcttggggtagttttattatattgacttgcattgccatgcaagtgtatattggcggctgtgaagttagagaaattccatgcaagcttgtttgatgcagcactatactaattatgcggactcccgtagttaaaataacttcgaaaatgaaagtaaagagaatgcaatgctcaaaatgcacttaatgaatttagaatcggtaatttagcctgaatcaagtaatcccattagtagaatgtcccttaaaaattcagaactcgaatgaatcaatggaagtgttcgtttcctctagtttagggtttaaatcaattctaatgtgagtgcgttaattctgatagggttgttcatatatgtgtatgtgtatgtgtatgtgtatctgtctatgtatatgaatgtcattcaggcgacaagaatttgactctaaactcatgtcttgttaatttctcaaatgatctttctcttccatttatttatttaaggttctttttaactgtttcaacatttgtgatgaacgatgttaaggcccttgacacggaagga

SEQ ID NO: 102514 - DNA, 729 bp, Mimulus guttatus
  Intron number 2 from transcript mgv11b024317m (locus mgv11 b024317m.g) derived from phytozome v7.0 (chr-ID scaffold_1 16; pos 235507 to 236235)
tcaatttagtgggttgtcttcttgaacctgcaactgtaagtcctgattcttaccctgttttctcgttaacttactattgcaacaaaagaaagtgtaaattacatttacatctttgagttatgctaaaataactttaaagtttttttagtattggtaattaccgacacacccctgaaacagtaccggatcttaatttcatagcccggggatcgatatgcactatatttgtttcccttaagctctattttgtcttcttcttgtcttcatcttgttgtcttcagcctaatactaatagtccattagaacactatggaataaattatccaatgcgctatatttgttttttttctaacgagcttgttacaattttttaggggtgatggtaattactgagactaaagggactttaaagttattttagcatatctcagggatgtatgtgtaatttacccaaataaataaataaaattaggtgacataatagtgtgaattttctttttcttttttttcttcttattgtgatatatatatttccttatttgttttgtattatgtttttttgggtggtgcatccagcttccgactcagttgtacacagctatggtaagatcattctttcatttttctctagtaatcatgtatgtaataaataaataaataaattggtatttaattttgtttccaattggagcagctatacacaacctccacagtagttctagttatcca

SEQ ID NO: 102515 - DNA, 529 bp, Mimulus guttatus
  Intron number 2 from transcript mgv1a001802m (locus mgv1a0 01802m.g) derived from phytozome v7.0 (chr-ID scaffold_1; pos 3615035 to 3615563)
tcacaggagattgagaggtgtgtgcttttgttccttaaaaaaagattctctcaaaatttcctacaatttgttcttgattttgctatacatatacaattgcgaagttcattgtgatcttttagttgggaagtgcataaaaggattttttgcattttgaatatgggaagcaagctgcagtaagcagaaacgataatgcatactatatgtgttggttcaaatagaatcatcagagattttatatctgtagatttttgttaaaaattgtaagctaaagtgaaagagagaaataatttggtaaaacaaactgtagaatggaaagtattggtgtatataagaaagatggttttccacatgtagtttgaatattcaactgtttatgcataactgtaactgtaaatatttctcctaaaagcatgtcacagttcttctttctttgaaaaaaaagaaaaggaaaagaaactagtgtttcatgacatcgctctttttatcttaactttatttaacttggtaggaaggttaaaggccacag

SEQ ID NO: 102516 - DNA, 389 bp, Mimulus guttatus
  Intron number 1 from transcript mgv1a009682m (locus mgv1a0 09682m.g) derived from phytozome v7.0 (chr-ID scaffold_4; pos 3021105 to 3021493)
acctctttggccccgatccatttgctttcctcaaggtaaatccttcaattctaccaatgtagggttttattttttttcataattcaattccgccgagatctacgcgctgctgactgatagataattcagttccgaggattgtgtattgtgattttgtttttgataatgtgttctgaagatttgattttttttgcgttttcgtgatttagggctatttccgtaatttttttgaatggttgaatctcttcgaattggattattgtttttttcagctgaagaagatctactaattgaattgacatttgattttgattttctgaaaatattaattttgtcgtctggtttattcctcctgcattgcagattgctgcggtggtgtcgcttcaact

SEQ ID NO: 102517 - DNA, 853 bp, Mimulus guttatus
  Intron number 1 from transcript mgv1a012689m (locus mgv1a0 12689m.g) derived from phytozome v7.0 (chr-ID scaffold_126 ; pos 512793 to 513645 reverse strand)
cccccgttggtggcaaaaagggtgactctgttattgttgctatcaagaaactcaatagagatggccaacagctaaattaattttttttttattcttgatgacaatcgtgtgtattgttttctgcattttttttaattgagtttttttgtagataagaaatcggtcgaattagttgtcgttttatgttcgtttgcttgaggggttttcgttttcggtttattttgaaggtcttaacttctcttgcaattttgagtctatatgtaagcagtggcggggccagcatagggccagagagggggccatggccccctcccctcccccaacaattctcgaatccctattttaatgcatttggttcccgcaaacttaaaattttggcttcgctagtgtatgtaagtgttctttgcggttttacgttatagatacaaaaaaataaaataaagggacgagtttgactgtttgagttttcgactttcgttatatgttgtaaactaagttttgtttcaaattcagctcatatataacttttggttgtgaatcgcttaattagaataacgagcccttaaatttttctatcgtttgtagataccgatcgatgtgacattctgcgattaatattttcgcaaagtgcgtttattttatatttttcgaagtcatccaactgttgagtaaagtttctatttttttttccctttaaagagttcttacgcaggtaatataaatgtggtaccgcggtaattgaatcgtgttccggccgggcttcgtaaaattttcaaatatttgattaaagactctgtttttggaacttacgtcgattcaattttattcgatttcaatcgtagggccataaaca

SEQ ID NO: 102518 - DNA, 604 bp, Mimulus guttatus
  Intron number 1 from transcript mgv1a011006m (locus mgv1a0 11006m.g) derived from phytozome v7.0 (chr-ID scaffold_13; pos 1196545 to 1197148 reverse strand)
attgtgtaataaagggttcattcattcaaattctggtaattttctttcttgggtttttgccattttaattaataattattattattcccatgcatattaataacatcataaaattcacgttaacttattcataattacgatggctaatgtgcgtgaaaacatgtgtttctggttgatcatttctgtccaagattctggggagttttttttcttgcaagattatattgttaattagcagatatacaaaccctcaattattggaccattttatcttagattaattattcattatttctatatatacaattatatatatatatatatatatatatatatatatatatatatatatatatatatatatatatatatatggaagatgttgcagttggcccacttcaatgtgtggtttcaattattacaaaccaaatcaaattgtccatttatgtagttcatccttatttattttttttcccagccatgaaaacatatagattgagaattaaactgaattttcatttcaatttcgaaaaatttacgttatcgttgcacacaatgcttacctattttagttgtttcctcaatttcttctagatcaatcaag

SEQ ID NO: 102519 - DNA, 974 bp, Mimulus guttatus
  Intron number 1 from transcript mgv1a007240m (locus mgv1a0 03419m.g) derived from phytozome v7.0 (chr-ID scaffold_2; pos 3394738 to 3395711 reverse strand)
tcgcggatctgacgacggggttttggatcaggtttgtaattttaatatttatttggggggtgtgattttatgcaattgaagaggagttcagcttacacttcgtcttgtaaattttgctgcatgggttttttttttttaaattatagcaactatttttgatgtgggttttctatttcgggaatattgcgtggcggaaataaatctggaagtttaaatttttgagatgttatttgaaggggattcttgaattccgcgcgaagaaatttaattattaacattggataattctggcttctccgcagatctgaagtcggtgttgtgtgttttgactaagtcaaagattatgttgcaaaaatatagcttcagtatttatttctgtaatgaaatctgggttttacttcaactttgtttccacttttgtagcttctacaatccagcctttatacacacacacacacatacacacacacacacacacatgtgtcatgtgtgtgtgtgtgtgtatatatgaatgaccatatttaactttctacatgtttcactgttgcttatttatattgctttaatttatgtagaccatcttttagtgggagtgaatattttctttatttgttttatagatcattgtgccttgagaaaaaaagtccagagcttgtctttactatgtgtttattattattatttattatgattattattattcacacttgtacttgctgatgctgtctccttccttgttcgccgtgtcgtaaattgtggatgatggtttgattttcccaggatgataataaagaggatgtagttgcagcaaacacacctccaccagatggttcaggtaggttaaaaaaccgttcttgattttgtaatataaataaagcaacttgattttgattcatctgattttttggtatcttcatttaattttgttattttggacaggttcaccattagagcctggccccacaacaactcct

SEQ ID NO: 102520 - DNA, 983 bp, Mimulus guttatus
  Intron number 1 from transcript mgv1a004200m (locus mgv1a0 04203m.g) derived from phytozome v7.0 (chr-ID scaffold_44; pos 271382 to 272364)
ctctgtcgagaggaagaagtaacccaactgaacaggtccgtttttttttttttttcttttcccgcacgtttctattacaaagctaaggattttgtcttgtagttgcccttttttttttttttttttttttttttttttttttttttctcatcacgatttcaaatgggtagtgggattcagaaacaaaattattccatttcttaccgttatttctcaaatttttggtgtttttcttaaaagcataaatttcgtgcattttccactctttttcgattcgtttttgacataatagaaatgggtttttttttttttaataaaaataaaaataataataagaataataataatatctcagaaaatataacagttatatatatatgaatggaggggcgcattttactaataagtcaaatgaaattcgtgcattttttgtttggatgagatgaatttgtggttactggtttttattacagtttagaggtaaagatttactccatttatagagggctaaagagtcttcgattttttcggaaaaaaaccgatatcttcggttgaaaaaatatcccacatttcatgggattcaggctctccctttttgacattaaagaaaaatatctttcgtgtttatagaactcgagagccacgtcgtcgtgttcgatggccgtttgttccatgttgctcaaaagttaagtagttctttcatacgaatatatatgtcgaaatgcataaatggacaaagaatctcgatcctttctatcggtttatgtttgaagaaaagaatcccctttagcaagggaggggggtatcggttttctttatccgtgatacgtagatattacggttacggccttacgggaatgttttgaattcatcgagtaaatattcggtttaaaaaaaaaggtattggcccccgttcttaacagtttttgtttttgcggtttttcgtttcttgtaggttgaaaggttaattttggacatataaa

SEQ ID NO: 102521 - DNA, 794 bp, Mimulus guttatus
  Intron number 1 from transcript mgv1a017078m (locus mgv1a0 17078m.g) derived from phytozome v7.0 (chr-ID scaffold_16; pos 1412042 to 1412835)
tcttcctcgttgcttttctcatcttcaaagatctggttagattcgttctttgctatttccattttgttttttttttccttatgctttttgaattttgattgtggctgagttatgcttagaacactctgttatgttttaattcttcgaatttagctggaatcaaggatttctttgcatcatgttaaaactctcaaatctcaatttaagcatatcaaatccatcaatggtgattcgactcaatttccatgcatatagagttgggataaattctgtgaaattgcttcatgatattaagattttaccttcaatcgtattcgacgagatgattttcttttggcttgctacagaaaaaaaaaagtttgattgtttcggcattcaatcgtaaaaatcagctcataatcctttactcgtacttattcaattggaagtcttttacgacttagatgttcgtatttcctcgaaaaagtgattagatcgatggcatttggtatattacgcatttggtatattacgtattaatttgacccataagcggtactgctattacgatatcaaaattcgataagagattaatgctaagtgtgttttcatccctatcgatttgcacccccttcgtatgttattgtatatccaaatcgtgcatttgccttgtaattaagttccacctgcattttcttatatcttaaaatatgtatcgtgcaaattgatttttcaatatcgtaccatttatgcggctcgagagtttacgtaaccatctgccttgaatgttgaccagacctcaagaccggaataca

SEQ ID NO: 102522 - DNA, 633 bp, Mimulus guttatus
  Intron number 1 from transcript mgv1a009966m (locus mgv1a0 09966m.g) derived from phytozome v7.0 (chr-ID scaffold_66; pos 661948 to 662580 reverse strand)
acgtcatcaactactccaaactccgtatctggaacgtaagtaatagaataattaattagcctaatcttatatataaaagaaagaaacgatagtgaaaccctaaaaatcctaaggaaatttttgtaattttttttttctctacgtactaaatttgtaattatattttttctttattttttaatttcttatctcagcaacaatttgcctctttctttattattcagtttttcttttaatggaatctttaaaatctatttttttcctctactaactttttttaatgtggattttattattattaatttttcctttactaattgattcatttattttttacgatcaatttcatattaaacaaattgagtaattatataatattttacgatcaatttcatattatcatatttgtatgaatgtttgattttgtttctgtaatttaaatattactagtaaattttgttatcatagtataatgtattttttttattacaattgttattgtcacgtattaaattaattatttcttcatactagtatatataataatattcacacacatatatacgtaatttgtttattaattattaattaattttttttttaccataagtgcagttcttggagtacagtaag

SEQ ID NO: 102523 - DNA, 372 bp, Mimulus guttatus
  Intron number 1 from transcript mgv1a016961m (locus mgv1a0 16961m.g) derived from phytozome v7.0 (chr-ID scaffold_51; pos 166401 to 166772)
ttcaaggggaacaactgacgacagctcacggagtagtactactagattaatcagttcaaaaaccaaggaagaagaagatgctgcactactaattatttgcaagaaaaacattaatggctgtaataaagtagcaaaatcaggtttgcttttctcatttatatataaattatatataattatatatatcttcttctcgaatatatttagtatataaaaatatatacgcaggagatcaagatcaatattcttccgtgagggatttgcagagtgcaacaaaaccagaggtaattagttaattaattaactataattagttaactataactaaatataatattagatgttacattgtgtttgtgtgtaggattcgag

SEQ ID NO: 102524 - DNA, 572 bp, Mimulus guttatus
  Intron number 4 from transcript mgv1a007344m (locus mgv1a0 07344m.g) derived from phytozome v7.0 (chr-ID scaffold_245 ; pos 276425 to 276996 reverse strand)
ttagtattcctgttcaccctaaagtaccagaacaagtatgcagacttgctgccttgctttcgtgttttttttttttttctttttcttttgtttctctaatgtgtcattgtgatcattcggctctctcgtttgcatctgcatgatgctggtaacgaagatatagttcatgcagccactgctaattgtaaaaaatatcagattttctatatatgttttgtttaagatggaatttgttgatggatgcagtattgcaaaaagattgaggttagaacttgaaattatggcatgagcatgtacaaattttcttgaaaactaatagtagtcttttgagtttttcattattggccaggttgacgtgattctttcattttattatgttgatgaattgcaatagtgtatttctcaacgggtctattttatgtcagttgtgaatgttttgtatggtgaaagcttcgattatttatttgtcatatatttttgttactccagaaatggtgaaagttgaattgtgccccttacatgtcttttaaaaagcaggctgttccagctctggcaactaaagaagtgattca

SEQ ID NO: 102525 - DNA, 969 bp, Mimulus guttatus
  Intron number 1 from transcript mgv1a016493m (locus mgv1a0 16493m.g) derived from phytozome v7.0 (chr-ID scaffold_91; pos 230846 to 231814)
tgggttcatatatcttctaaaacttgtgaaatttgtcttgttcgttctaaagtaaaattacatcggtttatttgtcgtataattcataatatacacatactcatcataacttatgttaataataattgatggcttgaatgcaagacttttcgtagaataagtacaagacttatttaggggtggaaattagacgaatcatatcggaagtagcacttttggaaaaatttcgatttttttcttaagtaaagagtaattccaattccattcgcaaaaaatggagagaaaaaaacgaaaatcaaaatttcaaaaattggaataaaataattaattaccaagttgaaaatttttgataagataagtgcaatttttttaaaacaaaaataggattttcaaaaaaagtccgacttttcaaaattattttcaaatattgaaatcaaactggaaattatttcgattcatatatatatatatatatatatatatatatatatatatatatatatatatatataacttctttttaatacggagaggcccaaactattttgcacatatatatatatatttctcttcatgatttttatttttatttttttatatgtatatatattatttgggaaatttacagttttcgtccctcaagtttgcaacgattacatatttggtcactcatgtttcaataattgacattttttagtcatttccgtcgatttatcgttagtccgtcagttacggtagtgatggaaacacgttagatttcgttagttttaacggaaaattgatggaaatgactaaatagtgttgaatttttgaaacatgtgggaccaaatgtaatttttttgtgagcgtgggggaccaaatatgaaaatggagaaaacgcgagggatgaaaaccgtagttttcccatatatatttacattttttttccgtgcagtgaagaaagggcagattgtgagagttgagaaggaa

SEQ ID NO: 102526 - DNA, 741 bp, Mimulus guttatus
  Intron number 1 from transcript mgv1a003063m (locus mgv1a0 03063m.g) derived from phytozome v7.0 (chr-ID scaffold_16; pos 122022 to 122762 reverse strand)
tcggcgaccaatctgctgtttctgcccttgtccaggtaaattggctttcccaaataattctgtaattcgctcattgtgtttcaaaatgttttctttctgctttcaatttcgattttgagtgtagaatgctgttggtcggaaattttgaattacaatgttgttcttctacattgctaaactcagatgtatattttgtgggtaacgattttttgttgttcaagaatcagagagtttgaactacgtgtgctgctctatcaattcatttaacagccattcttttatgactaacattgttctcaagagctgcccgatttcctgtttgtcattgatatgactggatgagtgcgaatgccgtaagataactatagaaagagacttcttcggcacagtcagaaccgtaaagctgtaacctttgtttgattaatgtatgttggagagaattatcattctttttcagctaaattcgaaagttgttggagccaatttttctagactttctcacattggaaaaatacctccttttgacccatatatggatatgtcgaagtttgctttcaacaggacacgaaaatatatgctcatttttcgttcttgcaatagccgtaattttcttatccttatgccagttgtttgttgatttactctagtgatgatatttccacattcatttctgaagtagaagttcctactgattattcatgtttaggcaggaattagtagagttgtcattgggatcaggca

SEQ ID NO: 102527 - DNA, 807 bp, Mimulus guttatus
  Intron number 2 from transcript mgv1a021399m (locus mgv1a0 21399m.g) derived from phytozome v7.0 (chr-ID scaffold_55; pos 45068 to 45874)
tacaaccaagctgatcataatatcaccattcactggtatatattatatataaatttctccgatttatagaggcttaattccactttggacccttaaaatataccattttgtcactcagcaccctcaaaataaattcatagcactttacatcccttaaacacaatatatgatgcgtaatgcaccccacgtgagtttttaaagcaaataaaggtaatataatatttttagtagtatttaaaaattatatatttttatcacaaaaaaaaatttacgaaaaaaaatttcttcagctatttcgttttcaagttatctgaaaatcatattttcttccaaatatatatacctaatatttcaaccaattacaataaaagatatatcaatcgaataatttagtgataaaagtttatttgattttattttgtaattaagaaaatatatttttttttcaattatcctgtgtgattttttactttttcgtactttgtccgttcgaaattaagttcgaggttgaagaacataacaatttaacttgttattttgcaccccgagaaaaaaaaaacccaatagaaaatgaattatccttttttattcaattaacggtgcattgtgaatgatttattgtgttttgagggtgcaaagtgctattattattttcaagggtgcaaagtgccaaaatgctccatttcaggggtgcaaagtgggattaagccatttatatatatcaaattttatgcatgatgcataagaaaattatttaattttttgtatacgtgttaattaaaaaaaaaaatcaggcacggagtgaaa

SEQ ID NO: 102528 - DNA, 747 bp, Mimulus guttatus
  Intron number 1 from transcript mgv1a022734m (locus mgv1a0 22734m.g) derived from phytozome v7.0 (chr-ID scaffold_25; pos 810451 to 811197)
cctccccaaaaaaaagaaattgattgttttttaatgtactatgtataataaaaattgattgttttataaggtctagatccactccaagcttgaaccaattccaatgcactgagtaaatctacatttttgtatctcatatataattggatatgcagatagttgctaatatttgttcaagcactacttgtaaacataaattttgattttttaaaattaatttattaaaccaaatattaaaatttatttaaaataagaaagcacacttataataataaaattggtttgttgaatttggccaatatcaattgaacccacccataaaatctacgagaaaaaacaaataataataaaaaaaaacaaaaataaataaataaataaataaaattggcatcttggagtatatataaagaaagctcgaacgctgtattccaaacttaaagctttcatttcatccttcttaattttcttacacataatagctagagacaacctacctaaacaaacaaacaaacaaatcctacagaaaacaaagagtgagaaacaaaatggaagcaaacatttacacctcatacacagaaacagaatcagaatcttcttcttcggaatcggaatcagaagatagttacataaacatggaacccgaccgggattcatcctcctcctcctccttccaaagctttcttattaataataaagaattcgagttccaaagcttctcaaacagctcctccgaccgccacaccacca

SEQ ID NO: 102529 - DNA, 960 bp, Mimulus guttatus
  Intron number 1 from transcript mgv1a012404m (locus mgv1a0 12404m.g) derived from phytozome v7.0 (chr-ID scaffold_158 ; pos 615063 to 616022 reverse strand)
tgtggcatctctgctaattcagtccccgcaaagaggtatgtatacatacacacacctatacgtatatcttgtgtcggtataaatacatatatttgtatgcgcgcgcgtgtatatacagtatactcgcgctgtatatatatagaactgcctctattgaagacggacgaattcaattgtttgattacctctatttagtactgtacagatggtttgtggctgcgaatttttgtcgagatctcgatatgtaattgaatccatagaaaattctgtgtctgcggtttttttttttttttttttttttatgtgtgggaaatttgccatgattatggtgctggttatttaaatttattaatttatcgttatggagctaatttgttatttcaatcttattctgtggtttaatgagttgttaattatgtttgattgggtttaatgattgatattttggaataatagagattacagttctattatttttttttatctaagttgctatgagatgtgattaattagtcaaacaatttctttcggtatttttagtgtctgattgattttgatcgtctgttaaaatgggctcggtctcgatcgaacttcaaatgtgttgtaaccgctctgtagttcgtttatctctagtaattatggagttgttatactattataaattgatcaaaccctttagtcaaatcgatggttgttttccactttcaacctttggaatatatatatatatgaaatacggaaaattcttcctggctggctgtgtaggcgcgtgtccagcaatttcatcgtgcatttcgttcttgttgatatcgattcccttattctgcttagggtaatgttaacgaggaaaaaaaaaacgtaattttagtattttcatgactgtgtattgctgtcaattattaaactgtattggttctttaattgacggttttgttatattttctgtagagaagggaaaca

SEQ ID NO: 102530 - DNA, 1050 bp, Mimulus guttatus
  Intron number 1 from transcript mgv1a009629m (locus mgv1a0 09629m.g) derived from phytozome v7.0 (chr-ID scaffold_327 ; pos 14641 to 15690)
aaagaaaaccccctcttcggcccctcttcctcaacgtaatttttctttttcttttttttattttttttttattttttttttcatcatttgctgatttttgttgatttcttgattttttttcttccaatttttaggggttcttgtgcacttgttttctttgggttaatttgattgatttttctatttataaattattttgttttttaaaatattttttggggattaatttgttgtataagaatggttgactttttggttttgggggatatgcagtttcttacattcttaaggcctcatttggttggggagattagccatgattaactaaattataggaatttgtttgatgtttggtatctccaataacttgtcgggtcgacccgcaaatattatgttatcatggcttatcttgccttctagccatgtcttttttattggatcatcgaaggtcaaatgatatagttggatttcattagattgtttaatcttattttggcaaccaaacgaggccttaatttacttaacagtttaagtccacaattgtctccctcttattttgttgtagagtgtgtcaactagatataacatgaggtgtttgaacttttattatccctcgacgttgcttttcgtttttcgtttattttttggtgaaagtctcgacataataatatgttttctatcttgggttgtgcaattaattgatagaatttcgagttctgttttagcggcatcgtctattagccattcgaatgtcgtatgataatgtaagaaaagaaacattaaatacgctcgagactcgtataatgtagacaacaaattccttttcaaaaaaacattagtttttcatgagcatttattcggtttcttgaaaaaaaaatggcacctttatcgaaaaggaaatgtctaagtttcttgaatggttgttaagtatacttttttcgtgcccgtcgcaaaaaatggaatcaagattgtcatcttcgtaccggaaaataaataaattaattaattatatatatgctcgtgcagattggaaaaactgggagcgctcga

SEQ ID NO: 102531 - DNA, 829 bp, Mimulus guttatus
  Intron number 1 from transcript mgv1a009062m (locus mgv1a0 09062m.g) derived from phytozome v7.0 (chr-ID scaffold_45; pos 1046365 to 1047193 reverse strand)
acttggtttccctccgatcaccaggggctccaacggtatacttccattctcgatacctttcttttttctgtgcttgcatttaaggtgtttgattcttggaaaatttatctacttgaatttgtttgttgttactaatagaataactattcctttgtttctttcaatcttgttggtttttttatgttctttaatgaaatgttactgtggttaatttaatttggcttttgccatgaatgtgcactagatgtttctctaatggtgttatggatgaagattggacccgagcaaaagttttgtcgagtctctttttcattatgtcattgaagccattcatagctgttacaaggattgcaaatttggaaaaggggatgttttaatgcgttgattcttcgataagtatctaattaaatttgtttgttgttactaatggtatcatcttttttttttcttttttttttcccaattctattggtttttttatgtgatctttaatgacatgttactgtgtttaatttggcacattcgatgaatatgcaatctgtgtttctcttatggtgttatggatgaagattcgatcctagcaaaacttgagttgattctattttacattgtgtaatcgaagccattcatagttgttagaaggattacagatttggaaaaaagggggatattttgagtaaatgtataatcttactcgattcaccgattaattcaaataaattggtgctatatatctttgttttatgtctgaagtgcaattttttctttattactcacatgggattgaatggtaggttagaagaaagcacgggtttggtcttcagattcg

SEQ ID NO: 102532 - DNA, 584 bp, Mimulus guttatus
  Intron number 1 from transcript mgv1a004818m (locus mgv1a0 04818m.g) derived from phytozome v7.0 (chr-ID scaffold_325 ; pos 9863 to 10446)
gactcgtttgtataccttcttctttctgttttatttgtcgttttgagctgatgcccgcgtattaagaaaactaataaatgtaaatgaattctgggaaaattataataaaatgactcaaaacccactttcttgcaaatataggtaaaatacaattaaagcttcattggagttcattggaaatcttgacaactgaaaaaaaaaaaaaaaatctgataaataaaatgggaaagagggagtagtactctgtgtaattaattgagattaaagtggtgtttgcaaatgctttttgaaagtgattatgagcttttttttgctcataatctgttttcaggtatttgcaaaatcaacttttgcttttgcttcacttaaaataatctgctttaaagtattttttgaaaagcattcgtaaccctgttttttctatttaagttcattttccagaatatttgcaaacacccccaacttttaaaaataaacacttaaaaatgacttaactcacaatcactaacttttgcttttaaataatcatttgcaaacaccacctaagggattgattagtaattatgaactaattgcagctcgga

SEQ ID NO: 102533 - DNA, 601 bp, Mimulus guttatus
  Intron number 1 from transcript mgv1a014565m (locus mgv1a0 14565m.g) derived from phytozome v7.0 (chr-ID scaffold_64; pos 359033 to 359633 reverse strand)
tccttgccaagccaattgcagccattggttctgcggtagcgtccttattttgactctaagatcatacgctatacttacttgaattcgtagattgtgtaatgataaactgaaatcagggtttgtttctgcaaataaacatattatacagggttattagattgttgatgattggtttttatgcatagctagagaaatatggaaattatttgctttagtcattcgattggtaggacttcttcacttgttgaaaccgtaatcaacttccgtgattgaaataattaagcaattaagtgtgattttggaaataattagtggtatactcatgctaagacatcacaccattcattttgctgcaggaattggatgattagtgtaagtgtttgtttgcataataggattagggcatagggataggtttaaagaagactattttgaaaaactctgtttactatgtataaaacctgtagtcccgcaatctgagatagatcacataacatcgattaggtaattgtttcttacaactttgaagttcagctttgtaatacttttgatgctgtttatatcaggtagttgttttttactactttgggaccacggagct

SEQ ID NO: 102534 - DNA, 711 bp, Mimulus guttatus
  Intron number 1 from transcript mgv1a021350m (locus mgv1a0 21350m.g) derived from phytozome v7.0 (chr-ID scaffold_17; pos 1632974 to 1633684)
gatctaaccaaaaaccagtaagttttctatctttccgtcgatccctattgtgctgtttacgttcatgcagtttttttaaattcttgtttttatttcagaatatcaaatcacgtaatccatcatagtgtttaactatctatgtttttagtgatggtgaataatgaaaatattatgttgcataactctcacaattaaaatcaactaatttttcatggacttagagaagaaaaccattataggaaaattacaagtcaaaggtagtagtattaaagtttatttgcattttcagtatgttggaaaatgtttagatattattaagcgtgtagaggatttgtggctaattattatccagctatagtttatcataaagattatagcatcaaaaggactaatataataattgattaaaaacaaaatttccactaaatacacaaaagttggcatgtctaaatcttataggggcatgggaatagtgttactttttgcactagacaaactatttgttcttttattcttctgttaattttatttagactctgtttatctaatttaatcaaatttctatttagaattgtcatcattctgattaatgggattatttattttaaaagccgggcatatacaataaatacgaatctacgaaatactcgatttagtgtaataatttatgcaatgtggattatcatgtatcaatagttcaacaggtaagaa

SEQ ID NO: 102535 - DNA, 637 bp, Mimulus guttatus
  Intron number 3 from transcript mgv1a000512m (locus mgv1a0 00512m.g) derived from phytozome v7.0 (chr-ID scaffold_42; pos 1539541 to 1540177 reverse strand)
cttactccccagaagtgccggcttctcgacacgacgtgagtgtcagttgttttacatattcatgtcatatgcattagacttgtttgagaggaaatcagaaaacacatctgctgactatatgttaagcacctattattgtgttaacgctatcttttaagcacctcatcagtggttgagaaaccaagacgaagtaaatcctttattggatatttttttgtaaattgttctcactgtctgctctttaaaattggcgagggaaacgaaacgaaacgaaaaaatttcagtgcccttgaatgcttgtggtagattttgagagttataggtttatcactagtgtcaagatgttgtgtcgtagatgtagttttgaattgaagatacaatagaaggtttgcttttacgttcttgagtataaccattgttatgcatttttgctattaccaatttgattatgcagttttcttctttgaagtataggcacttctttaagggcttgttggatgctgtttaacttacctaattcgaaaattcttttaattttgttcttactttaaagctcatcacttctcttttgcgtctaacctctaatgatgggccatttatttcagttatactgctccaatatacgtgaacatagaat

SEQ ID NO: 102536 - DNA, 774 bp, Mimulus guttatus
  Intron number 1 from transcript mgv11b000466m (locus mgv11 b000466m.g) derived from phytozome v7.0 (chr-ID scaffold_6 0; pos 476651 to 477424)
ggataaacagggtaaacgtgctcgagataatactggtaaggtaacttttattgatacattggggactgatgaattctctttgttgatttacttctcattaatcgtgtggcttatttctgccgctggtatgtttcattctagtgcaaccaatattttggatttttaattcagttgcttagtaatatgtgtagatagttactcaagcatctactcattattctaatatttcttagatgatcattatactctcaacaagctatttttagatgctatagctctctgtttatttcagcaattggtaactaaacatccttttacaattcatattttctggtattagatttggtttggtgaagaagcttagtgaatactaatttatcattaagagtttttaagtctatccaggttttaggtaaaggggaagggttagggtaaagggaaaggtatatttattctcattttgaattttatttctgttaccttctacgaagattaggccaatgttctctagttttacctgtcatgatttgttagaattaatgttcagtcttgaaccaaaccctcggtaattattaacacaatttgcaagatgtttctttaaacatttgattatttatctgtcaaaaagattggtctctatgcactattgagtattttctggaattgtgcttgtactggaaataagtatttagtatttctaactgtcaaaattaattatttccgcagaacgcactttaagggacgagtcgcgaaagcctgaactggagaaggata

SEQ ID NO: 102537 - DNA, 899 bp, Mimulus guttatus
  Intron number 1 from transcript mgv1a014420m (locus mgv1a0 14420m.g) derived from phytozome v7.0 (chr-ID scaffold_1; pos 3987260 to 3988158 reverse strand)
gcccattgacagcggcagtgacctcgaagaaggtcagtggttttttttgcgtgtcccctttacggttttagcccttgatttttatatcttattgcttgatttttttttttacaaaaaaaattcgttctttaagttggtaagattgctgggacttgtagttggattgatgcgtaaacgtcttgattagtctgaaaagtttcaatttttttaacatagcatgaggccgagctgaggaatttattaacggaataaaataccttgtacttaatcagatcatgtattgccatgggggaataaaattggcccatatgctcgaatcgagtattgtatgtgtcacatttagtttctattgcttgatttttcctctcgtctctcccttgtgatttcattcttcgatttgcctccattgttgaacggatcacgtttagtttattgtccaaatcattgggatggagttcttgacttgtgatgaagcaccaaaaaaaacctatgaacaaagaaattccgttgcttgccagcgtaattaccctctttaccagatagtgagtccacccttcttttgaaaccatatatgtaggtgttatatacagtcgtgacaatgtccatttattctctagcattttatataaattattacctttttgattgcaatacatggaacagttcgtcacagtggtgcatcagtggtatgtgttcctgtccattgcatggttctaagatatgcttcagttctgtagagttgaataattgatattattacgaacaaaaaaaaatgacttctgcaatttaacagcattgaattttcgcgtatgcttcttccttctatatacaagtattgacgatgatttatttggaaaaaaatagatttgaagacagctctggggaagaagcgggccgat

SEQ ID NO: 102538 - DNA, 819 bp, Mimulus guttatus
  Intron number 1 from transcript mgv1a014080m (locus mgv1a0 14080m.g) derived from phytozome v7.0 (chr-ID scaffold_79; pos 840089 to 840907)
aatcagtgcttcccagaaataagcacccaaatcaagtaagaaaaaatcatctttttctctaacctagttatctttattatcaatcgtttattaattatgtcatagaactaagtttattgtttggagaatttagtattagtatatagcaactgttcataatctacgaatttcgtctataattgtactaatcgacctcattgtcctgagagaaacaatccaaacattgcctgtaatgttgcttttttgttgcagaaatatcatcttcaatcggttctttatggatttcccttaacaaaccacactgcacatgctaattcatttaacttggatttgaaattaatttagcaaatttcaaacccgaaatttcagctatttataccacggtttccaaagtatgcagaaattagtacattttcccgaagctaacatcaaatttaaagaagtgtttctttggagtcatgttaagctattttttctcaaattgatatcgacaagtttgtgcgctaagcccattagatctgagctgtattgttttaatttttcaaaagaattcataatgattcctaattgaattgtcgccgtttcgtcgtccttgtcagatcatagctcacctgatgttgcttttacattccagctgatctcttacttctcttggcagttggctttgactgtttttgtgaaaatagctgtgagaattgaaaaagctatttaactctattactgcattgacttctttttcatgttactaatagaaatcagattatcatcttcgattgttcttcagatatcaaatcaagttgaagcaagactcttcaatcg

SEQ ID NO: 102539 - DNA, 564 bp, Mimulus guttatus
  Intron number 1 from transcript mgv1a015832m (locus mgv1a0 15832m.g) derived from phytozome v7.0 (chr-ID scaffold_168 ; pos 528351 to 528914 reverse strand)
gcgatattatactcgtcggcctccgtgactatcaagtatggattttttctctcattttttttcttcttttgattatttggtttattatgtttagattgaggatttttttggttgtttttgttaatttcagctcaattgattatcatgattaatcatttgaaatttaattgataaaatccaatttggattgtgtgtgtgttgttgttgtttgaacagctcccaaaatcatgataagcaatgtgaatttctcaaatttcatgaaataattccaatttggattgtgtgtgtgtgtgtgtgttgtttgaaacagctccccaaaatcatgataaacaatttgaatttcttaaatttcatgaaataattccaattggattgtgtgtgtgtgtgttgtttgaaacagctccccaaaactcatgataaacaatgtgaatttctcaaatttcatgaaacaattccaatttggattatgttttctattccgatttttatccaatcgaagcacatgaaatttaagtggattcgataataatctaattttatcgtcggctggtacctaaacatagg

SEQ ID NO: 102540 - DNA, 700 bp, Mimulus guttatus
  Intron number 1 from transcript mgv1a012006m (locus mgv1a0 12006m.g) derived from phytozome v7.0 (chr-ID scaffold_18; pos 997301 to 998000)
ggttgcttcttttgctgcaatgtaagtctttttttcttcatttattttatctttaattttcaaattaaaaaaaaaaacataaaaatccagtctttaataataaaaatcgagtctttaatctttccctgttttattcggtccgtgatttgatgtttggggtgtttgttttagtatcagttatgaggaatatgggattaggtgttgactgttgaggaattactgtagttgacttttttagtttcttcgactagtagatatgttcatcttctgtgtgaaggtagatatatatatcatctcatatatgtatatgtatgtatctattagggttggtttactgtaatttgatggtgagtcactacatcagtacattgttgtacttgttgaacatgaaacatgatttatatgtataacatgtgaattaaatgtaagaaatggtggcttttgtttgattagtgaatccaacttaaatgtttatgtaaccattttttgatgagtaaatcgaaagattagacgaactaatcgaaatgggaatgtttcattaatcgacaatgttgcctttgctatcgaaaaataataagtggatcttctcccatttcttaaatgtggtttaattactgtctctctctctctctatatataatgctgcatttgtttaccatttgcagttacttgttgatcttggaccgtacgaactggaaaa

SEQ ID NO: 102541 - DNA, 592 bp, Mimulus guttatus
  Intron number 2 from transcript mgv1a002972m (locus mgv1a0 02972m.g) derived from phytozome v7.0 (chr-ID scaffold_79; pos 185899 to 186490 reverse strand)
gatttgccagagaagctgccctcacggtaattcacacttttaacctccttctttttgtcaataaaagttgaccgaggagtagctaatatgttgaccaagtacatgtgtgaatgtgttttgtgtacttttggcttttgatgaaaatataagttaaatgttgaaaggcatgtgatttgactttttctagtacgtactgtcgatagagaagttagttgagcgttcatttttcatatatatgaaagataataaataaatacgaaatacgaaatacgaaatcagcatcaagttatcggtccactaatcgtctattatgacaattgattgtatagcttcggctagttaattctcattaattagacattaaaaaattaacacggtttattaaattaagcggatctatctaattgaggtaactagctgcaataaaataggttgtacttgtccttgttgcacgaactgttcagctttgacaatgtcttgtggtcagttgttgaagaagttttaatatgcaactaattaatgaagcattcatcaatataatatacatctatgtgcaggtgctatttaactttgttgaaatcagagaatcgca

SEQ ID NO: 102542 - DNA, 982 bp, Mimulus guttatus
  Intron number 1 from transcript mgv1a004339m (locus mgv1a0 04330m.g) derived from phytozome v7.0 (chr-ID scaffold_169 ; pos 233211 to 234192)
ataaatttcagtaaaaggaagaaaaaaagcaaaaggtaattttatcttcttcctctattttttttctctttaatccaatttttaatcagagttaagctgctattaattgcatatcaaagcggataaaatatttttccttttctaattttttttttttgtttttaattttatcgtctgatactctgattttacacatttttccagaatttataacgcatataaataatgatgttcatcttcactttctctctctatgtttaatattctgatcatatgaactctttgcatttccatctctgtgcgtgttgtgtgtgtgtgtgactgtgtgagagagaaagtaaagtgtgtgtgagagagagagagagagagagagagagagagagagagagagagagagtgagtgagtaaatgagtgtgtacttttattgcgttagaacctgattccctgaacatcccccaaataaaaaggacactaatcactttttcttttctgccatatcctttttttctctttctctctcatcatcgtcatctagagagagaaatcaaacaccaaatgttgaagatctactccattttcagtcggtttcaactttcaataagcgttttttcccttggcggtgtagtgatcagaacatacatctggtggtgaaattacgaaaacatcctccttcagctggtttttaattcacggtactaaccaacaaaaaagaaaagaaaaaaaggggccatccgttggattctttgtctttatcggtggtgtattcgtgtttggtgatacgtttttgggtgtttgcgatacgtgtcgcattgtgtgtatatatgtatatttttatgcctcttcttcttcttcttcttcttcttcttcttttgtgtgtgcttttttcattttgtgttatctttttttttttttcttctcagttgaagttatctccccctgttttctgtagaagtaactcaattttcggatttgacggtggag

SEQ ID NO: 102543 - DNA, 468 bp, Mimulus guttatus
  Intron number 1 from transcript mgv1a006585m (locus mgv1a0 06585m.g) derived from phytozome v7.0 (chr-ID scaffold_75; pos 489242 to 489709)
caaatcactctaccgatccgacgacgttccgcaaggtacttgatgaactgtagtatagaattttggttttcacgagaattattattatgtttttaatgtggtgccatactgtttgcctgtttttcttgtcgttgcttatggtttatatagttgtggagagctgacatatcacctaagtgcacagttagaataaatcaggggagttctggaacgttattttcaaattttagatgggagctaatgtaaatttctattgtagattgtttcgaatatgtttggttatgtttatttgagttctttgggtattttgttattgtggagtagcagatctattaatttctattgtttttctagctttggatttttttcttttcaatcctctagttatttaggtttgaatttagacggtaggattcgggttttttttcaatcctctaagttgttcttggaatttctgttttcttagaa

SEQ ID NO: 102544 - DNA, 688 bp, Mimulus guttatus
  Intron number 1 from transcript mgv1a011761m (locus mgv1a0 11761m.g) derived from phytozome v7.0 (chr-ID scaffold_7; pos 2477270 to 2477957 reverse strand)
ctgctctcaacacccttctcgccggccttaacacggtatgtatgtatgtatgtatgcatacatgaatgcgcgcacatgcaaagttgttttgtcggtcaagtttgatgttgactttttgtgtgtgtgtgaacaatttttcaattttgattacgtactatgtgcaattattaaattttctagcaattaaataattgggactaattctcctagctatagtatatcgaagattattggcgcttgtgtgtgctgttgaatataattgtcgaatgctctataaggctagggaatgtatttttttcgtccttccaccaatcggtagtttaaaatatggtaaattacgaaaaccccctcctgtttgggtagctacggtgtcaaatttacttacaaaatgaggggttttgggttttttcataagaaaatacatagttgaagggagtgtctgtaattataattaaccaaacaagggttttttcgtaatttgaacttatctcgggggtggctgtaatttgccctttaaaataattgcaatgccttgtcgatttaaaattcttgtttaatggagaaatatacttgttttattttgttctaaatgaaaggtcattttatcatatgggagtttgagcattgaattaaagtggattaattagtgggaatccaaaaattgaagtgtatatatggatataggtat

SEQ ID NO: 102545 - DNA, 939 bp, Mimulus guttatus
  Intron number 2 from transcript mgv1a015299m (locus mgv1a0 14408m.g) derived from phytozome v7.0 (chr-ID scaffold_17; pos 304719 to 305657 reverse strand)
caccgtcgtctttgtgcttgtcatcgtctttcacggtaattaatttttaccgttttaattttgaatttttcgcatttcttgaaatgtaatggtatacttgttgataatatcttgtattgtttgtgttttagtgtagtttaatttctattaattaaggcctcgtttggttggggagactattattaactaaataattggactttgtttgatttttggtatccccaataatttgttgggtcgacccgcacatattatgttatcagggcttatcttgcctcgtaatgagcttttttgttggacgttctggggtccgataaaataattgggtttttattagattatttatcttatcttggcaaccaaacaaggccttagcatattaatcaatggcataagctaatcttccatatctgtattgaatcttcagggattttgggttcacgaacatgatgccaatcgtaatgcatcagcaacttttccaagtaatttcgtgattttttctctcggttctttctattaattttagcgaccggcttagatattttgatcttttactactctagtagaacatgtccatgatcaattgtttctacacgactttaaatatttatttttaatgattcttatgtatcactacaagctcgttttcgttttttttttccttctaactcaataaatggatgattttttttatttatttttagttttttatttttattattattaaaaaagacgatagttactggttccccaattcccctcctggtctctcgaaacatgtaatgataatcataaactatatgttttcatataaatgtagagagtgtcgctgaaaacgatgcatggcatatcattcaacgagtcgacatttctcgtgacttaaacttgttatgtgcacgcgcagtgtaggaacgtatttcgcaatacttgagctgtata

SEQ ID NO: 102546 - DNA, 938 bp, Mimulus guttatus
  Intron number 1 from transcript mgv1a008043m (locus mgv1a0 08043m.g) derived from phytozome v7.0 (chr-ID scaffold_36; pos 66116 to 67053 reverse strand)
agctcgaacaattcgctgccctagctgtatttcaggttcatatatcttctctgcatgtgaatttacttttggattttgttacggactgttttcccctttttgttcagttgaattgtatgatttggggattttgtgttttgcttttcatttctgatttgtagacgttagggagtttgcttgatttcgggaaacttgggttttgactttggggtgttggaatgggggttgggttttatacccttcgtcagcgatttcgagtattagggttttgctatctttagtttcttcatgggattgggttttacatatatgtgtatgtatgtgtgtatatatgtatatgtatacataagtgagtcgtgattggtccgagggtgaagtcttattggatgaacaaacatgtcaatgttcctttgttataattaatttgtcaagcttagatgagagttcatgatttatttcgagctcgtgagagttgtttttgaggcttgcaagaggtgccggaaactacatacgaactgaaaaatcttaaggcaataatacctcgtagctgtgaagctggtattggccaagacaaatagatggaaagttgatagttgtataaactcttgtggagagattacaaatgaaaaaatcatatctgaaagcgagaacttttcaaagttaatactaggagatagttggaagaactgaaaagtatatttattttgcgtaagatactacatatttctcatgtttttgttctctctgttagtgattgggcttaagtacctgtgaatggatggctagcagattaacagttggtctcctcttatggagaagtttatcgatttgacatttcttttaatttcttctcgttcttttccttttcttagccctttcacttatcttttccaagattgtatctaattcctctgtttgttattctgatcaggctgggg

SEQ ID NO: 102547 - DNA, 386 bp, Mimulus guttatus
  Intron number 4 from transcript mgv1a012603m (locus mgv1a0 12603m.g) derived from phytozome v7.0 (chr-ID scaffold_170 ; pos 63756 to 64141)
ggggttgcttttgccgcacaatacaaccgatcaaggtgatcgatccttttacgttgtacatattcgtatttttatgcttttaagacatttaattagtacgattcgtttctcgggtttaagaagatcagtactcattaatataatgcactatgtgactatgattcctcgttttatgtctctactcttgtatattcgttatatcgagaaattttcactgaggaagttaaaattcgattgtcttttgtggtcgatcaagttttcactataagaactaaagttattgcattttgatttcgtcggtttctaatttttcgagacttgatgttgatacctataatctgctaaatatagagcttcaacacttgaggaatagtgtaccggattca

SEQ ID NO: 102548 - DNA, 569 bp, Mimulus guttatus
  Intron number 2 from transcript mgv1a010920m (locus mgv1a0 10920m.g) derived from phytozome v7.0 (chr-ID scaffold_24; pos 1375131 to 1375699 reverse strand)
gttttaagacaggtttgtctatagcttctgccgaatttgtttgattagaatttgtcgagaattggcttattcttggtctgtgaatatgtggtgtagctacaatttttttttttttttgttgaaatttgttatttgaaattgtaaatgtcgttttaattttactggaaccgtaatttaaagattatgcataacttttttgtcgaaacaccaaattagttgattcaagttggattacaaagccaaccttaagtactacaaagttggtgctttgagtttttgccaaattcgaagtgaaaagggtcaaaatcacatttgaagtcagatcggtaccaataaaattgaaatgatatttagcacctctaattatatatactgataaaagaaatctgctgtcagcatctttctccaatgttttttttacgattttatggtttctagtatggttatctcgaacacgaaaaaacacgagacttgtggatagttgatttttgcatcttcaatactattttgcccaagaatcactcatttaaatgtacaacattgttaattgttatttactttctgcagtg

SEQ ID NO: 102549 - DNA, 360 bp, Mimulus guttatus
  Intron number 1 from transcript mgv1a010920m (locus mgv1a0 10920m.g) derived from phytozome v7.0 (chr-ID scaffold_24; pos 1375829 to 1376188 reverse strand)
acgccgtttcatccctccgatccctcggcatccccgtaatcatctctctctctccccaatcttcgaaaaattaattagattgtaaatttataactgtctatgaattatgaatcagcgaaccgatttgatttttttttgttacttgtatgcaaattgaaaccctaatccctgatttttggaaccctagtatactacataaaaggcttgcaattgattctgagtgtctgagtagtttgatttcatttttcagctctaattgcaattaattatgtactggaattatagaatattttagtagtttttattcttcttctctgcaattttttggttttttttctcaggctgtcggttttgaagggg

SEQ ID NO: 102550 - DNA, 706 bp, Mimulus guttatus
  Intron number 1 from transcript mgv1a016254m (locus mgv1a0 16254m.g) derived from phytozome v7.0 (chr-ID scaffold_67; pos 346415 to 347120 reverse strand)
ctcatcttgccctcagtgaagacatcgtctccaaggttttccttttttcctttttcttctctttcaatttaatccgaataaacaaaatcactttttttttatttaattaatttattgtttcttggttctttgatcttaatttttgttttgcataattaaattggagctgttcagaatgatctgtttctttggttggtagttgactttttctctattgaggatcttttgatgtgttgttggagtaatttgatcttgattttcatatgcatatttaacaatgtgtcgtttttgtgctagtttttcgctttccgtttatggcgagatttcaatcttttatccgtccttcgttacatattttacagtaatgcataccacttttcgtagcgtatacttggcaatttccgtgactttgcgaggttgaatctcgaatgtgttgctattgcttgtgaaaatgataaggaacgtcaaattggattcgaattgcacaataactgtttgagttcgtagaaaacccttattttcccataatttctttcgatatttccaccaatgcccattaataactcttctctgaatcaaacagttatcttgcaattcgaatccaatttgacaatgagagtttaataattgcattaaggtcctttggtcgtcggactaattgaatttggttgttggtttgtttgggttcagtcgtttcagtgcaggc

SEQ ID NO: 102551 - DNA, 465 bp, Mimulus guttatus
  Intron number 1 from transcript mgv1a003006m (locus mgv1a0 03006m.g) derived from phytozome v7.0 (chr-ID scaffold_11; pos 1101588 to 1102052)
aggaagttgccgttaaggttattccaaaagcaaaggttctgacaatttttttaattttttttttcataattgttgtttggtgttgtttagtgattatctgcttgatcttgattgtgtactgtggattataggattacttgttgattcagacttgaaaagagatctgatctgtaggtttacttttgtttatgtataaattttgttgaaataattttaatctataggttacttatgaattttgatacaccttcgattctagctacgaactgaaataatcgatgtatcatatatgtagactgtactgcctaaattcgattcattcatttagtgttgcgaatcgtgtcttacggaatcccattaacaagtatatcatagttttcgataggaaaaaccttacggtagatgacgggcagtaatatccaatttttttcttcactgattgtatttcgacttttgcttttgtag

SEQ ID NO: 102552 - DNA, 714 bp, Mimulus guttatus
  Intron number 3 from transcript mgv1a000917m (locus mgv1a0 00917m.g) derived from phytozome v7.0 (chr-ID scaffold_2; pos 2912427 to 2913140)
gcgggagtaaggtattttttcattcaaaattttgcatatctaaattcgtttttctagcgtatcgtgttttccccccctattaatcggaggtttaattttgctgcatatgaaatagaagactaggtgtgaaaatttctgcattgtggaggataagcgttaatgtttacattagtctgaatcatatgcctgcaattcccaggatggcaggcctatagcctcaggagattactttttagtcaggcttagagatgtggctttaagctcaatttttcggacaaaatacgagatagaatcatgaatttggacatgttacaaggtggtgacagatagttgataaatttgcgtaagaactaattaagatggtttctacatattcaaaggtgatagctgcttcaggcagcacacgttatgcgttggccgttgagggttaacttaggaagaatgtttaccaaaaactagataaaaacactcttggtttaactatggaataggtctttgacattgtaaagccttcttctcgtttgaggattatgaattatacgtgagtgataccaaagcgtgaggattgatattagggcattgatattttactcctggttatttctaacttttgtttttttgctttatatatttggaacaatcagcttattctagttctctcatttacgtcatcttgcaggtttttaaaagcgggccactatttttatcatcgaa

SEQ ID NO: 102553 - DNA, 984 bp, Mimulus guttatus
  Intron number 2 from transcript mgv1a010915m (locus mgv1a0 10915m.g) derived from phytozome v7.0 (chr-ID scaffold_1; pos 3195162 to 3196145 reverse strand)
gccaagcaacagatccacacagcatagctgaaagggtatgcacaattgattctagaaaattgcttttagaatgtatactcttatattaaatattatgtttctctgttagtgttggttgggtattgatttggggggatagggggaaacgaagcccgaaataaagatgagagaattttcactcggttacattctcaagacacctttagtttgatgtgcttacaagaggattaattgtaaaaatagatctgctgtctttcattgggtttctagcacatgcagccttctgctaaaaatagctgaaattttcaaaaaaactaaataatattttttaacactaaaatataaagtataaaatataaaatataggacttaaatatatagtataggagatgtttatttcttagtagtcaaaaattgtttcactaattcatctaaaaattgttttactaattttttgataatcaagcaaaatcacaaaaaaatcctatactattatagcacacactttttgctaaaaattgttgaaattttcaaatatatttttagattttttaacactccaataaatagtattgaagatttttattcatcaagtcaaaaaatagctcatctaaaattgtttcactaatttcctaatagtcaagcaaaataaataaataaatcgcatgtcatataatacactcttcttgctaaaaatcgttgaaatttccgaaaagaactttaatattttttcactctcacatatttagtataaaagatttttgtccatgagtagtcaaaaaataaaactcttgaaaggagatttttgtcaatcattattattgaaaattgaataaaaaatttctcagtgggcttattttgaataattaagtgatttgattattgccataatgcaactgtagaattcgatgtaaatgttattatttgatatttaccactcttatttcagttgcgacgagaaagaatagctgaaagagtaagagc

SEQ ID NO: 102554 - DNA, 483 bp, Mimulus guttatus
  Intron number 2 from transcript mgv1a026547m (locus mgv1a0 26547m.g) derived from phytozome v7.0 (chr-ID scaffold_5; pos 3111748 to 3112230)
tagtcagatttctggccattacctttattcgccaggtatatattattttttatgggaaaagtacagtttgcaccgtaatgtttgcaccgattttgtattttggtccctcgtgcacaaaaatacacatttgattcctcatattttaaaaaaataaatacttttagtcatttccgtcaattttccgttagtactaacggaatcaagtgtgtgccactaaaattgttaagctattgaaacttgatggaccaaatgtgttttttatgaacattatggaccaaatgtgaaatcggtgcaaacaagagggatgaaaattgtaatttccccttatctttatctttctttttgtttcttcttttttttatttttttgtgttaattagtttgttttagtcctaaagactagtttctttaaattgtcaaggactactttttttttttttttttataatatcatttggcaggaataacaagacgtttccaaaca

SEQ ID NO: 102555 - DNA, 476 bp, Mimulus guttatus
  Intron number 3 from transcript mgv1a011250m (locus mgv1a0 11250m.g) derived from phytozome v7.0 (chr-ID scaffold_32; pos 1660680 to 1661155 reverse strand)
tgacacaaattcaggtaattaattagatttaatttaatagcacttttacacttatgatctgttaattaaaatttacatggggtaaaatatttagttgtaattatgcatctaatttaattaattaattaattattcgtgtttttcgtaaattgtttatagttcatacagatttgtagtggatgattatgtacattttgacgtttacatgatcttctaacaaatgaagttagaaacattaaattaattaataaaaaagtaatcttgaattactatatacatgtatgcaatatatatttggtaaatataaaaaagttgttggtacctagcctttaccaatagggtaacggtgtagggttcgagtcccccctcccctacttccccttataatggacttgaatttattcaaaaaaaaaaaaaaaaaattggtattaaatagtaacaattaactaactgggaataatgacgtcatatatcag

SEQ ID NO: 102556 - DNA, 854 bp, Mimulus guttatus
  Intron number 2 from transcript mgv1a013132m (locus mgv1a0 13132m.g) derived from phytozome v7.0 (chr-ID scaffold_3; pos 373017 to 373870)
gcaaggtgatgttttcttgcttaaggtttttttattctatttttattaattacctattagtgcttttcatgtatatatacatgatccaagaaaattttaattgtaaggccaagtagttgaacaacaaatcaaaattaatgttcttttgccaaaaactactcttgtgtaatctctaattgctaataatacatgtatgttaaaaaaattagcaagaacacctctgtgaaaaatggtcaaagccaaaaaaaatcttgacagcattacgtcgtgtaatgcacgtgcggatttttagagtaggggtgtattttttacttgaaaagtctaaaattccctatgaaattatttttggttccttttttgttcttttttttaatatttcttttgtaagggtaatttggtcatctcataaaagtcaacaataaatttcaaaataaagacccatgtgttttagaaaacataacatgggggcttcttgctaatttttttttacacaagtggtttttcggcaattagaaacaatacagggaggtttgtgctattaactcaagattaactgaacagagtaaataatctacagaaatgaagtaaaacaggttgagatgtataaataaatattggaattatatatgtttcaacattataataatttattttattcttttattttgaaattttattattggaattagaatctttaagacgttgatttttagtgaggaatatgttctttgtagtgcactgctagaagataattaattaccttagattatttaatatttatcattttcgaaaaataaataaaattgatcggaccaaattataaataatattggtgcatgcatgcagtttcccac

SEQ ID NO: 102557 - DNA, 771 bp, Mimulus guttatus
  Intron number 2 from transcript mgv1a011213m (locus mgv1a0 11213m.g) derived from phytozome v7.0 (chr-ID scaffold_459 ; pos 60686 to 61456 reverse strand)
aggtatttccccactcactactcattacttatatagggttttttttttccgagttgatttagctgactcagtttgtttgccttgttgcaatctgactcggtaacgggccaatttgattttgtttccttactatgaggcgtattgaagaaatttgttgtggaaattttttagcttctgtaagagttggaatttatcggtctcatgtgtgaagttctagtaaaagttttggagtataagattaatataacaatggtggagaggtcgaaatgttgggggtgatggaagaattgcatttattatcagaatataaaaatcttatcttgataacgatttttttccacaaatttggcaagattcgatctttcctaccgatgtgcactacttgtcagttagtgaacctatttggaacaacatcttattccacttagtatcttcatatatatatatatatatatgtgtctgtgtgtgtgtgtgtgtgtgtgtgtgtgtgtgtgtgtgtgtgtgtgtgtgtgtgtgtgtgtgtaactcgccctctatgtaagagttttgttgtatgtcagttgtgaggtattttgttgtgtggtagcccaaatcgattttgttttggagaaacaaggactggtttcgagtctggctattgatctctttttctttatttcgattgacatttatgtatgttgtcataataaactgaagctttgaaccattataaacctttttttttctcttctgtcagaatttcacggagtgggagtatttggttctcggact

SEQ ID NO: 102558 - DNA, 724 bp, Mimulus guttatus
  Intron number 1 from transcript mgv1a021377m (locus mgv1a0 21377m.g) derived from phytozome v7.0 (chr-ID scaffold_149 ; pos 508887 to 509610)
gtaaaaaaagtgcctgcacgattaaattgtgccagcacaaatcatttcagtttttcttgtctagcatagaacaagcgttaataaaaaaaattaattttgttcacgtagtaattgaattttaattttcttcgtttcatcttaatttttttgtttttttaaaataacccaatgcattgtaattagtactttaacatattcaatcaacattttttcacaataaagagtaattctttatttaattacaaaacaaatatgatcctattcggatcaaatcagaaatgattctaattaatgtggataaaattggttgtgataaaaggaggaaattaattcaatataatcttaatttttttagtcaactccatcaatatttatttcatatatgtattatataattgtatttcatttatagataaacatcgtatgtatattagtgacatcatcaatatattcatatatacaattattttaaataatataatacatgaattgctatataaaatataatagaatatcacagtgtgtgagagattagtgcaataaaaaagagttttttgtacttgaattttacataatttgttcgttgttagctattggaaagaatccaaccacttcataatttcttgataccaatatgctcttgtttttgtgtttgtgcacagtgacaataataaaagatgttcataaataaaatatgaacaatatgaaaagaaaatcgcagacg

SEQ ID NO: 102559 - DNA, 766 bp, Mimulus guttatus
  Intron number 1 from transcript mgv1a006822m (locus mgv1a0 06822m.g) derived from phytozome v7.0 (chr-ID scaffold_173 ; pos 126656 to 127421)
tggccagcatcgcgttccttacatagccattggaggtacaaaaaattccttcttttttttttttttaattaaaacattgaatgtgtaatattctatacagattaaaaaattaattgaaattagtatgtgatgatttgttgctctgtaatacgagagaaggggaagaagataatcgaaagcttaggaaatgtggagtttgggatcttgtgtgattatcgaaaatgtttagtttgatctttgaagtgcggtcttgatgaagttttttcggtcattatcggaatagaatgtagggttattgactgcgaactcgttctttgtaggaatactcgtttatggtgactagtcgaatgtagtaatgcttgttatatatatttatagtaacataatacgatgagctgccagtaaacgcttaggttgcaattagatgggaggatttagatttggggaagggattttactaaacgagatggatttgaaatccaccacaatgactcggaaaaaaaaaacgagtaatgggttagaaatccattgctaagtagattcatctaaactagttcgatggatttgtaattctcccttcaaatccttcaaatccaccatattaacgataagttatctatttatttatgaatttggtgtcacgggagttatttggaaaacattcgagtatcaagaactaagtgaatatatatatatatatatatatatattgctggtcgattcatacatatatttttctgcagcatttttgcaagcaatttcctgg

SEQ ID NO: 102560 - DNA, 730 bp, Mimulus guttatus
  Intron number 1 from transcript mgv1a019974m (locus mgv1a0 19974m.g) derived from phytozome v7.0 (chr-ID scaffold_30; pos 1504299 to 1505028)
tgccttttgaatttcaagggtttttcgcctgccaggtacacaaaacacattaattttgagttgttgctatattttattaattgttatttttcatctattttattaaattaaacataatcgtgtttttaattttcacttaatttcaaaaattgtgtgttggttaaattttcaattaatttccaccactttcctcactatgaacattcaaattatactgtgggctgatagttgtttgttttgtctgctattgtttaacaagtcaaaacatatattatttattttttttgctgaaagagatcttcaaaattctattttttttttcatttatttattgagagaaatatgttctcaaccattaattttttgatcgataatagttaagtcttatacatcaagactgaatagaggtggaaattggaagaaaaatacggaaattccgatccgaaatttgtccgattttggaatgatttttcattccgaattcctaaatttctaaatccgatttttcccatttttttttaatggaattgtaatacatattaaattcctatttctgattcgattttaatatctgaaaatttcgactattttccgaaaataacacttaaaatatcaatattatcataatttttgtattctagaagataaaagaaattggaatttcagaaattccgcttttccgtcccaaaatttccgattttggaacattttttccattccagtttcctga

SEQ ID NO: 102561 - DNA, 487 bp, Mimulus guttatus
  Intron number 1 from transcript mgv1a000778m (locus mgv1a0 00778m.g) derived from phytozome v7.0 (chr-ID scaffold_48; pos 286698 to 287184 reverse strand)
ctgcagaaggagtggtaagctttcttagataattgtgcagtaggatgttattttgattacgtgtctctgtcttgagaaaagttaaagataatgagttctttagcatgttgttaccttctatttctcatttagtttagtttgtcgattttgctgctagtactagaacctctatcgtccagtcctagcagtttttcacaatatattgtcattaagtgaccttgtgctttcatattgagtttcatggtgtgtgaagtgacttgggggttttgctaaaatgactttgtgatggcagatcaatccgtctgaagcagatctcgttttttaagatttttctgctgtagtactgcaagtgtttttttgtgactttcttctttataaaagttacggtgaatctcggtaagtaattttatcattatttgcttggttcatttttaatgtaattcatttccatcccgttaacaggtaaacacagagcgggctatacgcc

SEQ ID NO: 102562 - DNA, 310 bp, Mimulus guttatus
  Intron number 2 from transcript mgv1a023267m (locus mgv1a0 23267m.g) derived from phytozome v7.0 (chr-ID scaffold_32; pos 95361 to 95670 reverse strand)
ttgagattattgaccgagggaatacacgtaaattaattactttttccttctatttttgcatgattactttttgttttaattaaaatcttttgatttatattttcattttttgataatttctttgtcgagttttcttagaaatatttctgatttcgataatgtaaatagtaaaaaaaaaaattaataatgatttatttatggggttaaatttgaagatttggaccaaaaaataacagcatattgttttttgaattgctattttggcgcgtacatagcgagtggaactgcgtgtggtatatttgctgcgcta

SEQ ID NO: 102563 - DNA, 514 bp, Mimulus guttatus
  Intron number 1 from transcript mgv1a010439m (locus mgv1a0 10439m.g) derived from phytozome v7.0 (chr-ID scaffold_102 ; pos 830489 to 831002 reverse strand)
aatcggttccacgtcttagtttgcgctcctgattcgtacgtatatttatacgcataaataatatagatttctcgatgtatcgtttttcagcgtttcgcatttaatccattgtttttatcagtattcacgggggggaaattgtatagaatgctggggttaacgattcagtcgatgtttcacttaatttgtgttcccattttatccctcgtagaatcacccgtacgcgattatatatgtatacattgtttatctctgcagttgattgcgtacagacagtgcagagattttgaattttgtttttgtttttcgtttcctagtgaagatacagattcgttatatgaatgtaataatgtggaacaagtatctaaatgcaccatggatggttcatgaagctgaatcgtttgcaataaaggcattcataggaaaagtttcatgtgaagggtttttctctctctaacatttatattaatacttttcagtgagaagtcagctgttggtcacagtatcacttggc

SEQ ID NO: 102564 - DNA, 820 bp, Mimulus guttatus
  Intron number 2 from transcript mgv1a017111m (locus mgv1a0 17111m.g) derived from phytozome v7.0 (chr-ID scaffold_73; pos 468780 to 469599)
cttgagacgagctaaatatattggccaaaaggtatgcagtgctctcagctttattatgtcttggtgaaatacatggaatttatatatgtatgatttatgattgaactgctatatggaattcgtgatatttatgattgggataacacactagaaaaattgttcttctaaatcttgtcctaacaaatggcttgtcgacagtcgttgctgaaaccataatttgatgctcaactgcatattttatatgcacgtcaatctatggatctattaatgatgtgtatttgtttgtaattagaatgtgactagatttatgaattgaaatttgtatcatctgattcttatgctttgtggaagattcttgagacgagagcttgaattggttttggtgcaatgcatagctgtttgactgtttctcatattcataggctacagttattagttaatcaggaacagtaatttgcttgtccgctagggagagtacattattagatgcatccccacatacaagttgtcgttttcgtagctctgttattctactactatttgttcatgcttcatatgatggatgtggtgacaatttattcctgagatagttgaatgaagtggcaggataaatcatctctaattttccattggtaaatattgaatgaacaaaattaaaatgtcatattgcttctgaaatttgttatattccttttcttgttttcatagtaaagcgatttagttcttcgagagtgcttcaacttataaagaatatagagtaatgtagctcctttgatgtactacttgaacacagaaatacaatactgaacttcttactggt

SEQ ID NO: 102565 - DNA, 474 bp, Mimulus guttatus
  Intron number 2 from transcript mgv1a010613m (locus mgv1a0 10613m.g) derived from phytozome v7.0 (chr-ID scaffold_13; pos 1844642 to 1845115)
ctcgcaaggtaccctttctttttcttttctttttcatgctttctttgacttgtggggtgggggttgggggtggggggggtgggggaggctagatcatttatgggtctgggttcttcctaatgacttttggatcataccatatgttgaatcaagaatttaaagaaaataaaaaataaaaagtacatttatatctatttgtggggtttaattatatattctgatttgggatcttgtaccttaaaaaatatgtcacttaatgatggtactgattgattttaatggaaggcttttttcttgcttgcttgtactctcttgtttgttgggattttgagtagagattctatatatataatatatatatatatatatatatatgttgaagcatatgaagaacaaaatcatttactgaatttggcatttaaagtttcgttaaaggattcattgaattatttcattctcgattttttaaggcgg

SEQ ID NO: 102566 - DNA, 811 bp, Mimulus guttatus
  Intron number 2 from transcript mgv1a000222m (locus mgv1a0 00222m.g) derived from phytozome v7.0 (chr-ID scaffold_249 ; pos 173861 to 174671 reverse strand)
tgttaaattggaaaagctggccgagggtgaaacaggttttgttttgttgcctttttttcctcttcttaatttttgttggtgttgattccttcagtttgagattagggtaaaataattgtcagaagatatgtaatggagatcctctgtgatccagtactaatttcctgtctaattgtagtttggaagcttgatatatgattgtgagtactgctatatctaatggtgggcgtatgttatacacttagtcgttcgtttaggtggagacgtctcgaactatgactgtgattcctttttccagtgggttagttggttataagttttgagggggttcagtttattggtttatggatttatgttgatgaattgttactgggactttttagtatatgtcttgtgatctctcttttgagataatcaagagaatgagctgtcagcacttcttattggcctcactcctgcattttggaaaatagcatttttaattagtgaaaaactgaactgaatgcgttacttagcaaatccatcaatcgaagaggcaaattctagtgtaattttatcatcttgagaacccagagtgtaattgataatatgtgaagattgattctttgtatgagtcatcacttattcagagtttatgtgctagaacactctcttggtttcacaaaggtgtctctgagcttctaacttatgtctctttgggaaatactatcttttagtgaatgtactggcgttagtgtttatcaattgctattgattccattattttgtacacacagagcctagaggaaaacgtgcagaatccataagaggt

SEQ ID NO: 102567 - DNA, 870 bp, Mimulus guttatus
  Intron number 1 from transcript mgv1a015055m (locus mgv1a0 15055m.g) derived from phytozome v7.0 (chr-ID scaffold_140 ; pos 643382 to 644251)
actccgtttgggacaccaaaccttcctggtaagtggtaaccaaccccttatttttatcaatcaatcaatccccttttttactcttttttttttttttaattatgaatttgtatctcttttcttatcatctggtgagacctcgtttgggaatgttgatgggattgataagattgattgacttggtttcacaatcgtgtaatatatgactatgttgttatgttctgcggtttttgttagtacaattcttgtattgggtaatatgcttaggcatcgtttgattggggagattaatcatgattaactaaatatcggattttgtttgatgtttggtatcctcactaacttgctgagtcgacccacaaataatattatgttgtcactcgttatcttgctttctatgcatgttttttattggatcattgaaggtccaataatataattggatcttattagattatttaatctatcttggctaccaaacgaggtgttaacgggattgtgcaatactaggggttgttgagtttggattcggtatccctcgttcgcttgattaaaacatttgacagaccttgattatcttgtctatcgagtcaagtcatatcctacttcccaaacgaagccgaaatggcgaaatgtatagtttgcttaaatcagttaacatggaagaatgaagtgaaattttcagattttgcatttgaattaactgacacgagttctttgtgcgggttcaaatatgtgcagcacttggtgaatgaaagattatccttttatcatactaaaaacgtagatgaataacgctcctagtagttgacattgataatcctccgtttttcaggtgccaaccttggacaattgcactgactggagtag

SEQ ID NO: 102568 - DNA, 794 bp, Mimulus guttatus
  Intron number 1 from transcript mgv1a016840m (locus mgv1a0 16840m.g) derived from phytozome v7.0 (chr-ID scaffold_54; pos 676721 to 677514)
gggaggccttctttcgcttctgttttccttcttccgtaagttcccttttatttttctctttttttgggctcttacattcatgggttcttgcagatctgctgatttttctctctgtgtgtttttggtgtgtgtgtgtgtgtgtgtttttgcagctctattttttttggtgatgtaattgggcttgtgataattatttttgtgattggatctgagttatatttataggatcttgggtggttcttatggctaattggtgggaaattgaataattttttggtaaaaatcctttcttgatttgatctgatagaaatgaagagcttcaaaaagaatttgggcaagaagtgaaaccctaattagagatcattggattataactgaaagtgtagttggtgtttgcaaatcgatcgtctgtattatcgccgtatttcgaagaaaatgattaggttgctatggagctctatattaactaactgctttgttacttttagtatcaagatagtatttagtagtgacgtatcttatttttcgtattagtgtatatcgtttcgtttaatcatctcgagtcggtactcttgatcacgagtttcggaaaatgattaaaaagtttaaacatgtaatgggaaaattgcaagataatagttcttgaggttgttttagtcatcgaacaagattctgcattttgttcgatttttttctcgaatttaaacgaagcccacattttataatcactaaaacaaactcgaaaaaaaacgtgtgcaggaaacttgtcttgtgacagacaaagaaagcaattc

SEQ ID NO: 102569 - DNA, 732 bp, Mimulus guttatus
  Intron number 1 from transcript mgv1a013840m (locus mgv1a0 13840m.g) derived from phytozome v7.0 (chr-ID scaffold_6; pos 1750580 to 1751311)
tgactcaattctgcagtgtgaaatccataaagaaggtagggtgttcgcgaaggtgtggccaacacccgcaactctgtgccctcaactctctgcaggaaagatgagaaatgaactgagttcttctcctatttatagagtccgagagctcattgccctgcacgaaattaacacactatgagagataatgggttagtgggataatgggttagtgaattaattaaacatgtgcttaaataactgcggactaagctgaaaataaccgcccactaatcttagataataaatccgaattaaaataataaatcttataataataataattttggaaatataaaaattgatttaagaaagtcaaaccaattaaactatatttgactcaaagttaaatatccaacaatattaactgaagttaaatagattccgtgaaaaaatcacaccgtaaggaagtcggtttaagacggaaacaaacatcaagagaaacttggtaagtacggatatgtgagggtattttcgtaatttaacctaaattcatggggtttttcataatttacccaaaaaaaaagaaaaaaagaagcaattgtcatcagtctcagcaaaaagtagaccaagcaagtgaagccacgtggaaattaaaagacggggtgggaggaacaagtaacgccacgagatatattttggtccactcaaattgataaagctctctattgtgtgtgtcaaactgtcaagtgtgaa

SEQ ID NO: 102570 - DNA, 923 bp, Mimulus guttatus
  Intron number 1 from transcript mgv1a011468m (locus mgv1a0 11468m.g) derived from phytozome v7.0 (chr-ID scaffold_149 ; pos 153644 to 154566)
gataaggtcatttttcattctcaattacactttgtgtgtgtgtgtgtgtgtgtgtgtgtgtgtgtgtgtgtgtttcctccatgaatatgtgtttacaatacctgcatttaggtatttcatctgttgcttgtgtttcttatgaattgatgatgatgcttatgatttatgaattgtgagtcaacttgtgtgtaaattgcaaaaaaatctattagcacatgtgttaatttttgaaggaatgtatgaatgacattcgaaaacatcaatttttcgtgatgttttgaatttagcatatggggtttttcgacttaatcggtgaaattgaaatgctgaccgtaatgtacaaagaaatgtaatttaccgcccgtttgttgtacccgtgttgtattctcttccgtctgcaatttgatatattatgctagtaaaattatttatgatgataacattcgtaattagtaatcaacgttagctcaagtaaattgtaattggatgtatggcgttgttactttttttttttttaatttacattctatgattgtttatagtttacacgtgcagttgcacaaaacatgggagaagttttttttgtctttcctacctttagttttttgacgagcaaattttagtttacaagtccgtttattattgttaataggtttcttgctcatccattaaaagcatgaagcattatcgattatgctcatccaactctttggaagatgctttctgctatataatatcttcttacattgttcatgattttcgatcatgtcattcatattgctatgatatgtcggggtgctgcccaaaagtgaagttacaagcctgtgtggcatttgatcatctttattgccatagccttttttttaacattggatatgatgtgcattatttgccagggaataatcccgattataaattgggag

SEQ ID NO: 102571 - DNA, 973 bp, Mimulus guttatus
  Intron number 1 from transcript mgv1a005364m (locus mgv1a0 05364m.g) derived from phytozome v7.0 (chr-ID scaffold_129 ; pos 176926 to 177898 reverse strand)
cgctcgtatgcgttctatctgaatcggtttatttttctatgtttttcttttcaatttctatctggtggaagtttaaagtccggatcttgcctatggaattagttgaaaatgcaaataatacgaatcgatttatttgttttctcgaggatcaaattctgtttttattgtaaaagtaatgctgcttttagggctattctctaattttcctcaatcaaatagcagatttttaatatagaactttatcttatcagtgcaaggttcgagccctaatttataattctgtagttctgacatggatgcatttgtttatgataaacatgtttgggttttccattgatttctcgataaaattataatttcgcagttaaatgggggaagttgaaatctttggtgaacatgaaatgtttgggtaacgaaagagatttactgaaataatttcctgtagaatttaattcagttgttttcctggaaataaggagtttaatatgaggtgataaagggttgaggttctccttgttggctgagtgatgaagtacctaggtttgtacattgcagatgtcttgatatgagccatgtagtctaaatttgataatttgatgcgtttactggttagttttctgaaaattattttgtgataatatacaagagttttaattagaaaaagatgagagcagttatacgtcatgttttttaatctttgccttcttatctacgaggctgcttgtccatgaattaggcacctaccacagaatgtcatgtattttaattgaagctttgaggattgagtacctactatggtgttgtgttgtgtagttagtgcataccttttttttccccctagcaaaatttgctgcaattttctatatcttgtttaaaggaatggaaggaatttccatttactgaaactttatggctgaaactatttattatttcaacaggcacctataaagagcattctttctctacgaaggac

SEQ ID NO: 102572 - DNA, 712 bp, Mimulus guttatus
  Intron number 1 from transcript mgv1a007092m (locus mgv1a0 07092m.g) derived from phytozome v7.0 (chr-ID scaffold_37; pos 1077786 to 1078497 reverse strand)
ctgaagaacacttaaacagtttcgtcaaacaaaaagtaagatttttatccaccgtcttaatctgtgcatatagtgagtaacggcagtgggggttttctcaattggtttaatttctcactgtttttttcacgtattgatgtttgattatggtcgcaatttacatgaaacatggaaaattggtttcaagtattcatactttccgatggaaatttggatgatgaattgcttcgtccgattgatcagaatgggtgattttaagttttgcttttcttaatctgaattccatgtgtactggaattgaaggcattttaaaacgttttatactattttttggaacatggattcggaattgttctttaacatggttttataattatcttattctatttactccaaatcctgttgtacttttgaagtaatacaaataggacaacttgatgcaagaatttgttcttgcttagtatggtttataggctcggtgtcaaaagtttgaagaacccgaagacaaattgagaacaactgcattttgacttgtttaatggaaacttagttgcaattgacgaatgatgacaattttgtgtatagttttagtttgaatgcgaagatattttttttttttttttttctaatcactgacaaaatgtaaaaaaaatattgaagaaatctcttcatatagtatcataactacgttttttccaggttctacgttaga

SEQ ID NO: 102573 - DNA, 860 bp, Mimulus guttatus
  Intron number 1 from transcript mgv1a016641m (locus mgv1a0 16641m.g) derived from phytozome v7.0 (chr-ID scaffold_24; pos 310977 to 311836)
cgatcttcacagttcacccctaattttcggataaggtagaatctttcattcattcctttgtcaatttcgattaattctttcagatctgtttctctgtggtttctgcggtatgattccggcgatttttcgtcgttaattttgtttctcgtttcaaatttgttggtctgtagtagaggcgtctgattcttcttcgttgtgtggtgtttgatccactccttttttttttggtcttttatgattgaattttgtgttcacgaatttggggattagggttttgttgcttttttttttttttggttcgaaaattgtggttttggattcttgattcaatctttttaaccctgtttgatgtgtaactctgtatcaatcaatacgatagggtttttgtttattccgtgattttcgtcggacttttcaaattgctaatttttatgacatagatagaatccccaatttatgtgggttagagattccgagaataaaattattgtttcttgaaattagagctattgcaactaaatttggtggttttcgtgagtctgctgttattcggggctttctttctttattggccagcgtattttttttttgctcgctattggttttgagtttagttgtggagtgatctcgtgatacaatttagggacatgtcatagattaacggctgtatgatttaccgattcgattcgtctttggcatatgtttaaagctattttctttgttcaaacataggatcttttgaccgaattgatggttcagtatatgattttagtacatatatttaggctgattgttgatatttatttgtttttcttctttgatcaggtctgagcattcaaatctagcttgaggaattcttg

SEQ ID NO: 102574 - DNA, 277 bp, Mimulus guttatus
  Intron number 4 from transcript mgv1a016641m (locus mgv1a0 16641m.g) derived from phytozome v7.0 (chr-ID scaffold_24; pos 312451 to 312727)
atcagcgaaagaacgtttcttcgtttcttgttcaggtaattattacctcgtttccctgcatcactatatttagtacgaagataatttaccaaaaactaaatgagttagaatattgagtcggagaaaataaaccaaatattgtacatatgtggaaacatttaactggattttgaagtttgtacttttgatgctcctatatacttggataatcggttaacgtaatcattggttctgaaaaacaggcgggaatcgtgaagaaggagcatatcaagattca

SEQ ID NO: 102575 - DNA, 652 bp, Mimulus guttatus
  Intron number 1 from transcript mgv1a021788m (locus mgv1a0 21788m.g) derived from phytozome v7.0 (chr-ID scaffold_108 ; pos 433437 to 434088 reverse strand)
ctatttgcagacggtttattgcaaaacatattaaggtttctgttggaaccacggctgtaatttgacgattgattacaaaacttgtggtttgaggcttgtactccatttgttctctaattttatatgtaacaagttgctgcaataaaaaccacgataatatggagataggcaaggtgaggcgcggactaggtcgctctcttaagacgaatttcacgaccccttctctaatgaggtgcaaaaaggttccgatcgtgtcgcctatgggatacaacagcccagcctatctctccgctgtaacttcaccgaaaatgcacgttcaagtgaagcagaagcttacacccgacacacaacaaaagctcaaagtataagtatatagtatagaagaaaagtatttcttttatcttctcttgtactctcttctctcctccctttacaaagctacaaaagtcccctttatatactataaattataagcaccataaaacctctatttaatatagaattaaaggaaattatggaggttttatgaggcaaaataaagtctttgtaggtttcaaaatgttggtccaaataacctcataaattggtcaaagaaaatatttaataaaatattatttttattaaaaaacccaacagtttctacaaacacaat

SEQ ID NO: 102576 - DNA, 599 bp, Mimulus guttatus
  Intron number 1 from transcript mgv1a025867m (locus mgv1a0 25867m.g) derived from phytozome v7.0 (chr-ID scaffold_32; pos 1753572 to 1754170 reverse strand)
gggtaagtaaagatattgctaaattactggttcatcgtgttcaacaagaactttctcctaatcggagctgttgtgcacattatttatcgttgcaggtcctatttaattacattcaactcttgtcatttactggttcatcatgttcagcaagaactttgttattttgcctgtattagtggtttattatacttcttttttgtttatctttagtttcatgattacctgtttactataaaactctatgatcatcttttagtttattcatgcatttcgggatgtttgaccactgcatctcatctaagtaaatttgagtatctatggtgatctaactacatttcgctgcttcctttggtatttgctttcaattatttatccttttctcgattggattggtaatagaaaaaaaagggcggctgatctttgatgtgctcgttaatggtattatatactgtcctatatatgtaacggtcttccaatgaatcatctccactgctcccaactcatatggatttatttactattcctgatctaatttgcggcggtatttcaccattttgttccaataataattttttaacaagttgtgtcactgattgcag

SEQ ID NO: 102577 - DNA, 846 bp, Mimulus guttatus
  Intron number 1 from transcript mgv1a004051m (locus mgv1a0 04051m.g) derived from phytozome v7.0 (chr-ID scaffold_26; pos 219618 to 220463)
aagagcttgcaggaaaggagggagcggtatgacttcttttcccttttccattttgttacgacgattttttgttcgataatgtgcttgagtcgttattttttttcttttcattttgtagtttcaaattgcttaatgattttatgttgtttcttccaaatcgatgttatgaatgataatctcatcttcagttttttggtttcttacttaccaatgtaaaattaggatttaggaagtctacagatttggcaccatgtatatttactgaaagaggttatctcctttttacccttgactgttctttttttgttggcaacaaaaataccgaaattaaccttccaaactattgtgttcttttgcatgacttatgtgtacaatgactattcacaaagcatatcttctagccatccttaactttggtgtagataaagacttatagtcatctgtgcatctcaatgttccatcagaatctttgacatttttaccttttttgagtacactttctttcagatatatttgctctttgctggttaacatgaacaataaactctaataagaaacacgcccgcaaacagaaaaccatgcttcatctcttgtacatcagagaagtgcttttcagagtaatatccctctgagactaatcagagttctgaattgcactaagatttgtgtatttgcaaacgctcaaaagaaacattgttttagtgctccaacttgttaacttttatgtatcaaagtttgaatatattgggatttggaggtgctctaacctcgggtaaatatatctaataaaagcacagtccaatagtaccttaaacggcaaatatttcgtttccttgtaggcgtgat

SEQ ID NO: 102578 - DNA, 285 bp, Mimulus guttatus
  Intron number 1 from transcript mgv11b021073m (locus mgv11 b021073m.g) derived from phytozome v7.0 (chr-ID scaffold_1 09; pos 411805 to 412089)
ccattcacgtgagtttggcagggtcaaaagtgtctattcccttacattcatcatattaaataaaaaacaaataaaataaacaataataataataaaagaaaagaaaataagaaggaaaatctgcaactctcttcctccttcctcgagagaaacctgcaaagtgtcgccgccgtaacttttcaccacaaactcaaattttattatatacaatttcccaacattgtcccttttctacaaaatgtgagccattgaagctattcagtgtttttttttttcttcttcaga

SEQ ID NO: 102579 - DNA, 902 bp, Mimulus guttatus
  Intron number 1 from transcript mgv1a010650m (locus mgv1a0 10650m.g) derived from phytozome v7.0 (chr-ID scaffold_4; pos 3443095 to 3443996 reverse strand)
ttttgcttgatttttggagggccttcttctctctggtatgtgtttgtttgttttccttttattacaacaagaattcttgaaagaaattacaggggttttatgtaaatcttgtggatgacattgattttgatttttgattaatgtgtatgattggagttgagaagcatttggtactagattaaattgaatcctgcatcatgctttgtagttacagattgacttagggggagtgagttatgatcttttgtctttgttgattatgttttatcagagtcgataaggttttaatgattccgtaagaatcgaggggggttgtcttatctatattttggggcttatcctgagacttgggttgatgtttttatcaataaaaatctcatctttcttatggatctacgaaatcccagtttcctgaaaattcgagaagttgccatagcctcgtagtttgatgaagttttcgaataggaaaatgctcgtttctctgatttggttttgtgcctggatcagtgagccattgtgtgctggtgaatctataggttttgtactgaagataaaacaaattaatttcgtttaaatcgtgttcttgatttgtatcgctaactgtttaaccaaatgtcggaaaaatcgtgttgaaatcctctctccgaggtgaaatttaactttgttcgtttatcgagattcgtatttggagttctgctgcaagaaatacttgcatgtagaaaaacaatcagtatcatacagaacccaaagctgtcaaattataaagaaaatagaaacgtcgattctggggattgtattttgtatagatgactgatgtacgtgcaagtttcgtatttgatatttttatgtgatagtatacgacttgtgcagggtattctaatcacccgtattgagcaatcaga

SEQ ID NO: 102580 - DNA, 783 bp, Mimulus guttatus
  Intron number 1 from transcript mgv1a006936m (locus mgv1a0 06936m.g) derived from phytozome v7.0 (chr-ID scaffold_4; pos 1431443 to 1432225 reverse strand)
ttcaatccttttgttctcccgccttcccaatccaggtttgttttcccgatcgatttaatcctccttgttcatttattcggttgtttattgttgaatggtgatttcctgtttgcaaattttgtatttcgtacgttgtaatgatttattgaattttgatctgacaatttttattttatttttgcttttaatcgtatggacgaactatggcgaggaatgtagaagaattttaatttttcagattcatttcactgacattgtgtaattaggttttgctatgtgtttatttgggttgttttttggcaattggaagacaactattattgttcacgggccttttgtagttaaattgttttccttcttcattaatttctaattgctgctttgggttgataatatgcaaaagaaattggtgaatgttattttctggtgctcgattcttagggaatgtagagacgaagctggaagagataacatctctgtttattcacgagcgatgcttgaaatatgtggatatattctcatgaatacctaattatatcgaaacgagatattgaatacttagagtttactaccaccatctgcgactgaccgtgcaaacaaaatgttataagcaaacattaatccgtacgaatattctttgtcttattatatgggacacattcttgtttactatgatgatttgtgttgttatatatttactttgtcttaatagttaaattgagcttcctctgctgttaggtatcgtgtttttaaaatgaaatatgatttggcttgttttccagg

SEQ ID NO: 102581 - DNA, 1021 bp, Mimulus guttatus
  Intron number 1 from transcript mgv1a006678m (locus mgv1a0 06678m.g) derived from phytozome v7.0 (chr-ID scaffold_181 ; pos 294143 to 295163)
attgtactctgggcgccgccggccactccgttgcggttggttaattatttcattttttttttttaatttggttgttttttatttcgttttttattttgttttttgcaattgttgttgaggtgattgggaattgaaattattagggcatagaaaaatgaagaaatttttgggcatttttcatgacattggttacttaatgtgtgcatataggaggtgtaaacgaatatcactggagccaaatgcatgtttgttcaagcttcgtttgaatttttgtcgagcttttaaagttgtgtttgagttaggtttgataaggaaaactcgaacgagctgtgtatatgttgtgtaatggtgcagtttgggatgatgaatagggatgaagattgaaacataaattcctgattctgccgatttcgatccgaaaatttccgattttggaacaacatttcattccacaagttcccgatttccaaaattttccaatttattttggaatggaattggaatacatgttagattccgataatattttttttccgaaaattacacttataatatccatatttattatgcattttatattacagatgaccacaaaattggccgaattgcaccaattccgatccaacaatttccggatttttttggaacggaattggaattagttttgcactttcgaaataaattggaatttttgcgaaagggctaattcagatccgatccgtccaatttccacccgtaggtatgaaggagctggtatttctgggaatgtaaaattgatcgttgataataaaatttgatgtattataacggtgcaattaggtaagaaagagcccgtatttcctcaaatattcttttttaagatgttctaattgcactatagtcactttaaaaatagtgatatcaccgtgtaggttatggattataaccgagaaaactagaatcgaatagaagtttctagaactaattgatgctgcaacatgtataatggctacgtttaaagcttcctttgctgcaaatgcag

SEQ ID NO: 102582 - DNA, 881 bp, Mimulus guttatus
  Intron number 3 from transcript mgv1a022216m (locus mgv1a0 22216m.g) derived from phytozome v7.0 (chr-ID scaffold_5; pos 1663361 to 1664241 reverse strand)
tgggggaacatttgttaaattcagccctgtataaggttcagattcaattatgtcataaattctatggaatctgactatttgcggcggcttatatgtctggaatttgaatttgatattttatcaaaactgacaaatcagggtgattccaatgagttacagtcactgcctcaggcctccgtgcaacaaatgtcaccgagtagtgcaaaattctctctcttttagcctgttaatttaccaattacttcaaagtggctcttccactcactaaattcatcattctattttttgcagcacaaataaaaacagatttaatcagatcggatgaggtggaaaaccaagcagatttattgcaagtgcaagtaagacaaattcaattttcattttaagtacttattacagatatctgttttagcctgctatgcaatctctgctgaatctttaacgtctctattatgcaactagggctaataaaaagtgataaaagaaactactagtactaggtagtactctttaagattggtcagttaaggctctttcgtcaaacacaacaaacgaagtttgaacaattttctcacttgataagatttgaaactcagctttagttgtgagcttgatttatgtataaatgaccaagttactcgagcttgactaaattagagcttgtttagtgcatatgtttaactatcaaaataagctcaatccatttacacttatagccgcgaccacatgattcacatttgtgatgtgagttgtctcaagctcatcatcaatcatgtgaaaaacgtgtgtgaatctgactgtactcattcctttggtgatcctaaaatctgtgtctcttcatattttgacttgtttaaagcaggaattagttgacctgacaa

SEQ ID NO: 102583 - DNA, 598 bp, Mimulus guttatus
  Intron number 1 from transcript mgv1a022216m (locus mgv1a0 22216m.g) derived from phytozome v7.0 (chr-ID scaffold_5; pos 1664468 to 1665065 reverse strand)
atagcggtacgtgttcttctcatcttcgatcaagtgtaggttttatcgtttatctcatgccgcggtaattattaactgatgtcgaaaatttgacgctgatatgtatgtattgtcggcgtcgattctttgatgatgagaaccctaatttttcatttttttttgccctactgggaattgatgattctcttagttgtaatgaagctttggaatttaattgattatgatatgcaaaatagggattgaaatttcattttgaatatgtttccagtcatctggattttagtatctcagaatttatagtgatgtaaagctgacgattaactaaaatgactgcgcaagaaatttgaattatcagttttctttgtgcaagaaattgaattaccatatgtatcttcgattttgtcttaagttccttttcgaggctaattgctaatatcttcaaaaactgacttgtgtagccgaaaggcattgctcgattggattcagaaaaaacttagtcgagataatgttattctttcatgttcataaaacttaggcaatcaagaaaagttggcaagattcatctcaactaggtaccatgtcgaagatttccttccat

SEQ ID NO: 102584 - DNA, 633 bp, Mimulus guttatus
  Intron number 2 from transcript mgv1a000091m (locus mgv1a0 00091m.g) derived from phytozome v7.0 (chr-ID scaffold_126 ; pos 570399 to 571031 reverse strand)
aggtaattttgatgaattatcgaattgccgaataatgagatgttgtggattgaattgtcgttcgtgcatccacttatcggtgattgatttttaattgctaggtgaagctgaactgtgtataagcaatagttgttattgtgcctcgaattggttatgttgaatattaaattgaaatcccgcatatcggttaatgatttgaaggaggaggtatataataagcatgaacaagatgatagctaataagttggtttgactgatcattgagtaacttggtgtcacatttgtgcaacatatactagaaggttggatgatgcttccatcatgtatttggtcatatactagaaattcagacaatgtttgcttgaccattctgatgaatcgtactagatatccctgtttaattggtgttgcattcctgtgtagttggaagcgtttgatatgttctatggcctgcttgcatctggtgctaatattaaaagttatgtttctataaataacccttgggtttctctaatgaattattccggaagaaaacattgaatgaagttttacaggaaacaattcatttccgacaagtattacttacgttgtgtttttaatttattctaggaggaaccgaaattcaagcaagcg

SEQ ID NO: 102585 - DNA, 754 bp, Mimulus guttatus
  Intron number 2 from transcript mgv1a026203m (locus mgv1a0 26203m.g) derived from phytozome v7.0 (chr-ID scaffold_109 ; pos 420148 to 420901)
gcacaaccatttaaaacccaatattaaggttttctttttttcattttttaaatttatttgtttatttcctcaaacattcttgcatataatacaatatcattttcttccttttcgatcatttttcgtttccgtttttaagtcttgcacgtgtgtagtcaatggttcatttaaaacgtgagatcgtccgtcggccaaattcgattcgtgtatatgcattttgtatatatataatagtcacaaggattttatgattaattaagaatcttaaatttattaattttcttgtttggtctaatttgtgtgaatgaattacattcaacactttaagaagggaaaatatctttactaagaaaattattattttgatagcttataagaagatttagtggaaattgattttttgaaaataataactaattaattaattcttgaaatcgttcttattctatgcttattttgttttgaattgcttttttttttattgatccataattaaattatataaatcccataattatattgatcacaagtattttgctacatgttattactatacgttgagaaaataataatatacccaataaaattaattattttggagaaatacaaagatacaagtctctctctctctctctctctctctctctctctctctctctctctctctctctctctctctctctctctctctctctctctctctctctctcatgtatatgatgtgtatatatacggcgtttttgtagaaagatcg

SEQ ID NO: 102586 - DNA, 757 bp, Mimulus guttatus
  Intron number 3 from transcript mgv1a007356m (locus mgv1a0 07356m.g) derived from phytozome v7.0 (chr-ID scaffold_4; pos 1593610 to 1594366)
attcgcaaatctgtaagttcattatagcctcatatatgattttttttgtccattcatgctcattgaaatgacctgtcataatgcaattatttgagctttaaactacacagtcatcaaaaacttgatcggataattttgcatttagttaaggtgttatgggtgctgttgttaacaacatgaagtttacaagttatgtcataagtggacccagttatgagttatgatcctttcagagctagcaatagtagtaagaagggaccttcaatcttcaatagttgatagcaataattttagaatacatcagttgtttgccttgtattgacttagtaagttaatcatcattcaagccattctctttgtcatagtttgtctacatgcagtataaagtgttgcatacgaacaattgtaggatagaaagttgatatattttctttctctgaaaaccaatgggttatgccttatgggtttggatatgcttcttctgttaaagttgtaccgttctggaatcagtaagcaatcttctgcaatgaatggcgattttcttttagcatcaaatattcaaatttcattaacaaaagaaaaagaaaaagcaattattgcctctgttgtttctctgtacaatgaaaagttgtttaggaagtgttctatcatatagtgctatcttttggcagtgtcggtctttgtggaacagtaactaactttggcctatcatcgaatttcaggtagaagcaacaaagggcaaagacaaggacgaaaa

SEQ ID NO: 102587 - DNA, 590 bp, Mimulus guttatus
  Intron number 1 from transcript mgv1a010689m (locus mgv1a0 10689m.g) derived from phytozome v7.0 (chr-ID scaffold_83; pos 979001 to 979590)
atcctgtactctctctctctctctctctctctctctctctctcacacacacacacacacgcacacacacacacacagagctctgttttgcttgctttaatttacaaatgagtaatttatttcttctattgtaactaagtaactttatctttctataatgaatgttctgcttatatttggggaagagtggcgtagggttcaggggcagccataggttttatttgattatagaaatgcatgcttttctgtgctcatttcttcgagaaatgtttcttaattcgattttcgtatctcttaattccatcgatttttgcttctcttaattctgtgtctaatttttttttcttttttcttttttgtgtgccaatgtatgctctttgaatgtgtaatcatgtagattgaagattttttccaagttcaaattggaaatattctattttagcagaaagcccctttactgttgatttctacatgaaaccttatttgttctaatttttttttctgtatttctctatttgctgatcagaatcattacattgaataaactacaggacttgttaccgatttttttttttgtttttcgatagaaat

SEQ ID NO: 102588 - DNA, 879 bp, Mimulus guttatus
  Intron number 2 from transcript mgv1a007882m (locus mgv1a0 07882m.g) derived from phytozome v7.0 (chr-ID scaffold_66; pos 505145 to 506023 reverse strand)
tccagttcaggtatacatacatacatacatacatacatacatacatacaaatcatgattcaaaaatcgtgatttttgtcgaaaatcgtgtgctatattagtatactaatttttttttgtgattttgcatgaggattcaaaaattagtgaaacaatttatggatgaactatttcgtgactagtttcgtgtttcgattcggtgttcaattttttgcggttttacttgaggattcaaaaattagtgaaacaatttatggatgaactatttcgtgactagtagtgaataaacatcttctatagatgtttttctgttaaaaaaatatttaaaattgaattttaacatgggagtgattttaaggaaaattgtgtgcttgagtcacaatttttcgtgattttgcttgacgattaaaaaattagtgaaacaatttttagatgaaccatttattgactatttatgaatacacattttccatagtatagtttgtgttttaaaaaatattaaaaaattgattttaacattcaagtaatttttagaaaaaaatcgtgtgctatagtatacatatgtttgtgatttttcttgacaattcaaaaattagttaatcaatttttgcatgaactatttcttaactacttatgaataaacatcttctatactattcttttgctaatattgattatagattcaatgggttacgtaactacaatatgaaaaattcgtgctagttaaagtactggtatgttagtcgattttttatgccagccaacaaagaatatcccgttaaaacatcttcttttaatttgtttgaattatttaatgatttataagcatctaaattttcacacagctgccttctgttaaaagcgaaacatctaacgagcc

SEQ ID NO: 102589 - DNA, 654 bp, Mimulus guttatus
  Intron number 1 from transcript mgv1a013745m (locus mgv1a0 13745m.g) derived from phytozome v7.0 (chr-ID scaffold_157 ; pos 363583 to 364236)
acctacaaaaatacccgcccactctttctccagaggttagttcaattggataattatttaagcttagaattattgtttgattatgtgtttatcggagagcttgcttaattttgcattcattaatttattaccgattttagctgttcgacatggttattgattggcaaggttttttgaagaaactgtttccgattatgtgaaattcgttctatccgaataaatcgcttgcgaaacctaagaatttctcgaaaatcggaagattgaaatttgagcaagcaaattttttatagtggattgggttctacactgagggtgccggtttattgcactgtttaaccgaattcgatatatatatatatatgtatattttttttaattctcgacattgcatctattagtattgtttattctcgactttattgcgagacgagcattttaggatctaacaacccgaagaacacgtgtagtagttgtcttaagagattatatttagaggttatgtcattaattttgctgtcgaggttgggggaggagcttttttccgagacgttttgtgcgattctgttattgcgtgttgatttttcggtccgtgtgattcttttagaactataaattacagaacaaaaagtttctacactaggagcttctactttc

SEQ ID NO: 102590 - DNA, 181 bp, Mimulus guttatus
  Intron number 1 from transcript mgv1a004661m (locus mgv1a0 04661m.g) derived from phytozome v7.0 (chr-ID scaffold_11; pos 501145 to 501325)
ttctcttcaatcaacaaaccattttccactaaaaagtgagtctttttcgttttttcgatttttgtttaggtttatgtagcttgttagaatttttttgattttatttaatgaagaaaaattaattacgatctagcttcgtatttattgtgttgaatttgattgttttttttttcaggggtgt

SEQ ID NO: 102591 - DNA, 907 bp, Mimulus guttatus
  Intron number 2 from transcript mgv1a003142m (locus mgv1a0 03142m.g) derived from phytozome v7.0 (chr-ID scaffold_126 ; pos 608146 to 609052)
ccgcacttccgataaaggacgaaccggatattcaggtggtgatttcttcatttgctgtatatgtatttatataatgcaatagttactggagttcattgattttgttcttggatttttgattgcatttgtcagtagaggaattcggcaattaggcgtttcgttccgtgagtgaaatgtttctacagagaacataattattcagacggtttgggtgactttaggcacgagtctcatgtttcttcagagaacaatgtaaacatctctgaaaagagtggataatttcaggaaaacagctctaaaatgcttagttgcttactcttcggttaaggcgttagagaatgaattacatatcgaaagcaaaatcaagtattgatagacgatagtgccatttgtccattattagctcatcttaaagagaagatggctaaaattaatttttcgagttttaaaatgagtacaatccggacttggtctcgttttttccccagacttattgtcatcgctttctcattgtatccatgttccgaaaccctgttagggagactatttcatttttcttttcaagttggaaaattgcatataccgaaaaaatacatcaatgggctgataactaacaagaataccgaggcactgttgcatgcatgttatgtaatttgagtatttaaatgcaaattataaagcctagtctttgttcagcattatgctgtgtaaactaccaaaacaattccaaaggcagtgcgactataagtgcttctcttgcgcatttagatccttagtgatttcgatatatgatgtgattagacagaatcagcttaatcggtattatattgaggaagatgaagctagtttacttatgatatatgcttaatcaggtgtggctacattttgccgtgtcaagtctgcattt

SEQ ID NO: 102592 - DNA, 825 bp, Mimulus guttatus
  Intron number 1 from transcript mgv1a004835m (locus mgv1a0 04835m.g) derived from phytozome v7.0 (chr-ID scaffold_44; pos 1447502 to 1448326 reverse strand)
gaaaggaagtcgtattctgatactgttcgtcaccggtacgaatttccgttctgcattcgaagtttttttttcttctcgatttccttttttttatgtgtcgactcatgatgtaattgctactgaagtatgaaataatgtttaatattggaacatagcgttttgatttttatatgaaattattttgtctgtgtctgaactctccgatctgtatacgacgaggcgccgatgcgcgccttttagctttgtttgataatttcatgcctatgtgaagtggtgaattttatggagttattgtaattaattagaatcttctgattttttttttggtatagtttatggaaatttataattatattccattcactgcttaaatcgataatttagttaatcgccctttgtaactacttggatttgctgttgtatccgaatctgtttgttctatactcgttgaaatgtatcagaacttcggtgcaatttgtgaatatgttgttcgtattgataaattttattttctgtctttgtacatcatgtattttagaaactactaacatttttgtgtctgtcgaaatgaatgcaatgcttacactcacatttgcacctctatgttgccttgtgaatataactccatcaacacttacattgtcatatgtgcaccccttcgttagggattttgcttgcattgcttatgtcatactaaagcaagactaacaaaacgccgatatactcgaaaaggcattccaacaatttaattaacttttggtttttgccattttttcctcatattgtatgtttaggttgtattcagagtgttgaagacttatagcc

SEQ ID NO: 102593 - DNA, 743 bp, Mimulus guttatus
  Intron number 1 from transcript mgv1a011036m (locus mgv1a0 11036m.g) derived from phytozome v7.0 (chr-ID scaffold_8; pos 2570207 to 2570949 reverse strand)
actctatcttggtcactcttggagacattgctcatgtaggccccactaactctttctttttatattttaatattacatttttccgcaatttaaatatataatcttattttgtcaaaaaaaaaaaatatataatcttattcattcatttatttatttttaaaggcgaccaatatacataatttattttaatatattattattatacatttcctattttaatctgaaaactcgtatgattaattagtgtattattgattatgtagagtgagaaaggatattaggataaatataaaccccatgtgtgagtgattatttaattgaaatggctgtcaaagcagccattattgaaccctacaaaccctaacaaattaaatctctagattatatattgacaattcaatgacgtgtaaatggagctgctctttttaggtgtcttaatccacatcttcaaatgaacatgaaatgagtttcattcgcatttggctacatacgttaaggtcaaattaattacaattagctgaccacttaatatacgtgtaattaggcaaaaaataacatgtcataattaaaaatgagtatttatgtggagagaaaatatcacttggtatttttcttaaaaagtgtaatgattttggctttttatttatttattaaaattggtgttattaatttgattaattagggttatctgatactaatacatgacaggtttggagtaacggtaagacgaagaaagtgagagg

SEQ ID NO: 102594 - DNA, 1042 bp, Mimulus guttatus
  Intron number 3 from transcript mgv1a011207m (locus mgv1a0 11207m.g) derived from phytozome v7.0 (chr-ID scaffold_48; pos 876912 to 877953)
agacgttgaagatttttttcagcggtgcgatcctggtgagttttagggttcattttcactctgctgcgtggaattttgttgaattctggagtgttatttggtgtactttgttagctttatggtttatcgcactccattttttttttgaattcctaggtgttctattgctgctgcaattcgggttattttaattgataatttgacgatttttgttaccctcccgtttttttatttggagatggcgatctcatggttttatgtatgttatagatctggaggaatgagaattgatgataactatgtcttgttatgctttaaattttctctgtaatgaaattaatagcatgaaatagtatatgctgttttcatatatttcacatttattacccaagtgaatctttgacacgtcgtttttttctgccacggataattgccacgtggtaataaattaacctgcgtgatgctacttcctttgtataatctgggctgtgctaattggtagttactgctttatttagttgtttggagtgttgatataaagaaacttggattgtttgcggcacgaatattaccggtagcactttgttttttgcttttgcgtgtgcacacatggttaaattcttttctgattatatattttctttagttggtgtctgtattggttctgatgttggattttttcaccaacagaagaagcaagtttaccttagttgactgttagtttgaactgaaattacttgtagctttagttatctttagtaattgtttgggtttttaatggagattaactgatgacagtaagtttgttcgtcgctctgcctatttcttttctagctgcaactgttagaaggtttatcatcatatactcctttaataactccagcatatgtgccgtatgtgtagcttgtctggaaaacatatctgtgagattttttctgtactgaacagtcaacaaaagatgcttctatgtgaatgtatactattaagtattaatagaactacctctgtcaaaaatggaaactgttgcagagaaggaaaatct

SEQ ID NO: 102595 - DNA, 824 bp, Mimulus guttatus
  Intron number 2 from transcript mgv1a016108m (locus mgv1a0 16108m.g) derived from phytozome v7.0 (chr-ID scaffold_8; pos 1034710 to 1035533)
aaactaaggattgttggctgattatcagtggaaaggtcagttttttaattattttttgttctcctaatttcattattaagaatataactggatttgttagtttttagctgtatgaactctactctgtaatttttttgccttaactgtagttaattttgttggatccttgtattcagctttgtgtcggtggagtgaagctttgaaattggattttgaagcaattttttttaactaaaaatagatattcaagttttcatcacttccattttaagttatgtgaactctcctgattgatataataaattgccagtttcagtttatgagttctggtttatatagttggatcatgtgttgaagtgatgtgagcataaagaaaacatacattacatgttcgagaaacgtcgattccagtagttgcaaatgagttgttacgttacgtctatttgatttcaagctttgcctcttgagtgtggagctcaaaataaattgttaatggcttttgctgcataattttgcaaagaaaatatggaagatgagatttatccctacgtttaatgctgaaagagaaaaccgagaatctcgattgttcagataccaaagcattcctcataacgtctcgacgaatttagtctggaagattctttcatcgaaagtcaatctttaggcctccttttgaaaatcctaccttctaatccactttcttaccgacagatcacaaatagatagttcgcgacttccctacagttgactagctagcatgattttcttgttaccgaatctctatttgtgtattgtttctaacacgaaattatttattcaggttt

SEQ ID NO: 102596 - DNA, 686 bp, Mimulus guttatus
  Intron number 4 from transcript mgv1a001682m (locus mgv1a0 01682m.g) derived from phytozome v7.0 (chr-ID scaffold_4; pos 3867538 to 3868223)
cattcaactcttcacattgtaataagtgagtctatatatatacatatatgatttttatatccacccttaattcagttaatgaaactatttgaatcaccattacttttttgcaatttcatggatacagttgttatttatctatcttttttatggaataaacttccaggtatgtttttatttatttattttttgggaaaaaaaacagcaaaaaaaaaaagaaaagaaaaaaaagaagcatcaattggccatgcatactgtcctacatcgcatgtcgtgacatgcatcacttagttggcttaatttgctgtttcgattatttccgatgttgtctatttcgatcaaacaacaaatttatttattattttttgtcatttactattttccaaatgccatcttgtgaacttgtctgaccaaacattatattggcccgtccttttcatccatatatcaactccctctgcctagtaacaaattaacaatactagttggtcaaaattcaaaaagaaaaattggtcaattattctaaatactaggaattttacatttgattttttttttctaaataagatgatgaaaatccaaaatagagactgaaatcaaccgcaaattaaaatttcaactgaatttgaatctcgtgacgttttttggcaggaaaataattggggcccgatattacataaagggct

SEQ ID NO: 102597 - DNA, 417 bp, Mimulus guttatus
  Intron number 1 from transcript mgv1a026527m (locus mgv1a0 26527m.g) derived from phytozome v7.0 (chr-ID scaffold_195 ; pos 448204 to 448620 reverse strand)
cgggtgctaaaacttctctagttgttcgtagcccggtgagtacatatatactatgcaaaaataaattcaaagtttattgcgatcagtattcttgtgttatatcgaattgctacaaaattattccatgttaatttattggcatgatttcgtttttttagcaatttgtatccctgattaggtgttgcatgctaaaaaaaattgaatcacaagggtctttttgctaataaaataatataaaataacatgaggtagctttctagcagttcgatataagacaaagggtactaattgcaataaacctgaataatttacttttcttttcttgaattttaggacattaattaattaagttattcatttattgatttatttaatttttcgaacgttattttttaggtgcactttctaacagaaggg

SEQ ID NO: 102598 - DNA, 401 bp, Mimulus guttatus
  Intron number 1 from transcript mgv1a005888m (locus mgv1a0 05888m.g) derived from phytozome v7.0 (chr-ID scaffold_18; pos 353287 to 353687 reverse strand)
ctttccctcatctcagtataaaggacacccccattgtacgtatgcttaaaatagttgtacacttgtgttttctctttgctattatataattttgtcgatttataattattccactgaaaatgtgtgtattaaggttaattttctttcaggttcagtcttctgtttcatgattaagactgttaattaaatagattctcacaatctttgtcccttggttaaggatagtagcatattcacttgtaactatagagccacaatctttgactttcatgcttaaaccatgtataattgtttgggaggttgttgtttcctatttctactgttttgtttttcttattaattcatcgatattttgatatattataggaagcttcgtcggcgcagtacatactgcaacagta

SEQ ID NO: 102599 - DNA, 629 bp, Mimulus guttatus
  Intron number 1 from transcript mgv1a011015m (locus mgv1a0 11015m.g) derived from phytozome v7.0 (chr-ID scaffold_32; pos 110110 to 110738 reverse strand)
atagagctcttctaagggtaaaatattcatcattcatatacatatatatgtgtgtgtgtgtgtgtttcagtgtgtgtatactagcataggaatttctaattaatatttattgggatattgaaatacaggtggagcaagtgatgaaggagcagaatatgttggatgtgtttgttgtgttggaaggctattgccatcttcttattgagagggttcatctttttgaacatgaaaagtttgttttctttctttttcttttctcttatatataaaaattgaattgaattgaattgattattttgctcctcttcatatataaaaattgtgtcttggttctttttgtttttgggatataataaatagagtttgccctgaggagttgagagaagctgtatcaactttgattttcgcatccactagatgcggcgaattccctgaacttcaagagattcgtgccattttcgcctcccgtttcggtaaagaattcgcttctcgagctgtcgaattacgcaatcattgtggcgttaaccctaaggtaaatatatattcatcactctttttaattttttttttttgacatgatatgtaatacatctttttatcggcagatcatacaaaagctgtctactaga

SEQ ID NO: 102600 - DNA, 828 bp, Mimulus guttatus
  Intron number 2 from transcript mgv1a020830m (locus mgv1a0 20830m.g) derived from phytozome v7.0 (chr-ID scaffold_313 ; pos 307 to 1134)
ggacccgtcttgctcaggtttgtttcgatttatacaaaaacccggtctcaaaaaaatcaaatggaaattcatcccaataaattgaatatagggcaaattacggccactccctgaggtatgaccaaattacgaaaaaaaaaaacccctcttgtttgggtaattacagccaccccctccttttaaatatttttacataagaattatgtaattcggttatttaccgaaccaaatcgtatattcagttcggtaaacggtatgaaatgttggtgcaccgaaatttagtatcggttttaccgatttaagtttaacatccctaaatttatgtgtggaggggtttttccgtaagataatatagagggtagctgtaattacccaaacaggagggggttttcgtaatttgaccataactcagaggtggccataatttgtcctttaatatataactaaacattgcgcaatgccttgttcagtgattatctttttcgtatctgctttgagctcaacactattgtaaaaaaatatttgaacaaaaatacgaataagaacattgctttatttctcaaattcttcgcccaaaatactttagacataattaaactgctacacacttattgttccctccccgaaaacaacaaacaaacaaacacccattgacccattctacaaaaaaatacctctctctagaaatctaccctataaaatgtaagcaaaacgttcctatagtatctatatgaatatctttttggatgattgagcgcgacatgtatattgtcttttctctcaaaatttgaaggcacgccgcatcgggtttgagttttctaagggtgc

SEQ ID NO: 102601 - DNA, 293 bp, Mimulus guttatus
  Intron number 2 from transcript mgv1a015325m (locus mgv1a0 15325m.g) derived from phytozome v7.0 (chr-ID scaffold_113 ; pos 826685 to 826977 reverse strand)
cccctctctggagaggcggtccagctggacccaaggtatatttaatttttaatttattattaattatttatatatatgtttttacacacagtgggacgtattgtgtgtgtagatcttgtgtacttattaattgcatcttttaataactcacgtgacatatctgtgtttgacaaatgttgtttaggacccatttaatttgattgattcctttttttcttttcaatgatttgattggcacaaaacatttaattttaaatttaattattttaatttcttgatgtgctgcagtcact

SEQ ID NO: 102602 - DNA, 877 bp, Mimulus guttatus
  Intron number 1 from transcript mgv1a026867m (locus mgv1a0 26867m.g) derived from phytozome v7.0 (chr-ID scaffold_14; pos 2038737 to 2039613)
tccgtcataaatcccaaatcatcagaggtagttttactaattttaggcgttttgttctttcttttcttcttcttctgtgaaaatgttacgattaattaattcgcctctgcgattctgtgcggcgcaaatatttagggttggaaaactcaaattatgagtatgataattttttattttttatttctattggagtgaatcacagttcaattacgaatccaatacaagttatacaactatcagcaaccagttgattacaacagtgttgtaacagcaatttttttttacgcgttgactttttatcttgaatgaaattcatgaggtatatgtgtatctatatcagtctttgggtgattgtcatgcataattcttgttgtggaccaagtcatgcaattataagtacgatgcttaagctggtttcaactttgtaatgtaatgtaaaaaacccaacttgaatgttcttaatatattgacttctaaccaaacaatggaaaatcattgtaattatcaggacagctcttagcaatatctaaaggactatctagtttcaagaatcttttgtcaatacggagtatgtttataatgattacttacctcttaatgaaagctattactcatatccgtctacctacaaagtgttcaaaaaactcattaagatgtgtttctgatttaatagtgcctccgatgatgtttttacagagtcttcagttctatttggtcttactagatttgactctttgattctgacctataatataactgttgctaagacctgtttttcacttaaaacgttggaacttcattatgcttttaagaaattttccgaataacactattttctttctctccagcttttgaaggtgtttcagttgtattttat

SEQ ID NO: 102603 - DNA, 550 bp, Mimulus guttatus
  Intron number 3 from transcript mgv1a000387m (locus mgv1a0 00387m.g) derived from phytozome v7.0 (chr-ID scaffold_17; pos 483175 to 483724 reverse strand)
gttactacttcattccagtttacgacaaggtcgtctattcgatacttttaccccttctattattgatgctttgatctgcattggtttgattttcttgaatctgttttttttttgtttggttttaataacatccttattcacgagtcatagttaaatgaaaaagtcgtaagtttatggactaaaccctaaatcacttcaaaaagatatattgagtatgaaagtattgagtaagggtgaaattcgatcaatttccgttgtatacttccacaattgtgcatttctagttcaaaagctatgtttttcatgcctagattaactctatataattgaaacagttgttatagctggagcatatgataattgattttgaagtcaacttgtaacgttttggtttcacttgcaagttgcattatttactgtggagtgttatatcaatgagaagttggattaactgatcattgatcaaatgtatctcttggtgatcttcctgtagtaacattcatctcgtttcattttgtaaatatgcttttaccttggttgcagggttctt

SEQ ID NO: 102604 - DNA, 1010 bp, Mimulus guttatus
  Intron number 1 from transcript mgv1a012572m (locus mgv1a0 12572m.g) derived from phytozome v7.0 (chr-ID scaffold_15; pos 162523 to 163532 reverse strand)
ttaacactcctccaattgctccgccatcatctccggtaactcctccgcccctaaccaccaccaccaccacgaccgctctccttctctctctcaaatgtatagtcacgtgacgtgattgatccccgacctatttttaattctcatcttcctaatgcacacacacttgcaactgcataatcttcaggcgtgcattgtgtgaatgctttcctaatctactatgttcaatttcttcttcatctcttcattcactgcatttgatgagattcatatttctctgtttttttttttttttcttggattttgttttgttctgtggtgtcgctttgggaatttgggaattgattgaagttaatttccagtccgcacaattttacatcttcagttgaattgattctaggtcatttatttcttcatacattcaatcctttctaattgttcgaaatctgcctgaatttactctgtgttatgaggaaactaatgatctagatgtatagttaaatatttgctaattgcgtttttatgaatagttacttcaatttttcatcgtaaatcaaatatgaatttttcgtatattcctcacaaccaaacataaccaccagcattggtttttggctggattgtaggtaaagacgaacgagatcagtttttctgttcttgcatttctttttccgaaatatattttgcttgaaatcagactttctttagcaaattactttcgacattcgaaacttgcattcgctgatgttgaagaattagtttccgaattagttttgttgtttaagatgatctcagtgactggttaccctaatctgttttatggttcatatctattgttttaatctcgattcagctgtaggaatgcctcacggtgttgcattatttcacttatggttcgattgtgtattcaagtatatgacattcaaatgagtaatcgaatttattcaatcccatttgctcttttttttgctgctgcaggtaagtgctcgaggtcaacacttgataaacgcagt

SEQ ID NO: 102605 - DNA, 711 bp, Mimulus guttatus
  Intron number 1 from transcript mgv1a003050m (locus mgv1a0 03050m.g) derived from phytozome v7.0 (chr-ID scaffold_69; pos 637887 to 638597 reverse strand)
gcaactctgtgaggtatggagtttttttttttttttcttaatttttttttattgcatgtagtagttattttgttgtctttttatgttcttgtctgaaggaaattttacaactgttttgtgttttgtatcactgtattcatatggaaattatgcttttttcttgcaggattaatttgatttttgttgttgttattttcttgataacttatggtccactatataattagtagagtaattaattattattgaaacaaagtccctaatgatgtaaatctatagttaattgagttccacaaattatccattaaattatttattatatgattaaaagggcccattgtaactgtaaagtgtaatcccaacatgatctaaaggttttaaatatagatttatttcaattatttaaagaaaattaagcggctttttttttttttttttttttttcatttttgatgattatcgtttttgtgtactcatagattagcttttgatcttgagattattataggataggtagtaaacttgcacatgcattgaaatttattttaaggttatttgttcgaacattttccttcaagacttaagaattcgattttttatttatttattaatttttgtatattgtcttaatggaacttctattcgtataataccttgtgtaacttgattgacctgttctgttcaggtacatatcctctgaattggcaaccg

SEQ ID NO: 102606 - DNA, 500 bp, Mimulus guttatus
  Intron number 1 from transcript mgv1a024394m (locus mgv1a0 24394m.g) derived from phytozome v7.0 (chr-ID scaffold_26; pos 2006651 to 2007150 reverse strand)
attcacaaacggccgtaacacagctgatattcttggttctgtctctatttgatcattgtgtgtttgtgtgtgtgaatctacatgcatagtgttttttcttcctaatcgatttcgaatttcaagaaatttattgggtttattgcattcaacaccctatatttactttaattgttaaaaaaatctccctattagtaatattaacaaaaaaaccctcatgtgattcatattttaattagcggacgaccgtctaaaataaccccacttttagggggctagatgctaaaagatgcattatagggagggtatttttggtaatatcaataatacaatgagtttttttaacaaattcgatataacacagggatactaaatgcaataaactctctgacatttattattgcattatcattctctattttcatgttgttaattcgtgctaacatgaactcaaaattaaaattgcagctcaacttctcggtttcaactcaagcgttccaccg

SEQ ID NO: 102607 - DNA, 1019 bp, Mimulus guttatus
  Intron number 1 from transcript mgv1a016923m (locus mgv1a0 16923m.g) derived from phytozome v7.0 (chr-ID scaffold_126 ; pos 674509 to 675527)
ccgtcgcctccctccgcgttttcggtgtccgatcggtcagattttattgattattacttgttagctcacatgatcctagggttttgtggcatcaccaattttataggtgttaaatttgagatttttatataatcacagcaattaaaattagggttagctcataagaaaataatataagcatattcattatttaaaaataaaaaatatatatatttttagttgtcgatcggatttgaataagagtattgatagtttcttcgaagtgagatcattcattgagatggttcgagaacaaccggtgtagctcgaattctcatacattaagataaccatatttatcctcgaaaaaggccatttggttgccaagataagccaagattaactaaatagttggacttaatttgatgtttggtatcccaataaattgccgggtcgacctgctaaaattatgtaatcatggcttatcttgccttctagtgtgttttttttgttggacgtcgcgagctccaataaaataattgcgtttcattagactatttaatcttatcttggctaatcttatcttgccaaccaaacagggtctgagttatgaatttagaaaacctctaaaatcttgtagaattaagatttgaaacaataagatttgaactaagatttgaaacaacggtgtcaatttcaacagaaccccgtttcagcaaattatataggatgcaaaggaaacggaaatgatgatttaaagttgccccgttttcctctgccctgtatttctctttgttatgaattacaattttttttttgagatttccgtatgccgttttcgaagaagctattttgatccttttttcctcgtcaaatccggctattgttatcaattatcattaatcaaagagaaatgttgtcgattacataaattcgattgttctttgttgtgcataatcagcatctaatcgttccttatttgttctgctcgaataatttgatgatcgtgtttgctcgataataatacgtgcaggtggaag

SEQ ID NO: 102608 - DNA, 1039 bp, Mimulus guttatus
  Intron number 1 from transcript mgv1a023545m (locus mgv1a0 23545m.g) derived from phytozome v7.0 (chr-ID scaffold_66; pos 105632 to 106670 reverse strand)
gcagctggcgtgcacttccttctaaagctggtattttttttttcttttttctttttttaaatttatttttataaaaacacctgtcttaattaattaggtttaagaaaaccttcaccagacttccatgtatgtgttctttttcttgcacgaaattccgttttccgttaattatgggagggtgttatttcatgcaatttttttttttttttttgaatagattttttctataacgcatgcaatagggatttgtgtaaaatttatttatttattttaagactcgattttttttttaaattatgtcgaaataacacatttattcagttttaatatgaaaattatatttcttgtaggggtgaaagtcagaacggaaattttccatttccaattcattagaacgattttttttttcatttcgatttccaaaattttgattccatatatttcccaaaacaattgcatcagaattggaaactttcaaatttaaaaaaatattttttgatacaattgtaatttatgaatgtatttcaaaaaaacaaaataaaaaatatatatttataatttcaaaattattatacatttatataatctatcatgaattaatgtattatctatatgtaaaaggagtataaataacttgaataatcacttagcttgcatcctctttctattttctttttatattttgattgaataaataaatctgttcttcttgatattcaaaaaatatttcgaattttaaatgaacatattaatattgcataaatccacttctgttgcaagaaattaaacacatgacaccctctcttacaaaaacagttgcatgaaatcctctccacagttaacgacgttagtgattaacggacaaagatatcatttcgtgcaagaaaagatatataaaacactccaatttcgtgcaggtttttaatgcaaaatataatttatttgtttaaaatgaattatggaactatttttaatgcttttattggtgttgtacattaattaattaattaattaattaattaatcgtagggctccgaag

SEQ ID NO: 102609 - DNA, 739 bp, Mimulus guttatus
  Intron number 1 from transcript mgv1a000340m (locus mgv1a0 00340m.g) derived from phytozome v7.0 (chr-ID scaffold_168 ; pos 396471 to 397209)
aagtgcttcccctgtcaggttgttggaatgattcaagggtgttgattagtgtttttttcttagttgaatgctgttgtgttaagtggctggaaatactttttttgctaaattattgtgtgtctgtgtggctgcactgaagtttgataggattgaaggtttctttactgagaatgtcgttgcgcttaacgtttgattacttagaaaactttaggaatgcttatatttggattccattgaggaagtgtttatagtttacattttcttgattttaaattgtctgatggaaggctctagtatatgcgtaattgcatatgatacctaaatataattggtaaacttgggaattttttgttcttatcgtcagatggagttgcgttctacgtggttgattgtaggaatagaaaagtgctcacggtatttatataaatgatacagtagccgtttttatgatatcccacaaatataatttgaattgatcattctacagagtggcttctctgggttctgggattgaagtaactcgtataacatatcatgaaactcagagatgattgaaatatgtcgtttctgctatttatgggaagggtttattttgtacaagtcccctttaataatgttctaggtttgcgttaatgatattcgtacagtcttctccttatagttcttcttgctgtttttcttttgacatttaccaaataccacaggtctgtacctttggatctgtacccttaaagactta

SEQ ID NO: 102610 - DNA, 732 bp, Mimulus guttatus
  Intron number 2 from transcript mgv1a010897m (locus mgv1a0 10897m.g) derived from phytozome v7.0 (chr-ID scaffold_22; pos 1300615 to 1301346 reverse strand)
gagggagctgttggtgttattcctactgatactgtgtatgttagatttttttatttaattttttctcttcttttttgctcagttcaattttatggccttggttcgggtgtttaaatttttttacatgtacatagaaaattgtagagctggccggaaattatgtggtaaggcatctggccttcttcgttatcagaataaatgctcttaccttaaacctgttagggttcttcctttactttggatgacaaccttttcacttgtatttttaagtgagactataactaataatagcatgtgcttcagtttttttctgggagaatcactctgaaatcaaattacataggatcggagttagtacagagtggctagacgtgtattgtcgtgatcttagaaataaacagaggattcaatacttgagccttaccttcgggggctatgaattggtatattaatagaatatacatctggtataagtaatacgtatctgattgaccggacatcgttgaaattggagaaattaatccaacatctgaggtgtttatattaatagaatattatttcctttttgaggtaaaattggtagaaccagattgaggtatcaattcctattggtcgttgaatttatatctttgcattgtgtagagagctcaggttttgagcagaacgaaacctgaaaagggaaaggggctagaatctcatgattagcttatgtatttttctttggtaataggt

SEQ ID NO: 102611 - DNA, 762 bp, Mimulus guttatus
  Intron number 1 from transcript mgv1a002898m (locus mgv1a0 02898m.g) derived from phytozome v7.0 (chr-ID scaffold_33; pos 1139408 to 1140169 reverse strand)
atattgctcttatcaagagagtacttcctaaggaggtacaattttcaacttttttttttttttttttttttttttttagggcttgtagtagttatagacttagtagtgtcatagacattctactcaaagtcatgctagtatagtgacgagtccaggaattgtttatagggtgggcttagcaggggtttgggggcagcgccctcgagtaaaaaatgaataggaggagaaaaaatttaagaactttttttacatattttgaattttaggtggaataaataataaaaatcaggtgagctaaataataatataggtataatataatagaaaaaatagtaattgaggggggcttgagtcttccagctagccatgggttagattcgccatgtgcgcgtaaaagcaacaagtccaaaaatttgttagagagagtgcttaaatcttaaatttataagcgcgaataagtagtggtccaaaaataattaggattttaatttgcataaagaaaaaaagaaaagaaatattttaggatttttttttgtttttgcattaatttggattttcggtagttttaataataaaaatagattgggtaaacaaaattatacatataatataatggacaaaaaattaattgaggtggagttcatccttgccaaatggtgggtgtgtgtaatatactgtgcttgtgttgttaaatagttacatataatgtgttgttaatataatttacatatattgattgcgttttgcaggttgcggtaggca

SEQ ID NO: 102612 - DNA, 644 bp, Mimulus guttatus
  Intron number 2 from transcript mgv1a009491m (locus mgv1a0 09491m.g) derived from phytozome v7.0 (chr-ID scaffold_17; pos 1400607 to 1401250)
caattctcgcggaggataagcacttgcctatgtacgtatttttcgtttttgattttaaatctttgttctgaatgtttttatggtgatgtaccagtaactgtagggttattatccatcattaaattttgtacatattattgcagcaatttcaaaatatgcaatggtaaagattacttttttttagtgttgttgagttgctattttcttgttcactattacttaattaaatcgagaagtggtggatggtgatgcctgttaagttacaatcagtctggttttgacattatgttcatcttctgtcgaggagattaatttggtgtctcgttttctcctttagatcacaagttccaaaaacaggttttttctagcttgataatattatccaagtaacaactggctattttaataatttgaaatactataaaactactgaatagtatgagaagttcagttaattgcttttgtattatggcaagagtttttttttgaaatagcaagagttttgattaatgaggtgaaagaaccatgaatctagatataagactatatatcgagcaaggtaatgcatgcgatgtctatttctaacaatgattgttcatatcatttccggatgtaattctcggtcaatcgatttctcaggtacg

SEQ ID NO: 102613 - DNA, 633 bp, Mimulus guttatus; identical to SEQ ID NO: 100986
  Intron number 1 from transcript mgv1a000185m (locus mgv1a0 00186m.g) derived from phytozome v7.0 (chr-ID scaffold_39; pos 744739 to 745371 reverse strand)

SEQ ID NO: 102614 - DNA, 592 bp, Mimulus guttatus
  Intron number 1 from transcript mgv1a003525m (locus mgv1a0 03525m.g) derived from phytozome v7.0 (chr-ID scaffold_1; pos 2753857 to 2754448)
accccctcgatttagtctggctcgacaccaccaaagtctgtaatcatttcatatatatatattttttggaatcatttttctaattgcagtatgagtttttgttttccggcacttttttgttcagttgtgcgtacataattttcttctgatctttgtagctttgctatggtaccgtaatacgcacaaaatagtatatatccatggagtatttaatgcagttgacagaaggaatttaatgctaccttatttctcctataatgggtttgtaggtttgcttgttccagttcatgagccaatttgactcatttaattttaatgcattagctaccaattagtcaatctatttgcagaagatttgaatgattaagatatttgtttttttgttaatgcacagtacgaatcaatctgacaatatattcagtaaggttgtacatatttatgttggatagtagcaatgatgaactcagatgttttagtgtttggtgtatatttatattgtagttcgttggatccttttattctggttaatttttatggtatgaacgtgcattcttcagcttctgtctgccgtaaattgctggctgaagtgtat

SEQ ID NO: 102615 - DNA, 628 bp, Mimulus guttatus
  Intron number 3 from transcript mgv1a003097m (locus mgv1a0 03097m.g) derived from phytozome v7.0 (chr-ID scaffold_335 ; pos 74784 to 75411)
ggtcaagaggaaatagccattccggtccattctgagtgcgttttatgttctcttgctatgttttccccttattgaccttgactataatgttattgtggcccgaatatttttcatcttatgcattttattaatggttttttgagttttatcgaaccgcctcgtaagaggtgtaagaattatgtcctcatctttcgtgagtctagcttccactttgcgcttgataacttgtccaaacatcatatatatatatgaatacatatgtatgtcatgtgtactttttaatcggataatgcattctgtaggagatttgttttttacctacttccacatttacttgaaaatgaattatttaaacacgtccttgaaacactggccaatttatcaacacataaaatgttggcatgtgtttcaatgatcagggtaaaaaattcaattaccttaatttagtcatcaaagggaagaaattccagtcatatgaacaatatgaaggatttttatgatgtctataatctatatatatacttgcttaaagtttaattcctatttattaccaaacactgtggtgataacttaaattttatcactctttgcagtgttgcagcagcttgtgcagcgcaccctacagctg

SEQ ID NO: 102616 - DNA, 839 bp, Mimulus guttatus
  Intron number 1 from transcript mgv1a010032m (locus mgv1a0 10032m.g) derived from phytozome v7.0 (chr-ID scaffold_290 ; pos 74518 to 75356 reverse strand)
aggctacgccgtcaaagcatctgttcgtgatccccgtcagtaacccctttttctctcacacctctcaatttttctcttcattgtttgatgttttatatgcccttcgatcgagacgagagatgcgtcgatttgattcctttttttctatccattttcgtgtttgattgatttgttcactgtgttgtttcatttggtgatttcggattcaattatgtaaaaatctgcttaattagttgaattgaaatggtgttcaacatcgcccatgcaactatggaaaatattttttaattaaatctaattgggtaaaaaagttggccatctcccatggcgtttattgttctatcaccttcaaatgggggtcactaactgcaacctggttgttgaatttttgataattttgatcgactagggcctcgtttggttgggaagattagccactattaactaaaaaataggacttcgtttgatgtttggtatcccgaataacttgtcgcgatcgaccagcaaatattatgttatcacggattatcttgctaatcttttcttttagggagattttttgttggacgtcccggagtccgataaaataattgagttttcattagattatttaatcttatcttgccgaccaaataaggcctaaatcaatgtgattttcattatcattttttgctaggagatttaatttacaggatagtcctgggaatgaatgtatagctgtaaaagaaattactatatccaactggtaaaatattaaaggtgataaagtggttggttgtatttgttcgtttttcgctcctgaaatttactttttattgaagatatggaataatgtgcag

SEQ ID NO: 102617 - DNA, 802 bp, Mimulus guttatus
  Intron number 1 from transcript mgv11b018884m (locus mgv11 b018884m.g) derived from phytozome v7.0 (chr-ID scaffold_1 1; pos 2105075 to 2105876 reverse strand)
cccacggccgctactcctcaactgctccaggtatttactctttctcttagattctctctccttcttcgtatacaaaattccttaatgtgattttatacacctacagttcaattttgataaattatctccataattgtgaattccacggatttccgggtcaatttgatatcgaagcatttttcatgtgttaaacagtccaattagttcagactaaattatgtcatcattcgttggaaagttgggaatttttctgtattattttttattctgccgtgcattttcatacttggacattgataatgcactgtctctccgatttggtgagaatagagatatactttcgtgatcgccactcccatatggtgagaatagcaatttggcatgcctgttaatttttatcgggccttatcgaacttttaccatgtaattcgcaagtttatgtggattagggctcctacatatgtggcttgtaaatagattccttcttcgtttttgaatttgtagatcagattattttcgacattcgagtgctgcctgtagaatgttatcttttcagataaaaaaaaaatgaattatgcatttgatctgatgttgagttgaaacctacaatttcaggagtactggagagagcaatagcttatctagagctcctcttccaagggagtaagtgccttctctatatgtatatattcgattaacgggaaatacatatttaattctgaattcacgtgaatcactaaacggtacattttccttgttaaacctaggttgggaagcccgagcagtgaggtgcatcaggtgt

SEQ ID NO: 102618 - DNA, 646 bp, Mimulus guttatus
  Intron number 1 from transcript mgv1a015766m (locus mgv1a0 15766m.g) derived from phytozome v7.0 (chr-ID scaffold_50; pos 385257 to 385902)
tttattgccattccggccgctatagcggcgttccggtgagccatgtttgttacactgaatgttgcctgccacctggtgaattctggcaaaatgcaatgtaaatttgattttgtattttttccaagagcaaatcaacggtcaatttcttgccctgtgggtgctatttttgtcagattaaaaattatgaagtttttgaatatggttgccactggcatactcaattatgaatattaatcatttatgcttatttgattttgtgatggtatattccatttttccaaaattatttgtttgtagaggctatgaagagtgtaatttgaaattgataattttcggttagggtcgaccttgccgattttggatcgacatagtcatcaagaatgttagtcatcagtatgtttaaattcaatttcatttgctggttgatttgcatatgtaacattaaaaaatcattggtatataatacatgaaaacctataagccatatgcgaagatgataaaatatatagtatttcatcgagaattatgcaccttttaaattctttcaactcttagccgcgcgagaagaggaaagaaaactcattttgtcgtataaatgactatttatacagattaggtagctgagccagttggagaaggggaaata

SEQ ID NO: 102619 - DNA, 473 bp, Mimulus guttatus
  Intron number 1 from transcript mgv1a020777m (locus mgv1a0 20777m.g) derived from phytozome v7.0 (chr-ID scaffold_5; pos 3516812 to 3517284 reverse strand)
taatcagatttctggccattacctttattcgcaaggtatatattattttttacgggaaaagtacagtttgcactgtcatgtttgcaccgattttgtattttggtccctcgtgcacaaaaatacacatttgattcctcatatttaaaaaaaaaacacttttagtcatttccgttaatttttcgttagtactaacggaatcaagtgtttgccactaaaagtgttaagctattgaaacttgatggaccaaatgtgttttttatgaacatgatggaccaaatgtgaaatcggtgcaaacaagagggatgaaaattgtaatttccccttatctttatctttctttttgtttcttctttttttttttcttgttaattagtttgttttagtcctatagagtagtttctttaaattgtcaaggactactttttttttatttataatattatttggcaggaataacaagacgtttccaaaca

SEQ ID NO: 102620 - DNA, 544 bp, Mimulus guttatus
  Intron number 1 from transcript mgv1a008340m (locus mgv1a0 08340m.g) derived from phytozome v7.0 (chr-ID scaffold_148 ; pos 279254 to 279797 reverse strand)
ccgccaccgttgaaaccatagccaatctcttgcaggtatttacttgaaagagtagatttggtccttttagttgtctaatttgatttttatttcttaagtttgtgaagatttacttgtgtatatgttaatgcatgccttaattatacccaaagattgcacctttgtgatgttttcgcctttaatttggtaatgtaggtctaattatacatgcttatttatctaccatgtgtgtatgtgttacactagttcttgttccataactttgtttcgattaggacaaggtttactcgtctgttttcgtttatcgttgaacacacttctgttatagtttgtgtttcaatgctctgctttgtccggatgttgaccagttcgtgtttttagttgattctctattatctttttcatcttcttgatagttgtctcgccttctctttcggtgcaaaaaatgttaaatttgcaccctctatccgaatttcaggttttctttaatcgaatacgctgatctccatttgtatgttaatgaaacaggaggttggttgcaatc

SEQ ID NO: 102621 - DNA, 740 bp, Mimulus guttatus
  Intron number 1 from transcript mgv1a014286m (locus mgv1a0 14286m.g) derived from phytozome v7.0 (chr-ID scaffold_54; pos 21814 to 22553)
tccatctccatcgacatttacaacgccggatccgagtattcctctctctctctctctctctctctctctctctctctctctctctctctctctctctctctctctctctctctctctctctctcattttcctttggtttttggttatggtgtttatttgttgaatttctgctgaaatttttgtttgtttgattatctattcacacaattctcgttaattgcattactttctgttaattatgttttttttttattaaatctgttgatcattgaagataaaagagcgttaatcagtgttcattgcatgttttaggtttcaattttggacgaattcttctcattttgattttgatttgcaattggacttaaaatgaaaaaaatggaattaaattatagcatgttgaaaatttggaattattttgatttgcaaatctctttttggtaaattgtgaaagcaaattagtatatctgatttgatggtaccctatcatttattgattgtttatttatccataatcgaatctgtgattaagcagaacatgaaatcggatttattcatctttttgtaagtctgatttctgcaatttgatccaaatacactaatttcatttgattcagttcataaatatttccactacattttgaaaatctttggatgcatatcctttttagcatatgcgcacttgtttgaaatatttttcgaaggaaagtaacaatttgttatgattttcagaaccgcat

SEQ ID NO: 102622 - DNA, 418 bp, Mimulus guttatus
  Intron number 1 from transcript mgv1a024589m (locus mgv1a0 24589m.g) derived from phytozome v7.0 (chr-ID scaffold_92; pos 582733 to 583150)
gttccattgcggaaataaaaattcccggttagttggtctcctttcctttgaaatttttctatctctttgctgctcaagctagggaggaagttggaaaacttacattcaaaagaaaattggactcgacggatgatggttctataaattattgaaaagaaaaacttagctattctttaccctgttatattgtttcatggattctctcttatgctatggaaagtgccagagcatcgaatttatttcataaacttaatacaaacttctctagttgtgcatcttctcacattttaattcaagatgttgttccgattggtgtttatatctgaagaagttttcatgaactgagaaatttcctgagactattatgtatagagagaacaaggcctgaatcagttgatcaatgttttgctctatgcag

SEQ ID NO: 102623 - DNA, 805 bp, Mimulus guttatus
  Intron number 2 from transcript mgv1a017305m (locus mgv1a0 17305m.g) derived from phytozome v7.0 (chr-ID scaffold_245 ; pos 282103 to 282907)
ggagttgcttttctctgggcttcatatctgaataggtatgttgatgtacatgaacttgcttagtgtatttaacggtttctttcttgccctgtttctttttttttttttgtttgtttgatctgctttttgattgtgcttaatgtagttgaataggatgcatgatggggtttgattaaaaatatatttatttttttctcaatcaccttggatatggaattcggtacagcttaactttatgaaatggtattgacccttcttcagattaacaaacttcctacttatattgcaatttttttaaaataccttaatcatgtgaagcatagtttgtcattgaagataacattttattcgcccactttaatacacgtgacttctcagaaaacaacgtctgcttgcaacagtaaatctttttttctcttttcaaattgttcgttcgtatccaagttgctggtttcacgagatacatacacacacacacacacacacacatatatatatatatatatatatatatatatatatatatatattggtttcagaattcgctgcctttgtttggtgcaagtgcagtaagtaactaacgcaagtgtttaatgccaagtttttcaaagtttcaatcagcttgagaatcacgaccttcaaagatttctcagctctcacatccatgttaaaagcttatgtgaatttcttttccaagataatggcaactattttcgtagtcccttgtttttcagtttgatgtaattttctctggtttttttgcgtggcagaaaaaagttcgactggatttgcgtttcataagcaa

SEQ ID NO: 102624 - DNA, 566 bp, Mimulus guttatus
  Intron number 1 from transcript mgv1a001853m (locus mgv1a0 01853m.g) derived from phytozome v7.0 (chr-ID scaffold_51; pos 1340361 to 1340926 reverse strand)
ttcgatcttattctttgccggatcataaaagacaggtcagattgcatattcatcttcatgattatttttagtagttcaattattagggaatattcttaaattattgttcatcgctagtaggtgtagcaggataattctgattgttgatgacctttttgctgatttgtttttgttcactttttttctttttctgggtgacaatgtgtaaagatttgatgttaactgttctgtatactactttagtttcaagttgagtagcaaatttttcgatccagcggaacgaaaagtgatttttttaacccacctttttccgctggaaaaagcagacgctcaaaaagctgctttaacttgggcaataattcgattatctcttgactaaatcttgattaaattaatattctgtgtttgctatttacttctacttccaataattttaactttgctttcggcagattattcagtatgcataagttgatgtataaactactaaaattcggatgtttattttgttatgcaatgacccaataacagtgggaataagaagaatttgaagcgttcgagatatc

SEQ ID NO: 102625 - DNA, 675 bp, Mimulus guttatus
  Intron number 1 from transcript mgv1a007337m (locus mgv1a0 07337m.g) derived from phytozome v7.0 (chr-ID scaffold_36; pos 533627 to 534301)
gccgcctgtcagattgccgataccaaatcctccgagtatgtttttttttttttttaaattttcaattgattttcctttttcttcagtaattatgttgtttttgaggtttagattatgcttccaattgagtcttttcacttgaaatttctaggtttgtgcaatagttttaagttacaaatagttttttttggggcaaattacggccacccgtgaagtatggccaaattacgaaaaaatccctcatgtttgggtaattacggccacccctccttttaaatatttttacgtaaaatttatgtaatttggttatttaccgaaccgaattgtatattcagttcgctaaatggtattaaatgttggcggaccaaaatttcggttcggttttatcgatttaacattcctaaatttacctctggaagggtatttttgtaagataatacatagttgatgggtgactctaattacccaaaacaggatggggttttcataatttgactataactcaagggtggccgtaatttgcccctttttgttattattattattggtgttaaatttgatttaatttactatatgttgaattaaatttataaactctatgttcaatttgatttaatttacttttttccttaacaattagggttcaagccttgattttgtcacctacaagggaat

SEQ ID NO: 102626 - DNA, 988 bp, Mimulus guttatus
  Intron number 1 from transcript mgv1a004155m (locus mgv1a0 04155m.g) derived from phytozome v7.0 (chr-ID scaffold_76; pos 934200 to 935187)
gggattaaccaaaaccccttgtctccttctaattcgtaagcttctcctcccttcccctctcatactgaacaaaataaacaataaatatttcagttttgcttttcatatccttgttttttctcttttttgtttcaatatttgagtttgattaatgatgtgctgggggggaaataaatccgctacttgaaggtgaatgttagaatcttcgaaaaggaaattgttttgtggttgacatatttactaggattggatttgttagcgtgagcatatgtagacgcaaggatttactatattagttaacgggaagaagactgattatgtgactggtgagaatttacttaccgagaagcactgcggctattagtaatgcctttgagattgatcacgatgttaaatattaattaatttaaaccgatggatcatgattattaaatatgaattagtttaaattcttgccactactagaacggcttgaaaagtaaagggtgtcgtgaaatttctcctctacgtttggtctgccatttcattaatgttcattttgcgggtacgtacccaaaaattcttttctttggatggaattttagtgagatggaaaagttaccttgataccaatgcacgtaaacgtcgtactaatgttcgctaaatagtactaattttttttatagttgtctcgttttcctgtgttggactattaatatggctcacgtggttgaatttttactggtcgggtttgacattacctatgttagttacgtgtatgtattgtgtccaaatagtgtctcatgcatatatgcattcatatttgttttccctatattttgattgtatttgatcgtattgtgtttacatgtatatatgcatgtttactttataatatatcaaagtaaaaacattatggtgcaattactgaattctagcctctttttcatctacatgtatatatatatatgtaggactgctgctggggagaggacagtgaagaaactcc

SEQ ID NO: 102627 - DNA, 754 bp, Mimulus guttatus
  Intron number 1 from transcript mgv1a006210m (locus mgv1a0 06210m.g) derived from phytozome v7.0 (chr-ID scaffold_2; pos 2933795 to 2934548)
atcacagagaggcgacaacatcgttttccgagactgtacgctcatttctctctctctctctctctctcctcgcacgctgtgtagatcatctatccccaaattactgatgttcttgttgaaatagaagaattacgtgcattgtttcagtattgtgtttgctttcgttcgatttttcttcttcatcctttttctctaattcttcagtattgtgttgattaggacttatttctccttaccttcatttctttcgcaatttttttggggttttcgctgattgagcttactgaaggaagacgatcttagttatatgtttcttcctgaaattaattgagttaattctcttaatggtttggagatctgtaacctaaagctggcattagttcgacttccactgttgctagatatctgattgaggagattttacattggtatatatatttttggtagtttctgggatttgttaggagatttaaaggacatgcattgaaattatcctggtatcgagctttcgtataaaactatatattcaatgtttttactttggttcctctagaaatcacagagtttcctctgtaaacgaagattaggtctcaaaatgataggtcaactcaatagaaatttggcaatcacaaagtttcctttagattgttttgtaatttgttatccttttctgattggtttccatttaattttgcttccttcgaaactttatttcttcctgagtgtaatgttgcctatgatgcagatcgtagtg

SEQ ID NO: 102628 - DNA, 748 bp, Mimulus guttatus
  Intron number 1 from transcript mgv1a004765m (locus mgv1a0 04765m.g) derived from phytozome v7.0 (chr-ID scaffold_69; pos 566070 to 566817)
cgttgaccactgaaaacattaaagctgttatcttggtcagttttcttctcccctttcatgtttttctatgagttaattgcaaacaccacccccgtgaaatctctaattgccaaatgccccccatcaaagaataaataaataaacaaaactcacccttatctttcgaagcgagtccaaacctcggcccatccccactccagttataatcccctcatacgtctacaacaacatcgctggacccgatgaaataatgataaatattatatgtaaattttagaaaattacaattcagtcccctgatttatttgattaagtttttcaaaacttcaatttggtcctatagttttttgcagaaaccctggggtatttcggtccttttacaacctgtcaatggagaaaatttaaatgggacgactatgctatttacatataaaaatacatggggtatttgctaatttttttagggtaaattacaaccacccctgaggtttggttaaattacgaaaacctccctcttgtttgggtaattacaaccacgcgtcaactataaatatttttacatgtccaccattgcggtttcaaatttagtggaattttcgagataatatgaacttttgtatccgttttatatgattgacatcaaataaataaaaaatatgtacatgtcaatttctagtccatggaaaatgaattgattaaattacaagtaattcgatacgagttaatggtctggagcttaaatcaggat

SEQ ID NO: 102629 - DNA, 874 bp, Mimulus guttatus
  Intron number 1 from transcript mgv1a013580m (locus mgv1a0 13580m.g) derived from phytozome v7.0 (chr-ID scaffold_266 ; pos 59323 to 60196 reverse strand)
tttctccttatcgttcttcaggttccccttttcaggtacccatttgtataaacatgttgaatctgtatttgcatttaattaaactattagtttcaatttgcaattgcgcgtgggttttttcttacctgatttcttccatgcttaaacatctcgcctggactttgcctgcgatgaaattttgaagacgatcccaattttaagctttggggttttttttttttttttttttttttgtcagtttcaattggaaagaaattattgggtttcctttaatagtattgagatctaagccaattgtattttgtatagctatctaagaaaatcattacttataaccattgtagaactaagatctgacttgcaaatgagatgagttattggtaatgaagttgaaataaatgttgattttttagagatcaaaattgattttgatgattttcactcccattatttaatgaagtcgaaaacacattgatgatggtcgaagataatttaggttttcatggatgaagttttcgacatagttatgatgctaagatgattatcttaatgaaattgtaaccgatgtatgatgtttgatgattgaagtaaattgctgcagatctaatcttaagttaaaacataaaactcttactcttgctgctgtatgaattttattcacgattagccgtagccgaaagctactgaattccatttcttaatccgacgaattttacagagagaggagaaaaagtcgaattttgttctctgctctatcgatacgatgattagccatagcctaaagctaggatatatcaacttatcataacggattgggtttttctgctgccgattttttccgtatttttgtcagggttcagtgtagatctggaac

SEQ ID NO: 102630 - DNA, 272 bp, Mimulus guttatus
  Intron number 1 from transcript mgv1a011319m (locus mgv1a0 11319m.g) derived from phytozome v7.0 (chr-ID scaffold_252 ; pos 67445 to 67716 reverse strand)
ccccccttcctctgatttctgcgatcctcctcctggtaatcaatcctccatttttttacagttagttaccatcatatctcctttatctgcgatccgcttccgttaatttgctttcgaattttgttaattatactgtttattcttcaatttttgaatgtttaatcttcattgttgaatgcctttctttttgtgttttttttcgattattcaatttctagtattggggttattttgcaggatacaaacaaaggggttgagttgaagtaatagaa

SEQ ID NO: 102631 - DNA, 837 bp, Mimulus guttatus
  Intron number 1 from transcript mgv1a016667m (locus mgv1a0 16667m.g) derived from phytozome v7.0 (chr-ID scaffold_68; pos 967847 to 968683 reverse strand)
attgggcttctgggtttcttacagaattaatcgtacttgtcttaatcttttttatgcaatttcttagcttgattttttgcttgatatatgggttgtattttcctgtgagataaatttttatctgtgtcttttttttttttttttttagtttggtactgtttcagttggtatataatgcttgagatatatatgcagtggcggaggggggccatggcccccagcaattctcgaatccttaattttttatgtatggatataaaaaaaagtcgtgtgtaattagcattatcggcccctccctcttcacaacaaatttgcattcggctcccgtgaacttaaaattctggctccgctaagcttctgatgaattgaattgggtttttctagtatgtaatatattggctttgatttgattgtgcaattcggggtgcattaagaaatgtcggtgttgattttgcgcctctattttcgttttaactctcttcgatttcgtgcatttctttgattcaatgctttccatcagcttttattgatttaatgagttagagtttggtgcttagtacgtttcttggatgcggtcgaattgttgacttgatataaagatcgaacacgtagaattttcttctattccgtccgtgtatatatatgtttcaatttctttgtattcagcattagatttttcatctctgtatgccatagcgaacttctcgaatatagctcatctaaaggcggggaacaaagacgaaaaacaccgttttctttcttaacgttacgatggttattgttttatttatttaatttgcaggcatcgcctatagtaataggtgctacggtcggaac

SEQ ID NO: 102632 - DNA, 781 bp, Mimulus guttatus
  Intron number 3 from transcript mgv1a002896m (locus mgv1a0 02896m.g) derived from phytozome v7.0 (chr-ID scaffold_55; pos 232388 to 233168)
ctagtaacttctcttattaagttttctcgaaaacaaatcagtcaatcctgtttgtgttttactgttactcattgaatggtcaactctaaggatttcactttctttggttgcttttttacctctattgtagtttgaccattgttgtacaatcaagaatgaacatattaggcatacctgcatttcggagcagacggttgttcgttaatgtaatttgaattttacattttcggttttagcgaacaattcttgatacacagtattagcaatttttgttgtttgttcatttgaatgtagagtggtttaaggattgattaaagtttgatagcaataaagaccaaaggtaggcatacttgtgttgtttaatgaactgtctgttgttatttcattgaagaatctatggttatatagttgttagtgttgattgcttgctggtagatctaaaactagaagcttactgtttttgacacgacgagtactcgggtgaacttttattgcacctaacgcttcgaccctccaattgtcacaaaacacacatgcacgcacttgtgtgtgtgtggaattgggggtggattgtgcacttggagcaatgcgtgcaccaaattggatggtatatttgtgcacgttcgtcgtgttcttctccacatcatggagtttatgctgctctgcctgcagctgtgaagtatttgcatctcttactttctgaatcaaaaggttaattatatgctgtgtatctctgccattttcagttttagacgctcttcccaggttaagaagacgaaaa

SEQ ID NO: 102633 - DNA, 786 bp, Mimulus guttatus
  Intron number 1 from transcript mgv1a010553m (locus mgv1a0 10553m.g) derived from phytozome v7.0 (chr-ID scaffold_4; pos 2111019 to 2111804 reverse strand)
ggtccccaggagtactacaccggcggagaaaaaaggttccttttttatacttaccacaatttcatcgctataacaaaaccctaggctattcccacgttatgtttgtttctctaattgaaattcgagctagttgagttctgatctgcggtggattcaaattgatttatattgtattcttattttgtttgggttgtggagttgatcatccggtatttaattggggcacggatgcccatatttaagtgtttgtgttagggttttgtatgttaagttttgtttggcgatctaaattggttgctttaagttgatttacaattaccatcctttgctgaaaatataattctggctcagaatattgtgcaggtttatgattgtttctgtgtggtgctgtatgatatgttgcagcttaatatagtgcaacatatcattccccgagaaaataaaagggaaaacctaaacatctgttttctgtttgttgcctgctaaagtggtagaaatgactgaattgatttatcgtttttgtgccggatattgctcgattttcttataaatatatccttttatgaattcttaaggaagcacatgactgtagagggcctacaattatgtgagttaccgctgatttggtttgaagttgctgatccggttcatgagttttacttgttttactaattttgcgtatatttcatttattatatttattcttcatttgataaatgcttagctgatatgtataagggatgaatcattacctgactatttattaaaatacgatatttcagtggt

SEQ ID NO: 102634 - DNA, 536 bp, Mimulus guttatus
  Intron number 1 from transcript mgv1a001036m (locus mgv1a0 01036m.g) derived from phytozome v7.0 (chr-ID scaffold_12; pos 2725850 to 2726385 reverse strand)
gaccacagaaggtgtttgagaatagtcctgagacggtgagactgataacctttcccagctttaagttttaattgttttactttttttcactaatcaccttttacagcctcgacctaaaagtttccgtttcacatatttgtgctagtgggtttagcaaatattgattctttattttcagagctctacattcttgattctcagtgatgtgtttatcgatattagtttggcacattataattctacagtgtaggaatcagtgctgccagcattaagtagcaaattcaggaagcctgctattgtattttgagattattttttggtggggatgggggctatcttttgtaatttaactaaaactaatttgaatatgtattaacggaattgccatttgtaatttatactaaaaccttttaactcaaagtgtttgctctgctggactcaactacttaggcttattacagttaactaatcaccatcccacctggccctgttcacatattttactgagtgggttcttttcttacaggaggcgtctg

SEQ ID NO: 102635 - DNA, 999 bp, Mimulus guttatus
  Intron number 1 from transcript mgv1a015725m (locus mgv1a0 15725m.g) derived from phytozome v7.0 (chr-ID scaffold_151 ; pos 535518 to 536516 reverse strand)
tttgcagaaagacccacccacttcctgcagcgccggtactatttatatatttcgtatttaattgatttgtgcaatacgtgttccattttttatgtgttgttgatattacagtgttccgagatttgatccgttggaatttttgtagatttagctttggggtttctcacatctgtcgattttgaccatttgttgattgtagaaatgctatattaggtttttggtgtttcgtactgaaaaaggtggaagatttattgttttctataattcgtctgatgaatgtttttcatttgaaggcatgataatatttaactcaagtggagctgtcaaattaaattaaaatgactgaaatttgatgtagattatttggcaaagaagaaaagaaaaagaagtacgaattattaaggcctcatttggttgagaagattaactaaataattgaactttgtttgacgttttgtatcccgataacttaccgggccgacccgcaaatattatgctattatggcttatcttgccttttagggagcttttttgttggacgtcccggtggccgataaaataattgggttttcgttggactatttgatctgattttggctaatcttctcttggcaaccaaacaaggcctaagtgttttagaattgttttagttgttaaatgtcaattgattatgcttgtagacttgtgcacattgtaaaggcatactatgttaaaccctttcgccgccagctgtaatttgtttatcgagtaattagctttatgacaaaaattgttttgaatctgattttgtatattcctatgatttcattgtaaagtttattctaatatacttcagcttgttgtttgtctcgatgtatttggattacgatcataagtgattgcatttattatatgatcgctttcgacaaaacagagctaaaatcttacaatctgctttaatactttttttctaaaataattagtttgctgttgacattgacaggacctgttggagaggac

SEQ ID NO: 102636 - DNA, 472 bp, Mimulus guttatus
  Intron number 2 from transcript mgv1a008479m (locus mgv1a0 08479m.g) derived from phytozome v7.0 (chr-ID scaffold_8; pos 448459 to 448930 reverse strand)
cttggccttggagatgtaagatatattggttataactgtttgaactttgaattaaccgcttaatacggctacttattctgctaatatttgcagattaagtttgtttcgacgcatttttctcattggcagtaattcaattctaccattgcactgcatgtataatgcacgtagtcgtaacattggatttgatctctgcttaaatgtttgtttcgacatgtacgatgttgagtttgatctcaatagatgattttttaatttttaattttttatttatttcaaagatataattaagaggcaattccaatgttagaaattttagtattatttataaaattcatgttaagtgctgctgacttgtttctctacggtaatttttatgctttctcttccgtcagattttttttttctcactgtaataattcaagtaacgcttctttggttatgcatttcgatcttataggctattccttcg

SEQ ID NO: 102637 - DNA, 664 bp, Mimulus guttatus
  Intron number 1 from transcript mgv1a008479m (locus mgv1a0 08479m.g) derived from phytozome v7.0 (chr-ID scaffold_8; pos 449891 to 450554 reverse strand)
cccctctttcgccatccaatatttcgtgtaaaaaggtaatccccatttctcgattaacccttctttatttgattagtactaatttttcatgcgaatctgttgattgttcattttcttcgattgatgcctgtttttttcttaatcaccgtttgagtatttagtcaacttcttgtaattgcgctcaacaatttcgccatttttcatgaaatgacacaattgattgcgtggtaattcgaattaggttattgttaatgtttttttatctattcaaattatttcgttatctatgtttgttttcgtcttccctgatttgtggttcaaagtgggtttgtttactttctaatggttgatttttttttatttttttttccccggtgaatttgctccggaatttttgaaacatggattatacaataatgaaagttgttagaatcaaaatggttatttgggaaatgaatagtggaatgaatgtgtaaccttcgtcgttcgaattaggtttttttgttttttttaattcagttcttgtttgaattttgatacttgtttaggtcaatagcggtcgaattctacaattgccttttctatccggtaaattttgaatttttatgatgcaattgtgcctttttcaggtttacgggtgtttctcgttttcgagcagatagaa

SEQ ID NO: 102638 - DNA, 998 bp, Mimulus guttatus
  Intron number 1 from transcript mgv1a004247m (locus mgv1a0 04247m.g) derived from phytozome v7.0 (chr-ID scaffold_228 ; pos 245846 to 246843)
atctctctccctgcacgtggtctccatgtatgtgttcccatatccctattataattattgtgaattgtgtccctttttatggaaatatatattttatagccttttttctgcagaaaacaaattcttaatttattgtttctcgaatattattttaccttttctaccttgttttgtttaattatcaatagagtaagagtggagaagctaattcactgtgctttgtgtgatcatcgctttgatattttctgcatttgtatctactctagagagagagagagagagagagaagctggtgaagagatcattattcagatatttttctttcatgaaaagagttgcgtggggttgttaatgtgagttttgcttaccctgtttgtgtgtgtgtgtgtgtgtgtgtgtgtgtgtgttttgatactgtcatatgcagttccagcccaaccaaaccatggcaaacccgtgacaggacaaaaggtttgtggaccagaaagaaaaagagaaggagaaataatatataaattgaaaaagtaaaagcaatagaagaaaaaaattcttatccaacaccccctcctacccacttctctctctactctcttccccatttatgagggaactcccaaatcaaaaatcaaaaatcaaaatcctctgattccatagactccaaccttaattttactgttcttcttgatttgtttaagtgtctttttttactgtttgccttctagatgtgtgcgatctgtccaaatttggactgtgttgtgtgatgatgatgattaaggcaggcccatttgtgatttgttgggtggaataatcaaattgggtctcttttgagatctgggtgtctgtaaagatgtattctttcgagcatcatctttttctttttctttttcatcatgccttgttctcttcttttctctgtttacctatctgtggtatctcactttttgccgcgaatttctttggcagatttttcaagattggaaaggatctcctttcacaaa

SEQ ID NO: 102639 - DNA, 385 bp, Mimulus guttatus
  Intron number 2 from transcript mgv1a024812m (locus mgv1a0 24812m.g) derived from phytozome v7.0 (chr-ID scaffold_3; pos 1164945 to 1165329 reverse strand)
caaagaacaacaagaaaaggtgtgtctgtctctgcgtgagtgtgtgactgtgtttttttcttcttttttttatataattaaaaagaaatataatgtttgctcaatttagtgcaagtattgttagagaatttggtttgtctctcaccgccctgtttttggtaataaactgatatatcaccacacatgtttttttcttgtccttttgacattatttgcatacaacaacaatttgactcactaaaattcttgccatatatgtatatagatagatatatgtatagtagttgcatacatacatacatagatacatacaaccaacactgatttaaaaatgtggcagttatatatagcggcggcggcggcagcagctcaaaatcagaaaaag

SEQ ID NO: 102640 - DNA, 594 bp, Mimulus guttatus
  Intron number 1 from transcript mgv1a000647m (locus mgv1a0 00647m.g) derived from phytozome v7.0 (chr-ID scaffold_3; pos 1452271 to 1452864 reverse strand)
tcgtgtaccgtgaaatgacttaattacccctggtttagagataatttgcatctagtacgtggcaatggattataatatttgtcgtgttgtagaccgttggatggtgacaaaaaacaaatgtatagatcacaccgtcaaagactaaattctctctcccaatctctacccacggatcaaacgttgtcaagctccacgtgtccccatcattgaaaagatccgaccggccttctctcctctttcctccaaataagttaatataaccaacaaccaaacaaagaaagaaaaaaaagaaaaagaaactgccctcccctgtaataaaaatcaaaataatcaaccgttgccttattatattatattattatattcatttcttctctttctctcttctcactccactggaaagaaagcccatttccctataattaataattaatatacccattctctcttttcactgaacttggaactgattggtgttcaaatttctaatcgaaaaacaacaacctcggacgatattctttcatagtttgtgaatgtgaatatgtctgtgtttgtgaagaaacttgttgaaaaggcttctttgaagaaggtaat

SEQ ID NO: 102641 - DNA, 824 bp, Mimulus guttatus
  Intron number 3 from transcript mgv1a011469m (locus mgv1a0 11469m.g) derived from phytozome v7.0 (chr-ID scaffold_7; pos 2497099 to 2497922)
cgccggtgcctcacgtccccctcgcgacgccggtaatttttttcccccttatttggctattgtgagtttataccgtgaattgagagattggagctatttcgataaaccctagtttatgcggttcacttaaaacaagcagacaaagaacataaattaagcacatgaagattgtttgttgtcatttagatcttgctcttttgagttggaatatctattctcgatttctcgtttagacgaggagtttctaatattggaatagccaagggtcataatattaaattattgaagcctataagaaatggtttcagaagacaagagatgctttcaaaatctgatccaaaattggtccattgtagtagtaacttgttcaaaatacggtgaattttatgaatgatgatactaaaattgtttacagcagtagacttgtcagtttttacttttacagagtgagaagatcttttgtcgtggccttttccaatgttacgattgaccatatgtgaaacattagttgcatggttagaggatggaattatttttagtcgcttcaatgttcggctttcgcttcgcgagacttcctttaatcctgtaaaagtaactgctttcacttatccaacaaaataaaaagaagagattccaagtgattaagtaattttgttaaaaaaatcatgtcagagcctttttttttccttcccacatttttctctgggtgtgttttcgattagtttccttttctttattctactgtcattgtgtttgagggggaatttagttatacttttcctttgttgatttagatacatttggcaaacctgcatctggttctg

SEQ ID NO: 102642 - DNA, 648 bp, Mimulus guttatus
  Intron number 1 from transcript mgv1a013527m (locus mgv1a0 13527m.g) derived from phytozome v7.0 (chr-ID scaffold_64; pos 1207945 to 1208592)
tcaataacactgtcactcccaccatcaccgttaaggtaaaatcatatctttttttttttttaaattaaataaatcaaattctagaattttctactgcatttgatcgatctagtcaccttaaatctgttaggattatatccaaaaataataaaaattctacaattaaatttatcaactgtttgtattcagtgaatgataaactcatattttttatttaattttttttttgcagtgattttttaaattaatgtttttttaattttaaattgtttacatttattttgatgcctctgtttagatatgtaacaatggagtttctggtattaaaattgctaactctgtaaaatccaattgagcaattctgcaattcacaatcaaaagttgtgtgtgtgtgtgtctatatatatatatatatatatatatatatataacttttgattctgaactgatattaaaatctctacatagttaacgtcatcggatttagctagtgatgaatcgcatagcaagtggactctcgattttgctctttgaaatttcggaaaaatgattttttattagtgatactcttttcgattttcttctttaaagacttcgaattgaagatcgtatttttgtttaaatatttgttgtaggtgacatcaccgt

SEQ ID NO: 102643 - DNA, 840 bp, Mimulus guttatus
  Intron number 2 from transcript mgv1a007444m (locus mgv1a0 07444m.g) derived from phytozome v7.0 (chr-ID scaffold_27; pos 394720 to 395559)
cctgttctaacactgtaagaacttcttccctgaaattctaattgtctaggaaattcgtttgtgttaatgacggcatgcgtgtatttctccttttaggaagcactttgtttgatcttgcctaaataagattaagaagattaatgcactcaagactaagaccgaaaggataatcaagattgaagtaaatgttactactgagtactgacaataatatactgattgcacatgcctaaattaggataacaagattaatggcgtcaacatgacgaaaaataatttataggacaacaaaaggatgtcaatgttaaggtactcctgtctatagttaaaagattaccggaatgtccacatgtttagtgtttgcgtttcgaaattgctagttatatagagaattttgatgcaatgatttctatttttatgcatttcttgtgctatttactttagattatacgaattttattcttaatgggaggtaattttatctcccgaacctctgacctttggtatttattgagatacatcatcggtacgtcaatacatgccttttttcttgaattaaggacttcattaagaagttctttgaaaaattctttaataaatagctgcactgtgtgtatttgtgtttagctgttttgtacaaagatcaagtgcctcttttccctaacatcctgttcttgttgagaatgcatttacctttccatgaaattttctcaggccctcttttccgattcgtcttgcatgcctcgatttttcagttaatcatgtctacctttctctagatagcttttgctgatgattacttttttggtctctctgatagatattttggcgggaatattg

SEQ ID NO: 102644 - DNA, 1004 bp, Mimulus guttatus
  Intron number 1 from transcript mgv1a020816m (locus mgv1a0 20816m.g) derived from phytozome v7.0 (chr-ID scaffold_476 ; pos 49641 to 50644 reverse strand)
cccattgaaccccttgacttgcctcaaatttgcaggtcaatttccttttttttttttttcttcttgattttaaaatattgatttttcaacagatatttttagttgtataatttaattattcttttagttattatttaaaataaaaaataaacaatttaaggtattaggatttaaaatacaaattgaattgagtttgagggggctaagtgttacaaatgatactttatgatggtaagtgttacagatggtatacattaggggtgtaaactgtatttaaccctatatattattcacgaaaattggttaatcaaagtacaaaaaaacacaaatatttagttcatgtaggtccaatttgattaaatacttcagcttcaaaatcgttcgagcacgggatgatttagccgttggagcaagtgagtttgtgtcagttgactccaattcgaatccgtttgccaacggtcgctaggtcgagtttgtcacacgtggttagcttaatatggtttgcgtcttccgtatggtttacaagttattatacgatagtgtaggttacccagtgcacctatatggttgtattacgtctaagattataaaaattcatacatcttactaaggaaattaattagttaactagtacgaaattgctgcaattcaatctaatccaactcatctaattgaacttgcctcaaatattagatactattatcgacgaaagagacaaattataatggtaatctatccacgatttcaaatagtgctaagtgcataagtgaaagcgaatagaaactcgaaattacgacgaatttcgacattgtttagacccttatctatccaatcttgcaaaaaaaaaaaaaattaggagcttaatatgttgtttattaggaaatacggattttatttctgtaatttgggttgttcgtacgattttttcagcactattagaaacttgaccttataaactcattttcaccttcaattttaaagggattcaacaatcgagtacatca

SEQ ID NO: 102645 - DNA, 974 bp, Mimulus guttatus
  Intron number 1 from transcript mgv1a024738m (locus mgv1a0 24738m.g) derived from phytozome v7.0 (chr-ID scaffold_27; pos 345577 to 346550)
tggagcaagaagaggacttcgttattcgccacaaggtaatttaaattaattagtctttctatttccgttttttttgtttctttaaataggtttataattccctaaagttaaaaataagggtaaattataaccacccctgaggtatgtttatattacgaaagatcccctcttgtttagataaatacaattacctctcaattataaatatttctacacgtccacccttgcggattcaaatttagtagaatcttttatattatatggaatattctcaatttgtacttgttttatgcaatttgagctccacattgtgaagcaagatgatcataaaatgtgttttttggctcgtatatatcagattttagtatatcacaaactgtatttttgcacaaaatgagttcaaactaaagaacatttcacgaaatctagctgattatgttgaatttgacaccataagtgtggatatataagaagattcacagttgagaagatatatgtaattatccaaacatgaggggtttttttgtaatttgaccatacatcatgaatgattccgtaatttaccctaaaaataataataatatttaaatcatttcaatattttcattacgaataaaaaaaggtatcatttggatactaagataatattatacaatcttatatgaaaatctaattgtataattggattagggatcttaattattacccaattaaccaataaactaacataagagctcctttcgcaatcaatgtggatcgggccgaaaatttattggaccggtcaatatcaaatgaaatcgaattatttaattaatcctaacattctttcaccgatcaaatggagcttcaaacaattaataccacttcttctaatcattaaaaaaaaattgataattcattaattgatgaaaaaaaataaacacaaaacccttaatgcaggaattaccacatagaatacagaaagctgttgatac

SEQ ID NO: 102646 - DNA, 359 bp, Mimulus guttatus
  Intron number 3 from transcript mgv1a016211m (locus mgv1a0 16211m.g) derived from phytozome v7.0 (chr-ID scaffold_85; pos 923550 to 923908)
agccttggactgcaaggctgctcccatccagacaggtagagaagttatatcatttatcaatttctttttttattttattttttccttctggacttaatttacaagtaagagaagttatatcatccaaacaattcgtttcaagcaatgttaaatcaaactccttttctattgtaaaaattggtcttagtcaaggttcgtttgaatcttggaccaaaatgtttattacaagaaataatttttacattttcatcggggctataaaagtttctgtttcttttgaccttagtttctattcgtaatgaactttcttctttacgattgcagtttggttacattgtgttgactacatctgctggaat

SEQ ID NO: 102647 - DNA, 706 bp, Mimulus guttatus
  Intron number 1 from transcript mgv1a001067m (locus mgv1a0 01067m.g) derived from phytozome v7.0 (chr-ID scaffold_149 ; pos 198794 to 199499)
attctactggtaatataccttttgtgttaatttagatttacggatttttgggttaaaaagttgtggtgagaattttggttgtttcctgcgcaatgcgtgtgattttcatgctgttttgattaattatcttgttggattttgaatttgatttttttttttattttctacttttttgtttgtttgttggaagaatgtgaaggttttgatcttcaatttcttatacctagagcataattgaagattgtggtgatttttttgtttttgtttttggattgcagttcagtttgtgttcaatctaataatggtaatggccaattgcatcagaactaaattagttgatttatggataatgctctcgtaaattgcgattatttgatttcatggtttaactaaaagttgtacctgggaagatttattatctttgaaattatacatgtttttttagggaatgtgatgtagttgtgattatttcccttttctcgccattggtaagagtcaaagcttccgtattttgttagattatttccactcttaacattcttttccctgatgtggtgcgtttccaaacaacgtggttacttgtgcttttatgcatctttcaaggtagtaaaataattttatgaaaaggttaaagacttattgcatgctaaatattatatggtgtgatatagtgtctgggagagtgcgagttgctgtcagattacgt

SEQ ID NO: 102648 - DNA, 376 bp, Mimulus guttatus
  Intron number 1 from transcript mgv1a015235m (locus mgv1a0 15235m.g) derived from phytozome v7.0 (chr-ID scaffold_90; pos 35943 to 36318)
ggcaacaagcaaaaaaattgacgagaaaaaaacaggtaatgaaccatttccatggtttctgaatctcatcctccgtttatttcgtgcctctgaagccatgtatctcgcgagttatgaagtgtttgaccatgttttgttaaacataatttatgccgacgaactgctcgatgaaatgcctcagtgatgaagaaacttttttgaatccgtaaagtgttagcggagagttgttttcagtagaacccaccattattccatctcgaatcaaatttcctactgatttgccttcatttcagcttacagtacacttgctttttttttttttttccttttttttttcttttctgtttttcttgtttatgtagtaaggtggtgtttc

SEQ ID NO: 102649 - DNA, 522 bp, Mimulus guttatus
  Intron number 4 from transcript mgv1a008560m (locus mgv1a0 08560m.g) derived from phytozome v7.0 (chr-ID scaffold_210 ; pos 72576 to 73097)
agcttttatcgactactcttatattcagtctatttgtaagttcaaggtttgattgcttgtttcgttttcttcatttggaagcgcataactaagtcatcgtagtaaacaagatcgaaactttttttaaatttgttaccttattgacatattaattagactcgttgaattgcatccgctccgctaacatggttcttcaataagtcacattaaagtgactctgaaataaaattgtttccgttgttggaattaatattatagataatgtacagtcaagtgtaagcatacatgacagatagatggatcgatatatgaatgaccaatcctcgaagaaagtgcatgaaattatgcagcgctatcacaaatgctagagattgaatattaagtgtctcattgtctttcatagccattacctcataacaagttataatcaccttgcaatggctatattgtgttggcttttgtttctcagtttgtgtgtcaattccaggtgacgttacttctttacatcgctggctgcagatc

SEQ ID NO: 102650 - DNA, 698 bp, Mimulus guttatus
  Intron number 2 from transcript mgv1a026334m (locus mgv1a0 26334m.g) derived from phytozome v7.0 (chr-ID scaffold_228 ; pos 109311 to 110008)
accttcggtttgatttctttgctctctttcgtcgggtaatttattcattaattaattagtataaccactctttaatttgtttttttttttggctaaattaatataaaataaattttgaggagattaattaatagattaaaattggctagatatttatatttagggtaaattacaaccacccctgaggtatagttaaattacgataaaacccctcatgtttggataattataattacccctcaactatggatcttcttcatacacattcaccttaattgtgtcaaattcagcataatcttttagatttcgttgaatgttctctaatttgtactcgtttttgtgcaagaaatgcagtttctgatgcaccaaaatatgatattttcaagctaaaaaacacaatcttatgatcatcttgtttcaaaatgtggagctcgaatgggataaaacgggtaaaaagaaaaatattccatataatctagaagtttccactaaatttgacagcgcaatgttggacgtacgtgtaagaagatatataattgaggggtggttgtaattacccaaacatgaaggggttctttcgtaatttgaccatacatcaggggtgtggttgtaattttccctatttaatttttacaaactcaattttttttaaccttatggcagcgtgacagttaaccagaacgtatatttcgagggtt

SEQ ID NO: 102651 - DNA, 500 bp, Mimulus guttatus
  Intron number 1 from transcript mgv1a003891m (locus mgv1a0 03891m.g) derived from phytozome v7.0 (chr-ID scaffold_161 ; pos 95093 to 95592)
ccgtaagcactcaaaaatctcctctttcaatgcgtcttttttttttttttttactctttagctacggaactctgtgcgtatttatgtttaatttagtgttcccagtcttctgaattttttagattgcttcgcggttttgtttacttcgagaatttgaattagaatgtctgagaaaaatctccccctttttttatttttttacgaaattgaaacagatgtactctgcatttgtttatgaatttttggtaaacaccaattccgtgtcgaatccattttgtgtgaacttaatttcctgggtagaatgtaatctacatttgatttctagcagtggcaaacatcctatgtttcaagatgggtttttcttgtttaatcggcatatagtttgttttgatgcgattattactcgactgttatattgctgctttgttggaaatttaatgtaaacagcttgatatgaacttacggtacttttccgtgattttcccaactatgaacaggtt

SEQ ID NO: 102652 - DNA, 466 bp, Mimulus guttatus
  Intron number 3 from transcript mgv1a003026m (locus mgv1a0 03026m.g) derived from phytozome v7.0 (chr-ID scaffold_109 ; pos 414689 to 415154)
aaatttctgtaactgtaagcctctgttaattgcatacataatctgatttctagtctctgcctgctttgtttgtttaaacccagataaaattccaatatttgcctcatcttttgtatgaagagtttctcatgcttcaagagttgagaccagtaattggttatccatgtagaatccaatttctgagcagtattgtattaaatttaacatagatgatttcccaatgatgttggttttgattttctggagtgaagtggggattccttctaactcgccgatactcccttcttagatagttgaaattttattcagagatgtttagtatttcatctatgcaacttttagattataattattttagtgctaaactctgttattctcctgtaatgatatatatttgttcttttatcctacatatcacctttgtaaattctaactgatttgcttacttaatttttctagggagata

SEQ ID NO: 102653 - DNA, 462 bp, Mimulus guttatus
  Intron number 1 from transcript mgv1a002872m (locus mgv1a0 02872m.g) derived from phytozome v7.0 (chr-ID scaffold_245 ; pos 73359 to 73820 reverse strand)
ccaagtttcgccagcgatcactcaccaaggttcctcctttctctctctctctctcttcttttttttttttttttttctagatctcacggctttgctctttctttgtttcctttggattggagtggccgattaagttgtttagatgttcaacgttgataaaaggagatttagagcgaatttattgttttttttttggcaattaattgtgtgattgaagatattaaccccaagggttttaggggtttttgactggtccgaatcaaataattatacagagtaagattgtgaattaaggatcttctcaaagagttcatcagataattgctatgtgattttgtctattgcttttttttttttttttttgccccaggagtttgggattggttttctgtgtgtactgagtcagagttaacttatcatggtttcttctccaggtgatcacacaaaatcttctaacgagta

SEQ ID NO: 102654 - DNA, 902 bp, Mimulus guttatus
  Intron number 1 from transcript mgv1a005584m (locus mgv1a0 05584m.g) derived from phytozome v7.0 (chr-ID scaffold_297 ; pos 123135 to 124036)
tccacggcaacatttatctcgatcctgtatgtatttttcctctcctgcttttcgtatacttctgattttcgtttcaatttgttgctgaaagcgtgttttcctctctcctgcatgcgtggatttaagttcaattttgaagagaaaatggaattgattcttagtttttttaactattgagatttaatttatgtgattgcgtttggggaggtggaatcgtactgatatgctggtgtagtatcgtgctgaattagttttaattgtaaaattggagtttaccggagcagagatgtttttcgttcttctgttttgttttgctagtttttttagttgatgaaggagattgtgtgcctttaagtgatagagttgcatttgatctgttttatgttgatataatagccgttgaagattgcagaatacacggtcctctcagattcaaaagccatatataatttgttgtgatttgattattcctgtttctcatactatccaagtcaaaagcattttttattatgcacgatttctgcatatgcaggcacatgtgcatctgttttattttttaaaactaacatgtatgctcctcctactacgtatgcacgtggatctttcaataataacttgattgatacaaaagcagaaagtcgtggcatatattatatatttttatgtgttttgttttaactccttcatttttttttatccttgtatggcattatcttatttgctattgctctgattacgtgactatcccgttaggtttaaagtcagaagaagagaaaataattaggtggcgtggtacatcattcaattatttgtccatcaaagtttgattctcaccctcatctttttttttctccttttgaatcgcagctctctttgaagttcgttgacactgaacagtttca

SEQ ID NO: 102655 - DNA, 703 bp, Mimulus guttatus
  Intron number 1 from transcript mgv1a000456m (locus mgv1a0 00456m.g) derived from phytozome v7.0 (chr-ID scaffold_4; pos 2372795 to 2373497 reverse strand)
actcaagtagctaaggtttgattttttcgttttatctggatgtgaaatgtgaatttattggaggttgagcttatctgatgatatgtttagattgattttatggaaattatatgttttaggtagttctcattactgcatttggtaaaatcatttttatttttattttttcctttttggacataataatgtgttaaccacactatgaatagaccaagctggtactgcatgtagttgatgaagtccttgtgttaaaattgtatattaggtcaccttgttaaggtcctctctctttcttgttgcaattttgtgttatttagctaaataacattatttctccacttcaattttccagctatgcaaaattgaaggtgtcgtttcatgtctgataacgaattatattctggtggaagatttaagttggttgaaattttgtccgccatgcacagtgaccaatccaatgttatatgtaatcattttgaagtcaacagtattggttgatgatgtacactgtaacttgtttgagggatacttttgttttccagaacttggaatgtgcactttttcaattttttccttatgttagaattcacattttctggccatgcatctgagttagtccatttgaagcctcactttgatttcactgttttttatgttatcatcttgtaacttcgccttttgttctttcttttccagaacattg

SEQ ID NO: 102656 - DNA, 803 bp, Mimulus guttatus
  Intron number 1 from transcript mgv1a023104m (locus mgv1a0 23104m.g) derived from phytozome v7.0 (chr-ID scaffold_104 ; pos 813020 to 813822 reverse strand)
atttatttttactcaatattcgtgtgaaacgcaacgtaataaaacgagataaaatcataaaatttctccagctatattgagttctacttgcttaaagtggatgtacaattattaatattgttgcaatagaaaatgacaaataactagtgtttggttgatggaatagttaggcggaattaaaaccagacgtattattaactattcataaactaactctcaccaatttggcagctgcttatttaattaaccacaaaatactaatatctgttccactttaaatagattttaatcacctaactatgcatgtgaactcaattaattaataatacacatccaaaataaaactgtttatgaaaaatgagaacccattcaagaaacatgtgaacggtcactcttttatacatttgttttgcatatttctatattataataattgattaattatttccacgactctttatcttcaacatcgataaaatattagaagaataaatcataagttattaatgtgtaattaggaaaacaattaacatatatctcgaattccatgccaaataattaattaaagtctagggttttctaaagcagaaaccaaggagttacatgtgtacatatatataatcaaaaaaatatgtactttgtatattaatgcaattatgattttgagaagaaaaatccaacttggagcttttgttatcttcgtgcatgcacttgtattatctgttcttggtaacaaattccatggctgccaaacaaaatcttcacaagggtactacatttgcaacggaatattccggggatct

SEQ ID NO: 102657 - DNA, 641 bp, Mimulus guttatus
  Intron number 3 from transcript mgv1a009342m (locus mgv1a0 09342m.g) derived from phytozome v7.0 (chr-ID scaffold_112 ; pos 291412 to 292052 reverse strand)
aaaaaaacgacaaaattttaccagcgccgtgccaggttcgtgttccgtttattacaatttccacaattttttttccggaacaggcagtgtcgtacatataaattataaattgtaataattcgattagtatgcttgttgattcatagcacttggttacagctgcctttatttaccagttaccggtttttaatggtgtttgctacgacacgaaactttcaaacacttatttataagaatacattttgtcactttaatactatattacccaaggagttccacggggtgatatcttaattgtaatcctattagttagattgttaggcctcgtttggttgccaagataaaattagtcaagataagattaaataattgaatgaaaatccaattattttatcggaccccggcacgtctaacaaaaaagttctctaaaaggcaagataagacatgataacataatatttgtgggttgacctgacaagtaaagaaaaatagataactagtgtttaaaatgtaaataagtgttttttaaagatttattttaatctttaaaaaaattatagaactgataaatttattagcatgacatcaaattgtatttctttgcagcaagatacactccctcattgtatctttcttcacat

SEQ ID NO: 102658 - DNA, 957 bp, Mimulus guttatus
  Intron number 1 from transcript mgv1a025077m (locus mgv1a0 25077m.g) derived from phytozome v7.0 (chr-ID scaffold_167 ; pos 215454 to 216410)
ggaccttccaggtatctacataaccatgcatccacccttttattttcatttaatttaatgattattatatatatatacttttgtagatatataatttatcatgcatgttcttaattcataataacattatgttatatatacttggaatatcattaaatcaaagaataatgtgaaaataaagattggaactgaataaagtgaaaaccaaggaaggtataattgagaaggaaacctcagtcttacaattccaattcttcaacccctttttatgatgaaacccaaaaagaattaaaaaaattaaaaaaataaaataaatctttgaactctacatttctgattaatatatatatatatgctttcaatacttgaatgaaaaaggaaatttctggatggttcttacatcttttcaagtagggtaaattacggccacctcctgaaataagctcaaattacgaaaatacccatcctatttcgataattacactctcaacgaaatattgtcttacaaaaagatccctcgttaaatagtaagtttgacactgtaatgctggacgtgtaaaataatacatagttggtgggtagttgtaattatccaaaacataagtgttttttcgtaatatgaacatactttaggggttgctgtaatttgcctttcaagtaatatctttcacaaagatatatgcaatcatccaaaattatcagtcttattacataaagcaactgaaatataattaattaagaaaacacatgagtacttattgagcataatccaacaaatatagctactttagtcaaatatagactaatttcatcacaattagtattaccaaatataaatgctattttaactttataagagtaagattcccatgcaacgtactctttttaatttatttctacatatgttacctattattattttgcaggaaagtctttattaccaagcaaagatcttga

SEQ ID NO: 102659 - DNA, 824 bp, Mimulus guttatus
  Intron number 2 from transcript mgv1a016850m (locus mgv1a0 16850m.g) derived from phytozome v7.0 (chr-ID scaffold_109 ; pos 291262 to 292085 reverse strand)
atccaaagttggccgctggggttttctctctgaaggtatgtatgtattgctcgcctattttccttcgtctcgtatttattccattatcaattggctgattcaattttgaatcgttgaaaatgaattctgtatgatatttttgcttgggtaatttgagtggatcgaattgttttatttcatactcagcacgatagcacgcaatttccttcgtttgagatgattattttgttttcgattctgcatcctgttggatttgagcttgggatttcgatgcatagcctttcacttctttcgcttttcatcgtttaatgattttaagagcatgaagtctaactaatttccttgtatattaatactaccttaagtagcttatcgtttgacgtgtagagaaactgttactgttagcaaatatgcttactttcgatttttagcagttttattgaaaatcgaagaagtaacatataaaaggaacatttaagttctaaaatccaccttttaaccgttttttttttctttcgtcagctaaattgtaatgataatgggggatttgtgaatgttgtatatattaataaagatggtttaagctcccgtgaacattaattctatcgaggcagctattttatagtaaaacagaagaaatctgaacgaacactacaatagcaatgaaccaatcagtgacattttttctgcacttgaagctctgttagcaaattgagattacacacataataaatgcttcactgtgttgtgataatgcagcaatttcatttttcctcttgtttttattagggtttgcgacgactttataacaggatcttgattga

SEQ ID NO: 102660 - DNA, 1008 bp, Mimulus guttatus
  Intron number 1 from transcript mgv1a003809m (locus mgv1a0 03809m.g) derived from phytozome v7.0 (chr-ID scaffold_4; pos 1741782 to 1742789)
gtacaaaaccaacaactaaggaacaagcccaggatgtatgaatctctctctctctctctctctcttctttatagagtgctcttttcaactgccaaagcttgagtcttttaaagaacttgtgatcattgctaattttaggtgcttttcttttttatccttttgattcaagttctcagctttcttgggttgttgtcagttcatgggttttgcccctacttgttttttttttttttgattctgtaattttggatctgtagtgggtttttcctcttggttgtgagtttgtgatcaagatctgatttttatgggaaatttgaatcattcattatgttttttttgttaaaatgtaaaaagaattgtatgctattataaaaactgctgcattttgtcagcagctgacttgattcagtgcccactttacccctttttcttggtggtccttgattctctgttaattttttgttttctaggttctctttacaggttttctggaagtaggttttgatttttttttttttttttatagttttgttaaagccctcttttttgggtttctgttggtaattatatatatataaaatatatatatatatatgattgactaatattctgtaattatgccatcagccccccatctctttcactctgctattcttttttgccatctctcttttgataaagtcctgtgtagttttgcattggagcttttgagtatttgggctttagtgatttggtatttttgttttgagatttaggctcttgtttgtttcttgattctgaatttctgctgattttctattgtttcgtttagatcttaccggtgagtttagcgaattccgtacactacttgttctttttgatgattataaacatgattgctatgcttgttaaacaccgttaaacttgtgtagttttcgttcgagatacatatcgtgcacttctcgattattctaatcagcatgtgtttgttttgacagagttgggagatacaatcctctgaagttgatc

SEQ ID NO: 102661 - DNA, 737 bp, Mimulus guttatus
  Intron number 1 from transcript mgv1a008007m (locus mgv1a0 08007m.g) derived from phytozome v7.0 (chr-ID scaffold_164 ; pos 59747 to 60483)
gatgtatgtcatgtttttttattcttaatttggggctttttttgttgttaaattattcgtttttgttttgtgttttagtgggaattgatattattttgtggagtttatttttttcattttgaacatgtccttattatgaatatgtgtttgtgtgtgtgtgtgtgaaaattcagaagaaagtagagaagactagtgatgaattgaatggatattcacaatcctttacgattacgtgttaatttttaacacttttttgcgtatttgtaactatacgaattcctcgtgctcccgttgattctggttggagatgagctgtcgcatagttgaataaatgccgttttggtcaatgtgatgagattatctgtaaatattgttatgtgtgatctttaaatgctataatctctgaattgtgaacttcgattttgagttctaaagtattgagtggagttccgcagacaccgacacaacgaaacctcaagcttttggagtttaggtttgatgtcgaaatttgacacagtgcagttagtaagtagtttttaaccttgattcttgtttaaatgttgagacgctgaaatgttaaaacagtgataagaatcaacatgaggtatttttgttgtcccgtttcttgtataatctatttacattttccttgctttcttttgttcttcaagacttctttattcttgaaattcatttaggttttaaagtcgtaacgaatctactctcgttttacagtg

SEQ ID NO: 102662 - DNA, 862 bp, Mimulus guttatus
  Intron number 1 from transcript mgv1a008374m (locus mgv1a0 08374m.g) derived from phytozome v7.0 (chr-ID scaffold_16; pos 670323 to 671184)
caacaaccctgatcatcagatctcgtcaactataggtaattttaattttatatctattgttttttctgcataaagtttcaatctttacatcttctccattttcccccttctgaattcccacttcccaatgcagattaatgagtaatcttgccttattttgattgcatctctgtactctgtgtgtgtgtgtgtgtgtgtgtgtattgggtggctatggaaccatgagaatcatatggatggaattggaactttgtaaaccacaattttttcgaatctgtaaacaaataaatttattaatcaaacgaaagcggattacaatctccgggaatcatatctccgggaattcccatgattcaagggcttagaagcgtgttcttgaatcaaagaaatatatatgtatacatacaccttgaatttaaatatgttatgaattcgcggcggaggctcgagacttgagcttgagaagctcgatttgtgtctatgtgagtttgactttcgcatgcaccgaagaccttcttttataggcacaagctagggtttcttggcacaatttagggtttcgcagacattttgaagcccaaataagttatggactttaatttgagacctaaattagtaatcgatttattttggttattatctagtaatttatctcaaaatttcgatgtctacagaactaatttaaagcttattatgttgcatttcattacaatggaactgttcccttgtacagttataatttgtaatgaacttttatagattcatttctcgtgttcgtcgcttttgataagtgtaactgattttaatttgtgttttttttcttgaagaaaaactaaaggcgaatccatcatttgatataaag

SEQ ID NO: 102663 - DNA, 819 bp, Mimulus guttatus
  Intron number 1 from transcript mgv1a004950m (locus mgv1a0 04950m.g) derived from phytozome v7.0 (chr-ID scaffold_4; pos 1557952 to 1558770 reverse strand)
attacaggtacacacagtcacacacacacacacacacatatatatataattatatatatatattgccttattgcattttgttatttccaatttgcactgaaagattaatcatctgcacatgctcttcgtattatggaattagtagaaagtagaaaccattaattgtagagtaaattacggaaaccccagaacttaggctaaataacgaaaaacaccccacctatttgtaattaccaaaaacccctgagttttgttgcggtgtaacaccgcggatttttttttattccaaggaatagactttacacaatttcaatttcagatattttctttcacccggtatatagattgtacacatttgatgttaaaaattttgatcaacggtaaatcagagggggattttggttattacggataagaaagagtatttttcattatttagcctaaattgaggggggctttcgtaatttatcgttaattgtaaatcaaaccataatcagataatctacctttgaggactttaatgaacttgtctttattcacaataaataaaagaaataaataaaatatataaatagaaaaacataaatgctgaatgatgagtagtacaattttgtatgagcaaaaagcctgcaaattgttactggtgaagtcattacatctctcacctaaatccagcgcatcagttacggcagttattgcgaagtagatttgctcacatgacttcactacacagtacacacacacaaagctaaaaagccctagcctggtagttaaattaaacatgattaattaactactaatttaattataggtactcag

SEQ ID NO: 102664 - DNA, 799 bp, Mimulus guttatus
  Intron number 1 from transcript mgv1a006501m (locus mgv1a0 06501m.g) derived from phytozome v7.0 (chr-ID scaffold_30; pos 1953381 to 1954179 reverse strand)
cctgtttatcttcaaaattcatcttcctcaatcaggtaatttacgcaactcgttttgttattactgaaaatttatctgctttttccttcaatttttatttttttttttgttttttttcccgtgtgtgtataagcttgtcggttctgattcgtttccgccatggccggaatcggagaagacttctgtttatagctgcgagctcttatattggtgatagcggatcttcaatttggaagtaatttttactctgttgagttagttgattactagattctgctaatttgcgaactgtggattttgatttgattttgtttatttatggatttttatgaacagtaacttcagcagagtagtaaacaaggcaatatttttttttttttttaataattgtagtaactctactaggtggaagttcaattaagcaagtttctcattgtgttggtagctgaattactatcatgaattgtttttttcaatcaatgtcatgaatttattttcgagataccgattgagatttgatttggccgtaaaatttgattaccgaaagttctttatcttccccgttttttgttgaaaacttttgggcacttgtgtgtaagagcagactgctaatgcaactgtcgataagtccactgactctgataccatttctcttaactcactgtttacgattttcaaatgatgctttgtctttcgcgttgtcgtctaaagatgtttgcatgattttacaccacatgtttctaataaaggtggttttttaatgaccgttttttgatattttcttggagcaggttcgaat

SEQ ID NO: 102665 - DNA, 623 bp, Mimulus guttatus
  Intron number 1 from transcript mgv1a015515m (locus mgv1a0 15515m.g) derived from phytozome v7.0 (chr-ID scaffold_222 ; pos 64238 to 64860 reverse strand)
acaattcttggcaggcagaactaaagaggaagcaggtacgaaaagctaattaattttcttatttaatttgtttctgagtttcgatataaaatatgataatcacctacgatgctccataatctctctatttgcagtcaattgatggtggttctattattttgtggctgtttttcgattgtttttaattttctaggttttatgatttgggggttatcacataaatcggttaaacctctttaaattaatacagaccgcactaacaaaattattaatttagtgaaatattaaattatcgaactaataatttaatatgtttttatcgagttggtaccggaagaaagtattattcaaaggttattaatttatcaagtattaatttatggaggttcttctgtatttaacaactagtaggttgatctgggtttgttggtggtttccttggcctctgatctttgtttgatattaattatttattatttcgggttcaccaaaagaagcagcaattacgcaaaatcgtatgttttttttgatgtaacaactcggtttagaagtcgtttgatgtggctttagttgttttcgttaatacaatatcggggggcgtttgttgttgcaggcaagaaaac

SEQ ID NO: 102666 - DNA, 545 bp, Mimulus guttatus
  Intron number 1 from transcript mgv1a026208m (locus mgv1a0 26208m.g) derived from phytozome v7.0 (chr-ID scaffold_2; pos 3459534 to 3460078 reverse strand)
cgaaccctgggaacttcctggtatatatatattctttattttttttttttttttttttttaattttattaattctctgaattcaaaaaaaaaaaacagaagtagggtttgcatgtatgtagtagcactaatttcatttctgagtttcttgtttttggtatatatattatatgatcatattatgtaaatgagatgtttgtgactatgtttttattgtcttggaagttgccatttgttgagctgaaaaaaacagatgagaaattatactcatcatttagtactactgcatatctatatatatgtatatatagatatatagcttttactatagccagcaaaaagtttggttatattataaatcaactttttaatgagccatttccagaaactgaaaagttcataacagataaattattacatcactttttactttttctgcaagaaaatctagacaatattacatcttcctgcaaatatatatgtagcagcagcacttattacagtaacagacagaattaagtaagagatggtcggttataattgtag

SEQ ID NO: 102667 - DNA, 530 bp, Mimulus guttatus
  Intron number 1 from transcript mgv1a001212m (locus mgv1a0 01212m.g) derived from phytozome v7.0 (chr-ID scaffold_196 ; pos 365388 to 365917)
gtaagcaggtgactcttttaccattaactgttaactgttagtgtgtagagtagtataattttgtatgcttgctgatgcatttgagaatatatgctcaactttggtgcttgcctgtttttctgtgctaatcttggtgaagtgtttcagatgtgaaaccaggtggacatgtattttctgccactgtttagttttatatcttctgaaactataatcctatactaacatatctgctgtagttatgagttacagatcaccaaaacctactaaatttcctaactcaaacttttagaataatatattttctttcttttgtttttcttaaaaataaaatctcaccgtctttccaggtcaagtaaccatataatacagctatcattagtagaaaagaaggaaattatcgttcggatttactattagaacatggcaacatgcccctgcacaaagtttgggatgtgtaccaaatcagtcctgatcaattgaaaatagttttcataaaatctaaaggttgtcatcgtacttatttttgcaga

SEQ ID NO: 102668 - DNA, 521 bp, Mimulus guttatus
  Intron number 2 from transcript mgv1a001212m (locus mgv1a0 01212m.g) derived from phytozome v7.0 (chr-ID scaffold_196 ; pos 365972 to 366492)
ttacagaaagttccaaaaagaagcaagcccttctggtaattatttcacctgaaagtttataatatttattgttcctgcaatctatttttcttcttcagtttccctcctacccaaaccctgcacaaaaagcatttttacaggtattctcacatctagagtctcagactattagcaatattggaagcctttgggcttatttccattgtgttttgggggaagaattgccttccaaagtaacaactgaatctacagcttcttcataatttatcgcatttagagttattaagaagaaataaatgttatttatttgtaaatataacatttgtgccctcaacgtgtttgtttttgcattcacatgctatgaaagacttcactctgattttctcatcaaaatcaaaaatagacaaatgggactataatgtttttattggtttaatcatctcacaactagtgcttttgatgttccgtgtcataaaaggattcttttattacctatataattacactgtgacttgcaggac

SEQ ID NO: 102669 - DNA, 543 bp, Mimulus guttatus
  Intron number 1 from transcript mgv1a003922m (locus mgv1a0 03922m.g) derived from phytozome v7.0 (chr-ID scaffold_213 ; pos 257604 to 258146)
ttggggctgtggaagattgagctggaaaaaaaagggttagtgctgtttatggaagattcttcttgatctttctttagatcttctgggtttgttcataatttgattatgttttgtgctaatttgttgatttatgtatttgtgtgttgcttttgattaatttatgcttgtgggttttttgtaattttgtgtgtagtggatgaatcaatgtaattcactctgatgctttttagggttgggttcttgatattttgatcagtgttttatttgtattgattcgagctcgtctagctcgatttgttggactttttcgctaattgtcggattttgttctttttttggatctgtcgaattttgggttgttattcgatagatcttcgttattatatcaacatcgatcttttccgatttcagaaatagtagttatatttatccatgtagtaagaacaagatccttttgccataggtttctcgtattaactcgagacgcatttaatgaagtaagcatttactagttcggttttttccgtagaatttggatagaga

SEQ ID NO: 102670 - DNA, 536 bp, Mimulus guttatus
  Intron number 1 from transcript mgv1a007589m (locus mgv1a0 07589m.g) derived from phytozome v7.0 (chr-ID scaffold_290 ; pos 93505 to 94040)
cggcgttggaattttcactaaggtaattttcatttcttctgctaacaatgtttttgttttcacctgaagtaataactagatgtttttatgtttagaatttagagttgaaaaaatctccgatgttcatcatgctgcattcccagaattgaatcttatgacaattaattatgagaattggagtcgagattatggtttaaacgtcgtatcttcgatattcagccatcgctaatttacgttttaccctgttcagtgttcgccaaacgcctctaatattccgttttttgaactgcgcactttctctaatttggttgatagatagttggcgtgccatcgtattcacatcccgattctaacagactcgtaattatttttcctgaatctttatatttgtaactcacgatctacttgaacctctcgatgcatttgttgttcattcatttacgttgttctgtatctttcgactttttatttttggagttttatttttgctggccgattcattgtcgtttggtttctttactagactgctgcagaat

SEQ ID NO: 102671 - DNA, 670 bp, Mimulus guttatus
  Intron number 1 from transcript mgv1a014081m (locus mgv1a0 14081m.g) derived from phytozome v7.0 (chr-ID scaffold_11; pos 838885 to 839554)
aaagaattaagcgttggaggtttcaatcacagagagtaattttttcactcccttcgctttcaatttttgattgcgccgatggattttcaattcaaattagggtttggatatagggatttgatgttgagcaaatggatttgaatttttgatgtgaaatttcctaagcaatccatatagatttgttattatatattggaaatctttagctcctaaatgcttcagcctatagtgattcaagcaacagttcaaaatagatgttggttgatttgacaaacgtgggcgagacgacacacgtctcgaataggctcttttttagcagcatttataaacgcagtgtgtcgtttgagcttgattggagtgccctaatcactaattcagcttgcaatgcatcatcggtgattgtctgtctgcaaaatcattgtacgaaaaactaacacgtatccaatttaatcaattgtcaatttgaatgacgtgtcgtctaatgcggcgctatacaataaatatgcagatttttcatccactcgagttctttattgtggctccggtcacgtacgttctggttaaatattggacttggatgcaaaatttcttgtcccctatttgaattcttcggtttttttatttgattaatgaaggagccgaggcataagaagtttctcttctgcaccca

SEQ ID NO: 102672 - DNA, 488 bp, Mimulus guttatus
  Intron number 3 from transcript mgv1a002634m (locus mgv1a0 02634m.g) derived from phytozome v7.0 (chr-ID scaffold_2; pos 3874119 to 3874606 reverse strand)
agcaccctgtacttgattttgaggtttgttctgcaatccatgccactttccgctttttgatattttcagtatttttttgagcatatggctatttatttcatttgagttgattatcaatatgaagccattgtgtttttattattattattattactactaatatcatgataaccgattactattattgttattgttatttttcttatgctttctggagctacagttggcaggaaacagatggacgaaacaatcattatttttcattagaatgcaatcatgttatcgaggcattatgcttctcatgtggtattcaatcgaaaaagatctattactgtagcgaacaatgattgaatttgttatattttatgttccatcttcttttagaggagaaggcctcacttaacatctatgtttttttaattcctgatgatgttgctcagacatcgctctctaatttatcttaccttttgtgtcttctgttgattagg

SEQ ID NO: 102673 - DNA, 548 bp, Mimulus guttatus
  Intron number 1 from transcript mgv1a012328m (locus mgv1a0 12328m.g) derived from phytozome v7.0 (chr-ID scaffold_18; pos 1131110 to 1131657 reverse strand)
agtgccgtttttcagtaaggtaatgattcatactggtttatgattttttttttctttatttttttttaaattatttaaatcgtgatttattttttggctttatttcttaatgtgtgttttgtgccctggaatttttatttgctctgtttatgctgttaatgtatatgaatctgactttcttttcccgtaaggcttgcttagtatttcccattttgattctgtagatccacattgttttttttgttttttttgcttagaatgcattgatgggattttagtgctaatattctccgaatttcgatttaattagtaacaatggggatgcgtatttgctgaggtaaagggaaaaaaatgattaattcatttgaatttggaattattgagagattttggtggctcatgttagcaaaaatcaaggattaaatctcaattgtgtgattcagatactgaactaagttgattttacatgtggagtttattaacatctattttttttttttttttttgccacaggttggattagatactgtttttttcggtttggaata

SEQ ID NO: 102674 - DNA, 400 bp, Mimulus guttatus
  Intron number 3 from transcript mgv1a023707m (locus mgv1a0 23707m.g) derived from phytozome v7.0 (chr-ID scaffold_1; pos 4771065 to 4771464)
cacaggtactttgttgctaatatgccattttatcattgagaaatatgattttatacaccggggtaatacagtagtcaagaatgagaacattcataaactgcttctacaagttggatattggataattattaaagaagtatctagaagagctaaaatatgtatatacatggttgctatctaatatgttatcacttcgtttttcttggtatccattttggtgttttcaattttcctattgggcaaattttggtttttgaaaccttgccggtaaattttggattttaagtatagtgggggttcttcatataacgtgatagatgtcataccttatgatactattttacctagcaaaaactgattaatatcaactatgcccttttaccaaacaattcacagagag

SEQ ID NO: 102675 - DNA, 522 bp, Mimulus guttatus
  Intron number 1 from transcript mgv1a005873m (locus mgv1a0 05873m.g) derived from phytozome v7.0 (chr-ID scaffold_181 ; pos 29294 to 29815 reverse strand)
tctctgctaatagtgttgatatcaggtattttttctagattctttatttatttttcttgagaactgtgctttttttttttttttttttgttatgtgtattgattcttgtcttgttttgtattagtgtttgattattttctgtgatttttgttttttgggtcaagaaatccatgttttcaagattcaagagtctaagaacaggtgtttcttgatttgttttgatagtttaaataataactttgataagtttgagatttcatcttgattgactttggctattaaatgagggaagtagtttggtggaactgaaatatcttgtaagaaataatgtttgcatttcgattaaagaattgtagaatgaatgtatcgaaacgagctcaaaggatttgttattcacacctatgttaacttcgaaactatttcgatccatctatggggactttggttggaaacatttcgaaatttccatcccaagattgttgtataaatgatggcttttttcgtttctttttgtgtttaggt

SEQ ID NO: 102676 - DNA, 502 bp, Mimulus guttatus
  Intron number 1 from transcript mgv11b020379m (locus mgv11 b020379m.g) derived from phytozome v7.0 (chr-ID scaffold_4 1; pos 502358 to 502859)
tgtggaaggaatccagtgcgcacactcttagggtgtaccctcgtcttagatccgcttgttccaggatcttcaaccgtatcttcttcttctagataatttttttttttttttttgatttgtgatgggaaatggatttgttgatgtaaattatgtgaataaagaagaagtttttactattaatattttggtggaacaattttaattttggaacaattctataaatgttgagagaattagaattatgggtgaaattgtaagttatgaaattatctttttaattaaaagaagcaaaaaacaattaggactagattgtaaattttgaaaatttaaaaacctacttataatactgacattttgaagtgttggagctaattgtaatttagtttaaacttttaattaaaagtgaaaaccctagtttgagatttctttaaatcatcgtttgagagctggagaagtaattagacgatccatgttgttccaattcgttctagcccgctccgat

SEQ ID NO: 102677 - DNA, 715 bp, Mimulus guttatus
  Intron number 1 from transcript mgv1a017166m (locus mgv1a0 17166m.g) derived from phytozome v7.0 (chr-ID scaffold_8; pos 1681603 to 1682317 reverse strand)
cggaacatcgtccgccggagattccttatttctgtgtaagtttctctctcgctgtttacttatgtttaattcagacgttttcgcatgattttccggcgtggaagccattattatgacgatttgttttccaagttcttaatttgctttcaaaaatttaatttaggttttgtggatataattttcttcacgaacatctgccttttcttttatttgtgtgttgaatttcgttagaatgtgcgcaagtactcattataattaggttttgattttctagtgattttggagttgccctaattctcgtaattgagtggagagacttaactctttgctgtaatgcttatttagatgcatgtgaactcgtttaaactttggtggttgcaaatgcataatgttagggcttcattgtgggattagggtttaaagtgttgcaaacagtaattatgattaccactgttgtaaagtaaaagtgtgaaaccaatctaacatactggttggggctctggatcgtgtattgaaaatcgtattttagtttgggaaattagaatttatacatttctttcttccagttagaaactattcaaatcatctgccattgctttcattgaccttactagaatttgctcattcgcctctgtgttgatgctgtgctaattgtgcatgtgtgtgtgtgtgtgtttgtttgttcttggcagcagttggacgattaattcgaaca

SEQ ID NO: 102678 - DNA, 626 bp, Mimulus guttatus
  Intron number 2 from transcript mgv1a014679m (locus mgv1a0 14679m.g) derived from phytozome v7.0 (chr-ID scaffold_81; pos 921550 to 922175 reverse strand)
actcggagaaatagtcacaactattcctactattggtatgttcttctctctctacttgaattttctaaaaattcatgctttatagtttcgcaccttgtggtatgccgtatgaatattaatgtgtgtgtctgtgtgtgtgtgtgtgtgtgtgtgtgtgtgtgtgtgtgtgtgtgtgtgatagagagagaagatgaaatgtgtatccacgctcttgtcattttataactcgtcggtttatccttcttccataattccacatttatatgatagaaatattgacagaatggatttggcttttaaattctctttttatccctttggaagttaaattgttataatatctaaaagtcgtagtgtaacgacgaacatagaacgttgatgaatcctaagcatttcgttttctctttttatcaataaaaatcaaatagattaagagccaagtgtttcgttgtatgtgacttagacgaaacagataatttgagattgatcattcactgataaatttttacttcaaatgttctcgatatggattttagcctgcgattacgatctactcctcgtaaaaccacttatattttaatctttactaattctgttaattattaccatttgctctccaggattca

SEQ ID NO: 102679 - DNA, 660 bp, Mimulus guttatus
  Intron number 1 from transcript mgv1a014679m (locus mgv1a0 14679m.g) derived from phytozome v7.0 (chr-ID scaffold_81; pos 922289 to 922948 reverse strand)
tcatcactcctctctctctctctctctccatcaacgtaagctttctctaccatcttcatcttctctaaccgcaattcatcaatttatttgtttttttttttgcttccgtgaattgaattgcagatccagattccagactttgtgtaaattatcatttcctgaattatttaattacgtaccctctgttttatgtacgttcatgtgcgcaattgatttttttttttgttttctcgagtgattgggcgaattggttgatctaattttgtttggtttcttttgatctgatttatgttttatttatttttattactggaattcatttttttctggtttcagttgttcagcgattacattgttgattaactttcttctgtattaccttgttgaataattccgttagatattgaaaattgtgttttctggatcgtttcgatttcaccgttcgattgaagtgaattttaactaatcctgttttctttttaaaaaacaggacttgattaaatttatgttgtgttctttatgcaattgttgtatgattgataatagcttgagaaatgtagaaattttttatttgcatttggaattgaatatctgcaccttttcgaaagactgagtcttaattaattaaattttttttttctgggtgtaaaatacagagaa

SEQ ID NO: 102680 - DNA, 902 bp, Mimulus guttatus
  Intron number 1 from transcript mgv1a003808m (locus mgv1a0 03798m.g) derived from phytozome v7.0 (chr-ID scaffold_83; pos 275698 to 276599 reverse strand)
tcaacactctctctccccctctcactcaggtactctctctctctctctctctctctctctctctctctctctctatccatctctatcaaaaaaaaaattcgtcttcttttttcttctatatttttgtggataatttttctgcgttctggatgaagtcgaatatgatttgatgttgtagatctggtgacattttggttatgtggatttgatttgatgtaaacaagtctgcttgtggttggttacacttaatacttgtagatctaagcttttattttgcaaacgaagtttaaccagttaattatttgtgttggtgaagtttagccattagtttatgttctgcagtagatctatctgtacaactgttttggattacattatatgaatataattttggttttgctgatgctcatgttgtgaattggatagtgatgcatgcatgaagatttttgttacacttttattggttatattttttaccattttgatatgaagcgttgaattgtgagttgtgacactagatcagatctgtgtcaatcaggttgctggcaaatgttggtggcattttctcaatcttaattttttatttgtcttccctttttcttatccgagttaatttataaaatgtttttttttaattatttgagaagatgttcttaatatgtcaaaatagttttactctcaccttaggagttcaaacttgcatgacattgttgagaattgagaccattgtgccatggaacaaattttgttgaccatttgcttattttggaattggttaaagtgtattgaattttcatgttaggaaaataagggttttttttgtcccaatgtaacattgttatctaactgtttcttgcattttttttttatttcaatgggtgcaggtctcttcatttaccact

SEQ ID NO: 102681 - DNA, 691 bp, Mimulus guttatus
  Intron number 3 from transcript mgv1a012290m (locus mgv1a0 12290m.g) derived from phytozome v7.0 (chr-ID scaffold_26; pos 1493658 to 1494348)
agttgtgcacgagaagggtcttctcgcccaagattgtgagtaatttaaaaagttattcactgttttttcccaatttctgctttctgtttatagtttattgctctggcctcttgttctatcttcaatttagtgaaattcaaatattcgtttcgattatacgaaaatgcagcagcatcaatttgctaaatttggtgcttcattacacaaataggtaattaaaatattgtcaaagtaaccatcccagttctcccgataagtatgttcactgtatgacactatgactatctttccttccgtgccagcatcaattaatgaaacgaatatggcactgtctatcaccacctgcggaacctacatgtggcttcccgtttatcccgggaagataatattcgactcattagggaagttggtttctaattgagaattgcgttatgatactacctagttgatgaaacaaagcaatacgatatttccttcaaggatctacatacggttctttttgtggggctaggttacttgtcatatgcgtgaggacaaaattgccaagtaaaaaagtaatgaaaaatgattctttgagtgattacgttttttcctttgttaatggatccttgaaatgataccagatacaaagattcaagttcttttttgttttgcagtgccgccctggctaacaaaagttacacagagaata

SEQ ID NO: 102682 - DNA, 541 bp, Mimulus guttatus
  Intron number 1 from transcript mgv1a015882m (locus mgv1a0 15882m.g) derived from phytozome v7.0 (chr-ID scaffold_384 ; pos 78228 to 78768 reverse strand)
tcagcaaattcgctacgcccgccggcaattacacggtagaaatacctttttttttttaccttttcgacggtagattttgtgtgtttttattctgccctttatatgctgttctagttttgttttaggttttaattggttcagacaatttggttttagctgctgtttgtttgaagctttgattaatttccgtgattcgagatcaatcaattggttagtaatcactgaaatttgtatttttaggttagttatctcaaattattcttaggtagggctccataattgaactgcccaattcctaatcagggttcgtagattagttctactttcagctattccgtcagattatctcagttctgttttttttctcttcattaatatgataaaattacacaatttctagataatcgctaggctttcgattatgtgctttgtttgtctagggtatacaacatagttgcagtattatgcttcagtttatctgaatgctgatatttggtttcttttaggttttccaaatttaacgagccgaaataaaaagggg

SEQ ID NO: 102683 - DNA, 824 bp, Mimulus guttatus
  Intron number 1 from transcript mgv1a017416m (locus mgv1a0 17416m.g) derived from phytozome v7.0 (chr-ID scaffold_50; pos 1482574 to 1483397 reverse strand)
ctcccaagaaacagctgcaccgattccttgactaggtatttatttacttgattaattttgtttttaattgataatttttttattttttttttttgtttttaatttggtgtaatgaaattaagtattttttaggggtttgattaaacacctgaaggtgtttgattatatgcgcaaaccagaaaaatgtgggtgcaaattctgtaccaataaaagaagattttggcagcttgttgaacatatgaagttagttgtactatggttcttaaaggctctctataaattaatagagtcgggactaacaaaaatctattaatttagcaaaatattgaattaccgaactagtaatttagtacgtttttaccgagtcgggaccggaagaaattattattcaagcgagtttattaatttatcgaggttctatgtatttaagaatcctgacctgttgaccctttggcttttccagcgatacgaacgtatttcattcattttgttctgtaagactataatgaaaacgcaatttttttttaaattctagacgaatacgatattgagatctttatagatcggtggcttttggaaaaagtctatttttgaatctattgcttcagtgattttaaatatgcaacatatttaatgactgaatgaaaatacacaatcttcggatcaaagatggttactttgtttaatttaccgagtattaattagcactaagaactaaaagatcgaaccttttccttcgatttgcctttcgattgtctaaaagtaaaataattccttgtttctttcctaatactaggaaaatcctagatttgctactaacagca

SEQ ID NO: 102684 - DNA, 721 bp, Mimulus guttatus
  Intron number 2 from transcript mgv1a016222m (locus mgv1a0 16230m.g) derived from phytozome v7.0 (chr-ID scaffold_7; pos 2430252 to 2430972)
gggtatgcatttctgattaccaacataccctaatatttttttttataatgttctggtattccatttaattcggctttggaattggatttctatcagcttttttatttgtgtttttgtttggaaaagtaagatttttttatttgctgataccatttttgtttcttatatttgagattgattattcttatataggtgtttatgcgtttgttgtgtttaagtttatgtgctctaggaagaaaaaaaatgcattttcttgagagaattgtattcgattgagtgctgattcggaagttggatatgttgatttatcggagttggtattcggagtttgatttgtcgttttaattcgatatctacttgtcttttatagttaagtttttcaagtacttccgataaattgttgtcgcacgaattctgcatctagttattttatttaatgaatttgaagccatgctgatgtccattcttgatgtccattctgcttcttcgattacaaatgaaatgacaaatatatccctctattttggtaacatttattattacgcatggacaaatttggaaattagaaaataatctcaacgtctaatacatgctatcaaaatgtcggtttttgtcgacatcaacgaacggatatgattgcttctatcatgtagtttgactatatactgttaattggaacagagcagtgtttttcttgggtgtgctactaagctcaaattga

SEQ ID NO: 102685 - DNA, 769 bp, Mimulus guttatus
  Intron number 1 from transcript mgv1a000017m (locus mgv1a0 00017m.g) derived from phytozome v7.0 (chr-ID scaffold_2; pos 2856031 to 2856799)
gattatattcatgtacgtctcccactgatttccgtttttttttgtttgaaagggttactgtgttatttttatttttattttttgttttaagattattatgtggtatgtgtgttgtgcttgatgtttggagtaagcactgtcaatttttttttttccgctgttctacattacgcagaataattttaataccactgttcaggactcgattagttttattgccaactcaataaactcattgcatttcagaaaatgttacctagaacaaaatccgtcgagttgtttgtggtgcctctgtcctctctgctgtacagtttttcaaactccctttcgttttgaaacttaatttgatcactgtatccagaattacatccgaattcggtaatcgctgttgtagtctaagatcacctattacaaacatagagaattgcaatccagctctgcaaatattggagttgtgtcccagagtgatctttactaatctttggttgttcttcagttgcctatacaactgtgccctctgctgcctaaggcttatgcttagcgtataatagttttgtttttggatttttctctatgtacaatccccttgtggcacaattattataatttgttgaagcttgctgatgaaaactcggaatttaccttttggatgctgattaaatattgttgaaaatgtccaatgaattaaagatagcttttagttgttttactaatcacgattcatcttgtttcaggtttgcttccaggttgctggcttggatcctcagtc

SEQ ID NO: 102686 - DNA, 620 bp, Mimulus guttatus
  Intron number 1 from transcript mgv1a007626m (locus mgv1a0 07626m.g) derived from phytozome v7.0 (chr-ID scaffold_24; pos 1961436 to 1962055)
gacatacatcttacaatagttcaggtaaaacctaagaatcgtacgtcccgcagtggttagcctagttgtttgtatgtcagtcattatatgagagtgtggtttattcagtgcaattatatgattagctacgaactcgttcgttaactattgcaacatttgaaattgtacactctttagacacgcactagatttgtagccctcttgagtaattgcactagctagtccttttcaagttagaaattcttccactatgattgattctacttgcatcaaaattaattacaattgaccccaaaagaaaaaaataaaataaaatagtgattttccattaaatggtctaatccatgaatgtaaaatcgagctgcctaaaaatgcacaagcaaagctatttccctaacaagtgattgcaatatgagccacgtgtacctatctttcaacatatactctcaatcccccctttttaattttaattttaatttttattttttttaactttatttttattttttcagcggtgataattattaattggcatttaaattttctctataaatatctttcttttccaatcatcctggatatcagtcctacacacacatttccactacctcctctctgct

SEQ ID NO: 102687 - DNA, 655 bp, Mimulus guttatus
  Intron number 4 from transcript mgv1a022149m (locus mgv1a0 22149m.g) derived from phytozome v7.0 (chr-ID scaffold_58; pos 1107381 to 1108035)
caattcaaaattggcatcaagattttctcaaacaggtcactaatttgtttattaactcattaattattctaagttgtttattagtttttccaataacctatttcgcgtatacactaagcaaaaactcgggtcttccgtttgattaagcttattttaattaaatagtcataagttgttacatataataagttgttttaagagctgataagttcttatgtcttgtttttataaattttttaaagtgttcaaatactgagcttagaagctatttttactcatttagaagtatatatcaatactttttaaaacaaatcttatttgctctcaaaacactttgaaagtacttataagctctttttaacatcttcgaagctcagtcaaacacccaccgtaccctctgaaccaaattatgcaaaaattaatttttttattttttttacttttttattcccaaaaaaatgctcttattggacgaccctttaatttatcaaaatatagaatatcatcgagtctaaataaaattacaaatatatattttatctagattatattatttcattttatttatagaaatcaaacgaggccttattatatatcgttcatctaataagttattccaggtaaatccatcgaaccccgagacattcccgtttgt

SEQ ID NO: 102688 - DNA, 680 bp, Mimulus guttatus
  Intron number 1 from transcript mgv1a000411m (locus mgv1a0 00411m.g) derived from phytozome v7.0 (chr-ID scaffold_207 ; pos 362950 to 363629)
aggccaaactccgtgacgccgatcttcgtcgtcaggtatttattttctctttatttctattttgtctgtatccttcgctccaaggaattttgttttttaggttcaattttgatcaaaatactcttatgccttttgttttttttttcacggttactttgtgattatcaaatatacagggaatcaggatttattgtttaagtttagtttattgtaacgatgaaagaaatatgatacatattaggtaattcatttgttccttaaagttcaactagaataaattggatccgtttctactaaaaatttatttcccccctcgtgttaggtaaaagttgggtaacagttgtgttcaagttcaaccccccacccccacccccacccccccttttattcttctggtcctcgtcctcccctgtggcataagtagatgttttggtgaactctcatgtcattttcttgctgttattattattattattattatagtttggccgcatctctttatgtttcgagtaggttaaatatcataatatcaatttgttgttcctttgtcttctggtgtctttttgcttgaatgtggtcctctgattacataatatttattatctgaggatctttgatatgatatttacactaaataaactgcagaaattttacgagagtttatcaaacaaggctaggcc

SEQ ID NO: 102689 - DNA, 392 bp, Mimulus guttatus
  Intron number 1 from transcript mgv1a014967m (locus mgv1a0 14967m.g) derived from phytozome v7.0 (chr-ID scaffold_59; pos 119604 to 119995 reverse strand)
tcttgtttagaggactcttttacccctcaattccggtatgtttgacccattcgaatttccttcattttcagcgctttttttttttttttttttcagttgagagtgattttctgataaatcaaatcctagattttataaaatttaaatttgggttctcaaatttgagaagccaaacttaaaaaaaattgacaagttctaagcttttccgtttagctgttatgatcgattattatcagtattggtatgaagatgttgtctgtttatgaatgaatgtgttcgatgaaatgtcccagagaaaaagtaactagtttcgggttgttgatttgtatgtaactacaagtttctttcatttcttggcaaaattcagattttagtgtttagctgccgcagcc

SEQ ID NO: 102690 - DNA, 498 bp, Mimulus guttatus
  Intron number 1 from transcript mgv1a009506m (locus mgv1a0 09506m.g) derived from phytozome v7.0 (chr-ID scaffold_122 ; pos 9197 to 9694)
ttactgcaactaaccgccaagtaagaaaagttttttattcgttgctttgctgttaatgttattgtgcaagttttcatgcagccctatctttgaaatttactttttctgtttgattttcaaaatctcatatggctagtcgatcttcctttgggcaaatttcaagccttaaatttactcatgctttccatcataaacgcacacttgcctattcagcttccttactttatacctgttatgtaatgatggatagacttgtcccggagccagggtagactgaggaaaaaaaatctcctagtagaggcttgaatattaattaactcagcttgaaacttgtctaagattaacaacagctgtcaatttggtattgtctctatgtatcaaatggaactgagtcggtaaatatctagattgtttgtatttatgttgcaatactatcattgttttgagttcttgaaattctccctgtacaggtaagaggtgggcagctctggggtacag

SEQ ID NO: 102691 - DNA, 1044 bp, Mimulus guttatus
  Intron number 3 from transcript mgv1a009506m (locus mgv1a0 09506m.g) derived from phytozome v7.0 (chr-ID scaffold_122 ; pos 9891 to 10934)
gcgtgctactatcagagtgttgcctccacaagattgtatgttccaaaaggatataatatttatgcaaaagtactcgctgctttgaatatatacctgccatagtcataacattaaacacgaaaatgcaactgttttctgccctaggttactataaacactattaaaaactcccaaaaggtaggatggtcatttctatatggctcaaccaaaataaagagcaaaaaggagctcagcgtgggttttatagttcgatttatgttgagacccaccatttaacatacatgcgttctgtaaactgtagcagccacatctagtgaatcatctgccactttcaaaaggaacactcattctctctatctctctctctctccctctcaaagtatatttataatcatctagtcccactgtataaattgtacgcaatgcgtgaaatcgtttttgtggaaactcttaaaactagggtgtcatcttgatcaatgtgtgtttgctcttgcgatgcctatataatgttttattcatgttgtacttcagtccaaaaaatatttcatttaaactctctctcgctctctcaattttcttttgttttttgaagaaaaaaatgatatagttgtgctgaaagtatatacataatcatctagacccattgtataaattttactgggaaaatattgatgtgaaaattcttcaaccgggatgtcatcttgagcaatgtgttgctctttcgatgcctatatagcattctctgaaaaacgtaggcgttcaaattttaaaatgttttagatggcagctattacatgccatttcatttgtgcacttcattatcatgatttttactccattttgatgctatgctactgctttatcttcaatctgttatgtgagttttacgttatagtttatgaatggtatgcgatatttacttgtgtttgacagtgatgcttaaactttgtttatattatgttgattgcatgcagttcctctattcttgtgttatatgactttaatttttaaaaacgtaaggttacatttcaacactgaggaata

SEQ ID NO: 102692 - DNA, 940 bp, Mimulus guttatus
  Intron number 2 from transcript mgv1a017214m (locus mgv1a0 17168m.g) derived from phytozome v7.0 (chr-ID scaffold_36; pos 1419010 to 1419949)
tctaggcgcagacacgtgccgatctttgtctcagggtatgctctgcattaccacccctggagtttgatacaatttttcgtaatgtttctgtaagcatacttcattttttttttctttttatatatatcataaccaagattctgtattttctcgacaattagttgttcttatatgccctatttgattactcgggttctaatatttcgtcgcaaatgagttcaagttaaatcatttcaggatttctcgtgattttttaatttgggatttattgctgcctttcaatcggtgattttttttcatatctattctcgtttgtttgccttttttttctcaccatacgtttaacaattcgagaaggaatgttctgggaccagcctaccacctgattagttaggcttcaattgtctacatttgcgggcgcacaagtattaagaaagaggttatgttttttacctaactggaatgtgatcccgtagtatcaaaactattattcttttaataagaattgtattagttttttgttctcatgcccatcttaaacatacaataactgggctgaaaaatcattttcgttttagtttcttgatccttgctaaggtgttatcaagaaacgacgatattttctgctaaatttatcttatttacggacctaagaagttagcaataaaaataataaagtctcgggtcttaattaattacccccttttctttacttccttagatacaagatgctataagttactacttactaggaaacgagctattagtctttatcgaacaaggaggaactctatggcttaaattcttagtatatatatatttcttgtttgcacttttggggtgggggtgattagatacgaattacgatatctggatctcttccttatacattgttcattttcttatttcagaaatagggctctctgtgccccgataacag

SEQ ID NO: 102693 - DNA, 572 bp, Mimulus guttatus
  Intron number 1 from transcript mgv1a013444m (locus mgv1a0 13444m.g) derived from phytozome v7.0 (chr-ID scaffold_178 ; pos 336925 to 337496)
ttggtaagcttttgggcttccgttttcattttattttggaaaaagatgttttgggagaagaatttgaaaataaaataaagtttgtttgggtttgtgagaagagacaatttatattgtagctagtcaaatcatgtttgaaaggtattgggaaaataaattttgtaagaatttgaaagatgaagtgatttaagtttgtatcatagtgaaaacattttataatgtctcaatcaattcatgtttattagagaagaaaacatttgaatttttttggaaaaagtttttgaaaataatttagaaagataattttattttggagaaaaagtgaaaataatttgaaaatcgtaacaaacatagccttagaggtgcaatgtgcaatcatttgaaattttcatgggcgcaaaatgcagttttcataatttaagagtgaaattcgcaaataaaatacaacccgaggggcaaagatgttattctcttaagctaagagtcagaattgtaagagacatatgatatgcgggtgcaaaatgataattacgaaagggtgacgaacctgttgagttgagcttgagcttaac

SEQ ID NO: 102694 - DNA, 817 bp, Mimulus guttatus
  Intron number 1 from transcript mgv1a002548m (locus mgv1a0 02548m.g) derived from phytozome v7.0 (chr-ID scaffold_79; pos 197461 to 198277 reverse strand)
tctcaagtcgttgatttcagtggtatggactctgatcttttgtgggttgtgattagggtttgatgttcttcatatctactttttgatttccatgttttttttccctttctgtgtgctgtccttttttttctgatgagatcttgttgttttcttgaaaattatgcagatttttacacatgcatcagtgttttaattctaattgtttcatggatctaaacatatgtttattgtatcttgttatgttttagccagatcgtagtttttctgtattcgtaacgataagattggtgctattatttcaattcttttatcggttttggtcaatttgatatcttataacttacagtatttttcctttttttgagtttttttgttcacatgtccatggatcttatttcaaggctacatattatttttttcgaagaaatcaaatttattaacttagttaatattcatgcatagcgtgagtgaaatttcgaatctacgattattaatgtttaatggttgattgaaacttgaatagtggctgttgtaaaagatcgatgtaactgatttctcaattatgctaggtttgttaaaaaatctggctaaaaaaaatatttcggtttgggagtcgggattttacacttaccttttatgcatagtttcttccatgtttgttggtagatcttaaatatgcagtgtgacgtaatgacatagtttcttttcattctatcgaaaattatccggttctttgagtgtgaatattgtctgatttctatgtccttcgtctttaatttcaggtgacaattcgttttgccctagcgcatttctgtac

SEQ ID NO: 102695 - DNA, 658 bp, Mimulus guttatus
  Intron number 3 from transcript mgv1a018146m (locus mgv1a0 18146m.g) derived from phytozome v7.0 (chr-ID scaffold_11; pos 1070676 to 1071333)
gtagctctttcaggtattgattatgaattatttaattctttgaacttagtaaaataatttaatcatgtgctccctccgtttcaaaataaattgtactcatactgtcatacatattaagaaacctaataaacagcctcctttttaatggagaatccccaaattgccctttacaaaccttgaagaaacataatttagttgtacaaagaacaatcaacgataaaagggcaaaattggtaaaaatattttgccttcaaattctgaagtgacaattaatattggaatttttttcggccttcttattggacgatcatcatacatcccgaaaatcgaaattcttgatcaatgaagaaacacccttttttgttggtgacacttatttttgaaacggaaagagtattgaaaatgaatattgcaggttttcgaaactcctttttatctcttaaaccaaactgatttacctctgtcctactttctcggggtttaaaattcaaagatgaacgataatcttttgtttttctaatcccataatatatatatatatatatatatatatatatatatatatatatatatatatattcaaaaaccaataatgtaatttgacaagtaaaggcttattgaaaccctgtgcaggtggccacacaatcggcttcgctca

SEQ ID NO: 102696 - DNA, 934 bp, Mimulus guttatus
  Intron number 3 from transcript mgv1a020126m (locus mgv1a0 20126m.g) derived from phytozome v7.0 (chr-ID scaffold_18; pos 1605887 to 1606820 reverse strand)
ctggtgttcggtatgttttttttcttccgattaatatccacattttgatttattcaaattgaaatatgattgttttggttgattgtatgccattgggagtggtgatttgaactttggagaagtaacatatgcaattaggagatcaatttaaataactgtgttgtaatttgatcatgtagaagcaaaattaaatgttaaccatgtaaaggaagcatcacttaatggaatttatatatgttcgggtgtgatctctgattgtacaattgacggaatggatttgcagccattgcgtctgttcttgtgcttgtctgtcgccgataattccccgtgtataacactatcttgggtaatgttttatgggaatatatatatttaaaaatcatcctggtttagaatatctgattgtgcataccgaatataccaggtgcaggggggggggggtatgcgtatgtgaaacttgctgaaatggatttagctcgtgtttcaggatttgcagatggtcttttcattgatatttatatttgaattttctgaatttgttattcaattacgacatacatgaattcttgagtactctacttcccttcaaatgacgaatcccttaattcgactcctggtgaaagcttatcttatctatagaggatcttaattcaattccaatctcttgaattgtgattctcaggcacatgttgaattgtacatttgagcatgattctattgtttcatattcgtttcaagttatttaactatagaggagccgttagtatctattgtggagtgacgactttgtaactagtacttacacgaggataaattgtactaacttgtgttgcttcaatgttctttaactgtataaaataaattggactatgttttattttcttatatgtttctcttaaccagcataacgaaataaatgttatttgcagggcta

SEQ ID NO: 102697 - DNA, 712 bp, Mimulus guttatus
  Intron number 2 from transcript mgv1a000058m (locus mgv1a0 00058m.g) derived from phytozome v7.0 (chr-ID scaffold_126 ; pos 176205 to 176916 reverse strand)
ggaaatttcagttggattacgttacaaggtttgtgaaaaatggttgtcgatagatgtattcagtttcggtagtttacttcttcaaatatatgtaattaatcaattgcgattgtgtaatccatgggaaatagtaattgatccttgcgaaatatccactcttttagtgccatgtccattttctaagttctgttttcataaggatgttgaggttcttttttttttcctaatgatgatgttgttattttatatcataaatgttttatttgaagtagttggttgggtttaaccgaatcgaaagcgttcgacttttagaatcttatagaggaaaccaggcatatttgtttttgcattattaagtaattaagtcagtatcctaatattactatgtgcacgtgactatttttgtcctaatattactcatgaatcataactcattttgccataataaaatgggtgctgctttaactgtgaattcttgattccttcggtttgcagttttcatttccacattttacatcttgccatcttaaatttctagcttcaccactgtgtttttttccctttcgcgagttgtggtatagttttcgctgtgactcttaaaattacctcatattcttgtggaagctttattttatcctttgaggtaagattttccctttacacattttctttgacagcctgagacttttgttaaagttcgcccccggtgtga

SEQ ID NO: 102698 - DNA, 676 bp, Mimulus guttatus
  Intron number 1 from transcript mgv1a000058m (locus mgv1a0 00058m.g) derived from phytozome v7.0 (chr-ID scaffold_126 ; pos 176965 to 177640 reverse strand)
gatcctactcgagctcgatgtatgtttacgtgaactcaattttacaaattgccccctaatttttggtgttctggtggtgaaatttgattagggttttttttgatgttttttcccggcttgacttttagttgattatgattcaattttagggattgaagtgatcaccagttatagaaccttcaataattgaattgaaagaggggggaaaacaatgttaacaagtaaacgtaatctggtgaattgtatgcgaacatcgatagtctcgataaccctattttcgccttcgtttgtgcatgactacctttcctagtggatgttttgtactggaagaagagagagactgttagttctagtagaagttgttgaagattccattacgtgtttatgtttggttaaacctgttgaaataattaaaaaaaaaaaaaaaaaaaatcgacagaactgttgcagggttagatagcgtgtggtacaatgggagtttgattttttatttatttactttttgaaattaaaagctgacacgcggacaaggctttcgtgaatggtaattaagggcgttatttgtttattccggcgttcatacattaatgcctaacttttgttgccctttttactgatcgaacattatctgtgctattttgagctaatgcattttttttggttcgttacaggaacc

SEQ ID NO: 102699 - DNA, 699 bp, Mimulus guttatus
  Intron number 1 from transcript mgv1a020135m (locus mgv1a0 20135m.g) derived from phytozome v7.0 (chr-ID scaffold_164 ; pos 221199 to 221897)
acggccaagttaaaagaacaggtaattttttattatttttatttcatttcccaattaatttgagttttttttttttttttttttttttttttttggaattgaattgggagattgggatatattgaggtttttttatgctattttttttttgatttttcttaattaaatgatgaatgagtttggaaatttgagaactcttctctgcaaattttgacctaaaactgggtattcgggatcgggattcgagatttcgtattatcctgatccttcattttataactttggaacagaaatttttgaaattttcaaactttagggttttcagaaatcccgacattgaacaaccgtgggttttcaggatcgagattcgagatttcgtactatcccgatcgttaattttataacttggaacataattttgttgtttttttcaatattagggttttctgaaattagggtattgaactaccgaacggatttgaatcccaactcccgaaattctaatccataaaaaatctcgaatcctcgagttcctttaacgaacgcaacttttcacgtatatattcgaaattgtggtgtgaccaaagagacgcatgagttccgtcaagtgacaatcgaatatcatttgcgttgaagtgtttttcctttttatttaatttatgtattatttttttttgtgtgtgattataattagggaca

SEQ ID NO: 102700 - DNA, 539 bp, Mimulus guttatus
  Intron number 1 from transcript mgv1a017467m (locus mgv1a0 17467m.g) derived from phytozome v7.0 (chr-ID scaffold_205 ; pos 447550 to 448088)
accgtgacatctcaatcaattcctgtacttatcaggtaattaccgttttgcccccatgtagttggagattttgccaattgtgtcatgaattgcgtaaataaagatggcattttttgttcttcaaagatttggtgatatgtaattcgaaattccttttagtctttaagctctgtgtttgggtcaactcatggagaattttcaatggtcctaaattagaatgaattttttgcataattggatttgcataaattttcaatggcattttttgttcttcaaagatttggtgatatgtaattttcaattttctgtaatttggccttaattgttattcaggagcactaattccgtttttttgttattttaatcccaattatatttgaattttatgttctgatagcaatgaaatcgttgtgtagctccaatcgtttctgtggtttgtccggtagttcgatttcttcttaagcttgatctaataatgtattctctttatcttcttgtttgaagggaaaatcggtaaattcacctccaatctcctcgga

SEQ ID NO: 102701 - DNA, 791 bp, Mimulus guttatus
  Intron number 1 from transcript mgv1a001826m (locus mgv1a0 01826m.g) derived from phytozome v7.0 (chr-ID scaffold_17; pos 2083724 to 2084514)
aaatccgtaagttctctcgtttaataaaataatgttttatttatttaaatgatgtactaatgtctaatttaggtaattaatggtacatttgattgaagaaataatgcatgtatatatatattctatatttctatacttgtggcttgcaataatttgagaaacggtgtccccaaaaagttggtactcctgtgatttaattcatagtatgtatctcaataatcaatataaaatattttgttttccctctttcagaggtaagttatcacagccaatcaacaaaatatattaaaaatttaaaattaaattcggaaggggtctcaaagataatattttttttattctgttttgcatgtaaataagtttagttgatgataaaatttatgttgataattccatacgtaaagggaatattctttataaagtaaattattaaatttcacataaataataatttaatagaccaatttttttatgttagtaagaacttgtggaaattatggtttttaaaaaaaatcatattcgaatttaattataacaaaattatatttgaatccaaatttgccacttatcactgtcacagtcccacaactgtcagagccacttgttgtaatgtgacctgcataattgtaagactgacataagtttggtaacaagtgggccccatttcgcgagcccattgggataatcaaactgatttaattaaattagttttgtaaatagttaatcaaactgagtttaatgctaaaataatacaaattatgaaaataattatgattaaattgttgaagcag

SEQ ID NO: 102702 - DNA, 647 bp, Mimulus guttatus
  Intron number 2 from transcript mgv1a007212m (locus mgv1a0 05080m.g) derived from phytozome v7.0 (chr-ID scaffold_102 ; pos 138932 to 139578 reverse strand)
ctctctgtacttaccctgctgatcctgatcaggtacggtggtatctactgctaattgtttagctatggcgatgttttattttcctaaaaagtgataattatgatattacataaaggaattgttgttaattaattcgttgcatttaccagtcaccaataagttgtaataaacaatgagataccaagctcacatcgggaatacacacacatgatatgagagagatacatactcactatgagtttgtgtctccatgtgcatgaattttatgattttgttggctagaagattgtttgttcggcagtttgttgattgccttgcctgtgttttaaatattaaattcggaaaaaaagtgaggaattctttttggcatgttttaatctgcttccgagtgtttcttgggtggaaaaatggttattatgacactattttaaatggctgtgctttagttataacacttgtgtaatcaagtttgtgctcaaaattactttttaattcctttacattgtttttggttaaatctgggagtctatgctacaccaatttggttctgctaagatttcaggtcatgtcgtattttcttgatccattatagcttgctaaagaaagggtcttttgtttttacaggaaattgatttgaagaatcacag

SEQ ID NO: 102703 - DNA, 987 bp, Mimulus guttatus
  Intron number 1 from transcript mgv1a005576m (locus mgv1a0 05576m.g) derived from phytozome v7.0 (chr-ID scaffold_2; pos 1986452 to 1987438 reverse strand)
agattttcgcccgaccacacctgggcacagccctggtatagggcatgctaatggacctgcgagcaccgagccaaaagcctgaatatataaagtagtacatatatgtatatgtgtgtatgtatatatagacatatatatatgttgcatgcatgttggaattttttcgaatttaagtaacatgttgatagtatctgtgaacatttgaattatggtttcttcctgttgtcctatgtttcatcagttgataaaattagaaacatatacgttgtattactgtcttaaagtgcttgtagtttgtacacgatttggttaattatggcaattattcttccgtttcgaaatagttatcttcgataccgtttttaataataataataattattattattattattattataaaaataataataataaaatacacaccaggagatttttctgtaaaaaaaaaaaaaagaattaatatattggtagtttgagtacaatgttcagtgttacaatgtcacttcacttacactaccagcaagtactaggttctatttccatcagtacagaatcctatgttccctgtcctaaacactgaaacccaacaatttctttttcctgattttcacagtcagaatttattttgtttttttgctttaattagcaaaaattaaatccacaccaaagtcacaaataaataaataaataacggtaattactcaaaataaaaaatattaatagcattacccaatttgacggccgacccagacagaatcactctatttaatatttaattatttctacatatcttaaaattaaaaaaatcaacggcccacatcgcaaaccagcttccccaaatcggacggctgtgataagcccagcgtaatctcagggcttaccatgaaaacctcaaatcctagtgcccagcctccacaaacctctttcttcttctcccttacaaactcagattcacctatacttacaacttccttacaatacatc

SEQ ID NO: 102704 - DNA, 909 bp, Mimulus guttatus
  Intron number 1 from transcript mgv1a011632m (locus mgv1a0 11632m.g) derived from phytozome v7.0 (chr-ID scaffold_113 ; pos 784178 to 785086)
caactccagctgtggccgcccagcattttcctagggtaattttttttatttatgaaaaagtcgttttctttttcctactgttttagggataaattattcatacttggaagtgaattggacatctaattagttgtttgtttcttatagtgaattgggtttatcgcttttaatcttcagtttatgataacatatgaatacattaagctaagccctcgcagaacttcgggttggcactggatttatcttatcgaaacattaattgctaaccagaaaagagtactgaatgatggaatttgttcgtgagattagttctttaggtttttacttgttagatttgttttaattttatttagatgtcattttcgttaaactagtcattctttagtgctgcttttcgtaaggtaattggtttcttgatctgatttgtgctacattgtgtcatttgacgaactagatgcaggtcggaaatccacttttccttgtcggattccttctgattagaaaatccacatacccttaaaactattggataaatgtgatccgtgtaacgactttggtctccagttccttctttttgctccttccctttcactcgattttccgggagattttattttcaatttctcctcattgttcattaccatcctttcttttaatttctttcatggtgggaaagatctatgcacgggtttgtgaattgtgatatgtttgtaaccctgttccttttatggtgttagtactttaagagaggcatggtgtcattgctacatttaaatttgtatacaccgactattgaagaagctcaaatcgagtgttttatctatattaagcttaattgcgaagaactattagtgttaatcatgaagtgggtttatctaattaagtgcattttgagatgtacagacaagc

SEQ ID NO: 102705 - DNA, 739 bp, Mimulus guttatus
  Intron number 1 from transcript mgv1a011136m (locus mgv1a0 11136m.g) derived from phytozome v7.0 (chr-ID scaffold_3; pos 2890297 to 2891035)
aggtaatctttaattatgcagttaaatctctttaaattaatacagttgagactaataaaattttattgatttagtgaaatatcaacacgtttttaccgagttgggaccggaagaaagaattatttaagcgagactattaatttatcgaggttctactgtataaagttctattaagatctaaattagcaattttggaataaaaaaaaaaaaaagaaaaatcattttttttgtcggaagtgaaaaactaagtcgaattgtattcaataaaagaatcggaaatatctgaaatcggaattttggaaattggaatggaaaaacttgtactaaaatcgaatgttcggatcgtatttggcgctttcggaaaaaaaaaatcaattcttttttagagtgaaaaactaaatccaattttattcaatcaaagaatcggaaatatctgaaatcagaattttggaaattggaattgaaaaacttgtactaaaatcggaaatgttcggatcgtatttggcggaattggaaatttccaattttgttttggtcacctataacgcaaaatacataataatttatattattaatttgttagtgtaagtttcccgaaaaggcaaagtaaccggaatttttggaaaatattttctgcaatctaatgtgtattccaattcggttcccgaaaaaaaaaatcggaaaccctaacttaatagggcaattttgattttgttttttttagattaaggagctgaaa

SEQ ID NO: 102706 - DNA, 839 bp, Mimulus guttatus
  Intron number 1 from transcript mgv1a002785m (locus mgv1a0 02785m.g) derived from phytozome v7.0 (chr-ID scaffold_63; pos 121281 to 122119 reverse strand)
tgcgtcgcgcccgatttccccgatatatatttttggtaagattttatgttcctttttcttctttatatctacgggttcgcactagcggagccagaatttttaaatccaaaagggtcgttaattctaatatacatgacttttaaaaaatatatatataaaataataggaatttgagaaaccctatgttggctctgccactgcacgttcatcatatatatatatatatatatatgtatattgaatttttcgtgttttattagtattttattttttatattttttttgctgagagtttgaattgaagtatctttatttttgttggaaagattgaactgaatcatttgataaaacggttatttctatgctacacccgatgaagattacaccgtacggttttttaccgttgatctacacataccaatgtgggtgtgtgtttgtgtgcatatgaatggtaaagactaaagatctacccagtgtatttcaccgggtgtagcatagtataaaccattgacaaaaacatgttaattataaatattttattgaattatcttcatataatcaagataaatatattaccaatgtgatacgatatagtaattaatgcaaccataactgtgattaattacaacaatatcggattaacttatatttggattattgactgattaatatcactattgactataatccaaaagcaaccaacaattaacctaaaccaatcagactccaccacgtcatcttcacccaaaccccccctctctctcacacactcacacacttacatatatatatatataaacacaggcagcaaataataacaaaattagaagagaatcagc

SEQ ID NO: 102707 - DNA, 944 bp, Mimulus guttatus
  Intron number 1 from transcript mgv1a018101m (locus mgv1a0 18101m.g) derived from phytozome v7.0 (chr-ID scaffold_97; pos 154361 to 155304)
agacatccggccagaattgcacggtcgaagcaagggtaagttagtcattttacattataatattggtttattatctaaataggcctagctagctaataaaatttgtaaaaaaaagtcgattaattaatatggaattaattatattgtttaatttcaacgctttgcaaacatcaaacgaacattgaagaaattaattgaccagaatttggtatttcaactaccctatatgtacttactcattaatttcttttctttgatttcactaactaatagcaccaaataaattatgaagttctatattctaaacactttattaagatttaaataaaaatgtttaattgcaataagtcaaatgtggacatattgtaaaaaaataacaataataaagtgtgcaatcaagaacatctcaagagacgaaaatttatacttcattttattttatcgtaaactttttaattttttcattatttctcggaagaccttaaaacgtcatatgttttttttcttcattatttctccgaataaagtgttatatatatatatatatatatatatatatatatatatatatatatatatatatatatatatatatatatatatatatatatatatcattgtataataaaagttatcggattaatttaatttagtacaaattagaaaaaaaagatcgataaaaaaagtcaaattgttatatttattaaaattgtcgataaatattagtataattaatgttatgtagtaaaattacatatatttaagttaaaatactaagatataatagttttatgtggtgttatctaattaaataaagaacaaaaaactatcacattattatttttaaataaaaaaaaatatataatttagaagcttactactttgattatgacatgaatctaactctattttcaacttgcagtctataacatttaattgggtta

SEQ ID NO: 102708 - DNA, 877 bp, Mimulus guttatus
  Intron number 2 from transcript mgv1a008054m (locus mgv1a0 08054m.g) derived from phytozome v7.0 (chr-ID scaffold_16; pos 1356355 to 1357231 reverse strand)
gaattagtttgttcaaccagcgctggtgattgcaagttagtggttttttatatattatatacatgaatatttgttgatacccatttcattaagcatcaaattccatgatcaaaacaattattagtatctgaattataggatcaaacggtttgttttgcaccttcatgtgttggaaaataattaaatttaatatgtgagagctattggacagaaattatactgtattaggtaagtgacgtaaattgaatattaaagttttttcaggactagaattacgttttctggataataaggtagaaattatgttgtttgatggattctcggtcagatatagagaacatgaatcctattatctaaaatccaactttgtgctgctggttctgtattaagaatatccgtaagagcatctattcggcttcggccaacatttgtgacacgggagaagctgtcaactgctatattattttgaaaggaaaatgattttattattcatgtatttgagcctaagttgggtatttggggtaaggggggttatgcggataatttccagaggtattggaccaaaaccgttggtatgcccagtttttttaatgaatttataagtgcagtttcggggcataaatatctagttccttattaaaaataataaataaagtatttaacttgaaaattataaatcatgttagcttatgcatacattttacaacagtaattactatctgatttgttttttcttcctttctcttttgcttctctcttgttaagaaatacgttcaaatagataattttttatcacaactttgtgttcagttattgatacctgagatatatacaaattacagattgttcgagttgagtgataaggaagacaagataa

SEQ ID NO: 102709 - DNA, 680 bp, Mimulus guttatus
  Intron number 2 from transcript mgv1a022762m (locus mgv1a0 22762m.g) derived from phytozome v7.0 (chr-ID scaffold_70; pos 298070 to 298749 reverse strand)
tggttccttttgagtttgttcttggttcaggaaaagtaattctctctcgtcttttattttcttcaatgtttactcatctgccatttttgattgattgattgattgctttatgttcatataacatgtaatttatgccaaccaaccaatatagttcctgaggttgaatttcacatgttttggctgaattagggaaaaaggattatgtatttctatgtagttggagtcaagtgtgcgtcatctctttcttatttgttgatatttgtccttctttcttcagtatttaccttgagagaattgaacacaaaaggaagaagctattattcctatgttgtaacacttgaaagagactagtaacatacatacatacatacatacatgtctttcttgaaatgtattatagctttcatctccttatcgatctcatacctagtacatggactgatcaattcaatttttttgatgagataaaaaggccttctttcatattcgtcagcagaaaatatgacaagtttctgaatacgttcagctaaagttgagcaacgctgagaaagatatacatgttttttcagttttatgtatctatgttctgaaggtaggctgttattctgcattcatacaaacttatatgtacatgtaataaattaggtcatatctggaattgaatcagctgtgagatcaat

SEQ ID NO: 102710 - DNA, 251 bp, Mimulus guttatus
  Intron number 1 from transcript mgv1a022762m (locus mgv1a0 22762m.g) derived from phytozome v7.0 (chr-ID scaffold_70; pos 298722 to 298972 reverse strand)
gtgtcaaagccttggagcttcgaatcggcgacaaggtttattcaactacctcgttacttgttttttaataatctgttctttgcaattaaagtaatttgatgtttgttgctttttggggtgggtaaacaaaggttataatacattactatggaagattggctgcaaagcaaggatggcgcttcgattccacttatgatcataaagatgaaaatggagaacctgttggttccttttgagtttgttcttggttc

SEQ ID NO: 102711 - DNA, 448 bp, Mimulus guttatus
  Intron number 3 from transcript mgv1a003116m (locus mgv1a0 03116m.g) derived from phytozome v7.0 (chr-ID scaffold_101 ; pos 1016754 to 1017201 reverse strand)
tattgctgtacgttttgcgaacaattagcattatttctcgtcttattttattgttgtcaatttagtcctcactaagctttcccgatttgtatcatgatttgaattacgaagaagaaaaaaaaagctatacatttataaatttgtagtgctccgaaaaaaacgaaacctgatttaatttgagtatgttttggagtacatgtccactgcccaaaaatgcgataactcagaatattaagaataaattaaagataacattaaaattctagcatactgaagattttgtttgttgtgtggctggttaacaaatgacttgccttcttagttgttgttgtttttcttgggttctggtgtacgttttatctggttaatttgttatgtcttaatcattgttaattagtggacctcgttgttaagtataatgattcgaacaggtgtgtagagatccgag

SEQ ID NO: 102712 - DNA, 878 bp, Mimulus guttatus
  Intron number 3 from transcript mgv1a009475m (locus mgv1a0 09475m.g) derived from phytozome v7.0 (chr-ID scaffold_106 ; pos 228780 to 229657)
aagtttttgcaggtatgctgtacctttctttagtggattataacgtgttgagattggcgtttggttattgcgacgattcgtttatggtttttgggggggtggttaaattatttaaggtatagtgatctcaaatagtgtgtgctgtgtgtgtgtgtgtcaaagtgatttcatttgatgattattttgaaagtatgtgtgcataagtttcgtaatttgcaatgtgataagaaagtgatgtgacgattaatatcggaactcttctactattgcagctgaatacaatgtagcaacggaaagttgggcttccactatataaccaacttaaaaatctggtttggctgttttgcttcggtttatgtttgtaatagggagatatgtgtgttacatgtgatataaacgaattgtgaattttcggaaacttcaattaaccatattcttcagtgatttatcttgaattttattcttatcacggacgtctgcacttgatttttgtttgaagaaaataaaggcaaagtcaccattctaaactctaaagtgctcggggtttcatgtaataatgcatttctatatttgttttgttgtcgtaacgaagcaactgctcaataagaaaacagagatgtaaaacacgattggtagaattaattgcacaaagagaaacggggctataatatactgatgcttccttaattcgcaaagcttttatatggtgtgtgtgtgtgtgtgtgtgtgtttcttgtttagcgatcgtgttgtatgctaaagaaaactaaaactcgatagatattatttgcattttcccgttaaactatttacagaagaaaaatcacattaatcttggtgcagaacttatttcttccttatcgaccgagctcacattt

SEQ ID NO: 102713 - DNA, 829 bp, Mimulus guttatus
  Intron number 1 from transcript mgv11b023775m (locus mgv11 b023775m.g) derived from phytozome v7.0 (chr-ID scaffold_8 7; pos 487175 to 488003 reverse strand)
cttttggtgtcgaacagctcgctttgctcactcaggttttttttttttttttttttttttcttttttcccttcatccttttttcattataacataattaattaataaataaataaaaattactaccactgttagtagtttcagatagtagtttatgttttcatcaataattttaagtgggttttgattttgttttttaatgatttaaaattaaaatacaattaattcttgcgctttggaacttggatccaaacttcagggtttctttattttttttaaatttttttttacttggactggttaaaacatataattaaccagttagttatttagtgacaaaattcttgttttcaattttaattttaattttttttggggtataaatataaatgtaaatggttttttttttttttttttttttatatttaatattctgctgcaaaaaaatctatttttcttgcatatttccatgtaatgaaaacctttgcaacatcgaactgtctttctattacaattttcatgctatgttttgaatttttagtgctgttttgggcaaatgtcacttgacaagttctcttctttgatttcatgtaacattatttattaattgtttctttttattgaatagatttcattatacttttttatccacattcaatactttctacatttggttttcttttttatttattacacatgcccccctctctctctagtcttgtctttccacagtaatctcgtttaaaaatatataaaaaaaataaaaaaaattgtgtaatacaattaattaattaaataaattaattaatttgcagaaacaattgagtagc

SEQ ID NO: 102714 - DNA, 651 bp, Mimulus guttatus
  Intron number 1 from transcript mgv1a002227m (locus mgv1a0 02229m.g) derived from phytozome v7.0 (chr-ID scaffold_26; pos 1575263 to 1575913 reverse strand)
gccaccgttgctcctccggcagatcgtatccttttcataaagtttaattttttttattttttttcccgtatggtgtgatttctttctactttttggttgtattcgatttgacttttgtgttttggttatgtggctgattttatatatgagttacagcatgtgtttttgtttatacgtatatagatctgagcttgtttagcctgctgctgctgctgcgtgggggtttcggtttttattgttctatggttatttgttcactgccgtcgattttttcttagatttaattaggtttgctatgtttctacctcttttttctcactcgtgcgtattgaatctgattttatcttttttttttttcgttagaaagctattgaggcctgcatacgaaagccctgtggtttaagttgagctactttttgaattatttcttcgtttttgcttcgttttttactagttatatagttttcatgagttttgctcaccattttaatttcttgaaactgaagccaactgtgagacgtcttagtttaggatttggagcatgttttttttttttttttttttttttttttttttttttaatccaagtaggaaaatcaggagaaaatatgtattcctttacttttctcgcttttagaagctgcagatatt

SEQ ID NO: 102715 - DNA, 710 bp, Mimulus guttatus
  Intron number 2 from transcript mgv1a015650m (locus mgv1a0 15650m.g) derived from phytozome v7.0 (chr-ID scaffold_81; pos 891465 to 892174)
tcggcaaaggagtctgcaatcggtttgtccgtacggtatgcatatgcattttgtgtgtgtgtgtagtgtgtgtttgtgtgtttgtgcacctaggctccattgttttttggatattgtagtttaaaattttcttctttataaaactggctgtcgaacatacttgtttcttgaggtgatcggaattgaattctctcgttaatttacaatgttttctgacttggggaaaaatgctattcaaattatccgaaatactcgtaaaaaaatgaatgcagagaattatcggcggaggggaacctctactccatccgccccgagattaatcctaccagcttattgatttttgattgttcatggaagttagatttgcccgtttttagatatctatacattggaatgccgataattttttgaaacttattatcaagaatatttctacacagccggaatactttcggaaatttatctagttttttttgggatggaaaacaactagttcaatttagaaaatttgatcagtcgtttcacacagaaaaataacggatctaaactttctgtacgtgatggtgcttgttggtattaatgaaaataacttattcttttttacacgaggtggttattcaataaatattctgaaggttttgtgaattagttttctcactgtcgaatctgattactaactaatttgtttaacggaaagggatcgtgccagt

SEQ ID NO: 102716 - DNA, 773 bp, Mimulus guttatus
  Intron number 2 from transcript mgv1a010244m (locus mgv1a0 10244m.g) derived from phytozome v7.0 (chr-ID scaffold_8; pos 1037272 to 1038044 reverse strand)
attatctccttgcctataacgagtttctatcgaaggtacccctttgtactaatatgtgatattatctttgtgttttatggatgtatttgtgtaactgtactttcgactgggctgctacaacgtgttttggcggacttgttaatattaagagcatgcctttaaacttgtctttgagtgctataaatttttgtttcgatgtatttcgtttggtgtaatggcaccagaaagagaaaatgataagtactttcggagtatcaagttcaaatacgcagattcagattacctttttagcaatgaagaaaaaacagttgacacatctaattttattacattgacattttatttttattatttgcaaattatacaatgcaattagttgattatttagattttccaaggttatcctgtcttgcataccttttccaatacagaagatgagtcatgacacgtaattcaacattgagctgaccatgataaagttgttccttgtactacgacaattcgatcccattttttttttctcattatttgatctgcaagtaaaatatataattatgtttcagacttttaaaatcatcatttgcctccttaaactgtgaaacaacgaataggatttattttgtagtataaatggatgaggttctatttacttggcaacttatagtgaacggggacatctttcaataagtgaactatgatcgtaattctatgtatggattccacaatcctttccataatcgttttcctattacaggttccaatccctgctagca

SEQ ID NO: 102717 - DNA, 905 bp, Mimulus guttatus
  Intron number 1 from transcript mgv1a007110m (locus mgv1a0 07110m.g) derived from phytozome v7.0 (chr-ID scaffold_87; pos 607012 to 607916 reverse strand)
gatccatcaaagtgtaagtttaatttcttaattaattaattaattaatttatttttcccccatttttgagtttagggtatctgggatttctgaattttgaattgtgggttgtggattatgttaatgttgggctgaattgcatattcttgaattggattaatcctgcattttgggtacatttcctacaacttcattgttagggttagtatctgaatttgaattttaaatgccagtaaagtaaatcattcatctgatttttttggggaaattacggccgccccatgaggtgaggtcagattacgaaaaaatccctcgtgtttgggtaattagaatcccctcaactatgaatcttcatacacgtacacccttatggtgtcaaattcaacagaatcttctagattctgcggaatgttctctagtttgtactcgttttgtgctaagatatacagattcttatgcaccacaatttgatatttacaagccaagaaacaattcatcttgtttcaaaatgtggagctaatatggggtaaaacgggtacaaactgaaaaatattcatagttgacaggtggttgtaattacccaaacatgagtggtttttccgtaatttgaccttacttcaggggtggccgtaatttcgccaatttttttttgtggaggatttggtgtaaaaataatatatagaaattttttcccggtgcttcgcctcaatataagtaattttagtgttgttacatgaactttagtattgatgaaaatagattgaaaatggatctgttaaatgagtaatgtagatcagattgaatttcctagttgaacttctgatggtggtttacttatttctaacatgtgattatattgacgttgtgcaggccggaatctttgggtattgtagtcgggatagttt

SEQ ID NO: 102718 - DNA, 871 bp, Mimulus guttatus
  Intron number 1 from transcript mgv1a010214m (locus mgv1a0 10214m.g) derived from phytozome v7.0 (chr-ID scaffold_39; pos 1407366 to 1408236)
tggccacgcctccgtacgtactgagaggatttcaggtaatctttttgccgattctgatttcaattacttttttttttttttttttaatttatttataagccttcttgtgtttgttaaaatgcctgtgtgaccaatccacattggttgccattaatattctttcttgaggttgattatgttttttaaattttgtttgacgcaatattctcagtgcgaaactggtggggttttaattacttctttcgtaaaaattgtttctttcatcgagtagtagtagtagtagtagtagtatgaatatttcctcacaattttttgaactgtaactatttttactggcttagaggaataatggattgtcataattttgtagtgtaattgtccttgaaataatgcgagttgtgtcctgtgaaaaattgggtatatatatatcctattcgctacctttatagatttcatagtgttggataacgaaaatcgtagagctgtgttgtaagatgaatgatactgaagatctattattggggatttaccctctttctgaatcatataccgcgctttatcaccgaacaaatcgatcatatatcgcgctttatcatatgctaattagatgatcattcttctaggcaatgccgttttgtgcacataatgcattcaattcctagtatgcttatttgtattacgctccatttcttggtcggaccctttccaattcatttgagtttcgcatgcttaaaccgtaggttggagtgcagtgacttttatataattattttactgaaacgtaaaagaaaatgtcgatggatgcgattaatttgacagaccggttccaatgttgttctttgcaaatatatgtatgtaggaagtgctggtg

SEQ ID NO: 102719 - DNA, 307 bp, Mimulus guttatus
  Intron number 2 from transcript mgv1a008087m (locus mgv1a0 08087m.g) derived from phytozome v7.0 (chr-ID scaffold_137 ; pos 442545 to 442851 reverse strand)
atcctttggctgcacaaaattttcaggtctattatttaccatgttgtttctctcgttttttaatcaagcatgtctccgcgtatgtaatcaacggaactactaaagttaacaatttattaaatgaaaaatgttaattgtaatttttctgaaaaatgttatgctttacagcagttggagaatttattcgttatatatattcttcagtagcttgcagaatttggattttgatttgaaggatagtaacaaaaactataactcatttatgaattcagatattgggtgaggcttaccaagtgctgagtgatcc

SEQ ID NO: 102720 - DNA, 507 bp, Mimulus guttatus
  Intron number 1 from transcript mgv1a009785m (locus mgv1a0 09770m.g) derived from phytozome v7.0 (chr-ID scaffold_83; pos 462206 to 462712 reverse strand)
attcgtcaaagcaaattcttacgaaaataattcaggtaaaggtaattaattactcccccacaatttttgcagatctttctttcccccttttcagctgatataaaacttatgatacgcatcaatttggattttttttttcttgtcaaatttgattaagatcagagttttgacttttgagtttagtcgtcagtttttcagattccgtgttcgattttttgtcaaatttggtagaattcccaatttttataaatgggttcacgctgatttctccaaaaaaaaaaaaatcgattttctttttcaatttaatttatagggttctgatgtaactgcatatttctgtgtctagttttgatagaaatcattcaggaaatgggcttaattgagttttaattagagaaaatgtatctatctgttttgaatttacttatgatggagttatataactttgggtttattgttaatctttttgcaggggattattgtgcaggttttagttttaataagtac

SEQ ID NO: 102721 - DNA, 802 bp, Mimulus guttatus
  Intron number 1 from transcript mgv1a019308m (locus mgv1a0 19308m.g) derived from phytozome v7.0 (chr-ID scaffold_76; pos 295545 to 296346 reverse strand)
tctaccacgcccccgtcaggaaacacgtaccgcaggtaatttactattttttttcttcaaaggttatatctcgcgcatgtgtttgttcggtctgggtattagatgcagtgcgtccatgagttcatagcaaagtatgcagtaaaggcaaggccttgagttccggggtggatttatgtacatattcatttctggttaattcatttttttttgtataccggcttgtaattttataccttcgacgtttttatgtgtcttcagagagtgatgtagtggcgaagagtaaattatgctaagtatgagttgtagcctcgtgctcggggaaaattatatatttgttccaaagtctctatctttatattaataatgaccggtgtggattttctgcccagaaaataatctttttcaaaaatgatatttaagttagtttaggaagggtcattatctgatgattctggatgcttccttaacagctgtctttttcgagggactgatgataattgttttgagaatttttgactcattccctcctatggttctcaagtgaaagttgattctgaagaaacaggattgaccctggctaactttgtttttgatgatataagagaatgtttatgctgatttacgtgttcggggaatttggtatagatatctgtttggagaggggccatgaatatagaataatgttactgtaatggattttatagtttcactctgagaatgattgaactgaaataatttatgaatccttttttttttccttaatgtaggacaaatcggacatcgaaaagacactggaggaaga

SEQ ID NO: 102722 - DNA, 674 bp, Mimulus guttatus
  Intron number 2 from transcript mgv1a019759m (locus mgv1a0 19759m.g) derived from phytozome v7.0 (chr-ID scaffold_179 ; pos 301420 to 302093)
gagactgaggaatttgcggctggtgaatacaactggtaattaatatgttaattctctatattcatatttccatgtacggtagaacctcgataaaattaataacctggtttatagaggtttaagtgtatttgtttttaattttattttttttaccatttattctgtcaatcttttttttttttttgataattactctaaccataatggaagaattatattacactatcattttcacaatcgaaagctttatatgttaacattgtgcaggtgttgcatgattaaaatcaaaagaaattagggaaaatagcacttaacccctcttgttataagcttttgcagatgatcctatgtgcttgtaatatcagcacataactcccttgtggtttatggggtagctcccgttagttttttcgtcaaatttaaccgcgtgtgggtatgtgtcaaacttcaacggggtcattggaaaaaaaatactttgacgtttaacactggcgtttaagttttaaggaaaaactaactaaagctaccccatataccacgagggggttatgtgctcatattacgaacataagggggtcatctgcaaaagcttgtagccataggggttaagtgttatttacccaagaaattaatctttttttcacttgtacacaggaaactaataatctacccta

SEQ ID NO: 102723 - DNA, 691 bp, Mimulus guttatus
  Intron number 1 from transcript mgv1a025821m (locus mgv1a0 25821m.g) derived from phytozome v7.0 (chr-ID scaffold_4; pos 2015453 to 2016143 reverse strand)
aagccaattactggcaaagaatcatccaacgccaggcacgatttctctaattcttcactcactctattacatcagtctacatcgccatcatcatgcatttttttaattagcttgcagaaattcgcgattgaatttagtaattttatctcagagtgaagcatataatatgctaaaagtgctctagaaaattgacgagtttctgtcggttcagctttcactgttctccctttattattattgtttttatttttttattttttgtcggttaactgtgatggattcctggagcatgaagaaattgttcgacctattgattttttttcatgacgcagcggattcgtttaatggctaatgttacaattttgatctgacttcattataatttatgtcctgttttcagctttgtgtaggtctaatttggggaagaataaaaggtcgcaagaaattgtatatacaagtttgtgctcggttattaggcatgattggtataacattttcgaatatagctagcaatcttaattggctaatttcatacattccacccttacatgtttactcacagatcaccattagtactaaatgcatatgctgattgctgacattgcttgtccgaattttttttttttttcgattttcagacgtatgtcattctaaatataccataattattgtgtctggcaggagacggttg

SEQ ID NO: 102724 - DNA, 865 bp, Mimulus guttatus
  Intron number 1 from transcript mgv1a003812m (locus mgv1a0 03812m.g) derived from phytozome v7.0 (chr-ID scaffold_13; pos 2043146 to 2044010)
tcgtcgtagaatccaaaaaagtcgacccatataaggtaaacccctcacccaccttcaattttttttttttttttttgcggaatggagttatttagtgtttattattttaagagattaattttaattcaccaggatcagttctggttatgatttattcattttttttcccttttcaactggtgtgaaaattaattttgtaacattgaatgcctgaggtattttcctttctgaaattaaaattgaggtataaaaagcataatgtgtttcgccttttcgatttgattggaagagtaaggcactgtgattttgaagaaataccttgtgatactgtttgaatagagtattaatacgacacgtgattaagcacgtgttttgatgttgtttagaggtgaatgcaataagaaacaatatgccatttgggctggatagtgctgaacagtaccatttatcttgaaggtcttatgttggagaatatgtattctgaatattgagtttttttgggtggcgatgaagaacaatttttttagataaatatcatgttattgcacacataaggttgcattgtgtagaggggcaaaccgtcatgctttcttgtagaagttgatgttccgtaggctgataaggaagttattttcatgttttaatatataattttattatttgagaagaacaaaattagaacacgatcttagctatacttagtttgatttgtgaaaacaggggagcctagtttttggttgcgtacatttttaattgatgctgctggttttagttaatgggcattagttacagattattgtttagcttcttacaagtatctcctttctcaggtacttggggtggataaaagtgcgagtcaacgtga

SEQ ID NO: 102725 - DNA, 361 bp, Mimulus guttatus
  Intron number 2 from transcript mgv1a024075m (locus mgv1a0 24075m.g) derived from phytozome v7.0 (chr-ID scaffold_16; pos 1452473 to 1452833 reverse strand)
ggtttttgcagctcgaaggagaagcccactctcgggtaagtttattgataacttccgaaatttttgtaattattcaagttcttgatgtgtactttattgagaattttttttttttgattttttttaaggtcaagttctttccagatattgaaaaatgttttcttctttccgttttctatagaaaaaattatattaaaaaacatagagaagttgatattttggagtagttgtctggccctgaagctgatattctcttacatgaatggatttcattgattatcttctttctcagtttcacaagttgatgtataataattttgctacagtggcacgcggattaagacccgcaaacggaatattg

SEQ ID NO: 102726 - DNA, 441 bp, Mimulus guttatus
  Intron number 1 from transcript mgv1a024075m (locus mgv1a0 24075m.g) derived from phytozome v7.0 (chr-ID scaffold_16; pos 1452788 to 1453228 reverse strand)
aggtaattaaatcccgccgcgtaatccgttctgcagttcttgtgctgaaattcggtcgctatcttgtgatattgttttgatttattccggttttcttttcttttcaatacctagatctgccttcgttttttttttttcgttttttttgggtatttgattggtaattggggtatttttttaggggttaactagtagctattaggcttggtaatttaatcttgctctgttttcaattgcttcttggtacgttgatattgcaaaaaagggtttcttttttaactttctggcaattgtgtactctttcgggagttgaatctgttattagggtttcaatttggggcactgttttctttgattttgatatatcgtgattaaaatatgacttttttttttttggtttttgcagctcgaaggagaagcccactctcgggtaagtttatt

SEQ ID NO: 102727 - DNA, 881 bp, Mimulus guttatus
  Intron number 1 from transcript mgv1a003681m (locus mgv1a0 03681m.g) derived from phytozome v7.0 (chr-ID scaffold_16; pos 405418 to 406298 reverse strand)
tgcatttcttacgtgcctttgcgaaagcgttagtaatcctcgcagctgtatttcattcaatgatttatttattttttccatcttgtttggtattggagctgtgttaatattatacttgttgaatatctcttggtttttggaatgttattcgtgattctaattcagtttacagtgagggtcaaaaagtgttcgggtgtttcttttgtcgatttttttaaggaatattaaaatttaatccgaatacgggtttatactgacaaatctcttatcatcttgctttatatgtgcaatgagagatgtataggtttgtttagtgtatcaattaggacatgagtaagattcaataattcaaggctcagataatatttattattgcattgtttgttatcttcgtggtgctagtttaatggtaaactgcgagtgaatgaatcagtaaacaatctactgccatggttgtgattttgtctctcaatctacttctttacctgttatggctttttttgctccgttcttttgatgattttgttattcctctgaagcaagcagtgaaatagctgagcagtaaactgacacaaaattgatacacaatatttcttttaatacgttgaagaaaaggccaatggaaagaaatatttaaatcataggagatccataagtattcttagttatcaatctgtcagctatggcattcacatggtcagcaagatttccttattgacacgtggcttaaatgtacatctaggtgcaggtgttcttaaaaatgcaataggtcggcacaggcctagtgtcttgtcttttagctactgttgcatatccctgccttgcttatatgcatgcatatggtgacattgtgctcaaaagtgagaaattgtgcatcaggt

SEQ ID NO: 102728 - DNA, 334 bp, Mimulus guttatus
  Intron number 3 from transcript mgv1a021491m (locus mgv1a0 21491m.g) derived from phytozome v7.0 (chr-ID scaffold_1; pos 559052 to 559385 reverse strand)
agcaaaaggatttacggatcgaaggccggattatagtaagtcatgcttttctattttatagttgtctgtgaacatttgtgatcttttaaatgttccgtagaagtaagaaacggaagcgatgagagctaatttagttggcgaagatattttgttagtacgagggtttggtttggattcatgattgcatgaattatttgtattttctttgatggattatgcatattgaagaagtataaatttgattgatttgttatgtgttcgtcaatcccgaatttcgatttaaattttcgacaaaagtgttaaagtctgttctgggcagggctttgacgaatac

SEQ ID NO: 102729 - DNA, 693 bp, Mimulus guttatus
  Intron number 4 from transcript mgv1a008695m (locus mgv1a0 08695m.g) derived from phytozome v7.0 (chr-ID scaffold_102 ; pos 17659 to 18351 reverse strand)
atccctataagtgccttctttgcatctagtctttggtaagatctcaactgtgacattgatattcttgtaaactaaattgacccatagtatattacaactggagaaaatgtacatgaataattattagagtgtaatgaagagaattcagagatgcctattcctgtgccttgcatcgcctaacattaagaataaagaaaaagcagaaaaatattgtgcattaattgttattagtgctaatagtcttactaatagggcttggtatccatacggggataacaaactgacatggaaagaaaataagatgcgttctccctgcattttgggtttccatgtgacatagcacaacaacattcttgccaacattttgttgggaaaaatgtattgggagaaacgtagcagtcaaattatatcaaaaggtgttggaagaaatgtattttgaaagaagaatgtgaaaaataaatttatatttgtttatacattagtgaaaacattttgttagcgtactggtttcttacaccaggtgttgctctaggtttattcatctttcaagattgctgaaattcctactcttagatatgatgtattctattgtcataaatgatctcaaatgcactgttcctcaaatttatagcaataatgagagtttatttcgtcacaggtttggtaacaccgcatacttgcacatatctgtgg

SEQ ID NO: 102730 - DNA, 817 bp, Mimulus guttatus
  Intron number 1 from transcript mgv1a012829m (locus mgv1a0 12829m.g) derived from phytozome v7.0 (chr-ID scaffold_308 ; pos 104910 to 105726 reverse strand)
aactcttggcaacattaaagaggtcagtattttgattttcttcaattttttattttagttttattttaatttaatttgcagattattgtaaattggaaagttagggatttgggggaagttcagttaacgtttttaacagtagttgaagttgaatgctgataaagattcttataaatttagtcgaattggagcttttgttcggttttcgtatgtaagaaagagattgagggatgtttctatggcctcacacgaactatataaaccggaatagttgcgattcttgataagaaattgggattcttgttatagttatagctaaatgacagatgttttcaattttgttatagaaaaacgagccgttttaagatttcacctgttagaaccgatgtcttcgatattgttctgagctataaaaagtggagccgatattttggattaggtggagaaataagtttcctctcgataattaacgatttgttttcagagcagctgaaaacacgcctttgagaagatggtttcggaacaaaaaccgtgtaaaaatacgaaaatcggacttattggctggaattgtattaacggaagacaacttcgattaagtgcttcgttatccagttactatacgaaacatgtttctcttatctgagaagaaaattaatgcgacatcttttaatcggtggcctcgaattttagttagttaaaacgcttttctcgactatagatgtttcagcttataaagttgtaatttattttttgaatatttgcattgaaatgtgacttggcagataccgtttgaggtcgaaggttgatatcgagagtg

SEQ ID NO: 102731 - DNA, 498 bp, Mimulus guttatus
  Intron number 1 from transcript mgv1a013505m (locus mgv1a0 13505m.g) derived from phytozome v7.0 (chr-ID scaffold_8; pos 1568354 to 1568851)
cacgtgctgctgctgctggatctgatctcaccactgtaagcatttgttcccccccatgccgatttaatttgtgtttgttgctcgttggttcgcgttttaggtgccgatttgaacttaaatctttgaatctgagttgtttagtataatttgaattaggtcgattaaatacgtctcgcaaatagcttcgtattaattcgactcgtgtttaattgtattgtattgcattcccctgttcttttttgcttcttgtcggagaaaattcggaaataattcgtttattgatttcctaatatagtagttctactggcccctattgtgatttacgcatttgtagcttgtgttaattctcagcctagtaggaccgagaatcttgttcgataaaaaccagccaaagggctattttcttttttatgcattgtttccatttacggcattttaattcggttttttcgttttcgtacagttggagaggggtctagagcctattacgccggccaa

SEQ ID NO: 102732 - DNA, 1009 bp, Mimulus guttatus
  Intron number 1 from transcript mgv1a003293m (locus mgv1a0 03293m.g) derived from phytozome v7.0 (chr-ID scaffold_60; pos 422633 to 423641)
ccatcttctaccttcttgtcttaaacctctctgtggtgagtggtttcgtgacctctgtgagtgagggtaccagatctggggaaacactgtgtgtgtgagttcgattcgttggggttttgggttgggttgagactacagtcggagtgaggctgagatctgagcactcggatgatgttctgactgctgggcgtggatctgtgagcttgacaccgggagtgtgctggctgccgccgactggactccggacgtggacacgggaaacgaggactgagccgttgctgtgtcatcttctccgccggagccgaaaacgggcagattttcgatctgccccagattcgttcttattattatttatttctgtaatttatttgttaagtcttaatccccttccccttaggcttattaatctgtgtaattcatttgattaaaggtctgtaatattaatgctatttgaacggccacccaacatgttgtgatcatgataaactgataaattgattttagagttaataatttacgcttctaaaaattctgaatggagattgtgacccagttcaagaaagaaagatgtaaacatattatatactacaagtttattgatgtacgtatatatatgatacgtatattacatgtatatatatatgtatatacaactacgaaaactttctaaaacaagcgcaaaccctatcatcagcatagcaacgagcgtctcttacatgattgtaacctagggcaatcttgcacagattttgacaagctatcagtacacatggatcaagatcgaaatgaaatggatcttcgatctcgttaggtaccgattctcgtccaccaacttcagggggacacatcatcaccatcatcgccaacactattgcagaaactaccaccaaattcattctaacggatttttttttatttgcaaatgatcgataattctaatatgtatattgatttaatttaattctttggggaaggtaggtacatatatataggcgtttaatagcttgat

SEQ ID NO: 102733 - DNA, 964 bp, Mimulus guttatus
  Intron number 2 from transcript mgv1a004798m (locus mgv1a0 04798m.g) derived from phytozome v7.0 (chr-ID scaffold_96; pos 755158 to 756121)
ctataatcgctctctctcgcccgattgtgtctcaggtttactcagattagggtttaattgttcttgtttgatttttttgtactcgaattcggctccggcattgtttttgtggtagtggcattgacttacttctttgttgcaaatgatgtttgttgaaattggtatttttaagattcgtgtatgcggattatcaccgtaaccatcattagctaagcatagagagagaatgattagtttgacaccgatgctaggcttatactgtaatagcagcatagcttggcgtttcgaagacttagtatgatagactgttttctctttgaacactcagcttgtggcataagtttatcggtctaggtttatatacgagggttgttatgactctgtacatgctctgggaaggtgtctattcgtctcatattgcgttggattaagtggaatttgaaccgtgctacgatatttggtgtaatcgaaggcgggatgaacataggattttaggtaagaagtcagatgttcagtaatgccatgtctaatatatataaacaaaataaagaagacttttacttgtggtttatggtaatggatctgtaagtgtgtgattctggattctattggttggatttatcaaggtatataatagctaacttctattgatttaaaattttgtgtattttaagtccttccatggatctcagattattcggttgatgacttatccatgttaatgagaagttttgatgcgatttctactagcgtagttacaaatcacatgtatacatttagtgtgtaaaacttttttttttcattaagatagggataaatttctgaatttgtgcttttaagggctcagagttgaagaaaatgtcgatatccataataatttggtaatgtgtgattttccgctaatgtctgttaattgtgtacttttaaagggctcggagtggaaagaaaaggctgaaaatctcga

SEQ ID NO: 102734 - DNA, 932 bp, Mimulus guttatus
  Intron number 1 from transcript mgv1a017939m (locus mgv1a0 17939m.g) derived from phytozome v7.0 (chr-ID scaffold_15; pos 588779 to 589710 reverse strand)
gagtggtgagttcttggacgaaactatacacagtggtaatagatgctgaagtcgttactccgattatgtttactaacaacggcgagattatatttgaagacggtgagtgtgatttgaccgtatgccacttcgaaagtaacgcgatttcgtaccttggagttgaagatcaaggttaccttaatttcgtgacgtacaacggtagccttgttatgttggaggactaaaaaaatggcatttgatcagttttttaaatgaggaagaaagtctattcgtaatcctctcaaagactttttttttctcttttcgcgtgcttagtttttgaattatcgttctttgtattttgttcgtttatttaattttgaattaccatgattttgtatggtaagttggaccttggatagttggttattaattgattgttcgccatcaatgtttttgaaagttgtttcccgcgatatgatgaacgatatcgttagattgcaatgaaagcatatactcattatatatgggatgttttgtttgtaactagtagaggtaatgcaaggatgctaaatgcgataaaaccttctcgaaatataaagattctaatttaatgctcgatttaccgatcacttatgagactctatgcatcccaaaaagaaaggataaatagaacttaattcctcataattatcttccattcttttattgagtgaatgtgacaaccttgtttttgtggcctgaatatttgaaaaaaaaatatgaaaaggaagtaagattatactttttaaattttgttaaaccttaacaaaacctttatccagtgtggttctaattaaaccgagattttgttttgataaaatagaattcgacacgagcatttgtttagtttttctttcaaaattgttctaaaaacatgttcaatgtaaataagatactgaattgtagcccgg

SEQ ID NO: 102735 - DNA, 971 bp, Mimulus guttatus
  Intron number 1 from transcript mgv1a002060m (locus mgv1a0 02060m.g) derived from phytozome v7.0 (chr-ID scaffold_109 ; pos 848880 to 849850 reverse strand)
agccccaagttttacgagtggttgttagaagaccggtaggtgatgatttatgactgttctttttgttaactgcaaagtcctcttgtactatactagataatcaatggccatcccatttagtgaactactgattattggtatgcttctatatatgctagctaacatatcgcacaagaagttttatgctgataattcccaatgttaaaacctgagaagtagtcgatttttcagataaatgcatacattagatcaatttaagcgaggatgacgtgcatgaatgcccaaaagcaaagatgcattgatctggtccaaaaacaaattactgacctcttgtagaaatcatgattttgttttcttgaccttgaggtgtcgattccattgctaagcatggttctagttgatgcctttttaagtagattaaaaattaaagtgttgctttatgcagattaagtgtcacattttcttctgggattagatagagagatagataagacgcaagaagtgtttttcaatattgttacttgaaaggtcaggggatcaagatcttgtggttataatctggggactggtttccctatgaaatgtcaaggttttgtaagattcacctatttttggagtagaatgagatgattcctattgagtagtaacagttcgaagaggccaatgaagactgtttgttatatctttttcttttattttaaaaaataagccattagctattctatcatatggtgatttgtatttggctaagcatatttagattcctcacgtggcaagttgcgtgcctatttgctttttgcgtaattatattttcaggtcttgcatttgaattatttgttatgtttactagtgagtcttttggcatggaatgtatttacattctaacacttattttgaactagtaaatcctctttggtatgtttttctatgttgcagctggttgctcggttgactaaggatatcgttgagat

SEQ ID NO: 102736 - DNA, 615 bp, Mimulus guttatus
  Intron number 3 from transcript mgv1a013095m (locus mgv1a0 13095m.g) derived from phytozome v7.0 (chr-ID scaffold_24; pos 1497160 to 1497774)
agatctttacaataatgtgagttctgctgatatttttgatagctctttgcactccatttatagggtgaaatatcaggagaatgtatcgtgcacgtgtttgaaactctttggtatttcgaaaacacgataattttctgaaaccacgtaagtttatggtttattttgttttattgctaatttctgtttggctcgagcgcaaaaagagcttaggctgcgtttggcttgcgtgatttgtaatgaatggatttgaaattagtccaaatagggaggatttgaaacgactccaaatgggaagggatttgaaatctctcacaattggtaaaaaaaaaaaaaaaaaaaaaaaaaaaaaaaaaaagaaaacctaaagaaagctatgaatttgaaattccttgtcaaataactcaatggatatattattgtagattagaaatcccgctttcaaatccttccatcctaatgcacccttgggcgattagagttattcaaatgatttcgtattttatttacccctctattgtaagaatcttctctgctgttttcttcttgatactttttactagaaaacgacgaattcatgaaagaggtttgtattccgtcaaactattttgtaggtgt

SEQ ID NO: 102737 - DNA, 824 bp, Mimulus guttatus
  Intron number 1 from transcript mgv1a000455m (locus mgv1a0 00455m.g) derived from phytozome v7.0 (chr-ID scaffold_316 ; pos 141913 to 142736 reverse strand)
aattcgtcggagatctccgtcagaactcaattcaggtatggatcctcttttttttttttttttttttaattgtgctgtaagcttatgtatgcgattaatcttcgtagttgaatattagtggctgatgatgttgatttctgtttggagaaattcttagatgcagaaaatgcagtaattattagtgtttattgttgagaattgatcgatttataaaagaagaacagctagataaattatgctcattcaaaaatcaaacataatatacatataattttttttatgatttaatttagctcatcgtatgttacaaggacagttattttacttgattttttttggattttgtctcttatgtagtaattatattttgggtcttctagatgtagtttgtgtaattagtgccatgggtttcttttcagttcttagtatcaaaaggagtaaatccatctttatttcgaaaatcgtcgtttttattatataagaaatggtgcaaccttgtgttgtatgtaccttttcgttacttcttttcccaccaaatttcaggattcgagtttttttttttttttaaaaaggggttgaattgaactgggctgatttttcctttgatttttgtttttatgaagtgtagccagttggttacggaagttcgttttctgttaatttgctattgacattgagttttcctttttaatctaagtcggtttatttatgttgtctagtagttcattgtttttccactccatcataaagagtgttatttgagattgcggtaattttttggttttgcaggacacagtcaagaacaatatccctgaattgtttta

SEQ ID NO: 102738 - DNA, 1045 bp, Mimulus guttatus
  Intron number 1 from transcript mgv1a000773m (locus mgv1a0 00773m.g) derived from phytozome v7.0 (chr-ID scaffold_54; pos 530479 to 531523 reverse strand)
gctaatcggatttgttttttttgctgatttaataggtataattttccagatctcggttattttgaagctgtttggattgatacatttgttttgtgctcgctgaattgatgttttttttctttttcaattcgttttaggtgtgtgtttttatgtgtgtgctgatcgttggagtttgattttcagatctctatcttattttaggttaatttgaatgtgtatgtgtttgcatgtgattatttgtatgtgaattttgattttatgatgttttgttcgtttatctaaccacttgcattatgttttcgttagatcacagattttttttatgtcttgttgagtttgattcattggaggagttaattttcttgtttaatgtatcaggggttctgatttctgagtgattggatcttatgattttgcagaacatgtggatctgtgatttttttgcaattttctggtgtttttgatttagatatgggtctcgagttatctaatttaatggttttctgcatgtggtgatgattcaaagtaatagatgaatctccttgcttatttcatggttgttattattcgttgaagataccgtttttacaatgatataaaaagatgcggatttatggaatttgtattagatgtagtttaaaatcaagatttgatcttttttgccacgttgttgaccaacggtaaaattgaatgtctgtagaagttcgtgaatttagattgtttgtcgtgtatcgacgtagatggttaaagcaattaaagctggcattgattgcatgtttctgtacttattgtggcgagtgtagctccaacaggaaactctaatgatttttttttaaaccactaaacgatgagagaagtagacgattagttttaatataaggaatgtgagttaaaggttctttctttttattattatttttgcgagtaactttttattgttttgcatgtgaataacggttttccgtaggtgtgagatattatgtattgaaatggtatcataattaatatttggttaaatgtgcgttttgcagactttgctgttgaa

SEQ ID NO: 102739 - DNA, 962 bp, Mimulus guttatus
  Intron number 1 from transcript mgv1a013671m (locus mgv1a0 13671m.g) derived from phytozome v7.0 (chr-ID scaffold_151 ; pos 283200 to 284161 reverse strand)
tctcttttttcccccatttcttctgcagcaatttggtgagtctcagatcttaattttttttttatttttttttatttacgatcttagtttctgctcgattttgtatgcgtagattaaatgtgagatagatatataactggatcttttattttattcgattttaattttgtatcattcatttttgtgtttgctgaattttggaattttgtttgtattcatttacacggtcatgcatttttgtctgtgattaatggtgaatttgatctgagcgatctcggtttaatttgagttattggcttatgtttttgtcggttttttctatggatctgcctatatggaccagcctcttgttagtggatatactgaatagtgcggtgatctgcattatgttatattcgataataagtatttagatcaccgtcgtcaaattgtcaaactgttgataaagatcacgtttgggctgcatttttttgaatttgaagtgtttatttcatcaaacactgaacattcttcgctaaaattcggtcttttcgttgatttttattgatctccgtttattcttttattattatttagatcaccgtcgtcaaatcgtcaaaatgtcaataaagattgcttaagggctacattttttgaatttgaagtgtttatttcatcaaacactgaacatttttggctaaaattcgatcttttcgttgatttttattgatctccgtttattcttttattattatttattttgtggcttaacattataaatagagctaaaaatttactgctaacagccacttggcattgatgtgaatttaatcatcattttagtacgtccggtttctatgtgatatgaatttttttttctatctaatgttacctttgtacttgttcgactaaaacaacgcatctaactctcgttggtatatttggttgtatgcagataattgattggaatttctctaggcact

SEQ ID NO: 102740 - DNA, 732 bp, Mimulus guttatus
  Intron number 2 from transcript mgv1a021876m (locus mgv1a0 21876m.g) derived from phytozome v7.0 (chr-ID scaffold_113 ; pos 286501 to 287232 reverse strand)
atttatctgcttccaccaatcatcttcaacgctgggtaagttaagcctatttacacctctatctcttctggatccagcttgcttttatctattgatttctgttggatatttgcgtcctgatttttatctacagcgcatattgatgtggtttcttctattaggagttgatgattcaatcagatacgtgacaattatcatgatataaattgtggttattagcttcacaaagaaatctatcggtgccgacctaaagttatcctattttctgtatgtgttacaaatatttattatcgcctatgtctggggtaaacctgcattacccagtaactctcgtcaagaggtatggttcctagttgtacctcttgatgttattgacgttctggaactagcaactactattccattcaatgattttttgataacaaatgagatatatttaattaagaaatcaaaacatattaaatgcttatatgtcgtttgaattgttgttctgggtaaataaatattcagctgagatcattgcctggcaagtctgggcagtattcttgtactatgactgggagaagaactcaattttctgccacccttgtgttgccttggaagttgtttagtagaagattcatatgcatcgctgctgcaaagtttaccaatatgcggatgttgcggtttatttttttcaccttgatccgtgaatcaggttccaggttaaaaagaaacagttctttcgcaact

SEQ ID NO: 102741 - DNA, 762 bp, Mimulus guttatus
  Intron number 1 from transcript mgv1a018710m (locus mgv1a0 18710m.g) derived from phytozome v7.0 (chr-ID scaffold_1; pos 93154 to 93915)
gcaggcaaataccaagccaggtatattcaagatctcttctggattaatatggttttttcttttactttatgtttcatgatttttatgttgattttactaaatgagattttcttgattttaattgtcttagaaagttaaatgattattacatcatttgacacattgagatatgaaaagcttttgcctttgtgtcctatttgtctttcttttttggtgtgcttgttatggtatgtcttaaaatttgaggcccgaaatcgaaaggctaatttttcttcgggccgtggatacataaattagggtttattgcatttagcacctttatatttactagaattgtaaaaaaactcattatactaaaaaaaatattaacaaaatccctcctatgatttaattttattagcaaattaaactacccctaaaacgcattatttattagcagaaaaccccttatgatgcatttttcgagcaacaagtcccctaaatggttcatttttaggggatacgtcgctaacaaaattgaatcacgaggttgaatttcactaatatttataacacaaggagttttttagcaattctgtgaaacataggcgtgttaaatgcaataaaccttgcgtaaattagtgtattatttctattttcaattttcatgtatgttcttaatttgtctttttaaaacatttttcactccaatgtcaaattaacaattaattgcaactaaattatcatcttttcttgttcttggtcattgaaaaaggttgccga

SEQ ID NO: 102742 - DNA, 954 bp, Mimulus guttatus
  Intron number 1 from transcript mgv1a003562m (locus mgv1a0 03562m.g) derived from phytozome v7.0 (chr-ID scaffold_351 ; pos 38487 to 39440 reverse strand)
tcactggctttgctgttgtcctcttcaattacacggtaacttcttctttttccacaaacatattactccacctgcttctctggaatctagcatttgctgtttcatgtccaattgtccattcaaattaaatggctttgtgattatcaaatgcgtatgaattacggagataattcggtaactgaatcatgaccgtattttagcatggcacaaagtaatgattatctcgagttgtgctgttccaattctttgattttagtgagcaggctaaaaaactaccatactcttaggtttcgtgtcatacaagttaatagtacagccagcagcaaactaagtgataaattcagtatctgccccctttgaaattgttggtttttcttgctgaacatttttggcccgagaatgtaggttttgataacatacctcatcctatccgccactgatatttcatgctattcccgtttaagaaattatctgtgctataattgatgactgattggattgtatctccatgcaccgcaccgcatgtttgttatgttaaattaacattcacaagaagtgacattatatgtatgccgacttagattgaatcttgttgaatagctgttaatgaatattccgtaatgggtgtccgacatgagaatcatcattacagtttatgacttgttctcatgagattgattcttgcatttttatatcgctcttgaatctgatttgctgatatgtacaattcacaatcttctttgttctaaaaccatgtatgctcactcgttttaaacctttttttttaacattctcggtttactagtgtgagtatttcatgaagacactgaaaattgtactcatattttttttagattttggcaggggaatgcaatcctttgttagattgctcttatttcattgatgtaatcaagtttcttaatatcgttcagactctgttaacttagtaggtac

SEQ ID NO: 102743 - DNA, 638 bp, Mimulus guttatus
  Intron number 2 from transcript mgv1a017618m (locus mgv1a0 17618m.g) derived from phytozome v7.0 (chr-ID scaffold_54; pos 1358651 to 1359288)
agcaacccaaggccgccagtaaagaatacgacgaggtattattaactctgcaattggtttcccagcgctttattttacttgcaattttggggaattttgattcaaattagggttcgttgcttgggtttagtttaattgttaaaatcaattcgggttcatccgatcttcaatttaattgttcgatttagaatgggtatttatttaaataatatgtatccctttcaaattgatggtttgaattgtgacttacagtatgagtgatttaatcctccgattgtgttttccggtttgaactttagatagaaagaagttgatgctaaagattacggttttatgtattttgcagccgcgttctataattgttcttaatctcgaaaccctagatgctcgtaaaatatactgattgctattgcctagtgtttaagataatttgttctattctcatttgatccctttcgttagaagatggcaaaattgaatgtgtagaaaaaacaagcaattgaaatcattctcactgtttttcctcgaatcaaatccgatatttagctggacaaattagaaaactaaaacattatacccattccttggtagtttttctgttatttttttttaaattatgtcgatttttgcaggttgac

SEQ ID NO: 102744 - DNA, 847 bp, Mimulus guttatus
  Intron number 1 from transcript mgv11b015721m (locus mgv11 b015721m.g) derived from phytozome v7.0 (chr-ID scaffold_2 00; pos 5010 to 5856)
gtgttcgggaagccgtagacattggacacggagtaaactctttagcgcaattcggactcgaaccccgtccttaatatactgtcgggccgtaataatcgttcgccacatgcacgacgaccgagttctgagtgtacccgaaaataaagaactttgattgttgtatccggcctggaaaattctcgagaggaggagttacggatttgttaagattcgctagcaaggctcgattgaagcaacggaggtccctaaatcccatgccgcccatctcttttggcctacaaagtttcttccaggccacccaattcatttgcttgccaacccccgctccccaccaaaaacggcgaatggatgtttctttttcataaatcaatcccgatggtaagaaaaaacaagacacgacgtacgatggaattgcttgaagcaccaattttatgagcacctcttccccgcctttgacaattgtcggatgtcccatccctcaattattttccatacccgatcccggagataactcaagatggccttacgagtccttcccattgtcactggtaatcctaagtaccgatcacaactctccaccacttgaaaacccaatatagaatgaattaggtctttatcttcgggcgatgtggaaggacaaaaggacatggttgacttgtctagatttatcatttggcccgatgtcctagcgtatttgctgagtatatccttgagtaaaagagaatttccatcccgcgcttggcaaaagatgagagtgtcgtccgcaaagcatagcgttgagaccaaaggggctgttggggcaatctggatgccctgaagctgcccgcttcacgttgctcagtttatc

SEQ ID NO: 102745 - DNA, 920 bp, Mimulus guttatus
  Intron number 1 from transcript mgv1a013367m (locus mgv1a0 13367m.g) derived from phytozome v7.0 (chr-ID scaffold_13; pos 265298 to 266217 reverse strand)
accaatatatattggtgtctgttgtgtgtttttgtgtgagtatgttctgttttgttatttgtgtgaatctcttgtatttgtgaagattacttatttgatgtttctttctgcaatttgggtactttgtctgttatcaattttttcttgttttttttttgggaaaattccgaaaatttccgaaaattacgaaaatgaagatttctgaaaaattccgaaaattccgaaaaaatcggaatcggaatcactttttgaattccgaaaaaatcggaatcggaatcggaaggcgttttggacttccgaaaaaaatcggaaattttccgaaacacccaaatccgatccgatctgtccgatttccactcctagtcaagtgtcaacacggtagattggaggactaaatgtgaagtaattatcaaatttcgggataaccgccctcatactatgataatagtatcatcagttttttgaaattgtcaatataatggaatgatatgattagatccgagggatctttccgtttttcgaattgtatagaatttcatgattcgatgaaatatcttgaaatttcttttatgtcgaatttacatatatgttatgtatcaatcaagtgaattttgtttaattttatacgttgcaaacaatgtaaagtatgtagatgaattcacaatcggtataatattacagggtaagaactgaaaattacgataggaaaacgaattcatcaatcacaaagctcaacacgcctacgtttgatctgaaagtctgaacaacaaaaaattataaaatagattaaaaaaaaaccccaatttaaaattcagtctccggaagcccgtaaaacaaaatcttcgaagattctccgtgggttccgactaatcgattattttttagggtttggaacttccgatcgctcctccttgattgtt

SEQ ID NO: 102746 - DNA, 552 bp, Mimulus guttatus
  Intron number 1 from transcript mgv1a012070m (locus mgv1a0 12070m.g) derived from phytozome v7.0 (chr-ID scaffold_17; pos 1249044 to 1249595)
gctcatcactccctccgccatctccggatcccctggtgagcttcaattttacttccttttttcaggatttttttcatccgcccttacttacaagtgatgctttttttttttaagaaataatttgacgaaaatatttatgatagtgaatgtaatttcattttagggattcgtagagaaaatagaggagcaatatgtcaatttggtggatgatttaccatactcttacttaagtgggattttgtagtcattggttgcattattgtgtggcatgaatttacactggattggggattgtttgttgtaatcagatattatgagaagtagaaaaagtgaattattaatgctggtttaacttttgagattgtcaaggatgtaagaagagcaaatcaaatgaaatttcattagaagcaagttacataggaagagttcagttgaggtgctcaaatatattaaataattaattgaatggattaaagttaaaaaagtcaagagtgtaattgaattcttgatgattgtggatgatgttgtgcagcaggagctgagacatctgcc

SEQ ID NO: 102747 - DNA, 653 bp, Mimulus guttatus
  Intron number 3 from transcript mgv1a012070m (locus mgv1a0 12070m.g) derived from phytozome v7.0 (chr-ID scaffold_17; pos 1249824 to 1250476)
gccgaaaaagggctgactacctcgcagctgagaaggtacccatttgttgaacttgaatccccagttcttgaattgcaaagcagtttcttcttctatgctactttttagcaactaaagtcatgagcattttaagttacttttacgatcaaagaattaatcttcggtaacctgccaaaaaggaagtcagaggaagaacaccttggaaacatataactggttaattataattactcgatcatttgtagcaatcttcgggtatctattaagaataaaaggaaattagagaaattaacagttccctatagttgttaaaactctatcaactccatcaaatgccccaccgtagatggtatcagtattttgtttgctattatgtacaacgtcaagttcaatttaaatattttgtcataccactaatttgttgaaagtacaatgcgttgttgtttgctattatgtacaatgtcaagttcaatttaaatattttgtcataccactaatttgttgaaagtacaatgcgttgttgtgtaatcactgtacttgatcaagtgaaactgaagcttgtgctagttaagatgaaaatgtttaattttaacagtgggagtctaggcttatttacattttgattgaatgttgagtttctttgacaggataag

SEQ ID NO: 102748 - DNA, 686 bp, Mimulus guttatus; identical to SEQ ID NO: 102058
  Intron number 1 from transcript mgv1a003974m (locus mgv1a0 03974m.g) derived from phytozome v7.0 (chr-ID scaffold_1; pos 3003298 to 3003983)

SEQ ID NO: 102749 - DNA, 768 bp, Mimulus guttatus
  Intron number 2 from transcript mgv1a009865m (locus mgv1a0 09865m.g) derived from phytozome v7.0 (chr-ID scaffold_113 ; pos 530076 to 530843 reverse strand)
cttccaaggacatacttagggaggaaggattaccggtatcgattctttgggcatttttttaatattgttagatgtaactcgagaaggtgttttccgtttaatattttgttctcttatgtgtttattcggtatgtctagagtctccacgattaccgaaacatgtgtttcttgataatttagaaatatgtgttatggcgcagttcgggagttggatttcgccagattttcttgattttgaaatttgggggaatcgtttgacgaaagatgtgtgttaccatacttacgttatgtgcaaaaaagagtggcgtaatcttcgtgaaagaatcggaaatttgaaaaaagaagtaaatgctattgttttggaaagattcgtaagagtcttccgtttttcgtttggttgctagggattttgtgttgtgataataaagacacgattcgaacagcttaagcacttaatcgctcgtaccctgtcagttctagtactatttacgaatctgagaaaaaaactgaagcagaatcgagaagtcgtctgcaagttttaattaaaaacctcatttcagaactcaattacagtagctaatttcggcaaaataaaagtaaacaaaagggacaaaataagcggcaaacggtcgtatttttagtcattatggcatatctcacaatcgtgtgatttcaagaatcggttttattcattttcactttactttttgttgcattacgttaattatttcatctttctcgttacttaacagggattttggaggggca

SEQ ID NO: 102750 - DNA, 1023 bp, Mimulus guttatus
  Intron number 1 from transcript mgv1a015004m (locus mgv1a0 15004m.g) derived from phytozome v7.0 (chr-ID scaffold_58; pos 711991 to 713013)
gcggtcaattccggcgaagaggtgaggtttcctggttttttccgcatcggcatttgcgttttccttctccaatttgagcttttttttttgttttattttatttattattggcattttttagtagcagattccgtgattcaattattctgatttgttttagggtaattaaacctaagtttttttccccctcaatgttgctgttttcgttgaagatttggatgattttttttttattatttttttttttcgatttattgatgattaaccgttgaccttaatcgaatatagttttattttagaggaacaatttttgtaaagagttattgtttttgaatttatcacaagttgaaaaattggaggtaaaatatgagatactgtaaaatctgtagttatgccaattggggtatggggtatgaactattgctgcttatcttttgtttctggtttgagggggttgataaactacaatcgaccgatctgtgaatgcaagagttctgaatccgtggttttgtgtgattatattcgtcttgatttatagttgtttggatattaggaattgagctgaaatctagttgctactctataacttgacgcgtagatttgagctatttttcgctggaatattatgaaggtgaatcggcatttctggaacttagcgtatatttgttttgaaaatttatgatttggcatagaagtgatagttgattaattaccttctctcgtacttgctgaaattatgtaagtggtttcgtgcacgccttgctacagagacgaccttttatcgcttttgtgttgcacattagcataaattgctaatttgatatcattttcattttattgtatttttagtttgacgggttcttttacttgttttttgatttatggtaccttacatttgtgatgtgatcgtcaaaagattctgtagctcttgactttttgcagccttctattttctaaattatgtgatatccttactttattttctcagtgcgagaatatccacagcaacgtggttttgcacga

SEQ ID NO: 102751 - DNA, 1040 bp, Mimulus guttatus
  Intron number 2 from transcript mgv1a006675m (locus mgv1a0 06675m.g) derived from phytozome v7.0 (chr-ID scaffold_19; pos 608479 to 609518 reverse strand)
aacagtttcttgctaacacacctgttatactgggggtaattattaagtatacatacagtagaaactcgataaattaataatctgcttagtaatagattctcccggtcccgactcagtaagaatatattaaattattatttcgatgatttaatatttcgctaaattaataaaattttacttgtctcgactgtattaatttatagaggttcaactgtatacgcatatctatgtattaaaatttagggtaaattccactttacccccctgtactctgcccaagaaccactttaccccctcgtactcttaatttcgtcgatttacccccttgtacttgtacaatttcccaatacaaccctgttcgtcaacttttttcgattttgactctgacgccatttggtcaagagtcaaaatattgacgtaaatattgaattttttcgatttagactctcgagattagaaaagagaaagtttcacacattcatatattgttttctttgcactgggtggaatcgatcaatttttgggtcttgatttttactaagttaggggttcaatttggggatatcttggaaggggaagtggtgggagaagaagaaatgacaatgttgacggaggagaaacgacgcgttataggcagtggcaattttgtaatttacagagttgaccaaatggcgttagagtcaaaattgacaaaaattgaaggaaagggttgtattgggaaattgtgcaagtacaagggggtaaatcgataaaattgagagtacgagggggtaaagtgactctcaggcagagtacgagggggtaaagtggaatttaccctaaaatttatagaggttcaactgtatatgcatatctatgtattaaaattaataaaattttgcttgtcccgactgtattaatttatagaggttcaactgtatatgcatatgtatgtattatgcatcttcttcttcttcttcttcttcttggtattaataatgataataagaagcgatatatgaacaggcaacagcaggtctgcggcagttaccagccagtgc

SEQ ID NO: 102752 - DNA, 610 bp, Mimulus guttatus
  Intron number 2 from transcript mgv1a014360m (locus mgv1a0 14360m.g) derived from phytozome v7.0 (chr-ID scaffold_36; pos 1182576 to 1183185 reverse strand)
ctacaacaacttgaggtaatttcttgaatattcgaaaaaattcagctatttaagtttttagttttgtgttcatttcagcgcatttgtgtttgtatttttcgctgtcgttggctttcatattctgcacgtcattgacatttggtcactgctaaaatttgctaaaatccattgaccatctcgtgcctagtctagtagcttaaggattctgtggtttgaatgtgacggagaaaaaaaatgaattggtaaattaccctaaagaagattgaacctgactttcatgtcatgttgctcttttcttgctgctgctatggttgataatttttttgctatttttgtacgctttgcttttgcctcatttcgcgaggtatttatatagtagcttcaatcaaattttaatggaaatatattttttgagtgtatacgccacagttttctctggtgtacataaagtatttttcggcttccaacataagcaagatttacctaggcctttgatagatacaagttatactatattatactatattcgtatatggtaaatgcacattatagtatatttgtataactttgagtataatcggagataaaattgtatcattacatttgacag

SEQ ID NO: 102753 - DNA, 756 bp, Mimulus guttatus
  Intron number 1 from transcript mgv1a014360m (locus mgv1a0 14360m.g) derived from phytozome v7.0 (chr-ID scaffold_36; pos 1183579 to 1184334 reverse strand)
tccgaaattcgttccggtcgtttctgattcaacgcgtgagtccttttttcctcttctcaatttctgtgatcattgtatgatgtagttgtaattttccttcttatggatcgattgattcatatattctctgaacttttggtgatttctttgttttgtcgttttgtgtgttggttttaaacttttaatctgttacttttcagtacgagcatgcagctttttgtattccgtgaatttctcgttctttagatttcgttatgtgcatatggatggatgaattggtaatttaatttatttattttattttcctgtgttcttgcaatctgtgagaagaaatttgaagtaacaaagaagtttgttgataaagtgacatgttcggaaaagaaatgcttgttcttcctctgttatcttaagttaaaaaaaaatgagtgtgaactggaatgaaccccgcgaatcactattaattgattcgattgctataatttttagatctatgtgcttcttcgatggtggtttctgattggtcaacatgtagtaaacacaggtttaaatgaattcttcctcgtttctagttatgattaattcatttgattctggaaacaatttccgttgatattttggtgatgttcatattctgaaatttaggagagtatccaggattgctcggtttttcagcacaaagaattaatgattaaattcgttgttataggatcacgtatacacatgtcttcagttttgatttccattttgcagagcaat

SEQ ID NO: 102754 - DNA, 548 bp, Mimulus guttatus
  Intron number 1 from transcript mgv1a025866m (locus mgv1a0 25866m.g) derived from phytozome v7.0 (chr-ID scaffold_92; pos 798344 to 798891 reverse strand)
attgcttcgtcgatgtaaattttccatctctattttttccctctttttttctagggttattagggatcggcatgcatgtgttaaaatctagaagagccacaaatatatatatatgttccggtggtggttgcaaaagcttttagaaacagcttctgaactttttttttttttgctcataatttgtttttaggtgtttataaaatcagcttttgctttttcttttgtttctcttgaaaataattggctttaagctatttttgttaaaaacacccggccactagaccaccggtttatctatttaagttaattttcttgcatacttgcaaacagtcactaacttaattcggtttttgaataagctttttgcaaacaccaccttattgttcccgatatgtacatatcgaaatttataaaaattagtgttaataaacaataacaatagacaattagttaatattgtctccgaaatctcaggatggatattccggtggttatatatttgaatgggtgaagtactaatttgtttgtgttcattcgtcagggctgcg

SEQ ID NO: 102755 - DNA, 947 bp, Mimulus guttatus
  Intron number 1 from transcript mgv1a014839m (locus mgv1a0 14839m.g) derived from phytozome v7.0 (chr-ID scaffold_218 3; pos 839 to 1785 reverse strand)
ggtcgagcgggtcagatttgtttgattttaattatacatcgcgttcgtttctgtttaatgtaggattgcgattttctcatcctctgttgattgctttactttgatgatcggaattttatctatcattaattagagatgaatcgagggggtaaggggtggaaacggaattgatttactgagctattttcaagctcctactttatcggaggacagtatcataattcatagactagagtagtgtgagttgaaccggtgggttgactcgctattgaaatctggctgcaagtgactttttaacaatcctgtacattaatgaacatatactagtggtggtattttagtgttgggggtgggttgtttggtgatgcaaatggatattataaaatagatactttaacataaagtttctttagttggttagaatgtgggatgctgatattttgcaacatgctttctgtgtgtaaagttgcaagcaagcaaccaattttgagagcattgatttgtaaaagttgttggtatcctcttttgataattgaatccttcgtttcgatagtggagtgaaaattaaccgaagagtaacgtgctgctatgaacatccttagtaatagtgtatgtctactgaaaaagtgggacaacgtacatccttaatacgtttactggaataaaagttcaaagacttctggattttactataggagctttttagattgatgattatcgtgctcagaacaagaatattatgacaccatcagccatgattttgccgtcaagtttgaatttgaaaggttcttttttttagctcatcgttcatggattcaactcacagcaatatcacagatatatatcattaataacatggatatcatgtaatcaagaacattgataattaagtatcactaagtttaacttctattcctgatctttctttctttctttatatgtaacag

SEQ ID NO: 102756 - DNA, 514 bp, Mimulus guttatus
  Intron number 1 from transcript mgv1a017764m (locus mgv1a0 17764m.g) derived from phytozome v7.0 (chr-ID scaffold_71; pos 678018 to 678531 reverse strand)
catttggtttaactcaaatcaaggcgattttggtggtaattttctccactttccttcatttcattttcttgttggtttgccctctgtctcttaatttactcgacgctagattcgacaccgttcagtaaaagcttttggactcgatttgttaacataacgaaacaaacttcaacacgtacacttttgttattgatatgatttgaaactcgatcgttgagtcgggaatcgattaaaatcaagctactcgagcttgattggtgctaacctctattgcttattatgcgtgcccctagttctgttgtttcttgaatatataggagaaattcaaatttgaagaaaaaaaattgctaatcatttttataggcataaaccctcttgtgatccaaagtcagacaaatatactctttgaagctaacaatgtaactctttttgtgattctctttcatttaaatgacataaaatatgctctttgattacaggatattgttgccggcgggagcgatactacggcaac

SEQ ID NO: 102757 - DNA, 653 bp, Mimulus guttatus
  Intron number 1 from transcript mgv1a000413m (locus mgv1a0 00413m.g) derived from phytozome v7.0 (chr-ID scaffold_109 ; pos 354621 to 355273 reverse strand)
aagcaggtttatctttaattgcttcttttaattatctggttacatttttttttgcttctttctgtttctttatgatccttttattcctcatttggaattcccgaatatgaaattagcctctaattaagaaacatagttggtcatgttgaacctttggttaaaggggaattatagaaaaaaaggaaaatgatagaattcccggatatgaaagtagcctcaaattaagaaacataattggtcatattgaacctttggttaaaggggaagtatgcttgttatcttcacttagcagtatataatttcagaggctattgcctccccacaattttcgtatgcctatttatatatgaaaaaggtccttaatgattttgaattataatgttaagtgcacttgcccagttcttcgttcataggcacacataagaaggtaatgttattggcgatccatttaacagtgcatcgtgcatattctttagaactggaatctttctatctttgatttctgttttccaggaaaaactgccacaagagtggttgctagataagttgtttcagttcttgagtttgtctcattttcttctgttcttcttccaattttgtagttttaacttaatccgtataataaattctgacttcataaattctttttcagg

SEQ ID NO: 102758 - DNA, 710 bp, Mimulus guttatus
  Intron number 1 from transcript mgv1a011676m (locus mgv1a0 11676m.g) derived from phytozome v7.0 (chr-ID scaffold_7; pos 1670384 to 1671093 reverse strand)
ggcagattcaaaccctaattccactgcttccgccggtatattagcttcgctttaactagtttgcaatcttcaattgagttttggatttctgtttaaattggatcgattcatcattttgattggattttgggattaactcggattattgaagactgaacgatgggtgtagtttaggttttttctgtttgaatataaaaccctgatttgttaatcattttcttcattcaatcatgcatttgtttttagctgattttagatgttccggcattaatattatgattctaggataaatcaactgatgaacattttcaagctgcctgtatttcttgggattagaaattaattttagaaaattgtaaagcaaagagaattttaattttaagctcttcttcttttcactagagaactttttttggcaatgcgaaagtgctgaatggtctttggatttctatcggggaaatcccagttacgtttattataattccgttatgagttaagtttctaggtttaacattctcacgaactaatcgagattgaagaatatttctgagttcgtgttctatgcttttaagtattgtgttagcctttctaagtacactcatctacgacgacacatttgcccgcaaaattgatgatttggaagtttggtttattttgatttatcatttaaataaacgctctcgtttctcgtctcagaaagtgcagaaaag

SEQ ID NO: 102759 - DNA, 626 bp, Mimulus guttatus
  Intron number 1 from transcript mgv1a025196m (locus mgv1a0 25196m.g) derived from phytozome v7.0 (chr-ID scaffold_163 ; pos 374662 to 375287)
caaatcatcaagctctcggtatggataatttttttttgttttgtttatggcagtatgaccgtgtttaattctcctcttcggcgtgattccggcgtagttgtagttatatgagttttcgattttttatcctttcataacttcttccatgattgatgtgagtgcgtttagtatttgaatgaaagttgctagcactttaatgttacacagatgatatgtatttattgttatacatggaatttagcaatgtttgacgagagtggagagtttaatttaatgttctttcatttgcacggtgtttatgctattatgaagtatcaaggaatcgaattctcggaaatgaaattagaaatacttgcagttagagctgaatatatgtttgtcgaactttgtttacggatcaaacatggtgttagttagtaagcaaccaaatgattttgttttgcattggaatgcctgttaatgaaatataatattaggcttgtcctcttgatcgtggattggattgctattgttgtttagcttaggtgtttgatgctgtaatatattattccaattccgacaagctctctgttaccaagataatattttttgatatttcgtgctatgcaggatcgaaagcgttcagc

SEQ ID NO: 102760 - DNA, 599 bp, Mimulus guttatus
  Intron number 2 from transcript mgv1a011104m (locus mgv1a0 11104m.g) derived from phytozome v7.0 (chr-ID scaffold_2; pos 3481618 to 3482216 reverse strand)
ttcactgggtagacctcgtccagtggttcctttcggtaatttaccttgttctttcattgttaaatattctggaggatagaatcttccacagtcttcttgtccagttttgacttcaattttgtttgaatgtttttatgtaactattgtaagtatatgataactcaaaaatcaatgggatttatgctattgaattggtggttttgaaacaaacattttgttatgtattaatcagggtgttcttgaataagaatattgtcaattcctgattcaaatgtatgttattactaggaaagatctcactaggatcttgctcatttatgtctgttttttcagtctgcgatattagcttcttaatgtatattttggacaagaaaactcgttatgtgatgatttatagccttcgtacgaaatttagaaactatttgctgatatagaacgagcccgtcccgtaaataattagacagtgcttggtggtttgacttcagtaaaatttagataaatttgccatttatgtatattgattttctacgttgaaactcaaaactgtctttttatatatcataggacgccttaggtctccatcaccttacattggaggc

SEQ ID NO: 102761 - DNA, 977 bp, Mimulus guttatus
  Intron number 1 from transcript mgv1a010976m (locus mgv1a0 10976m.g) derived from phytozome v7.0 (chr-ID scaffold_168 ; pos 570375 to 571351 reverse strand)
tggagagaagtaagaacttcgttactgcattacaggtatacttcgtttgcttttatttttttgagttttttttttttgttttgtttattggttgacattttaggatcagatctaggaatggttgtgctgtgacttgtgcatgcgatttagcttgtgttgattcctggttgacttatagtttgactgaatgcttgttggatctctttttagtggatcaaaattgaattagattctgcaattggcaccaaccttagtgattttaagtttgttcgatcttcggtgatttgattatttggggtaatttaggtacaaaaattgcatgcccgtgatgtgtatcctatgaattcttcttctatttctccgcgcgcgtgtgtgtgtgtgtgtgtgtgtatgtgtgtgtgtgtgtgtgatggaacttgtgggttatgcttgatcgaattcgccagtttagatgattcagttcaatttttctttagttgtcaattttttttctgtccaggttcatcataacttagtttcgtcgtccagtgtcgcgttatatataagatgcaaatagtcgattatgtgtatgctggctacagtaacaattgtcagtatccgtttttttatggatccgacttttcaatatacttattcttatacattgagttggaaccgttagacgaagacagagttctagtgattttattaatggtgatagagaattctctgagaaattcaaaccgatgtatttcttctcatactttggttgttctcagtgaaaacattcttccaatatggctatcgacttatctattgaaaaacagatgaatatcactaactaatatcgatcaacatattgcatgatgatttggtcaaattatcgtgttgacttcggatgctatttgtgatatactctatggcaaaatcagtaattgttttcatcttgttatatctccgtaggaactcaaaaacctcaggccacaattgtattctgc

SEQ ID NO: 102762 - DNA, 697 bp, Mimulus guttatus
  Intron number 2 from transcript mgv1a019787m (locus mgv1a0 19787m.g) derived from phytozome v7.0 (chr-ID scaffold_276 ; pos 259083 to 259779 reverse strand)
aatcgcttttaggtatgttaactctcattttcagtatatcctggtcttgcatgttcagaattctaaagagctacttctcagtgtatgaataataacaagtctcataaaaatattttttcattacatgactattaaaaggtcaaaaaataaaataacattattctggtttagtttttataatatggagatttcttctgttcttgattagatatttcagagttatatcccattgagaagtgtaactagatcaatttcctcttcattattacttgtgagttgtgatgtttatgtttaattatcattaataatgcaaaagaagaacatgatgaaatctagaatgagaggtctaaaactaggatgcattttgattggttcaatatcacattataatttgtgcctccggcaaattattttgcaaagatcgagggtaatcaaggtaaaattgaggataatttttttcttatttattgattagtctatttaagcaagagggatgaggaatcaggaatgagaagaagagatagttagcgaaacataatgtagaaatatggagctggcttctaagtagatttccagaatttggtatagagaaacatgcaatagaagataatttaataatatgtttgttccaaaatgaaattttgcagtccaatttaaagaaatccatagtaaaactttcttgcccctaattacagat

SEQ ID NO: 102763 - DNA, 408 bp, Mimulus guttatus
  Intron number 2 from transcript mgv1a007363m (locus mgv1a0 07363m.g) derived from phytozome v7.0 (chr-ID scaffold_8; pos 2717713 to 2718120)
ctgctgttttaggttttcaaggggattccaaacaggttcgtttataatttttttccaaatctgaacaatacttgattttcgtgaggttttttttttttttttaattgatctgttgctattttataatttcatcattgaatccaattactattgaagtttgaatttttaaagagaaaatggatctgcatttgcaaggacaaagtacatacatctgaaaacaagatacttaatttgttcatgctataataacagtgatgaattagcattaaattacggaaatccggtgtaatttgggcacacatagaagaagtgatgtgtggatgcttatttcctttctaaattataattgatgattatattctaaaaaacatcactaattgtggtttcaggccttctttggtgtatttg

SEQ ID NO: 102764 - DNA, 874 bp, Mimulus guttatus
  Intron number 1 from transcript mgv1a016555m (locus mgv1a0 16555m.g) derived from phytozome v7.0 (chr-ID scaffold_58; pos 163958 to 164831)
aattttcaggggcagactgcattaggttactttcggtgagtgccattcgcccttcaacggtgtttatatgtatgcgatttactgattttccgatttcaattttgcctgctttgctttttctattaaaacctaaattgtactattattgttggatttgaagtggagaagagttagattggagtacatgatgattctaatgtgtttgttttctctgatttttttgaataattcaagtagattgtagatttaattttttcttccatgtaaatccgtcgcttatgccacaagtagatgcgtttctatgctacccgtttctgattggatgccatttttatggagtgttgaaatttacagttgttcttgacctagatacccaatttatatgcttacatcactatgtaccgtattttctggaagtgaaaatggtgtagtaaaactgttgaaatctcgaatcgtgaaggtgtgtttgagtgcggcagtctgagttagcaacgtagagattgggcaatcgaagaattttaaaggtcaatgcgggactcttaggtcttagtttgagaaggtttatagaattgcacgatggaaatgtagaacacaaattggaggttcgtttttcacattttattggaggtttgttgagaagatgcgtgcaggctaattatgggtggtttaaagctgctcgaagaatgtttcgaagttagtttgcagatctttctttacatttatggagctaggtttagaactttgattagtttagcaagcttctgtagatgggaatttgaactcgtcagttgcaactgcccgttttttcgaactgcttcatgtgatttaatgaattttatgtattcatgttttgtttttcagtcacatcaatcac

SEQ ID NO: 102765 - DNA, 943 bp, Mimulus guttatus
  Intron number 1 from transcript mgv1a007153m (locus mgv1a0 07153m.g) derived from phytozome v7.0 (chr-ID scaffold_45; pos 723478 to 724420 reverse strand)
gttttcgaccaagactccggaaacttttctcagtaactgttttttttaattttttttaatgatgtagtgtttgatataataacttgattcagttcttgtgtttgcaaattagagtcactagttcgtgttggcaagattggatttttttagtcgtcgtttgggaaatatcgattggattgatgaaattgattgattgaattggatttgattacattgtccgtgattcttgattatacaatccttgtattgagcagtattcttcataggattgtgtaataataggggttaagttacttttctcaatgttaactcgtgtgtgtgtgtgtgtgtgtgtgtgtgttataatctgatataacttaattcagttcttctgtttgaaaatgaagtcactagttcgtgttggcaagattgaatttttttgtcgtcgtttcgaaatatcgatgggattgatgaaactgattgatttgggtttgattacattatccgtgatatgtaatatgaaattttatcctatgctcgtgattcatgattatataatccttgtattgctccattcttcgtaggattgtgtaataatagggggttgagttacttttctcaatggttgctaagtactagtttacgttttcaagattcaatatttaggcatcgtctggtattattgacgggattgataaaattgattgtgattacattgtccgagatattatttgtgctttatgattatacgatccacgtattgtcattcacatgtttgattaaattctggacccgttaaacatcacgggttttggttttcgaacctaaattcaaatagttgatgcatcttgattatattgtctatcaagtcccgttttttggttaccaaacgaggccttagcgtttgtgatagtttcttgatattataggagtgacagctggtcctccaacggtgctcgattct

SEQ ID NO: 102766 - DNA, 512 bp, Mimulus guttatus
  Intron number 2 from transcript mgv1a014320m (locus mgv1a0 14320m.g) derived from phytozome v7.0 (chr-ID scaffold_3; pos 4049304 to 4049815)
aataagatcgccatcttctccaaatcatactgcccgtgagtttccttctgtaaccctaattattcaatttgagttatcaatgttggatcagatgttttcttcaaattaccaatgaactggcttttttttttttttggtttttttttttaatttaaggcctcgtttggttggggagattagcgatgattaactaaataattagactttgtttatcttaccgtttagggagttttttttggacgtcacgggagcgataaaataattgagttttcaatagattatttaatcttatcttggcaaccaaacgagacctaagactattaaggcggataatttctgattagaacaatttccttctggcttttcttagttaaatgcatcctgtcaatctttttaggtttaaaaatcgttttttgtatccaaacactatatatttatgtaagcttcgttaatttgtttgttatgttgtgagcttagatactctctgcgtgccaagcgcatatttagcgaac

SEQ ID NO: 102767 - DNA, 971 bp, Mimulus guttatus
  Intron number 1 from transcript mgv1a005921m (locus mgv1a0 05921m.g) derived from phytozome v7.0 (chr-ID scaffold_17; pos 922804 to 923774 reverse strand)
gaagtcaaggagacgagtcagctgcaccactcaaggttagttcctgcaattactattttaaccttcttcatgttgcttttgtaccctatttctttaataatactcgcccggtcgccccttattatatctcgttttgggtgattacacgtaaattaagatactcaataaatatgcataaaataatatagtaaatactaaaatacccttgtcattcattttttttttaattaactaattaagagtgataaagagcaaaattgataaaaatagaattaatgtcttattgagactctaaaatgacaaataatttaggaaaaaaaaaaaacagcctaaaaagatatataataagagacagagggagtactctcttacttgtgcgtatattaaaaaaaaaataatgattcatgaattagagaaaaaaatatgaaaaatcactaaaatatatttttattgattgtttctcaactaattgtcttttaattactccctccgttcttaactacctgtcgtttttaactttgcacaagaattaaaaatttcaataaatgtgtcttgaatttatgaaaaatacattataaagattaaaataaccttgatcgtttaatgatgtggtaagagagagttaatacttagagttgaattaataaggttaaaacaggaaaaaaaaaaggaaaaaaatggatataatgaagtattagaaatctaaagtgacagataatatggaacaaaatatttttaaaaagagacagatattatgccacatatgttaattaagagtgacaaagtcaaaattgaaaaaaaaacaaatataattagtgcatgattagaactccaaagtaacaattaattaggactaaaatattaaacagtagaaaaaggaagtataagaagaatcaatttgatttccatttgacaatttaaatatgcattaaacagtagcagtagctccagcagtggagctattcgaagcg

SEQ ID NO: 102768 - DNA, 882 bp, Mimulus guttatus
  Intron number 1 from transcript mgv1a001976m (locus mgv1a0 01976m.g) derived from phytozome v7.0 (chr-ID scaffold_96; pos 918401 to 919282 reverse strand)
gctgccttcatttactggacccttcgttttctccggtacatttcttgctttcatatttgcttgcccactgaatttgtagggtgtcaatgttgtaatttgtttcaaaaaataagaatactgcagttatacggggattcttttcttctttcgagtgaaaatcaaattttttatagtataaatacttgttaagttagtaattgtaagattcacattattgttttaccggtaaaggttttaggttactcgtagatgcaaatattattgtcgaacagagggatatgatgcgaacctgctacatatctaatttcctgtaaatttcatgatgacgagtctagtatatttaccaaaattgaaaaaaaagaggaataagaatatccagtagaaatgggttaaaaggttgttcttttcattttctttgctttgagtttcatgtagaagaggttttgggaaaagtaagaatatttagcataattgcatgttaacatttatgggcacaaatcttgtagaaactggaaagcaaacaaaatgtcatattattctaaaagaatcttttctggcataaggggcctttgatctaaaatatttgccttaatttctgtgctggtatttttaccttcccattagaagtaattaacaaaaatatgatgttgagactttttaattgttttctcgatttttaactttattcatcataactctgattcttcagtttatttttcacctgcaattaagtagttcaatatctagatagatttatgtactatatcctggaggtctcctataaagttagacattgttccagacttgcatatgttgagatctcaatgattgtttccatcgcttccaggtttgctgttcacattcgtgaagtttgtgtgctca

SEQ ID NO: 102769 - DNA, 826 bp, Mimulus guttatus
  Intron number 1 from transcript mgv1a016917m (locus mgv1a0 16917m.g) derived from phytozome v7.0 (chr-ID scaffold_126 ; pos 524253 to 525078 reverse strand)
cgattgctaccctgcttactccgcctcccttaaatgtaatctctttgcctccttttttgttctgtttcaatgctcaattttattttagggttcctcgaatttgtgaaaaccctaaaattaaactagaaaaagctgacagaaaagctgtagttagttggggtttctattcagaattaggtttcagtttgaaatttttgaaattattttgaattgacgtaatgcaaaatttggcttacagatgatactcaattcgcaattgaatacagtagaacctaataaattaataacttcgcttaaataatgtactaaattgttaattcgataatttaatatttcgttaaattaatagagttttgttagtctggactctattaatttatagaggtttaactgtatttctttgggagaaaaaacaattgaagttttcattgtatgggcttgttaatctagttgctgctttatttttgaattgacctcgttaaatttataatcggaggaagaacaattgaattcgagcttgagcgtcagcatttttttatgtgtggattggcgaagagaccgtgattatggctttatgtacagaaaatgtatccattgatgctcttgttatttactttcttcgtttttagtggcgtcggtgatttttttacgaagtgttgttgtatgaagaagtacgaagcatttagccttttctttttatatgaactttttaattgcttgaagttatgttgaattgtttttccggaactttccagattaattatcatatatcgaaactttttaaacgtattgcaggcttagaattatataacactgacaagagtaa

SEQ ID NO: 102770 - DNA, 974 bp, Mimulus guttatus
  Intron number 2 from transcript mgv1a004870m (locus mgv1a0 04870m.g) derived from phytozome v7.0 (chr-ID scaffold_50; pos 874133 to 875106 reverse strand)
aagttcgtcttcgaaactcgtcggttcgacctcaggttcgcataattgcatctatatcgtagctcttatgtttgaaatttaggccccgtttggttgtcatgataagattaaataatctaatgaaacctcggatgatccagtaaaaaacattcctagaagataagccatgataagtcataatatttgcgggtcgacctgacaagttattagggataccaaacatcaaataaagtgcaattgtttagttaatcatggttaatctctccaaccaaacgaggtcttaaagtataaaattgttgggggtagtcgtttgaaatgtcagttgcctattttgatgatcgaaagtggtttgaatttgaaatttggatttgattcgaaatggttgaggttatggttcgtagttgaatctcgtggaaaaagagaacgtaaaatattggacagctatgtaataacattactgtgttttaatttttcggttgaagcttttgattgtatagttttatattgatatgttacgtgcaagtctagaataccgtttagttggatcatggtctcggaaatagttgtgaaatataatttaacctaaaccgatgccttctattagccatcctaatgtatgtgactacaatgattataatttacgatgcatgaaaacttgtgtactagaagagttcacttaaggcctcgtttggttggggagattagccacgattaactaaataactggactttctttgatgtttggtaaaccaataacttctcgggtcgacccgtaagtattatcatgccttatcaatcttgtagggcgattttctgttggacctttcgtggtccaataaaataatagggttttttattagattatttaatatttaatcttatcttggttagtcctatcttggcaaccaaactaggcctttagagttgatttcagtttcttgattgtgtttcaattgcttttccaggggtaaaag

SEQ ID NO: 102771 - DNA, 617 bp, Mimulus guttatus
  Intron number 1 from transcript mgv1a010741m (locus mgv1a0 10746m.g) derived from phytozome v7.0 (chr-ID scaffold_69; pos 1126377 to 1126993 reverse strand)
cagtaaaggaattgaaggtataaatgtgtttatatgaatgggggtttgcatatgatttgaggggaagggatcttcttatgttttgtgttcctggcaatataaatctcttggcaaccatccaaagcttgtcgaatttcggaaaaaaaaaacgagtagattttgaaacatggtcatgaggtttatttaatttttgcacttattgttattaatttatcgattactcgttgggaatggaggtatttaccatgaggtttcgttggtttttataacggatgagatagtggcgtaactatttgtatgtaacggagacatgcttttgatattttttgtgcatgggcagtgctctcgattttctgaattcttgatttatttgggtggtacgtgtcgatgttgggggactagtcgacaaacaaattcaaaagtgtaattttgagtgggagtaataaaggcgaactgttctaattactcctttcttctatgcattatacggggtcattaaatacatgtataatgcatcgccctctttttttttttccggttaaaacctgcatgtgtttgtctattattccacgagggctaattctgatttacgaaacttccattttcagttactatat

SEQ ID NO: 102772 - DNA, 346 bp, Mimulus guttatus
  Intron number 1 from transcript mgv1a009697m (locus mgv1a0 09697m.g) derived from phytozome v7.0 (chr-ID scaffold_51; pos 649765 to 650110 reverse strand)
cgggagaatcctttgtttggcccttcttctgccacgtcagattcttcttttcatttatatatatatgtgtgtgtgtgtgtgtgtgtgtgtgtgtgtgtgtgtgtgtgtgtgtgtgtgtgtgtgtgtgttgtcaattttgatgtgttaaaaattgggtcttgaaaaatatggtgtgttaaaaattgggtcttgaaaaaatatgatgtgttaaaaattgggtcttgaaaaatatggtgtgttgattgattttgaaattattaatttttttttttttggttaaataaacaacgtttgcttttgtaataatgcagattagagaggttgggagcactaaattggacaaaag

SEQ ID NO: 102773 - DNA, 709 bp, Mimulus guttatus
  Intron number 1 from transcript mgv1a004650m (locus mgv1a0 04650m.g) derived from phytozome v7.0 (chr-ID scaffold_124 ; pos 666262 to 666970)
ctatagagttaaaaagggtaaaattgaaaaataaacaattaatgcagcattggaattgtaaagtgacagataatatggaacaaaaaaaattctcaaaagagacagatattatggaacagggagagtattagatttcataattataatgtaattaatgcatggttatttcatactgtttgtgacctaactaaatttcgatgaatttattacacctcccaagtcagcataattaacatttaatatggtataatcggcactagtttttgacttttttcacacccttaaaaaatataatttcattaaatgtattgcatatagtaaattgtattggatttcttacaagaccacatggttaaaaaatgttattcatttatttaaatctatatttaaaaaaaaaaaattatacagcaaagattatagttaaatatgagttgggcaagttggtgtaatgtttcaattaatacttaataccacccccaagagaggggagacatgtattacagtattagtgccacactctctctctctctctcccctccgtaacactttctctctctaaaaactgtcactaacctgtatgtatctctatatattttgccatccttgaccaactcgaaagtacactgttcttccttatttatctttctttcttcatttatacacaaaaacaaaagctttatttatttttatttatttatttttcatcctt

SEQ ID NO: 102774 - DNA, 968 bp, Mimulus guttatus
  Intron number 2 from transcript mgv1a016393m (locus mgv1a0 16393m.g) derived from phytozome v7.0 (chr-ID scaffold_12; pos 1327494 to 1328461)
aggttaacatacgtaaataattcttatgtaattgcatgttgttaaagtttatgtgtttcactgtgctatttgtccttaattgtttttttggcatgatgaaatcattatctcctgggggttgttgcatgtagtcttggacaaagttgaagtttatttgtcgatgttttcacccactgcagaagttgcactgtctatgttctgaggatgtgaaaaccatctatccattgtttaaattattttttgaagaataaataaagggatttgtattctgctatagtaaaagagcgtgtaactaagctctaaagaaaaaatggtcttaatatttggagaatcgaaggtgtttttagagtacgcgagatattagatctcattattatgagttttcagtttattcggaatggattaaataagctttcagaacttgtaagatgctctcaccgattaggaagacgattctatcatttgatttggtgaaaatagtgttatttgagatctttaaagataacttagggtcttaatcttgttagctcctggttgattgtttttgaaacgtagaagctactctctcataatatttttaagatgttgtcggctcaaaacatcctttcagtttcttaaactttttatgagatattttatctaaaaaaactagtgcattgcccttaagtttgttattgctgctatagtattaacatgtgtcgattattgaatgggtattcttgttgagtgtatataaatgtccatgtggttagattgacctcgagtctatgtgtatttacagagtcatgtgtcaaactgagtgccttatgtttcacgtctagttgttctaccttgtgcataacaaattgtccagtacgttaatgttttcaaaccctaattttccttttacatctatttcggtctgatgacttaattatacatttttttcttttgacagggctcaggattaggatctttatctgacatag

SEQ ID NO: 102775 - DNA, 698 bp, Mimulus guttatus
  Intron number 1 from transcript mgv11b016063m (locus mgv11 b016063m.g) derived from phytozome v7.0 (chr-ID scaffold_2 3; pos 1370070 to 1370767)
atcgaatattctgcaacgtgtatatattatcgaccgtacgttttctgttttttctgaagaaaaaaaaaaatcatcgaatatcgcttggtcgtgtcctgtacatactatacagggtggctttgctggagatgatgcacaaccggtacgtatgcgtgtgcgtgtatatatggcatcattgtaatatatatatatatatatctatagggtaaattacaaccacccgtgagatatgattaaattacgaaaactcccctcatgtttggttaattacaaccacccctcaattatcaaatttagtggaatttttgagattatatagaatattatcacttttgtactcgttttatcccattcaaactcgacattctgaagcaagatgatcataatatgtgttttttggcttgtatatatcagatcgtagtgcatcagaaactgtatttttacacaaaacgagtacaaactagagcacattccacgaaatctagatgattatgttgaatttgacaccataagggtggaggtgtaagaaaaaatcatagttgaatggggtagatgtaattatccaaacaagaggggttttttcgtaaatgaccatacctcaaggggtggttgtaatttaccctatatgtatatcgcatgttataattaattttatctaattaaactcgtgaatataggtgtagtactcgatttgggtg

SEQ ID NO: 102776 - DNA, 897 bp, Mimulus guttatus
  Intron number 1 from transcript mgv1a001077m (locus mgv1a0 01077m.g) derived from phytozome v7.0 (chr-ID scaffold_54; pos 585350 to 586246 reverse strand)
cattggtaagtaataaaaatactatacatatataaaataaaataaaattatttattatctaccttttaatacaaaaaaaaaaaaaaaaaaaaaaaaaaaattcattctatttttttagatataatttgaattatacataaaattcttgaaaattccaattatttatttaattttctaaacaaatttaaagtgactatatttttttcaaaaattaaacatagttattggaaatttcccaattctgttgattcatagtgaaaatgtttacctttagaatatttcttcttttttttcttttgggtaaattacaaccacccctgaggtatggtcaaattatgaaaacttccctcttgtttggactcctcaattataaatctttttacacgtccactttgcggtttcaaatttagtggaatcttcgatattatatgaaatatttatcacttttgtacccattttatctcattcgaactccacattttgaagcaagatggtcataatatgtgtttttggcttgtatatatcagattgtggtgcatcagaaactgtatttttacacaaaacgagtacaaactagagcatattccacgaaatctagatgattatgttgtatttgacaccataagggtggaggtataacaaaaaatcatagttggggaggtagatataattattcaaacaagagatatttttttgtaaattgatcatacctcaggggttgattgtaatttacccttttctattttactttcagtccaatataagaattttttgtttttttctttgtttagattttttggattattaaaacaaaggtaaaattattttaatgatattagttccgattcctccgatttccacacctagctaacacttattattttctcataaataggt

SEQ ID NO: 102777 - DNA, 424 bp, Mimulus guttatus
  Intron number 2 from transcript mgv1a003214m (locus mgv1a0 03214m.g) derived from phytozome v7.0 (chr-ID scaffold_115 ; pos 12628 to 13051)
gtggtgaggttagcaacaattactttacataaatttgtctcagcttatttaactctgaatgctacatcagtttgattttttggcctgccatattggggtacctcatttcaggagggtgtgtggggggttgtatattgaacgtttgtattccgcttttccttgaattcctcacttcattttctacctttcatttgatttttcaatgtaatgttctgcttttcgtattaatttttttctttcttctaaattactagtaccagtttgcataacgaaagattgtaggtatcatttatttttgctatgtatctgaaaagttgcttgggatatttccttaactggtggatcaactttggattttttgatgccaatacttacaaaaatgacttgaatatgtttttgaaggtggatctggaccttggaaact

SEQ ID NO: 102778 - DNA, 532 bp, Mimulus guttatus
  Intron number 1 from transcript mgv1a022335m (locus mgv1a0 22335m.g) derived from phytozome v7.0 (chr-ID scaffold_405 ; pos 37140 to 37671 reverse strand)
cccttaaagctcgtaaaaacgacattaatctcaaggtccgtactagtacatgcacattcttattttttttccccgtttatattattttagttgtttatattctcactgtcgttaaatgttgtggaacgtggtcggtacgatcacaccatacaccatgcatatttgtttttctatcaacgacacatttaaaaaaatgtagccgttgtattccattgaagaagaagtgaagcttgtgattattaacaactgttttttgatcaaaaaaagtcgtaatttttttttggggcgctagccctgaaccccttgaaaattaagcccacactgtaactagatcctggaaaatctatatatatatatatatatatatatatatatatatatatatatatatagttttgcgtctcgtgtgtgtgcattttgtctttcagatatttaattttttggtgtatttaatttcttggaaatatatcaaaacacatgcatatatattataagtttgacgatttgggaacttgtagactcgtttgactat

SEQ ID NO: 102779 - DNA, 1064 bp, Mimulus guttatus
  Intron number 1 from transcript mgv1a009317m (locus mgv1a0 09317m.g) derived from phytozome v7.0 (chr-ID scaffold_266 ; pos 18660 to 19723 reverse strand)
attacccctctgttgccctaaatttctctcttaaggtaaaaagacagttttaccccttttcaccttgttttcttttgcttcgtttttttcggtctgagattgaggtcgttgttgtgcttgtgcttcttgtgcttgtgctttcaagaatgatgaatagttgttatatggtatgtgtatctagtaagatgatcttgtgcacttgtcttcgttcggtttttgatttttgaatgccgagaaaggtgtacttgtgaaattgctggcaaaatgcgattgagtttacttctgtttcaataaggtgatcgataataccctatcgttagacgtgtgttttttctttaagtggatttcggctgtgcggtagaaattcattgtaggcttgttgttttcatttccgtaacaactcgacttaactgccaatgaacttgtctattaccagtgttcaattggttgtacgatagacttttatatgtgttgttttgtgtaatacgccttaattttttcgtatgtatttaaacgcttatatatcctctatagcataagaatgatactgcattgaaagcttcccatatcgacatattcatgccagcctgtaaacgctctcgatgcctggtatcagtctttaatcttatcttccctgatttaacttcagatatccatgttgttttgccgatgggggtacttttacccgactgctcgataatcgagaaattagtccgaaattccctatgtgcaaaaagtaaattcacattaaattagtgtcgctcgtttaagtgctcctgacagagcactgattgatagtttgtggttgtatgctgattggtgtttgttttcttattacatcggaataacgaccgataaagataatgagggagactgtcgatttacaatgacgtaaaatgaatgccatttagctgtgaaaacgtgcatgatgaacgaaagaacgagcatgcaagaacattttctcgtaactaattccaccacactttacaaaattcaagattaatccatacgtgttacatctttcgacaggatctgtacaggaatattcttcggggaaacgcaaa

SEQ ID NO: 102780 - DNA, 964 bp, Mimulus guttatus
  Intron number 1 from transcript mgv1a002104m (locus mgv1a0 02104m.g) derived from phytozome v7.0 (chr-ID scaffold_223 ; pos 155088 to 156051 reverse strand)
aagcagggtggcgctctacagaaggagcttattaggtcagtaaattaattaattaattaaaaatatcattttttttttggcgttattattattaatttcttatttgattatttttttgctatatttgcacaaaaaatctgcactgaatgatttttggcactaactatttatcatgaaacaaagtacagtctctatttttgtccaaatataatgcaagccacgtggcataattgtgtaataattttttcaatacatttttacgtacatgtatatatcaccgctataaaaataaattgttgattatgtcataattaaagaagcaagattagggggttttaattgttaactaaattatcctttttgtagccttgaaataagtaaattgatttttgatagttattattagtatatgagtttattacgttcagatccatgaattaattaattgaaagattttatttttctttggtgcaagaaaaatatttagtgcttctagatgtggatgtagttaatgtgtcgagtaattttcaaaaaattatttttgaaaaaataaataaaaaataaaccacttaaatatcagtatctagctgtccaggagttgacggtttggtgaattttaataagtcggaggccacttattatttgaataagctactctcataaaataattgtgatcactttccaaaaccagatctcacacgtgtttagtgaactggtcggtataccgaatgcacctatatcgatatcgtattccattttattttattttacctaattttgcgtgtatttatttatcttcctattttatgtagttggcattttgtttttagagattaagaaagtcaaaaaatatgcatgaattaaaaaaaattttttactaaaatacacttgacattaattacttttcatcgtagctaactgaatatatttttaaccagattcttgaacgccggaatattcggaa

SEQ ID NO: 102781 - DNA, 829 bp, Mimulus guttatus
  Intron number 1 from transcript mgv1a013674m (locus mgv1a0 13674m.g) derived from phytozome v7.0 (chr-ID scaffold_13; pos 1323829 to 1324657)
gcagtcgagaagaatgttgcaatcatgataacgtgtttaagaaattcgagtagttttgaggagaattaaacgaatagattttactctgcttcttattctcaaacgaaccactccgatagactccccagagaaagggcataatagatgatcggagccggttcagcaatattgggccaaactctctcccacccaaaattattgggccaaggctcaatgagaaaataggaactaagcccatcatgccatttttcccgcctattttggagtaaaaaatttcatacaaatatattttggcgtactatttaataacttctcaaattgaagaaaattagaaaatttggggtgatcgaatattttactaatctttatctgtaacgtaaaagccggaaatctcgacgtttcttcactatcaaactcttcaatgctcaaaattccttttcataaagatacacccaaccgtatgcctctcaaaatttctaactacttatatatatatatataatatatattatatatacatatatatacatgtatacataaaatataggtttttgcaaccgcggagaaaagaaatgtgtctagagagtggagatcgaacgctggtcagtttttttaatcgtcctttaagctttgcttatcgatgctgacaaatgtctcaaacaacaaatttcatgtcagttttgaaatttctttagtgtttttcggattataaaattaagtgctgtttttttttttttaaataaattagtgttgttgcgtaatttgggatttgttttttgtctgtgttatgttaggaggtgtttgtgccgccgcatcctttaattaatca

SEQ ID NO: 102782 - DNA, 994 bp, Mimulus guttatus
  Intron number 1 from transcript mgv1a002716m (locus mgv1a0 02716m.g) derived from phytozome v7.0 (chr-ID scaffold_8; pos 479367 to 480360)
aggtgtagttcaattacaaaagaacctcttatgttttagaaactacatcaaagaccctgtagtttataaatttcttacacctaccccaataaaagggtgttaatgtataacatctacaaattacaaagagtgaatgtaattatgaaaatatgaggagctttttcattaatagaccttacttcaggggacgattataatttacccaaaatcttactaatgacacttgatttgtactacgccggcaattggaataaccggtttatactataccgacgaatgtgaagcaaaaaaattagagtttttaactttttgattggaataattatttttaggacaaaaaaaaaacttttcaccttaaacttttatttattttttcaccataccaacaaaatttattatttgcaatgtaaagcctcaaacaatatcatattttccttttgattttggagggggtgcaaggtgaagaaaataagaacaatctagaagaaatgaataatgcaataagtaaagcttttattaattcaaaattcggataccagcatcataatttatcgaatcaatattcgactgttcttaaattcgattcaaatattctaaagtcaaaatgcttgcatcttaaaattctcctagtttcttttttgtaatatatactttttaaatataaataaatcgaaatttccatgtttgagtttatttatttcacaccaaattcttgttactaatttgaataagaaaaaaaagtacatatgtatatgtataatataataattattgaaaatggaataatagttggggtagaaaaggaatatcgtaaagcatttcactttacacctctgaaaaggaataaatattttattttatttatattttatatttatttttttattttatttttaatatatataataatataatgcccatctcattttcatcactcacagactcactatcgtctttagcgattcccagcacgccctttctctttctaaaacat

SEQ ID NO: 102783 - DNA, 789 bp, Mimulus guttatus
  Intron number 1 from transcript mgv1a020065m (locus mgv1a0 20065m.g) derived from phytozome v7.0 (chr-ID scaffold_26; pos 747382 to 748170)
ttaactgtaatgcagatcctttgatcaagatacattcctgggaatgaaattgctgttaaattaataaaattaaattataaaaaaaaaaaaagtgtatttgattttggtattgatattgatataatatttatctctgcgttattttaattattttaattctatcactttttacattcatgggaaatggtctaaaatttcattaaaacatttcattgaatatttaataattaaattaataaataaattagtttattttattttacaacttttagatactaaaaaaattaaatataaagaaaaaaaaataatattttgattgggcaaattacaaccacccccatgaggtatgatcaaattacgaaaaaacccttcatgtttggataattgcatctaccactcaactatgaattttcttacatctccacccttatggtgtcaaattcaacagaatcttcttatgagattcttctgtggaatgaactcaagtttgtacacgttttgtgcaaaaatacagtttctgatgcaccacaatctgatatatacaatccaaaaaaacattttatgttcatcttgcttcaaaacgtggagctcgaatgggataaaacgggtacaaaattgagaatattctatataatctagaatattccactaaatttgaaaacgtaaggatcgatgtgtaagaatatttatagttgagaggtggttgtaattacccaaacaatatgggagttttcgtaatttgactatacctcaggggttggttgtaatttaccctattttgacttatac

SEQ ID NO: 102784 - DNA, 919 bp, Mimulus guttatus
  Intron number 1 from transcript mgv1a003605m (locus mgv1a0 03605m.g) derived from phytozome v7.0 (chr-ID scaffold_636 ; pos 23175 to 24093 reverse strand)
accactcgtctctctctctctctctctctctctctctctctctctctcttcatcatgtttcttttttattttttttaatgaattgtaaacgaagtttgtgtaattttgaattactaactaaaaactcctaatattactaattaatatttagcaacaaaaaatttatgatgcatattttttagtgctcaacctataagtgattagtttttttagggattaatttgctaagaattcaaatcgtataggtaggttttgataataaaaatatgtttttacgtactacttccgatttttttaagtgtcgtttaaggtatcttcagcatactaactaagaaaattattaaacggtcttgatttgtgatcaaaagtccttatttaattatttgaccaaattatccgatccatttacgaattttcgtcttctctttctcgtttcattaatttatcattaccgttagggtagagttgggaaaacataattaattaattcattagttaattaatattgtcttgcaactctaaagtgacacttaatacgtgaaaaaacatataaggttaaagcgacacttcagaagaaaaacatatatgtaatagatattttttttcttctttgaatatttaaagatttttgacacctttttttccccgacgaattcgcataaaacactttcttgacgagttctttcggaaaattagatgttacacatggtgatttacaccaaatgattgttatccgtagatctgcacataatctcattagcacccatgtgtatgtctccttagttggaggttaattatttaacctcatctatagttaacactcatccagtataaaaaataactaggtgtagcatctaattccccgaatatatttccttttgcagctccaaaaggtatattcccaccggagcctgaaaaa

SEQ ID NO: 102785 - DNA, 661 bp, Mimulus guttatus
  Intron number 2 from transcript mgv1a022372m (locus mgv1a0 22372m.g) derived from phytozome v7.0 (chr-ID scaffold_97; pos 216714 to 217374)
gcatcaggtaaaaaacataatgaattttttgaattccttcaactatgatattttttttataaactatgattttttatttcccgaagaaaattcgtatcgggagggtcaaattatatatataaaattttcagaattaacgatttttgtttaattttcattttgaaaatatcaaaaaaatatcgaaaaaaatgtatttacaagatcaatattaatattgtgtatttattatgttacttatattaggaatgaacatagttagaaaaaaatgaattaaatgtggattcttataaataaaaaaattaacttttgtaataattcttttcattctgattttcgaaatccgatttttatttatgtatgttttgatttttttggatatgaatcacaatgaaatatttcatttccaatttgtttttttaaattttcgtaaatattaatttcgataatatatccgtttgattttcaaccatctttgtaattcgtaaacgatctatttcgcctcgatgttagcaattcgtgctccttatggcaaaagaaaattctctctttatgccatatatatacatacaaacaatagtaacaaaaaaaatgatcttgatttgttttctaattattaattgaataaacagcattggaagtctaggtagaactgcaatcgagg

SEQ ID NO: 102786 - DNA, 611 bp, Mimulus guttatus
  Intron number 1 from transcript mgv1a022433m (locus mgv1a0 22433m.g) derived from phytozome v7.0 (chr-ID scaffold_22; pos 51786 to 52396 reverse strand)
taccggtaattttttcagtttactcaaaattcggttggtgtcggataatatcggccaatcgactttttttttggtaataaaaatttattatagatatttaattgtaatttttattttcttaacgtggaaaaataatttataactcaaaaactcggaacacaaatttattaaccctctacgtactgtttctattttataatacttatttcattattgtatgtttacttattgtagaagtttagtagaaaagactcttaattttaaagttaggattttagcaacataaattttctatatcttctgaaaaaactttttaaaacgtcttattattgtaggaaaaaatgaatagatagatgaacgataataccactaattaaccgactcattgtttacacgacaaagttttcaataatggccaaactggtaatagtttttaatatatagcaaaattggatgatcaggtcggataggtagttggccgataattacttgattttatgtttttaattcgtgctagttaactaaatcttaatttaatagtggaaaattgtgtgtataatcttaattttaattcaggtttgaataggagtgggaaaagctgcagactaaga

SEQ ID NO: 102787 - DNA, 652 bp, Mimulus guttatus
  Intron number 2 from transcript mgv1a001683m (locus mgv1a0 01683m.g) derived from phytozome v7.0 (chr-ID scaffold_4; pos 348920 to 349571 reverse strand)
ctctttacccggtttgtcacaaggctatttaacttcttatttgtttttggtattataacgttgactttctttaatctccataatttctcttccgaagatcacgttcatgctctatgttgaagctcacactcactaagtcaaagcacacacagttagactgtgacataatggttttaggtgttcctgtacacaagaaggtactcaccttttattggaaaaaaagaagacccctgtttcagtttgattgacgagcgtcagttaatattttttttgcatttctatgacatcattttaaattgctgtatgaatgcttaagttacagaatcttctgtagcggaacacataagaggtcaaccttttgtatcttttctcgaaaggggggttgggttgtggagtaatgtcatggttgttaaatatccggtgagaggtaacatgatgtattatataagtgacatggacattttatctagtaaaagactgcagatcactgtggtgtggattaattggatctaacaagaaatatagtcaaaatttgagatatatggtccctttttccagataccatttgtaactcagacagcccgaaatttgtaagctgaaaatccatacatgccttctcgttgtatgcagataacttcaaagagagtgatat

SEQ ID NO: 102788 - DNA, 699 bp, Mimulus guttatus
  Intron number 1 from transcript mgv1a001683m (locus mgv1a0 01683m.g) derived from phytozome v7.0 (chr-ID scaffold_4; pos 349686 to 350384 reverse strand)
atcgtgtaacatctttaaggttgtcaatcaaggtgaattaatgctagggtattatagtttttttccttaaatctagcgttaccacatatgttgctgggaatttttgattcaagggtctttcaatctcaaaaaagaaacattgtttttgctagccactttgtcagccatttatatggctgacatcaaattttacaataagatcaatagtgaagatctggtctagtaaatccctaaactcttaagtaaccttggttgacttggcctcttgtcttgttatattcggcgaatcgaaccacttatgtaaaaaatcttatctatccatgtttctattacacatacttctatatgtgtgcatgtaagtcatcactatcaatgtatatttataattgactagaagaaatttttccattttgtcctatttgtttgattttagtttctaaattatccaatttgaaccaagttggtgaaaatagtaaccccttgaacagttaaaatcaggtagtgggtaggggagttttatagatgatctcaaccctccttggaggaataatggtcagtaacagtgtcataataaatgaccaggaagaaggcagggggttatatgaagttctttatttttccttttatccgttaactacattcttttgaaacaatgtatttgcaggttgcaaggcttctaacagaaacatctgtaatcca

SEQ ID NO: 102789 - DNA, 676 bp, Mimulus guttatus
  Intron number 2 from transcript mgv1a014917m (locus mgv1a0 14917m.g) derived from phytozome v7.0 (chr-ID scaffold_1; pos 711243 to 711918)
aatgtaagccctccctcatgcaatttttagctttgttctcagatagctccggtgtatgaatatgattttgccctaattttgatctttgataggtagtgcccagatccaccagtcacacaccattgaaataaattttagaagagatgtgtagagagagagagaggatttaggtgagagagaaacttattgaaaaatctatgttctattaagatttaacagataatggttagatgttcctttttaatattcaggcaaatcgtttcaccgttttctttgtaatatttaccgacttcccaaagaatttctcgacactttgtttcatgtggaactttagttaaacttcttgcaacttgcaaataactattcttttccgttcgttaaatagattgttcgaaattagaaggttgatactagttgatactttttgcacatgttctaccgtcctggcattctaaattacatgcattaatgatccaaaagcacgaatcatcatttagttttggttcttacagaacacaaagtccatgtaataattgtacaaatatgtaactaaataccgacatcttagtacagtccagaccttggtcctgctctttgtaagcattgattcgatgtcctattgacatcttcaagccataattttatttatcttgcattatttttttgtattggcagg

SEQ ID NO: 102790 - DNA, 1000 bp, Mimulus guttatus
  Intron number 1 from transcript mgv1a007331m (locus mgv1a0 07331m.g) derived from phytozome v7.0 (chr-ID scaffold_1; pos 249251 to 250250 reverse strand)
atcgttctcaatctcttcttcgttttgattccaaggttcgatctgttcttcttcaactgtttgctgccccttttttttttgcagtgattttttagttcgtcgatttattgggaacgtacgtctctgtgttgtgttgtttttgtatttttcgtaaatctgtttttctatttggtgtttttgtgatacgaatggtgggatttgggtgtttttttttatttatattgtttgattttgcttttgttttctcggatcttaaaattagtatgaagttgtgtgtgatttagggttcctatcctttgtttagatatcgtagatttttgatgttttgatttgtgagagagttaattatgtttaatcttactacgatagtgaacgcacattgtttagattactcacggaataagatctcacgaaagttttttcagatgggtatattgtttgggattttttaattaatttttttttttggttaaaagattgatttttttatcttatttattgaagagatttgttctgtcttatttgccctaaaagatttgacccctttccgctctgtccagcatgtttcgatcgattcagctatttatgtgttctaaaaccttataaagtaggtactacttgtgatgaatctctggggagaaggtaaagggctactgtttaggaacttttccttgttgtatgatagccctttcctcctacgattcgtcccctaacataaaagaacagaagtttaatgcttgtaatccataacaaatggcttgcaagtttggctcttttggtatatttttcttcaaaaagaagaaatttgttgctcccattggctagaaaactgtcgattttttgtgtacttatattcttcagttgaatatttttttatgtttgctttgataaagcactagcagtctattgacataagtattcagttgtctgttctgttttttcactgaatattcagtttgtccaatatagttttactgacctgccaaaaaaaactgcagtt

SEQ ID NO: 102791 - DNA, 961 bp, Mimulus guttatus
  Intron number 1 from transcript mgv1a009094m (locus mgv1a0 09094m.g) derived from phytozome v7.0 (chr-ID scaffold_4; pos 1391095 to 1392055)
tcgaattttacaggtaaaaatcgacatttagatgtcgattttgaggtataaaattcgacatttagatgtcgattttgaggtctaaaattcgacatttgaatttgtgctataaattcgacatgtcaatgtcgatttttacctatgaaattcgacgcttaagtgtcgatttggagcatagtttttcgacaccttggtgtcgatttttgtttttttctcattatttgtatttggtcttacatgagaaaaaaaagccaatttaatttatggccatacttgtcattccatcttaataaaatagaatcttttggaatctttctttaatttggtcttgcacaagtgaaatgaatattgcatatagccgcagccaaagaaaaattgattccacctaaacttaataagttatgccacattacctttttttgaattttcaggcgaaaattggcggaattagactcatgtgcttgcacatgcggtttggatcggagttttgggtgcaatatgccaaacaaatcttaatttgaaggtgctatctaccatatttttaatctaaggggacagtgtcaaacatggataattggagggtgcaaaagtgcgaattaccttttgaattttccataaaaaaaaaaaaaaagaattcccttttgaatcggagaatagttatttaaatatcctatcaacctttcaacctaattcttctttgaaaaccccatcggtgctctacaaatcctattaaactcctaacctaattcaggtagaattagaatcggatcgcaattttgcttcctcgctatttcagaaccagcacaattcagttccatctaatttgtgcttgtcctttgtagaaagaattgatttttttttttctttttatatatatatatatctcttcctgttgaacaaattttaatctgtttggttattcaaagaagtttttcataagccgatcgatcaaaaagctggt

SEQ ID NO: 102792 - DNA, 1009 bp, Mimulus guttatus
  Intron number 1 from transcript mgv1a012119m (locus mgv1a0 12119m.g) derived from phytozome v7.0 (chr-ID scaffold_3; pos 4222314 to 4223322 reverse strand)
ccgcctccagggaaattactttttccaagaacagcgtaattatccgatcatcttttttgctttttccttgcagatcattttagcttctgctgcctacatttcattatttcgttatttcgttatttatttatttatttttcactgctttatcaaagctgtcgtaggggttttgtttttagattcgggttttgaattcatgaaagtaggccagcgtaatggttaaaatgcgtggtttgtaagtgttcagtcttaccagacctaaatttgaagtatgtggatgtagaggtctacccttgcaattttgttcaattgatgtgattttatgcaatatgaagtgcaccggagctgttgcattttctctctcacccattagattgtttcgcatggcggagatagatacaagggtgccttattttgattgtaatttctgaaatttgtgagttctgaagagaatgatatagtaatttatcatcctaaccaagctatttacaattaattagtgatttctatgaaaatttctctaggttaagtggtcctttagttagatttataatgcttgtaactctacaaaagcaagaatctttatttgggagaaaatatattgacccgtcaaatatatatcatttgaactgccaaataagttgggtctttagcatgtttttcttgtaacagggatctacaatgaggatgttaagcagattccacttagtgcaaatcgacaaaccacatttcagttttttcgtgtgacccttgggcgttaggcatatccagaatatggtgtgatacaaaaaaaacagtttatttccttttcttttcccgaggattcttttactgtttttagtgatatgacttggtagagactaccgaatctctctttatattttccctcagatatggataattgcatatgttatatatcttttgcttttgtggtaaatctttttcataagttttctggatattttttacttataatttttttacaccagtgtcaaggcataggacacta

SEQ ID NO: 102793 - DNA, 111 bp, Mimulus guttatus
  Intron number 1 from transcript mgv1a001958m (locus mgv1a0 01958m.g) derived from phytozome v7.0 (chr-ID scaffold_2; pos 1487220 to 1487330 reverse strand)
cgaagtacacctgaagtcagttgtcattcattcattacaaatattaatttcttttctctctcacacacaaacacactcaaacacgcacttataaatgtaatgtaaatgcag

SEQ ID NO: 102794 - DNA, 650 bp, Mimulus guttatus
  Intron number 3 from transcript mgv1a010933m (locus mgv1a0 10933m.g) derived from phytozome v7.0 (chr-ID scaffold_159 ; pos 963 to 1612)
aaggtccttcctgtaagtagcaaacattaacttgttatagtattatagctgaagccttcacttttgtctcggatccatcttccttttcatggttacgtgatgcatatttcaagttttggtaacttaagtgatttaaattgtatttcaatgtgctgagcagttgtgtatacaatgtagagaatttgtcttctgcaagtcaatttgtatgcttaatctaatattagttctttatctatcttctgtttgaccagtgaccactagcctggcaatgttataacttataattgtgatatcgttcaaaaaaacaaacaagtgaaactaatgctttgaattgtcgacactaatagtaagtggggttttatgttaatgaagtcttgtttactgacggctctcactttggaacatattattcttttaagggttttttttttggcccccatccttcctattcccgactatcctttctgtcttttatttgattgtttaagtaaatctcgatttacttaaaaaatttgacccatcaaggactattatgtttacctagctatctgtactgttctatagtagttccctattatgctcgtagttagcatgcagtaagatataagtcaacaagtgaactattgttatcaatttgtgaaggtgatagg

SEQ ID NO: 102795 - DNA, 721 bp, Mimulus guttatus
  Intron number 2 from transcript mgv1a003652m (locus mgv1a0 03652m.g) derived from phytozome v7.0 (chr-ID scaffold_85; pos 1100079 to 1100799 reverse strand)
aacccaaggccttcaaatcgcagtttccatctcaggttcgtcgtcttttttttttcgagttttatgttataattatgtttttttatcctgcacgttgtttgtgagtgttaggtagatttcttcagacatgactcaaatacttagacaagtgtgtcaaatgcaaagtcatcatctccaagaggaaatttatcagtaatgtaactctaaaacgacctttatttgaagaatctacgtgaagactgatagaccatgattgccgtttcgtgattattagatgtaagatagttatattgatgtttgaaatcttgatgtttattagaaactgttttactatattaggttcgatttactgttctggatgattgcttgccactgccggaggagaaattcaagaaagtcatgaaggagaactactacacaaagaccaagttcgattgccaactcaattcagaacaggttaagaagttgtgcaagctgtttgtcacttcaaccaaagggaaccgaacgaaaaagttaggcaagaccctcaaagcagaaaaacctccacctacactccgacgagagagaattccaaggccaagaacaggcggcgatgggccccgcattgcaccgagggaggaaatccgttacatagagcgtccacgtaagcgcccgaggagggcaattattagcccattacaccacccaccatcttcgtatctctacgacaagaggactgctg

SEQ ID NO: 102796 - DNA, 1023 bp, Mimulus guttatus
  Intron number 1 from transcript mgv1a003822m (locus mgv1a0 03822m.g) derived from phytozome v7.0 (chr-ID scaffold_4; pos 604624 to 605646)
ttctcgattcccccgttcttctctctaacatcaaggtcactctctctctctctctctctctctctctctctctctctctctctctatttttcgtttttcccccttctgcgtctactgattttttttcactagtgatattcgcttcagtagctggagatattcggattcggtttcggattcgaattcggattcggaatcggattcggatccggcaccgtgtatgtttgtttagggcactgtttgggtttatgtaccaaactttcaaaaattaaacaagagctaaatccaaccttttgatttcaaaattgatttattaatctcttcacttctcgattttgtgaaatgtgagtggatttcatttgttgatttgatgtttggttcttttttcattatagccctgctgctgagtgatttctccttttttccattgagtgctcatttggatattaataaatgttaggtgaatagttatgtgtgtttgttttgggaccgttggattccgatgctctaattagtagtgttactaatatattaatttcccgatggaattgttttcgggcacctttaaaccttttgtggcgacgtggccatgagaatctttttgaagtggagtcgaaaaatcggaaagacatgtgaatggagaggaatagcccatcattagaagaataagaaaccattctgttccattagaatcgtaaatatgctcattcactattatcaaatgacgatctgagttgggggtggaagcagcattttgatgtataaaaaatgctttctcgatagggatttctagaataaggatatatttcagtgttgtttcttcacaaaattgaatcttgctttactactagttggtgtttggcgtttttcttgtgtggagaaaagtggttgcacttaaatactcgagcttttgccgttataattgtcagcatcatgtatgacatatggacattttttaagtgcatataaaagtttttttactttgtaggcagagccatctccgaccactggctccttcttcaa

SEQ ID NO: 102797 - DNA, 671 bp, Mimulus guttatus
  Intron number 1 from transcript mgv1a004614m (locus mgv1a0 04614m.g) derived from phytozome v7.0 (chr-ID scaffold_151 ; pos 51191 to 51861 reverse strand)
tattaccagtaccctccctcaactctcttgtacaggtaccacgattcgtatgtatgttcttacatattttgttttgatgtatattgactttcgatcatgcatacattgtcttcatatatatattgattttcgatatttttttttttatagaaattttgtgactgtttaatcatgtgattgcatctaatgatatttgtctgaaattgtaatatcttatttagtaggtacaaaacaatcatttcttaatttgttaattaattatgtttttggtaataattacccagaataatttagtggttaataatatttgattaagccttaagcttcatcgtttttcgtgcctaaacaaagatttaaaattcttaaacttgtcgttatcatcgttaacgaggcattaaaatatttaatcctatgtaattagctcatagattagttaagattatctgctctaattagctgtcacactcacatattcaaagccatcaatcatgaccatctgatggcttttactgttcttttattaattttcatagtctttaattaattaattaattatctaaaaaaatcgcaacatttataatttatatttacatatttattaaatttctaattaaatttgaaaaaataaaaatccagaaatctgagaaaattgaagtacgtaagaaagttcc

SEQ ID NO: 102798 - DNA, 666 bp, Mimulus guttatus
  Intron number 1 from transcript mgv1a014301m (locus mgv1a0 14301m.g) derived from phytozome v7.0 (chr-ID scaffold_262 ; pos 48737 to 49402)
attcaaaaatcggaggtaattcgtgttcttcattcctttttattttttattttgtatgtttttagggcttcggatttgttaaatctgggaatttctgaccgtatatgtgacacccatctgatctttccacacaactagggttttcaattgaacgttcatcgagcttttactcgataaaggcgtgatttttgaggccgtatacataatcttttcagaatttggcttttgtttagatgtctaatttggcaattccaacatcagtcaggttaatttcatctacggagattgaataatttgatatttgatccccaaattggcactaatttatccccaatttggcaatttgttgatattttttgttttgaggttttttccatttcataccagtggtagaataagcccccttctgttttttttttttggatttagggattttgagctagctttctttactaatttatccccaattttgcaatttgttatcctgttttagttttgaggtttttcccattttataccagtggtagaataggcccccgtacgttttattgcttttggatttacgggtgactttagtttttgtagaagctaaaacatgtggattttgagctagctttcgttgtctcgcattataaattcggcattaactctgtagataaaatagca

SEQ ID NO: 102799 - DNA, 820 bp, Mimulus guttatus; identical to SEQ ID NO: 101884
  Intron number 1 from transcript mgv1a017604m (locus mgv1a0 17590m.g) derived from phytozome v7.0 (chr-ID scaffold_235 ; pos 48669 to 49488 reverse strand)

SEQ ID NO: 102800 - DNA, 402 bp, Mimulus guttatus
  Intron number 1 from transcript mgv1a005292m (locus mgv1a0 05292m.g) derived from phytozome v7.0 (chr-ID scaffold_2; pos 254665 to 255066)
aagggtttggccgccgcttcaagctatccgacgaggtcttttttttttcgcttttgaattttcgctacaatgttttacttctcgggttttttcagcataaaatgcagaagtttaggtggcagattgtgctgtatattttcttgattaactaaataatcggactttatctgatgttcggtaaacccaataattttccggaaatattttcatcgtggccctatctgcctttaatattattggattttcgttagatttatttgatcttgtcttgactaatcttatctcgggaaccaaacgaggccttaagttgatttgagaagaagtgaaaatattcaagtgttcgtttgtatatggattttcaggcaagacttcgagaggcagcttctttggagaaacacgtgc

SEQ ID NO: 102801 - DNA, 977 bp, Mimulus guttatus
  Intron number 1 from transcript mgv1a006945m (locus mgv1a0 06945m.g) derived from phytozome v7.0 (chr-ID scaffold_207 ; pos 229988 to 230964)
ctgaattcggtggatttggttgtgctagtggaaaggtgcccttttttttttttccttctaatttgaattatttcagtgtttatttatttatttggctgggaagaacaaaaaaaaaatataataataataataataaggtgatggacatggtgttttagggattggacgtccattgatttcaattttttaattgggaaattttgttggatttggggttatgaatttgcagaatgtaattgggaatctgtgatgtcgtcagaatttattttttcaatttgaattgatggattctcgagaagtccgtcttcgaaacccctaaattcatgatttaaaaaaataatcagtaactttctcctgccgatgtttagatatgtaaattgtgtgcttgtgtgtgtgtgtgtgtgttataaaactttttcatcactatatatatatatatatatatatgtgtgtgtgtgtgtgtgtgtgtgtgtgtgtgtgtgtgtgtgtgtgtgtgtaggtgtacaagtagaaaaaagttcaacttaaaagcaactcttgtccgtaaatatcttgtaaactccgtctattccacattgtgtcgttttgcacgtctgcacaaatattaagaatctcaatatacgtgtcttgaattttggaaaatatacattttgggactaaaacctatccattaattctcacccgctaaccgctccattaatactctcgtgctggagagagttaataagggtagaataggaaattatgtaactaatgcaatatttgatttctaaagtgacacattatatggaagaaacaaaatttctctaaagtgacaaataatgtggaatgaagggagtacgtcaaacttgtggtgcttgattgaattctaaagcgggagtcaataattattattattttttttatttcttttttcatattttgatacatatcttttcgcaggtgaaaattacccagcaaataaatcacgacgggga

SEQ ID NO: 102802 - DNA, 590 bp, Mimulus guttatus
  Intron number 1 from transcript mgv11b020612m (locus mgv11 b020612m.g) derived from phytozome v7.0 (chr-ID scaffold_3 78; pos 1564 to 2153 reverse strand)
aatttcccaatctcattaaggtctgtatatacgattgttcatacattcaaataccccatttttgttttcatttattagttgtaaattgttatacgaaacaaacgtgatagaagttaagcagaaagttaatttgagccccatttgctttaactatctatgaacaaccaaaagttaaacccccccactcttccatgaattgaaggacttgggagttaattatttcaatttcataatttcaaacctattaggcttgtgtggtagttccaagttaaaagggattttgaattattttttagcaccaactttgagccttttttccccattattatagtggatttaaaaacctataatatttagagcattcaaaatctttgtcctaaaacccctattcaaatctgaatagcctgaacttgagcgcaatcttggtacatcatctgggtaatattttaaaactctttttcgtatatacttttctgttagttatttaattttatttttaaatggtaaaagtaacgacttagactaataaggaaaacatttcgagtgaccaggattatgttattttgcaggttattgaacaagaaagtgaa

SEQ ID NO: 102803 - DNA, 572 bp, Mimulus guttatus
  Intron number 2 from transcript mgv1a010749m (locus mgv1a0 10749m.g) derived from phytozome v7.0 (chr-ID scaffold_16; pos 793240 to 793811)
ttcactgtttcttaccttgctctcatcccagccaagtacacttttttatctctttgattttttacatatttttcgatgtttttatcaactgtttatgtgtaatttttcttaatttatttgagatgttttgattgggttgagaaaattctttgggtgttgtcgaattttcgaataattgtgggtggatctattgtaatgtaggacagttagttgacttgttgtcgagaaattgaattcgatttggttgattcggaaatggatagatagatacagacacagttagagaaacagagatgtgtgaaattttatacgtaatctaaatattcccatcgtcgtttgagcttctacagataaaactaagaaaataagatttagttctatgattaggcattattgaaactacgaggcatgtgggaagctatgaagaggattgatcatgttgttgttacggggatagttttaactttaattgtttagttagattcaaagatcgaaagtttgacacacttcccatttgtttaattcaatctattgtaggaccattcctttcgtttggaatcttatttcagctg

SEQ ID NO: 102804 - DNA, 741 bp, Mimulus guttatus
  Intron number 2 from transcript mgv1a019746m (locus mgv1a0 19746m.g) derived from phytozome v7.0 (chr-ID scaffold_42; pos 1549248 to 1549988)
agaaagaccgtatcacgttcgaacaacgtgttgaggttagacgctttctcgtgtttcagttgttatatgtattgctttaattggccgatcagtttctataatcggccgatttcttatatgacatgactagaatttacttgtcgtattttgataggaattgcaatttctccacacgggcatcggcgatggagaatcgttgagggaagacagtggatgtaacattggtcgattatttatatccgggactgacagttcaccttttagttttgctcggtctgctgataatgtaagtttctgtctctaacaaaaatttagtactgccattaatttctctacttggttcgtaatgtaattagtaattcacaatcttttgattgccgttgtttatgagttttcgatttccaaaattttacaatctatatcaaaaagtaacaaagtggtgcatcgcaccttgtacacatctctaggcagactacggtatttcattggaacatgtacggtttctcgctccctcttttttttgcaatgttgtcaccaatcagatattatatttatttctgattggatttagttcctgacacagtgtccttggactttgttattggtatcatgttggttagttatgctttatcataatacttgttttacagattaaaagttacgttatccacaaaatttctgatagactacgttttttttttcttctgaaggtggttcagtttcatctttgtctgtctttag

SEQ ID NO: 102805 - DNA, 765 bp, Mimulus guttatus
  Intron number 1 from transcript mgv1a011688m (locus mgv1a0 11688m.g) derived from phytozome v7.0 (chr-ID scaffold_3; pos 1473938 to 1474702)
tcataaaaccctcacctctcagaacgatctttctggtatggaattcaaattcaaattaaaattcaattaaattgtggagcaattgtttgcaattttgattgattcaattttgattctgattttgattgaatccttttaggttttggattgaaaatttttagtctagattgtggatgtgataactgggcgcgtgggtgggcgcgtggggtttactgatgatggatgtgtactacagataaacctctataaattaatacagtcgggactagggaaattccattaatttagcgaattattaaattatcgagttaataattcaacatgttttcaatgattcgggaccgagggaaactattattttttaatcgaggttattaatttatcgaggttctactgtattatgatatatattgtttgtattatgatatatattgtttactgtttttccttctttgtccaattaagtacaatgcttgataataatttacacttggcgtaatgagtgatagtaatcgagtgatagtaatcgtctcttttgtcttcgaattttcgatcgttttgtgatgattcggtatttttagttgctcgtttttcttatatttacgtcttgtttgctttttcatttttgttttcggttgccgaataaattgattagagtttagaagtaagaatggtttcggattttaaatttgctgtttctgatgtgaataaactgcgtttcctacgtaaggagtgagattggggaacctatactgcgacccgtta

SEQ ID NO: 102806 - DNA, 372 bp, Mimulus guttatus
  Intron number 1 from transcript mgv1a003785m (locus mgv1a0 03785m.g) derived from phytozome v7.0 (chr-ID scaffold_8; pos 1121894 to 1122265)
gagggtattttataatggcacatgaatgccattcgcccttttaaattaggataagctagcattcaatatttggtgagtcacactcacatcggatgccgtacttatttaaaagtcttttgagttggtttcccataattgtttttttttttttttttttttttttataattatttaaataatgtcattttcttcttctacttttattttccaaaattaaataaaaaaaattaaataaaatcctctaatattaatgtcagaaagaatagtcaatttgggaaattaagtcggtgggaattgggattgcctaggaagcaagagtacatacccgatcatttagaaccgttggatcttactgtgacgttttccgatcaa

SEQ ID NO: 102807 - DNA, 480 bp, Mimulus guttatus
  Intron number 3 from transcript mgv1a010480m (locus mgv1a0 10480m.g) derived from phytozome v7.0 (chr-ID scaffold_100 ; pos 735640 to 736119 reverse strand)
gttcgtgtgcattatttattcagtggagattcgtaaaagatcattcgtttttctgatattctcgatttttatatatggagaaggtatttcttttgatattgtgcatattatatacacgtttgttttaaatgtattcacgtgtatatattactgtaaaaagaagtaaaaaagatggcttagtcgctaaatttgctatcgtttaaaaagaagtgaaaagatgacctcgttcgaattcagatgagtgtctgtaattcgtaaagtgaatacgaaagcatcaattgtcttgtgcttgttaatttgtatcgacaattctatacatttttctggtggttgaaatcagacaaatttattaccggaatacgttttttgttttaaatttaagtcaaatttatgaatttagataattttcaaatatataaatcttctcgagactaattatttatattttcttgtggggaaaaaatgtatatatatttgcag

SEQ ID NO: 102808 - DNA, 434 bp, Mimulus guttatus
  Intron number 4 from transcript mgv1a022557m (locus mgv1a0 22557m.g) derived from phytozome v7.0 (chr-ID scaffold_39; pos 138919 to 139352 reverse strand)
tcagcctttgcctctttttaattcctgagagagtggtatttgattttctctttaatctcaaatcctgttactgcgcacttttacttattcgtcaagcttttcattttgaattgaacaaacacgatgagaaaaatgcttcattttatctcactgtgaagttccgtgctggaaaaaggtcaaaatactgtttgaaaatgaagtcgaggagcaatttcagaaaattgtttacgatatagtgaacggatttagaagatatgcacgtggttgagagtttgtgttttcgcctcgtgtccccaatattttttttctctagccaatgttgcacatatttggactttctttgtcatcgattttcattacattgttattggatgtccattcattgcttagatatgctttaatattctaattggttgtctgttctgtaccagcaa

SEQ ID NO: 102809 - DNA, 879 bp, Mimulus guttatus
  Intron number 3 from transcript mgv1a007386m (locus mgv1a0 07386m.g) derived from phytozome v7.0 (chr-ID scaffold_2; pos 737403 to 738281 reverse strand)
gcttgaaaggcatcgaacgcctcgataaactcactgtaagctagtgttagatttcgtatagttttttccagttttcgattataaattgtatatgtagttagttggcttttcggcattatgttgtatagatgtggacttcatgtttctttagcatttcaagtcttgctaaaggtgctagcattttgagtcggaatttgagacgtgtaaaagttccttcatcacgacgaagtttcccgacatgtaactttcaaacgtagaaagctaaattagtaatttaatcgaagtacagaaagtaaaaaccaaattaatagtttataaaatgtatgtcgtaagactatagcttatgcttatctcgatagctggaaaatccgattcttcaatccaaaaacccaaatggtttcactagctaaatttcaggcggcacgcgaattgaagaaccaatcattcgattcaggttgaatcctcctatatgctagcatttcaaattttggggtctataaaatcaactattagtggttttttttctttggtaatttatcatatatataagcatatcctaatcccgattgtgatgggtcattagagaccttctcaattaaagttgcaagaaatgttcaccgttttatctgccatctgctggagtttttattttttcttctttcatcatataagagatgtgagctttagttaagtccaccgttttatcttaaaacatgtaaaaaaaatctcattatactttatttgatgtcatttcatcatccttctcatgtttgactttgttagcactattttcaaacaggattcgaatccggtttataactaaaacattatttaaagtattttacccctctcctcgtctctttctggtataggtattaa

SEQ ID NO: 102810 - DNA, 981 bp, Mimulus guttatus
  Intron number 1 from transcript mgv1a000820m (locus mgv1a0 00820m.g) derived from phytozome v7.0 (chr-ID scaffold_58; pos 773883 to 774863 reverse strand)
gtcggggacttctgtcgtcgagaaggtatcatctttgttgtttctttctgtaaatctcttctctcggtatgaggttttgcacatcttttccctcacacacacacacacatatatgtactattcttcgtctcctataatccttttctattatccataaatagttaaaactattgttatacttgtaaaggtgtagatattgatagaatgaatgaaaggacacaagagaggggagagggaagggaaaaagtagaaacataaatataagaccccaaataaaaataggtttgggttcttgataattgcatttgctgaattgtgaaaatcctccagtcatgactattggatgccaattttcccaaccttagtcctgataatgtcgctcttgtatctctaggattcataggattcaagagctgatgttacgtatttttttttttttcgtttatcatgtaaaatttttcatattggaaggatcatcatgaattatcagtgcttactaactgcaaacaactccatgactatcatcattccccttcaacaattacaaacacaagtgattttggatttttcgctttgctttttggtgtatcatcatgtagaagatatcaccgggaaacaatatcattgtctgccttcaaagatcaatcggacatacatggggaaaacgataaacagtaatctgttgctgtaacatattagcatgatgaaaaatttcttataaaacaaaagaagagccatgtcttattccacccacccatatgttttacttccttgcccttttcagttgcttttttgtttcttctgtagtttgggatactcttttgaagttgtatgttctgaactgctgctttcttatcattagctatcattgctattgtaagcatatgccttctgtaatatgaccatattgttaattcctattttatcattgaataatttcttacaggagagctatactgattgccactagtattgttgctg

SEQ ID NO: 102811 - DNA, 406 bp, Mimulus guttatus
  Intron number 1 from transcript mgv1a009183m (locus mgv1a0 09183m.g) derived from phytozome v7.0 (chr-ID scaffold_36; pos 865859 to 866264)
caaaagattcagagacttgttagctgctcaattgggtatgtgagaacaaccattttcaagaacccattcacatttcttcttcaattttgaaacttattgcagtgtgttttttctcgaattagtttttgattgcgttgattttcatgttgatgcttttgattttgattgtttcaagggtatatgctactttccttttatggcggcttctaaattggggaaatattaaaataattcgaaaaaaaaaattgggattgttatatgtacttcatctttgaagaattaaaattggagtgatttatgggttgattaatcgaatgcataagtattgatttctgcattgagtttctgtactctgtattacaatttacactgattaaatatctgcttgttcatatgtcagttagag

SEQ ID NO: 102812 - DNA, 280 bp, Mimulus guttatus
  Intron number 2 from transcript mgv1a009183m (locus mgv1a0 09183m.g) derived from phytozome v7.0 (chr-ID scaffold_36; pos 866373 to 866652)
gaagacgctgtaagtatttcgatgaattccgatagtagcatatgcatatacgtttcgtatagttacggattgtcttaactttgagttagttggataattttgaagttgaatgttagcgtgagcttttctttcgggtttatgtgattgatagctgttgaagatgaatcttgttttttttcgatagttattatatgtaatgatgtattgttcttgtagatgtaacgttgtattagaatcgggctagttgtcactgaatttgattgtcgttcttccttttagc

SEQ ID NO: 102813 - DNA, 742 bp, Mimulus guttatus
  Intron number 3 from transcript mgv1a009183m (locus mgv1a0 09183m.g) derived from phytozome v7.0 (chr-ID scaffold_36; pos 866713 to 867454)
gaggtatgttggttcgattctacttttttggttttttaaatgaccacttatcatataaatttcaaaatttcagtatcatgcacatacttttgagacgaaagacgtaaaatcaggcgtagagacgatattcttgatgttcgttctcgccagttactcttatgttccagttattatactttataacagtatgtaaaaaatagtacatttacgtcatcttcgagtcaaccttttgtgtcatcctttcactaatggtggtggttgaaaatccggttggatattcccgattggtggtagttattcaatcgagaaagttgtttgagcaaaattctatctgataaatatctagtggcgatttctgctactatataaacacacaaacgtattcacaatttgatgaacatgctcgctttgtcgttgaaataagttatactgctgtctgtaggcaatttgttagataattgttggttacgaggaattaagttcagattccacttaggttcggcggtatctattggttttcgacttgtcgtcttatttgtttacacatttattaaagttctctcttctttgttattttggcggaaagatttgtttgttcggttggttggcatgtcggacattcattttcatttccttaaataacggtgattaagatatttgtaactttaaattcgttaatccgattgtcgtcccttttgatatcaaaggcaaagtggtggccaaattctgtgctaagtacctt

SEQ ID NO: 102814 - DNA, 383 bp, Mimulus guttatus
  Intron number 1 from transcript mgv1a004373m (locus mgv1a0 04373m.g) derived from phytozome v7.0 (chr-ID scaffold_151 ; pos 422662 to 423044)
gagaaatcaattcggtaaaccgcaaatccatcacttgttcttcttcttccctcaaattaattactaattttcccgctattttcagtaagtgtacagaatttgttttgtatttattgtatgtgtatctatatcggaccgttttcccccttttcggatataattgatgatcgttggaaatttaggttaataatcgctgtaattatcaacagtttcgatttgctttgagatttggggtttcgtttatttgtgcataaaaccgatcgaaaagagtgttcaatgctcacaaatccacagacaaatatataaaacaacatgttattggagaatgacttgagatacaatgggcagggccgattttttcgtattcgaccggaaacatacag

SEQ ID NO: 102815 - DNA, 703 bp, Mimulus guttatus
  Intron number 1 from transcript mgv1a007390m (locus mgv1a0 07390m.g) derived from phytozome v7.0 (chr-ID scaffold_262 ; pos 28988 to 29690 reverse strand)
gcagcggctcgcgaaggtgctggccaccgccggaggtatatactacagtcgaacctctagcaaaattctattaatttgaccaaatattaaattaccgacctaataatttgcagttaaacctctataaattaatacggaaattctgttaatttagcgaattattgaattatcaagttaataaatttaaaacgttttcaccgagttgggaccgggagaaactattatctaatcgaggttctaatgtagtaggtttttaccaagtcgtaaccaaaagaaactattatttaagcgaggttattaatttatcgaggttctgctgtagtatgcatttcatttattgcatgattttgttgtacagtgtgctgttccagtagtaccttagtgtggtgttgtatgctacatgtgtatcctcagttacttttcttgtaagtgtttacagagaattggattgtttttttcgaatttgcaattgtttcaagaatcttccttttgaggagcccatattttagttcacagctcttgccaggctgtttgtgtagaatacccccgagtacttgtaccgaaaaacccgaaaacccaaaaaacccgaaaacctgaaaaacccgaaaacccaaaaacccgaaaacaattatgttatatactactaagtaatgttgtttgattgacagtggcatctaggagaagtagcgaagagctgattttc

SEQ ID NO: 102816 - DNA, 679 bp, Mimulus guttatus
  Intron number 1 from transcript mgv1a015121m (locus mgv1a0 15121m.g) derived from phytozome v7.0 (chr-ID scaffold_162 ; pos 324960 to 325638)
gtttgtcggatccattaccactgttgtttccacaggttcaatctctaatcttcctcattatttctactgtacaatcttgttccgttccagattatatttcagattggttggttgtaactcgtatgctaaggcctcgtttggttggagagactagccatgattaactaaataacaagactttgtttgacgtttggtacccccaataacttgccgggtcgaccctcaaatattatgtttatcttgcctagaatttttttattggaccttccaaggtcgaatacaacaattgacttttattaaattatttaatcttatcttggcaaccaaacgaggcccaaattgattaaaagattttaaacatttgatctacttcaatgaacattcactgttagggatgattgattttgtgggcttatgtgatttcaatgaaaatttgatgttttcgtcttggaattagatgcacgtttttcttgatgtttcacaatttacattaactgtcattttacggagatattacgtagctccgtttaattgattgacgtgcattcgttaaactccacttaaaaagaaatgagtgagtatcggtgatttcattaagtttcgttttttttaccctattcgttaagtttccgttttttgaaacgattcttgttttgtttgcaacagttgttttcattat

SEQ ID NO: 102817 - DNA, 815 bp, Mimulus guttatus
  Intron number 1 from transcript mgv1a013953m (locus mgv1a0 13953m.g) derived from phytozome v7.0 (chr-ID scaffold_132 ; pos 641443 to 642257)
cggtgaaatttaaggacctttgggatcaaaaggaggtattgctagttatttatactgtataattgtttgtaacccccttctctgctatggtgatatttgctttttcgcctgatttttcctcaaatctgtttgctgaattatgattttttatttatttttaattgcaatttgtttttaaaaatctttgctttgggcatgtaaatttgaaaatgaaaattcaacaaattcggcataaaataccattgaattgataatcaattcgatgacgatgccgtgaaaaggtttaaagttcgatttataaatatcttatagtgttcttaagaaagatgaatattccagagttttgatgaactaggggtgaaaatcggaatcgaatttctgaattccgtcgattccgatctgaataatcttttatattggaacaatatttttcattccgaatttcaaaattccggttttttggagcggaattagagtacattagcttacgatttccgatccaattttaatttccgaaattatacacttataatatcaatattattatgattgaacacatactcgatgaagcttttgcaggagtttaacttctccgattcggttaattcggtttactagtcttgcacttttttacagagtaatatagaatatagaaacagtgtacattcaatattaaaaaaaaggatggtaatgaaggataaataggatgtttggttttcttttttagcttcatcttctcttcttaatttgggaacttcaccgacaaaatattctttacaggaagtggctgttgttgcacttttgagacattttgg

SEQ ID NO: 102818 - DNA, 426 bp, Mimulus guttatus
  Intron number 1 from transcript mgv1a004316m (locus mgv1a0 04313m.g) derived from phytozome v7.0 (chr-ID scaffold_83; pos 901167 to 901592)
attctctggtttcgattgatgtatgtttcgtgtttttggttttaatttttcggattgtctattattatctttcatcgatggtttgtatgtttccgatgcaagcaaattgtgaacgaggttttaggagaatcaatcggatgtgtggcttgattgatgcagtgtcgtctgtttatgtgatctaatttgattttgattgttgcaaggaaaaagtttgtgtctgatccccgttcgttgtagttttaatgtttgagtggattggatagattattggataaatcattgtcttctatatttcatcgtcttgcatatagcttttctccgagaaattttgttgttgtgttcagtacagacctacagatgattctacgatactgtagaaattgtgtatggttggattttctctgttaaccgtgtttaattgtacag

SEQ ID NO: 102819 - DNA, 969 bp, Mimulus guttatus
  Intron number 1 from transcript mgv1a008064m (locus mgv1a0 08064m.g) derived from phytozome v7.0 (chr-ID scaffold_18; pos 761999 to 762967 reverse strand)
gttcttcttctccccaggtttaatcatctctgtactagaaagaaaaaaaaattgttttcaattggaattcaatgcagataaaattcgatttcgtttcgaattacagttggttgcaatttttgtctgtagcattttgttgaaattttaagcattggatggtggatttgtagtgtaaagtagaaatacgcgtgttctcttctctgtttgtggcattgaaatagtaatggtgtttgatcttacaatatcgcttagttatctaatttatttatttattattttctggagagagaattagacttcattcgatttcgtatttagccgattactgtgtgtgaaaatggttacactatgctgttcggaccatcttgaattgatttttcgtaaagaggttgtggaaacatttaatttcgacttgctcttgtgaggtatgaattacgatgagatatgaattccttgaaaacgcgttctaacttggtattgcttgattcatgattaagaaggttttagaaattcttctacttcatccacatgaactgaaattatgtccgacttattagacacatggacaagtatttgtaggtcgcttgcagtcttaaggtagtcgttttgcatattcggtactccaaataaaaaagttttttttattatgatgaagcctacccttgattaatcatttaattaattaaattcaataatgcgcttcttggttgtatgatttccattttcatcttggcattttctttgtactctgtttattcaatgctttgaatccatataatctctatgctgctgcagtggggatcaatcattaaacagtgagttactagtgtaaagacataagtaggccgaaacataataggaaatgtattcgttgaggggctagaaatatagtttcccacgtaaggtaggaggtgctttctgttatcaatatgtgttttcttacatctgtttctatctggtcttatagta

SEQ ID NO: 102820 - DNA, 458 bp, Mimulus guttatus
  Intron number 2 from transcript mgv1a002703m (locus mgv1a0 02703m.g) derived from phytozome v7.0 (chr-ID scaffold_7; pos 1653391 to 1653848)
cagtacatcactccctggactgtcactgtcgccaggtaccgattgtcaaatcgatcgattctacatttactttggagttgtttgctgtggtgtttgtgtgtaagaaatttgttcgtttgattcgatctcgtttcagtattgtgttgaggaaaagaacattgtttttttctcttgtaatgattcataatgtttaatcttggaatgtattgaatagtggcctaacccgcagtcgaatcgagggttttaaacgagataaaataacaatgcattttaagatgacacagagttattgcaaatggattcttgatctagtctcgtgttttcccaagttcaatatgatgctacgttaatcattctcgatgttctttttttcgtacgaggttgtcgtctatatgatttttcttataatttaatattttatagtggatatccgttgttacgcgaccctcactacaaca

SEQ ID NO: 102821 - DNA, 1005 bp, Mimulus guttatus
  Intron number 1 from transcript mgv1a006347m (locus mgv1a0 06347m.g) derived from phytozome v7.0 (chr-ID scaffold_102 ; pos 762103 to 763107)
gggttggaaaaggtcaaatgacatgtatggccttaaaggacgaaatcatccttccaatttactcaaacctgacgagaattagattggaaatacatatttggggcaaaatgcaccgagttgtatatttcggagggctatagtcttgtttttgcattttgatgggggaaaatgcaaaaatgacatttttaagggggcgaattgcaatttgccctaaaatatattaatataataaatcttattttatatataaaagaaagaaagattggacaaccttaaaaatccctaatggtgtttatgtaattatttatttttaatatttttttctactatttttttactataattttcaataattatcgatctcatatttttcatcaatatatttcaaatcttaagatataaagataaaaattcgatttattaaatcttaatctatatatttgaattataaatcttaatccgcaatattttaaaaaattaatattatatataatatgcataatactatattattaaatgttactatgtactatattttcttattatgtattaaattgattatttcttttcaatttttaaataatatcacgtgcatcgcacggggaaaaaaatgttagttggagataatatgatgtggctagatgaataaaaacaaaattataaatagggaaaattaacaaaatattaaataaaataataaatgcccaaattgtgaacaattaagcctaatttgtgatatttatcaaaaaaaaaagaagccaaatttatgacggtcctgggcctagaaagatttaggggttgaactgaaagaacaaataagatttaggggggcaaatgagaaaataaaaaaagcgaccatttcaaagcggccttctcgcagagcctacacacgcacagtattgttggttggtatggttggttgcaatctaaaataaaacaaaataaaaattaaattaaaaaaatggggtagttttctctctcatcggttctagtgagagaaaatcg

SEQ ID NO: 102822 - DNA, 736 bp, Mimulus guttatus
  Intron number 1 from transcript mgv1a002077m (locus mgv1a0 02077m.g) derived from phytozome v7.0 (chr-ID scaffold_12; pos 1492704 to 1493439)
gtgagccaacaaaaaagatattaaaatcctcgaaggtgcgagcagctatttaatatctgtgttctttttttttttttttttttctgtattttatgatcgcaattttgatgctctattcctaaatcaagtttctttttatctgtgttcgtcgatgtatgatccatttcgtgatgatcgtgattgatttttactgtatttatatcaatttattccctttttttttctgcttagcttttgaagtttttgggatgaattggaaacaaaattctctgttatttcatttctcaattttgatttattatttgtgatgttgggctttgatgattattagcttttcgttgaactgatggattgttcttttttccttttttttttaaggagattgtgattgtgtttaccaatttcaggtttcttgagtaggtgtgctaatttactcttcctttcacgtaaaacggaatttttgtacggttttatcccttaccgtagagttgggttaagggaatttggagcttcactccaaatggaaacttttacaagtaccagtgatgtataaaatgtagatatgatatgcactatcatatctgatttatgtttcctttattctgtacgtaccgatgtgaatgtttgtattatggtggttttgatgctgttactccactctattcgagcatatatggtgttggttattttaatttgaaattgtttggtgataaccattttttttttctgtgtagga

SEQ ID NO: 102823 - DNA, 918 bp, Mimulus guttatus
  Intron number 1 from transcript mgv1a003113m (locus mgv1a0 03113m.g) derived from phytozome v7.0 (chr-ID scaffold_3; pos 2443796 to 2444713 reverse strand)
tccccccgccccagtctctaagctcaatcctaattgtaagtaatttaattttttttttttcgcgtttttcctaatcgttgattgtgcttgctgaattggaattcgattttgagaagaaattagggttttcgagtttttggcatgtgatcgtggtgttaatttttcaaattgtattttgttttcaattttacttaacctcccaaatttcaattttgtttggggggttttaatttgatcttttgttggcttttgcttcttagtttagtgggtattacattatgtaatggtagtctggtttagtttaatctatgtcctcttattgtaggttgatttgaatgctcaaaagcgatattttacccttccaagctgaattgatttttgtactgtatcgacgtgtaaaataattacacggaagattttagttatatacactattgcaatttaatggcgcgtaggtgtttttcggtttcttgtttttggaactcgcatgaatgtttaatttttcgcttatcgtttgatgtgttgttgattcttaggggtagcgtttcttgcgttatgctgtacatttgtactgttggggtaggattgcccaatatactaagcctctacgtgtatcttgctccatatattatgtatttatatgtacaatcctttcttgatattcgaagttcctataacttaataaatttacgttttttggagaaggcgtcgtccttttcttttctctatttctaataacggtcaattttttcatctttagagtaagtattgatatgcatatatcaagtaatctctattttcatatccgtcctttctataattttctttctataattttcagtttataaataatctcttatatcgtattctattgtgtgcatattatgaaaatgggtccagatctggagttgcacggag

SEQ ID NO: 102824 - DNA, 928 bp, Mimulus guttatus
  Intron number 1 from transcript mgv1a007329m (locus mgv1a0 07329m.g) derived from phytozome v7.0 (chr-ID scaffold_32; pos 1308981 to 1309908)
cgccaccatctccaaaacctccgcgctgttggtgagtatactcacagacgaatctgtttctgtatctctatatgtatttatttaattacaaattctcctaaatttcgttgataaatagttgaaattgaaaaccaggcagaaaataaataaaataaaatattagtgaataaatgaacaataggttggattcaagtagcatcagtatttagcaaaaaactatgtttaatttgtaatttctgataacagtgttttttgtcaatcaatgtatgaactcttacacatatagttaaacctctataaattaatacaatcggcactagcaaaattctattaatttagcgaagtattaaattatcgaactaataatttagtacggttttattgagtcgggacgggaagaaattattatttaagcgaggttatcaatttatggagtattaatattatcgaggttcctactgtattatgtttatatacgggatgggaaatattttatatttattacgagtatattatcgttcttattgaaagttattttgaaactaactgcaaatggtattcataaacatgcagataatttacaagttatgaaaaaaaaatttcgaaaacaaaattttggcattatttttacaattattgtatggacttactctaattttattagttctcaatcctctacattgcgagacatagagaaatagtgccatatttgatgcatttgatgtgaatttatgatcagtttgattgttctggcactttgaaactcgtacgttaattcatgcacaatttgcatttgtcaatctttttattcgtatctggattttcacttttatcttggctggggcatgaaaatagtgttttgcatgttcagtttctcatatgctcttatatttgctaggaagacagctggaggaatctggtgttctaa

SEQ ID NO: 102825 - DNA, 331 bp, Mimulus guttatus
  Intron number 1 from transcript mgv1a011539m (locus mgv1a0 11539m.g) derived from phytozome v7.0 (chr-ID scaffold_104 ; pos 28572 to 28902)
gcctcaggtcagattcatcacacacaaacaccttttcattttttttttcatttaattttgtcacctttgttaatttccagcctagctttcttttatttaatctttttgataattcactttgttatcaaaaaagattaaatttgttatatatattattcttgttattatttgttctcttccccccttgttttctactgtttgtttctcatctttgagaaagtgttaaatcagctaactactttactttcttgtatatatatatatattatatcttcttcttgatcttttttaatttaattttttttttaaatgattattaggacatagcaac

SEQ ID NO: 102826 - DNA, 367 bp, Mimulus guttatus
  Intron number 1 from transcript mgv1a012758m (locus mgv1a0 12758m.g) derived from phytozome v7.0 (chr-ID scaffold_251 ; pos 260957 to 261323 reverse strand)
ccaccctattctcgtcgtcggctgcggcaactctggtgcgtctccttttttatacccattttgactttcagctattcttttgctaattcctttaatcttccatctctttttgtcttgattctaagtgcattacgattgatttgtttcttattttgaagatttattctccaatcgaatcaagctactttttattattttattttttttgtgttgtagacctagaacatttttttgtcccttatttgtcataatatatttttcttgagtcggaaaaacaagcactgaacaagtttgtaatttgatatttagttgataagaaccaactcaaagtactgcattgtttgtttctgcagcgtttagtgaaggc

SEQ ID NO: 102827 - DNA, 363 bp, Mimulus guttatus
  Intron number 1 from transcript mgv1a002946m (locus mgv1a0 02946m.g) derived from phytozome v7.0 (chr-ID scaffold_32; pos 1070917 to 1071279)
gctggagctcaatcgactggagaacgaagtcagaggttagtctcttcagctggatccactagattcccgctctgatttgatgttaaacgctgccgcttcgatgctttcaattaatttaatgggtagtgtaatgcgttacagtgtcttaaattttgaaataattgtatcctgaggtgaagcgcaaggctgtttgatgtgttaattcagttctgagagaaaaaaaacaacctaaacctcgagcgctatacgtcttttcacattaaatatttttggttgtgtgtgtaatttgttgaaacaatggcattttagtggggtttattgtttgcagataaggacagagagttgggggaagcacagtctcag

SEQ ID NO: 102828 - DNA, 716 bp, Mimulus guttatus
  Intron number 1 from transcript mgv1a013296m (locus mgv1a0 13296m.g) derived from phytozome v7.0 (chr-ID scaffold_15; pos 233722 to 234437)
ttctcgtctttctcgctttctccttctctcgacaggtaaaaaaagtttctccgttcagtgaccttttctttttttttttgaacttttcgcaattattgcttctctgaattcctgtgattctgatgcttgttgtttaatttgatgattgagctgaattatcaattttcaatttgtttgatttagatctgattgcacttctacatgatgggtgatagttgttttcatgtgctttctcttccttctgaatttgagatgccgcctgtgagtgtgtgtgtgtatgtgtgtgtgtgtgtgtgtgtctaatttgcattttgcaaatcaatgaatttgagagttccgttgtaatatgcattttgcaaatcaatatgtagaatcatagaatgtgaaatcaaacttagggtaggtagtccatgaaaattcacactgcatttatttaaccttttctattttgctgtttatgtttcagccgacttgcttttatctttatctgtcaaaagaaaatttatcgttactttcattttccaatgttgtgatcttgtttgctacattattaggataacaatcacgaaaaaaaaaaatccatagattttaaacatacatatataacacagttgtcgtgtagttgtgttttatcctaattctgctgccatttcttacttttgtcgtcttttacaactccagcaggtagagaagacagaaaaggtccacgagatcac

SEQ ID NO: 102829 - DNA, 666 bp, Mimulus guttatus
  Intron number 1 from transcript mgv1a000355m (locus mgv1a0 00355m.g) derived from phytozome v7.0 (chr-ID scaffold_92; pos 331337 to 332002 reverse strand)
atcctgaagacatcgaacgcgatattttggagaaggttgtatttgcgtatcttaagctctttcttcctttccgctgtatctgtttagttttttgttgattgtaatggcgttgcactcagctgttttgtattgcatataatgccaagtcttttatgtgattatgtctatcgatagtattctgatggcagaattctcctcactcgagtatattgcaaactgctttacaataatttgttctcaagatctgaagtagctctttagatcgttctgtagcagtataatattagtcatatgacatttatgtgtttcttgtttctaaattcatttttgcccatatcttctactcctgaattcagatagcagagtcagaccgtagtttcgaggggataattatataggaaatcatgaaaaatagtattagaataagctaaaatatgcagccgatagaattgtggttgcttcactaatcaaactgtatttgttggtcacggtaacgttgagatcgttattgtggtagtttgaacttcctgaaaatcaaggggtactatctttttgtcgcttctaaatttatgcatttagttggatcctttgtggttttctgctttcttctttttgtgtgtctatatgtattaactacgcagtctttatctggataggcaagaaaaa

SEQ ID NO: 102830 - DNA, 692 bp, Mimulus guttatus
  Intron number 1 from transcript mgv1a001166m (locus mgv1a0 01166m.g) derived from phytozome v7.0 (chr-ID scaffold_13; pos 2096525 to 2097216)
aatcgaagttcgcttaggctttctctctgattgaggtaaatttttctgtgtatcgtgtttattaactgtagatctactagtattttaattgatttcgttagctgttggtctagatatcgtgcttttgatttcggaattgatttgttcaattgctgctgtttaattttgattggtacagtgtgtcaaatgatgtttgaagttgtttggcgaaatctatttttctgtagatatgcgtcaatgatgtttggatttgtttattgaaatttgtttctgtagttatgcttatggatgcttcaaatttgaagcccagggtttaagctatactcatggttaagaactttagtgtttatgtttcggaaatctcttattaacttttgctgatgttgagaagaggtggttatctgttgatcgatgcaatttcgttttttatgtgtggttttattgatttgtgagtgttctttgaatgtaaccaattaaaggattggggtttatttcatattttgtcttggagttcatcagtttattggaatgatttttctctgattaacattttacacacactgtttttgacattttcttcagcagattattcagggttttatattctcgattgtgcaccttggtattaattttgcatgtggtaataattgtgtagagtctgatttccttaatgactcttttgtacaggagaa

SEQ ID NO: 102831 - DNA, 456 bp, Mimulus guttatus; identical to SEQ ID NO: 102082
  Intron number 1 from transcript mgv1a012422m (locus mgv1a0 12413m.g) derived from phytozome v7.0 (chr-ID scaffold_44; pos 802560 to 803015 reverse strand)

SEQ ID NO: 102832 - DNA, 683 bp, Mimulus guttatus
  Intron number 2 from transcript mgv1a007854m (locus mgv1a0 07854m.g) derived from phytozome v7.0 (chr-ID scaffold_90; pos 1025581 to 1026263 reverse strand)
ggaccaatttttccaggtacgtcctgtttctgttatggtgaattttaagttccagttactgtaatatattgctcttgcaagattgacgcaattaccgtggaacctattagacttttaagttgttatgtcttggctactttgatcacgtacgtgatttgttccaagcggactgttgataaactttggctagagacagattttcatttttaagatttactgatgtagttggtccataaaatcctgagttgacttgcttccaacttcatatctggttcacttgtaagagaatgttatttgattaactatacattgatttgtaattcaaaaaatggaagttgcaaggaacgacattccaaagatgttaaatagccaatgaaattgagtatagtttgcgacatggagcacatcttttgaaaatgttgtaaggaagctaaagcatagaccaagtagccgttcacgcataaaaatgataacaaatttatagtcaaaattgaatcatagcaagaactggttgggtctttttaggtgaaggaacaccattctcttaattccatgcacttgttcagcgttaaactttgtattttggatggtacggcttgctatttggtttgaatataatcttcttttcttccctcaaattttaccattacagggccaggaagatagattttctgtgtacgtgc

SEQ ID NO: 102833 - DNA, 846 bp, Mimulus guttatus
  Intron number 1 from transcript mgv1a007854m (locus mgv1a0 07854m.g) derived from phytozome v7.0 (chr-ID scaffold_90; pos 1026766 to 1027611 reverse strand)
tcctcctccagctcgccgccgttcgaatcaatcaggtaattgaatgttcttcatgggggaatgccgttatggaggctacatttattccgcgcgtgtgttggtattacgtgtttttttctcgccctcgtgtgtgtgtgtgtgtgtgtgtgtgtgttgcgtcgtagttaatccgtgtggtgtatctataggatttgtcgtttgagttgtgtatctataggatttgattcaggggcaggttccttcggtttgactttttttgggcaatggatttcttcctttttcagttcggggcggcggcgtagggaatttgaatcgatcaatgtggtttctttgttactgcatattcgctcgtttgatttgtttgacccaatttgattttgtttcgcaacttgaattatttaacgatgggatctgaagtttgggcatttatgaaaagctgttcgatgtacccttttcgtctgtattcatttccctcgtccttttttagttatggtcaaagtgaatttcaatccctgttttgggaatctgatctatggattttttggtcggcgaacttgatctacgttgacttttggaatacggtcgtcgtgcatatgtgtttaacaccagatttgagctgtactaatctatttatgtagttacccattttcaattacatatcttgttgttataagatttcttttttttttaatttctgctatagcagtgtttgctgctatagcagtgttatctggcaaataaaatgtatgttcttaattcagctttcttgtttacaccaaatcaagttgtgtttttttttttcgtcgtgcagctgcagatcaattgcaaacatctccatcttcgttg

SEQ ID NO: 102834 - DNA, 903 bp, Mimulus guttatus
  Intron number 1 from transcript mgv1a001310m (locus mgv1a0 01310m.g) derived from phytozome v7.0 (chr-ID scaffold_12; pos 2071695 to 2072597 reverse strand)
acccacgaaaaaactcgtaattaagctctttagaggttggtatttttgcattgggaattttctgattgtgcgttttttttatagtggtcttaagtgtactcacttctgggaaaagtcaatccgatttttactttttgtgcttctccagttgaggtgaaattgttagggttttcatgtctttgattggctggtttggtatgggaattttgttcgtggattctgtaaatcattagaattttttttatgtttaatgtagttctatttcttttgggggtaatatgtgaagatctggtattttctcaccttttaagaagtgtttctgtcacttccaattgtatgaattagaaatcttttaagctgataattaatcatgagttaaattgttccagctgattcatgcgttttaacactggatttttagatgttttgggttaattacttaaattgtctatttagtcttaaaacttcttttgccaggtgttacatttttgaatgtatgactttagcaaaaacctagtgtggcttcttattgtagatgaacattgggccaaaacttttcggtggttcaatctttatagttttcttcaaggggctaattctgacaaataattccaacataataataagcaacaagtattggagtttgttctttggtttcttgttgtgtacatgtttctcatatctcaacacttacacttaactgctttaaactttacgattagagttgctctgaaggtcactattcactttgatttttaatttttggtttctctcataacaatagattctgaagtattgtggataaacattttgtctattacttcaaggaaatattcttaactgttaattttgtgattcttgtctgaagccaaaccgactcttccgagtaactttgaggaaact

SEQ ID NO: 102835 - DNA, 636 bp, Mimulus guttatus
  Intron number 3 from transcript mgv1a011555m (locus mgv1a0 11555m.g) derived from phytozome v7.0 (chr-ID scaffold_14; pos 1940844 to 1941479)
ggtaactacaagaggtataacacataatgacaatgaatatataataaataattgtgaagctaaatgtatggtggtgaacatgcgaaacccccaagaatgtcacaatttaacatttattctagaatattctttcttctttatacgaaccgagtggatcgaacaaaaaaaaaagaagattatttttcacatttcatttcatcaactctaacaaaaaaattgttattatttttttgtcaaaacctgtctaagctacttattgtttcattgtttatgcttaatagtttgacggaaaggtttagtattacgttttgggttttaggatgagcgttaagtttttgaaatgaaaaaaacaaaatcagaaatttgtcgtacatggatcctgcttcaatactaccggaaaattatgttagtctttggtcatctttgagatcttttacgtcttgcaactaggaattccacataaccgaaaagaaaaatccttcactaaatacttcaggaaattaaaatcatgtttcggagcttttttcgtctttgtgagaattttcttaacctttatatttttatgccttgtgggtacgttgtgtctcttatcgggtggtagaatccaatcgggacatttacttctcttcaacaagt

SEQ ID NO: 102836 - DNA, 925 bp, Mimulus guttatus
  Intron number 2 from transcript mgv1a012194m (locus mgv1a0 12194m.g) derived from phytozome v7.0 (chr-ID scaffold_106 ; pos 479230 to 480154 reverse strand)
aggccatcaaacactccatcgctgctacacaaccggtaattaacctcgtaaccgctcgctttcgtcttttacggagacggatcaatttattaatgtgtgtttgttgatttgtattagggttttatgtttgatctgaattagcttcttgaactgtttgatccgcacaccttgttttcgtcgggatacggatcaatttatttatgtgtgtttcttgatttttatattagggtttatgtttgatctgaattagcttcttgaactgtttgatccgcacaccttgttttcgccgggaaccaccgaagtttatattcatgggtattttgtatttacaagatttatgttcactactgtttgtcttcgtagctctgtttcatcgtgtaaaatctgatgcctttcatgattgggctagaggttttcgattttctttactggagcaaaaaccgcccgatttttataaattcacattcggaagttggaaataaatctaaagtggagtcgcttgtgttctattggaatactattttgattcgaaaaatctcaagtttatgatcgtatgtctgtacggataaaaatacgggagaaagattcgtagttttgttagtcgtcttgcaaaccaacatttcccatctaagtataaaaaatcctgtttttttatctgctgtcatctcgaacaaatttcaagattcatgcttttataatgaaaaaaggttagagagttaggtgcctaaatatcgactattttgtggttgttatagttcttaaaattttattaagacaagaaatggctgtaacttgttacatgtcgcgtgattcttacaatgatttgtgaaaaatactttgcatcagaatatttgattagattaaatttttttttttttataatgtgacaggtccagttgactgcttacaaccctaagacactgga

SEQ ID NO: 102837 - DNA, 672 bp, Mimulus guttatus
  Intron number 2 from transcript mgv1a009588m (locus mgv1a0 09588m.g) derived from phytozome v7.0 (chr-ID scaffold_120 ; pos 350566 to 351237)
cgaatacaagtacaaattgaaaaatacagctcttggtatgtttttttttattgtctctatgatgatatattaggactaaatttcgagtttggtgtaaccctgaatcggcttacaatcgaatatataatgtcatatcctttttaacagtttttttatgttataattaagagttaaaattgaataataattttatcattttttacgatcgtaatccgaaaaatttcttactttcgaacaatatttttctctttttttcccgatttttttggaccagaattgaaatatttacaagcttcacattttgtatccgattttagttttcatttgtaatatggttagtatgtatattatgttataggtgaatacaaaatagaattgtaaaattccaattgtgaaagttttcgattttacaacaagtatttttcatttcaatttccgaaattttctaatgtttcttggaacagaatcgaaattaattcttcacgtctaaaatgaatcaaatttgttttttgaaaaataaaattacgatctgatccatccgacattattcgccatttatgaccttgttgattgaaaattcatcctttcttataattggagataaaattatcaaataatacaaaataactaatcttttttatatgcatgtgaaaaaaaatgttgacaggggag

SEQ ID NO: 102838 - DNA, 874 bp, Mimulus guttatus
  Intron number 2 from transcript mgv1a001156m (locus mgv1a0 01156m.g) derived from phytozome v7.0 (chr-ID scaffold_27; pos 153819 to 154692 reverse strand)
aacagccttttgcgctgttatccgaggagaaaaaggtagatttctgcctatttatgtgctaggatttatggagtttaagtggagtttacgactatgcagtaatttttgcatgagtagtttgtttgcttgctcactcgtcgggcggacgatataaggcaccagtgatcttgtatggacttctttgtgtttatttaacttgtttacagttacgttaatattacttgtttctgatgcaatctgagctaccgcgatttcataatctgaagctttgcgatatgcggagatcttatttatgtatttgtttcgcgtgaaggagtttttaactatgatgtgaaacagttaagaaaagaatcggaactctcttatagccggatattgaattctcgaatcacaagcttaggtccaatcctggattttagtgaataaataatattgattttttttttctttctaaagtatattatttattctatctaccaaaaaatggatgatttccttcattgcatggttttagaggttgaacttgaatgttgttcataagtaattcgggatgaacaaatctgcttgtattttgttttttgtttatttaattggatgattaccggcattgcactattttagaggttgaatgtatttgattagtaatttgggctgagcaaataagcttatagtggatgtgttcttttttataaaaataatttgtggaagttggttatgctgtgatttgctattagcctattatgtaatggccttttgtcacttggctatagtctctgttgactaagctctttctgcaaatatttttcttgtgagagtcccgcccttaactgtggagacacctaacagtccaaaatttccattttactgtagcttg

SEQ ID NO: 102839 - DNA, 574 bp, Mimulus guttatus
  Intron number 2 from transcript mgv1a000587m (locus mgv1a0 00587m.g) derived from phytozome v7.0 (chr-ID scaffold_76; pos 1098143 to 1098716)
cgcaattatacggatttttggggtcactaaagaaggttatctctcgaaattgtgtatcctaataatgagtggtttgaagtaagagtaaacgtagagctattagggtgtagttgtaaaggcttggagaatttaggaaattgtccgtatcatatcaaacttgaaagtaaaataatttggatcctctattttttgatgctaacatataccgtgcgtggaggattacgacttacaacttacatctacaaacttttggttaactgtcacttccaattgataccagtgctgttggtcagtgcagcgtgcttagaaaaaaaaaaacttattgtttatcctagtgtgtattttttacaattgcattgcttactattataggatcttagaatatacatcaaagatattacaataaaatgggcaaacacatgaattttcttattgtgctaacaattcttagcttttgttcttcgagtgacttgagtggttgcagaaaatccttatattggattaaggctaatatcacaggttattaatttctgaaattatccttggccaggacatagtgtttgctgtttcgtgc

SEQ ID NO: 102840 - DNA, 802 bp, Mimulus guttatus
  Intron number 1 from transcript mgv1a020217m (locus mgv1a0 20217m.g) derived from phytozome v7.0 (chr-ID scaffold_343 ; pos 134436 to 135237 reverse strand)
aagaagggtttcatctcagcccggcccgaaaggatgttgccgctgcacactacacattataaggggactggaaaataattacgcctaccagataccacgatatacctaccaaacaatattgaaaaattaccgaaacttcggttagcactatatttggtacggtattggtaccgttaccactattatacggtacggtagcggtattgtattttcagtaccatggtaataccgtaccgtactgcaaatttgaattttataatttaattcatatatatttattttatattagttaataattaactaaaattaaaattaatacataaaataaataggtcaaaacttaaaaaagttcaaatacagttcttaaaaattaatgagacaacattgaagctttgtgcaacaaaaaaacgtacattccatttggttttcactaaaatagtagaactaaatcaaattgagattgaaaaaaaaatcatgactctagtaatcttattttgcaaagtgtggctaaatcaatgaagttgaagtttgataaatattcgaggaactttgaaaaaataaataagatcatataaatagccaatgttcttgtttaaagtgttgtgtttttataaagatcgtcttcaaagtataacaaattaaaattaacggtagagtaccgtgtaccgatataccgtactgaaagtaacggtataccgaataacggtataccgcacttgttggtacggtaacggtatcgaatttttcaataccatataattcggtaggtacacggtattgatcaaaatattcggcaaccgta

SEQ ID NO: 102841 - DNA, 496 bp, Mimulus guttatus
  Intron number 4 from transcript mgv1a009277m (locus mgv1a0 09277m.g) derived from phytozome v7.0 (chr-ID scaffold_161 ; pos 266590 to 267085 reverse strand)
gaaactccggtggctcgtttacttgtcgtcaactagtatgtctctcatattttcttggtttattcggcatctagaatttatatacgtaaagcactctatctgcaatatgattcgaagtgcagaaaaaactaatctttatgttatgtttaaatctaggataagagggatggaaaggggaaaaccgaaaacgtgatatgcaaaatcgaggaaaattattacactatcgttttccttcgcaagaaattaggtattcttccgtattgcttgaatttgaattagaacattgaacaaacgcgtaaattagcaaaaaatctcgtgtacttgttgtaattgtatctagtgatctagtctatttaccgtcctgtttttctcttgaaacccaaaaacgaaaaaagaagcattttgtttgtataagtacgtgttgttttctttgttatcgtctcagtgtcgttcatttcatctgatgcacaggtgtatacggagattgtggtggtgc

SEQ ID NO: 102842 - DNA, 479 bp, Mimulus guttatus
  Intron number 1 from transcript mgv1a014044m (locus mgv1a0 14044m.g) derived from phytozome v7.0 (chr-ID scaffold_11; pos 2492727 to 2493205)
atcctgcaatttctccatttctcccaagcttcgaggtaattccttttttttttttgtctaaattgatgatgtctgcagtttatttgggggaattttgaattgaaagtcggttcttttaatttttgcttgtatattgcaccttccgattgttttgattgtgatttttttttttcttacagtcttctaattaaatcccccaatctaattgtacagtctctgattttgctttcttctgaccatttttctggaatttaagttctgattctgctattctctgtaggatgatgaatttttcatgtattggtgttttgttcttcaagttcggttatcgattaacgaaatagttattcactacgaaagagttcgtatgtagcaacttgtgtttcggatacgtagtttatacggatgtagcggttatttgggttcggttccaatttctaaaaagtgtgcgccctcgtttctgtttgcctttcagtgaa

SEQ ID NO: 102843 - DNA, 686 bp, Mimulus guttatus
  Intron number 2 from transcript mgv1a005996m (locus mgv1a0 05996m.g) derived from phytozome v7.0 (chr-ID scaffold_92; pos 335016 to 335701)
acatacagaacggagaagaagtagctattaagctggtatgcttgccaattacaatctaatctttgacctctccatttattgtatgtagttggaagccaaacaatcgtttcaattgatctatatcccatccttgtatatttagtcagctcatcacactatccattctgtcatcgtttttgtttgttatgcatggactaatgtttactttgtctacttaccttatcattttagttggaaccccgttggtaaaaattgagaatgcttgaaatgcgtattagtggaaccattaaaagaatctctccctatatgaagtacatcagtaaaaagaaaaaaaagtgtattagtaagtctatttagcagatgataccgttctaaactcttcgtagagtgaactctttcgactatgattttcatcaagtcttacaacgtggtttgttggtggccctgctaataactttgttagatttctgacatttttttgcagctcccttcgttatgaaacacttgtgtttctgtgcgacacataagtctgttttgaatttctttaattaaacaaagttgacagcatatgttcccccattctatttctctactataatatagcatcatcctcgtaagatatttattctcttttacatatgcaattgacaggaatcagttaagacaaaataccctcaacttcacta

SEQ ID NO: 102844 - DNA, 885 bp, Mimulus guttatus
  Intron number 1 from transcript mgv11b010786m (locus mgv11 b010786m.g) derived from phytozome v7.0 (chr-ID scaffold_3 5; pos 1003178 to 1004062 reverse strand)
cggaggaggtatgggttctggtttttcgtgtgtttttaaataacaatgttcatatttctccagttgccaactcaaattcaggttcttattaacagcagaacataggaatcggaataccgctactaccaaattatcatattggtatctgtgaaatacatagagtgcataactctgaaataccatgatttggctgagagttaactagaaaaatagaaatcttgatattttgttaaaaatattgtcactgaaatttcttggcggtatcccgaaagcctataagtggttcttaaaatttaacatttcatatcgatgctgtagattaagaattgataaagaattaaccttgaagaatctttgtgcacgatgaattatatattaaattctttagctttatgaaatcccgaggccatcattgtttgagcaaaacatccctcattgtattaaatggcgttttattgcaaagcgtgttcgaagtagcagcattgttgctacaacttctaattgattagaggataaacacggaggcaaactatatttttttctttttaattttctcaatctcatgttatttctcggagtccaaggaggagattctgactttggtttcttgtgagagttttgtgtggctttggtttcggataaagatgctaacgtgaatcttggctaaatgttaattaacaatatgtacgatcgtctttctcatgagaattttctttttcagccgcttattttccctttgtattgacactttgtattgacacttgacaggcttgttggtgattatgttcttcaacgatttaccgcattgtatctatctttcagtattctaattgaactttgttctccacagtgctacaagagcaggacctgaaatcgcgtcggcgg

SEQ ID NO: 102845 - DNA, 743 bp, Mimulus guttatus
  Intron number 1 from transcript mgv1a016261m (locus mgv1a0 16261m.g) derived from phytozome v7.0 (chr-ID scaffold_1; pos 4473773 to 4474515 reverse strand)
aactgtaaatccttttcaattccattattacgtttgtgagtatttagaacattggctataagattttctgctgccctaaattgtttcgagttaggttttcctatttcgtaaatttgctactatcggttagtattgcagtcctcatccagtattcaccggtagggcagcaattggtttaattgaattcgatcatctccacgccgtaattattttcttctttctacgtaaatattatttttcttcaatcaaatcgatgaaacctgaagactaaaggaactccattttttttttctgcatttgaagtgtgctttgtgtattttatggctttgcattattaattaattatccttaaacttgtaatgttgatatctcatcgtgtctgttttgccatatccacgtgtccgtcgtacataaacaatagcgtaatttggggaatgattaaattgtatggatctataaagtttctagaatacaaaaatcactgctatatggactttacagtttgatgggatggtaagattcgattgtaatcttctagaattgataaataaaacggtcttcgtaactttaaatcataactgcatttttgtacagataatgatgtgtttgcctactaattatctttgtttctgtttatatctgcgtgttttgctggtattttccatattttgaactcatggatctaaataccgaatatttttttttgttacgaaatgaacagaaggaggtatcagttatcgacg

SEQ ID NO: 102846 - DNA, 1036 bp, Mimulus guttatus
  Intron number 1 from transcript mgv1a005031m (locus mgv1a0 05031m.g) derived from phytozome v7.0 (chr-ID scaffold_30; pos 1722122 to 1723157 reverse strand)
tgtcttcatttgttttcagctcttcttgtttcttggtaagtgtgtctgtgtgtgtgtgtgtgtgtgtgtgtgtgtggggtgtaaatttgagctctttttgaacatttttgacaatgcctattgtacaatggtagtattaattagtttatttctgtctctagattttggggcacccttcaaactaattaggtgtgtaaacgagccgagtctcgagttcgagttcgagcttttgtcgagccggctcagctcatttcatttacacagctgaaattgattcattgccaaagtagtggttttatttctgattgcttccttaacttcattaagggcagttgtgtaatttttgggactttggataatgattaatacttgtcggtggctaattaaattgcttaattaggtttttaggatgagtatttttttgggtggagggtttcaactctcaagtgttgggcttttatttcatttttaattaccacattgtaaatgctttctaagtttctttgtagcagcaaattcttattcctacattaatcgtgtcctaaaataatgattagtgtggaaatttatccaagtagggaaacattagggtatcaaaaaatggtttcgaaatgtggatatataatcaatgtgacatgttcatttttactatacatgttggctgtgttattacatgatttgttgtttgattgaagccatgatttcattgttcgatttgaaaaaaaataaatcaagtagaaatactagataacctactcatgaacatttcaaatatacatatgttagaattctttcttctctttcttgaataacaacttgttacgtagtcattcttgatgtcttattagttattaccaagattcaatcttgcgctttctcgaataacaacttcttacatagtcattcttttatgtcgtaccaagattcaatcttgcgctttcttgaattacaacttcttacataatcatttctgagatttgattatcaagaatcaatctttaaaaaaaaattcaatctttttttatctcataggcac

SEQ ID NO: 102847 - DNA, 670 bp, Mimulus guttatus
  Intron number 3 from transcript mgv1a011016m (locus mgv1a0 11016m.g) derived from phytozome v7.0 (chr-ID scaffold_130 ; pos 278114 to 278783)
ttgtggggatttagcttacagtgtaaacaacagtacgatgttcgattcttttattcttgtacactttctcttatcatctttatctagtttttgcactttgtttagtttttgtagttctcttagttttctgaattgtaatgcttttaggcctcgtttaagaacgttaatgggattgataaaattgattgaactgttaatatgtgatcttatgtttgggatctgtgattatacagtctttgtattgggtaatatccttcaaaggattacaagattgtgtgatactaataagggttgagtttggactgaaatacccgggcccgtttcttatcacgagctcgatacataaaccttaaatatttgacttcctatcctaatttccaaatcagacactatggttagcaagagatgtatagttaagtactggaagacgtaattaagaattcccaatggttatgttcgttttgcaaattctttgtttaagaaactgaggcttcacttgtacggaagattgaattcacgatttaattcatctgctcatcaaatgtattcttacatgcacaatgaccttgcttttaaggcttgatatccaaacaaaagaaaagggtttatttcaagaaaatgcagcttacgtatgtacattctaaacgaactgcagaaattacgggtaaag

SEQ ID NO: 102848 - DNA, 461 bp, Mimulus guttatus
  Intron number 4 from transcript mgv1a023739m (locus mgv1a0 23739m.g) derived from phytozome v7.0 (chr-ID scaffold_24; pos 1637918 to 1638378)
gttatatagacaggtaaatatcaaatttaattttttattttttttaattcaaacactacaagaagatgaaacaaaaatcggactcaaaaaactaattccgaaatcgaaaattttcggatgggattaggtgaaattcggattttttgaaatttcagtcaactattatataaaatacataatagtattgatcgtttaagtgtattttttgaaatatttttgggaattaaaattgaatcagaaaccggaatctattatgtagtccaattccgttcggaaaaaaaaaatcggaaaaattggaattcggattggaaaacattattagaaaatcggaaatattcagtttaaaaatcgacgaaaatcggataaaaatggatctttaaactcgacaattgttgttgttttttcttttttttttttttaaattaggacaaggtaaaggaagcgagggaaattctcgagaa

SEQ ID NO: 102849 - DNA, 904 bp, Mimulus guttatus
  Intron number 2 from transcript mgv1a011445m (locus mgv1a0 11445m.g) derived from phytozome v7.0 (chr-ID scaffold_243 ; pos 20018 to 20921)
aagttcttcagctgctaaacgtgcgaggacaggtataattttcatcaattaccatgtttatgtttttctgacctaaatgcacttctttttgtgaatttaattttaattttaaaagttattaatccgtctcttgcacatctctcgtttccgtgttcaataaattcatatggctgtttcgcatctatttgtttcgatagaactccctgataacagttggtattgaaatttgtggattaacgtatctattttaagaaaatatgcatagttttcgacattatggattatggatgcatgttttacgcatgtgaaatgtcgagtttcgaggattaaagttttgactactgacatatgcatgtgaattgctctcgtacttgcgtcatgaaaaatcagtcatctttatttgtaaatatttcaggatgaaacttgtgaacgtctgaagatttttttatttatttttttaaatattgtggtatatatctattttctggggcaaccagatcccatgtgactgcagaaacatgcatttacatttcatgatatgtattttagattcttatgttggtacaaaagaacgaaaatggagatttcactattcggaagcttaggtccaatatttttctctaacggattatggcgctgcatgatggagttttgcctataggatttccccattctgaaatcgtatcttttcatttattgaatattgatttccctccactatacaaaagttccttccctttttatatggtattaatcggtacaagatttggaatatgatatttcaaattttacgagattatggaaactcgcaaatctgagattaactttattttctatttaatatttgtaccttggttctggtatttatttggccctgtttggtttgtaggtggccgcagggaag

SEQ ID NO: 102850 - DNA, 889 bp, Mimulus guttatus
  Intron number 2 from transcript mgv1a013610m (locus mgv1a0 13610m.g) derived from phytozome v7.0 (chr-ID scaffold_8; pos 1065063 to 1065951 reverse strand)
tgcacagtgagtttgccacttttacttttactttgatagagatgatagttattttattcatcgagagtggtttacaagattttgatgtgtgtgttgctatgctatgcctcctcgttgttttagcgagtggtgttgtttgaataatgtgtgattaaaaaccgattaaaattttttgggtcaaagattgtgatgaagtgagaaatttcactcggttaaagcttgatgaataaaaatacgcgacgaacatggaactgttaacgcttgggttgtgggtgagggagagactgaatactgtgtgggagctcctgattttgtgtgccgagagaaaatcaaagtcgtgaagttagaattcgatggttcaaaagtgttgtgattttgtggcattgaataggggagagactaaccgtaaatgtttaaacgagcaatatctttataaatctcacagcatgataactagttgcagcaatggacttggataatagttaacatcagaagtgtagtattgactcatgatgactgttaagaatctgatcagaagtgtgaatttttagtatttttttttttgatgtgttcttgagctttaattaacgagtatctcctgaacaatgaagctcgttaaccgtggagaataaatgacttggatatgaaataaaatcggaagggttttcactttagaaaaatatgggttcagatctagacacaaaaatggtcccttttttttcatttttcttttcatttcactctgttcacatccatcatcgatactgttatttcacgtattgatttactgaatagaatcacccaatgtttttatacgagcaagttttggtaaaagcgtgggtatatcttcaaatgttacaggtaccaagccatccttcagaaaaattta

SEQ ID NO: 102851 - DNA, 642 bp, Mimulus guttatus
  Intron number 1 from transcript mgv1a005817m (locus mgv1a0 05817m.g) derived from phytozome v7.0 (chr-ID scaffold_12; pos 2140591 to 2141232 reverse strand)
cagatctcggcggcgacaagcttaatacggtacattgggtgttttttttttgagcttaattgagttaattatttgtaattaaggatagtttttgcgattgtttttgttggatagcttgattcgttttttcaatttctgggtttagatgtaatgaggatattggtttcagtagtaagtagcttatgttgatcggaatactgatagagagaagagatttatgattattttaatacttgtgtgattataataagctgtatttgaattggccaattgggcactgtttgatttaattgaactcctctctcaaaaccatcttttacttggtggtcttgacatagtttcaaatggggcaaatttcatcatgttcttgatttctagaatttaatttattttaaagtttttattgacgaatagcacttgtttcagaataccttttttttctgaccgaagaagttttatttacatagcagtatggaaatggctgcactaatatgtcatctgattttagatacgtggtcgaacttttgatagataatgcgtgtcctcttttcttgatttttgaaggtttacgcaatgccgctaattatctggtttgtcactatttcagattgacaagacccgagctggtgttctggtcggtac

SEQ ID NO: 102852 - DNA, 958 bp, Mimulus guttatus
  Intron number 2 from transcript mgv1a017833m (locus mgv1a0 17833m.g) derived from phytozome v7.0 (chr-ID scaffold_426 ; pos 3570 to 4527 reverse strand)
gcacacgtggcttatactacaagtctacaggaaaggtacggaaaatacagtaacaaagtttcctctctttgaaggggtacgtaagtaattaaacaccataagtaaaccgtgcatggacgaaaccataatcgatttttattgtgtagaaccttcctctgtttcaatttatcttgcatgaagtcacctattaggttaattaacaattaacacatttaactatggtgcagattttcatgcaagtatttttgtaacacaaaggggaatttggtgcatgttttctaccgtactaacaagaatttatgcaaaataattttaatcatttaatactcacacggtatattttcttaaattaaatttcgaaagactcttttaattatgcgatttctaattttagaatgattttagaaatatacatttataatagtaatattattatatatttctaaaactagcttggaaacgtattatacgtgataagaatataatatacataatatgaaaatttattccactttcatcattactactactataatttttatttttatttttcatattattgaaaattcatttcaactttcacctatattattaatgttctatttttcatattgcaattgaataaatctgttcgacttaatttaagaaaacaatttaagttttaaatgaaaacatgaccttctctatttaaaaaacgtatataattttttctccatagttgacggtgtcaattacataataggggatgatttcatgcaatgtaaaatgaaatacaacgcaataaagctgtttacccctctttgaacacatcaatgattaatcgagcgataaaccaacacaatttaatattatatatatatatgtatgttataatttttgaattttgatccaagggtactttgtattaaatataaacgtgacagctattgaagctaaacatatacagtcctagtacatc

SEQ ID NO: 102853 - DNA, 987 bp, Mimulus guttatus
  Intron number 3 from transcript mgv1a011017m (locus mgv1a0 11017m.g) derived from phytozome v7.0 (chr-ID scaffold_52; pos 331839 to 332825)
tcttactccattctctggaatcaccgccaagttgtgtaagccccctctctctagacctctctctctctctctctagatatctctctctaaaaaacacacacacgcacggatacgtgtttgtgtgtgtgtgtttggtgaacaaattaatatgtacagagggtaacatgggaaaagtggaaagtgtatagcctaaagcaccaacattttggcacacaatacatcaatcaatccccatgcacaattatatatgtttacctaactttccacaattatttgttctattttagtttttattttattttcataaaaaatgaatcggaacaaaatattcgaatttggtcgatttcaatccgaaattttccatattttgtttttaatttcaatttttgattaatattccccaattcagccaaatgtgtgatatatcaatcatttcgaaaatcggaacataataacaagtctttgcattcgcaattccccgatatcgatcgaaatcccgaaacttacgaatttcgcaatatttcattccaatttaaattttcttcttatgctactaagtactaaatgattttttttttatttgttcaatttttaaatttccttttcgtttaataataataataataaaaaaaaaatcggaacaaaatattcgactttcgtcgatttcgatctgaaattttccatatatatttcttttttcatttcaatttctgtgtgatcaatcaatttgaaaattgaaaattgaaaattggaacataataagtatttgcattcccgatttcgacaccgaaacttccgatttagcaacattatccttccaatttcaattttctttagctactaaatgattttatttttggctttttgaggatgtcattaataaattaatccaaattcttgaattcataaatgtaaataacctatatatttattgattaataataattaattattaattttaaaatgaaaaatgcagattcttggtag

SEQ ID NO: 102854 - DNA, 730 bp, Mimulus guttatus
  Intron number 1 from transcript mgv1a006043m (locus mgv1a0 06043m.g) derived from phytozome v7.0 (chr-ID scaffold_2; pos 2369173 to 2369902 reverse strand)
tctcctctcaccgcggctccgtcaactcccttcaggtttactttttatctcgccgttctccattcaatttgtagatttctgtgtgtgtgtttttgttgatgctgttattgaactctgtttaggtattctgaattttgtgcgggtttagttgttctatgctattttacctgttgaacattttttgctttgtttgataaatgcataattggtgatttatggttaacaatataggggaaagtgaccatggatgctgaatttgcgccgccaatgtaagtttgaactgatgattgcatggggatcaattctagtatgatatttataaaaatctaaagctatgagcatggttatttctggttgggcagtttcttctccatgatttggactacccgtacttgttaatcatcttgccgtatagtttctggttggcaattaaatttgggagctgattttttttctttttttcgatttaattagagtctccacttggtaagaagtggagagacacggaactgagacgaaattacatttactagttaggatgttattgatatattttagcttgagtttctgtacttgtataattgtatccaaccgatgctgctctatgttgtctattcagtcaaaagattttttgttcattgcactgtaaggttatctgaaataataattatctgggctcgtgatttcaattgcaggtcgatttgaccgagagccgatatctactggctgg

SEQ ID NO: 102855 - DNA, 578 bp, Mimulus guttatus
  Intron number 1 from transcript mgv1a004133m (locus mgv1a0 04133m.g) derived from phytozome v7.0 (chr-ID scaffold_190 ; pos 307408 to 307985)
ttcacggccttcttgtcggagacagggcttcacaggttcgtattgattactcagccgcaaaaaaaaaaaaaaatgaatcttttttttttttgatcttttttaacgttaatcttgcttatttgttttgttgattgaactctgaaataggatgtagtagaaattctattgtgtatttttgtatctattgtctgatttcgattttgttgatcagtaacatatgaggtagagaacagtcttcgttaatgtatattttattaattgcattcattttagcaatgtcggagccataatttcgtattcgcccacttgaaaaacagagtagatgttaaagaaatggtcgggggggtcatggcccccatagccccattgcattttaggtgaatgtcctaaataatgcatcccttgattaaataagttaataaagtttaagataagtgaaacgaggtactcgatattgattgaatttgatagaaacgtaagtgaaaaatatgttattgtatagctatggtgtatgagctgatgagattttcttaaattgtgcagaaatcaggtagagtacctggggtgggactggttca

SEQ ID NO: 102856 - DNA, 986 bp, Mimulus guttatus
  Intron number 1 from transcript mgv1a009747m (locus mgv1a0 09747m.g) derived from phytozome v7.0 (chr-ID scaffold_104 ; pos 555719 to 556704 reverse strand)
gagagctggtatttccgttattcttttcttctcaattattacatttattttttcctccaaaaaattcatattaaactctatttttttatttttcaattcttgcgaattataaaataaaatattttttttttgggattgatgaaataaataatatacataattcgattgtcttttcttattattttttaattttaattgattgaattaataattaattcatttatttgaatataaaaaagggtaaattacaaacacctccttgatgtatggtcaatttacgaaaaaacctctcttgtttggataattacatctacccactcaactatgattttttcttacacctccacccttatggtgccaaattcaacataatcatttagatttcgtggaatgtgctatagtttgtactcattttgtgtaaaaatatagtttctgatgcaccacaatttgatatatacaagccaaaagacacgtattatgatcatcttacttcaaaatgtagagttcgaatgggataaaccgggtacaaaagtgataatagtccatataatctcgaaaatttcactaaatttgaggagttgagggggtggttgtaattatccaaacaagagggaggttttcgtaatttgagtatatctcagggtgattgtaatttaccctataaaaaactataaaagaataaaattatcaattaagaaagtctagaaggtgggccccactattatatatttggtaatctatccttattacttaggttgcatgcaacggctcagatcttatcttacctactaccaaccaaccattactcctgtggttcccataattcttaaacaaaagctaattaccccaattattaagacatgtgacaaatacgaaagttcatttgaataaaattgcattaaaaaaaaaaacaatttaatatatattttatttgatttaaaataatgataggtaccacttgaaagatacagttctagagggaggaa

SEQ ID NO: 102857 - DNA, 534 bp, Mimulus guttatus
  Intron number 1 from transcript mgv1a024669m (locus mgv1a0 24669m.g) derived from phytozome v7.0 (chr-ID scaffold_158 ; pos 408696 to 409229 reverse strand)
gcttgcttcatcatctgcaagctgcaatatatcaggtacggcatgtcttaatagttttgttgatatagcattttcaatctattatttagactaaagcgtctatatcttcttttgttttctacacgcttttccttttagtatctttctggttcaatgacctcgttgttatgaaatattagtaatatgttggtatgaaatattagtaatatcttcctatttaacgagatcgctgttgagcttttagtatgacaatacttggctttatcataaagtgacaggttgatatatgattgaactctattgccgcacatctgttatgaggtctgctatcagaaaggcatatcaactcacttatacctatctttttttttggctgttataagtttacatctctgattattaacatttacccatattggcttttgttgttctgtttttgagttttcagttaatttctgtacgctgcacaagtgacacttctctccattttttgttgtagagaaaaatcaactggttaaggaaaagaacagttcg

SEQ ID NO: 102858 - DNA, 732 bp, Mimulus guttatus
  Intron number 1 from transcript mgv1a020254m (locus mgv1a0 20254m.g) derived from phytozome v7.0 (chr-ID scaffold_4; pos 1677895 to 1678626)
gtgatagtgaatcgttgaatcctcttaatcagaaggtaattatcgatctataagatgtttgtaaataacccccgacttgaaacgaacaggaacataggtttggagctgttcttcgacacaccaacagcgttgtaggggaaaagggttcgtcgatttttatttttcacccaatcaaaaatagattttcgtaaatcttggaaaacgaggtttttaagtatttacactagctcattttaatggatcggtagtattacttttctctgcttttcgtttccgaaaaggcagaagtagtagcctgaatttattatataataggtccgattttcccctgcaattcatcctcttttggctgttgctgttggttgagtgggactaaacgacaagaaggtacgtttttgctaacctcgatttatttcgaagcttaactctcacaaaaaccatttcatctgtgactagacgaaattttatacaaagcactaaaggatctcttgaggtaactttgaaacttttggcttaaccaattcaagctatatttgtattaaacaatgaccggacgaaggtcaatggctacagttaaactggccattacgtgtttattgacatctttttccgtctgcctcgctcgagtttttaccctgtcctgttattctaatcatttggcattatttgatggaatgtttatggttcgtttatgtaggcatcttcaacgagagtaaagcatctcgaaccagt

SEQ ID NO: 102859 - DNA, 990 bp, Mimulus guttatus
  Intron number 2 from transcript mgv1a019004m (locus mgv1a0 19004m.g) derived from phytozome v7.0 (chr-ID scaffold_45; pos 675649 to 676638)
tttcggatattactatcggactgttgctaagtacggtacgcactgggggaacatttaaggggcatggggggccgttgaccccccaagaaaaaaaaaatttagatatttggtactaaattttttgaatattacttttgaccccccaaagtttttgtaaatatttatcttgacccattattttttttgttttttctccaaaatcttatataaattatagataaaataatcatatttaatataaaatataaaataagatagttaaaacttgtattattttaaataaaatttatgaatattacttattttcgaattttttttcatctaacgccttaaaaataaaagatgagatcgtgccatgaatctccgaaatattaagtgcagctattattagaataatttgaattaatttagatttttttgtgatgattaaaatatgatatatatatatatatatatatatatatatatatatatatatatatatatatatatatatatatatatgatattttaattaaaaattagttatataaacttattttttgaaccccaaaattttagttagccccccttacattttaatcctggttccgcccctgacggtacgtaacaataattaatattcctgttatttattatcctatttgggaaaattacacttttcacccctcaagtttatactaattccacattaggtccctcttgtttcaataatttaacattttttgtcatttccgtcattttaccgttaacatgtagggatgggcacacacttgattccgttagtaataaccgaaaattgacggaagcgactgaaagggttgaatttatgaaacatgagggaccaaatgtgtttttttgtaaacatgagggactaaatgtgaaatcagtgcaaacttgagggatcaaaagtgaatttttccctattatatatactcgattttcttcttattattactattaatttttttttcaggtaagaattctttc

SEQ ID NO: 102860 - DNA, 918 bp, Mimulus guttatus
  Intron number 1 from transcript mgv1a001756m (locus mgv1a0 01756m.g) derived from phytozome v7.0 (chr-ID scaffold_54; pos 1071366 to 1072283 reverse strand)
caagtgcgccgagatccagaacgctatttctgagggttagtgcattcttagatctctatcgaattcccccgatatttgaattttttttttttttttttttttttaatatagcagagtagaaatataacatttttaagtctttccggtatttttgtttttatttttttatttttttataatcataattaaaagcgttagtactttgtattatttaccatcatttttcttcagagttactagatacttttttgcattcagtttattttgtgcttaatgtatgatttagatcttcttttcgaacaactttaaaacaccctccattatttttcggtcgtggattttcttggcggcgaataaagggggtttagggttgttgtattgtggttcagtctaaatatggcatttatgagctggcggcgaggaatgggaacggatctgatttttttttattttttttatcaccgttacctagatcttggaaagattgtaatacaatttaaaaaatgcagcttatcttctgaggaaacttttgtcttatatttctaaaagttagtgacccgttttccaatgttgaagaatagtttattgtattgcacgtgtggagcatgtgagatactgatgctgtgttgcgtcatttaatatgtcttctttcatacagctctctgtttagaaggtaacttagttggtttagtatcattactcattagggtatgtagctaactattgttttgttattcttgtgtgtttcttgatgagtttgtttgtcgaacggtagtcgtttaatgttttaggagagtttaaattgttaaaatatttcaattttctagtttgacatgattgttaaaagatttagctcctgataatgttatttccgactatacaggcgcgacgtctttcctgttcaccgaatatcaatat

SEQ ID NO: 102861 - DNA, 828 bp, Mimulus guttatus
  Intron number 1 from transcript mgv1a015378m (locus mgv1a0 15378m.g) derived from phytozome v7.0 (chr-ID scaffold_66; pos 66457 to 67284)
gtggttacattgtcatcaaggcccgcccctgcaaggtttgattcgttctctctctctctctctctctctcctttttgtacgtttttttgtcgcattttatttttctagatttgaattcacacctggtggttttaggtatactatgagatctgagtaaataagctgatatcttcagttgctagacgcagttaattttgttgatcagtttttctaattcagaaatgaattcctttatcttccgtaattattcaattgtttacaggttttgtatacgtatagtcgatcgagttgattggcttttttagcttgatttcatctttccttgtattttttctctgtgtagatatatgatctggtgtagcatgtatctgaatgtttttattgacaaaaattatcaacaattggcatcctgtattactgttttgttagcttagattgtaatatcgatatttgcacataatcgatttctctgttgttagtgggttattttggtagatatggatgcacaatttaatccatgggcccgggagaggttttgtagaatcttctggtgaaaaatgttgtataattctctcaagtaggactcatttgctcgaaaccatatatgaaaaggccttctgtatataaattgatgttgatgaaaagttgataacgaagaaaatgagaaaatcatagttctttataaatgcgggtttaatttaactttatgaatagatttgctggcaattattctttagaatcacgtctctacatcatgtctatgtgatactaaatatgcctatgtttgttacaggttgttgaagtttcgacctccaaaactggaaagca

SEQ ID NO: 102862 - DNA, 478 bp, Mimulus guttatus
  Intron number 1 from transcript mgv1a015262m (locus mgv1a0 15262m.g) derived from phytozome v7.0 (chr-ID scaffold_58; pos 457922 to 458399 reverse strand)
atttcattggtttcttccacgcaattgactggaaggtattctttcttaccttttagcgtcgcccattgttgttaaaatgcgttgtttcttgagactttgttgagaacgaagattccgattctgctggaatgcgctggataatttttttttttttttttaattattatcatgaatattagttaaatctaggatgatgtaggattatgaatttttttattaacttatgatatttattttttcttggcctttttttctaaagctttttgtatgcattatgcagttgaaaggaactgagttatctataatacttcatcaattttgaatatattttagttaaaatgtgttggcatttcttttctccaatcaaccattttttgtatattgttgcaagtgctggatttaaaatgtttctgaagaagacaagataccaaatttgatgtttgaatatcgtttcttatctgcaggaaccttggttgat

SEQ ID NO: 102863 - DNA, 875 bp, Mimulus guttatus
  Intron number 3 from transcript mgv1a016457m (locus mgv1a0 16457m.g) derived from phytozome v7.0 (chr-ID scaffold_68; pos 360170 to 361044 reverse strand)
atttcctcaatcagctggtatgcctcaaacctaaactccgattttaatttgaccctctactaattgctgaattgacttgcacacacatcgtggaaaagagactgaaccctaattgtaaatagtgaactttggttttagtagactatggcctctttcttttatgaaacaatatgagttaaaattttgatggggtgattgacgctatatctgattagtacactaaggcctcgtttggttggatgtttggtatttccaataacttatcgggtcgacccggaaatattatattatcatgccttatcttgcattttacggagctttttattgggtgtacgggagtctgataaaataattgagttttcattagattatttaaccctatcttggctaatcctatcttggcaaccaaacgaggcctagaggggatggctaaggaaatgcttcgatatttagtatgatcttttattgatgaaatcgtccttagaactgatagcaactgtcagctttctttcgatatgcattgtgaatttgtttgtttaccttttgaagttcttttctcatttggaaattcgaaattttgtgtttgttttgcatctcaaaactcctttcgattttacgatccgggaactaaccaaaatcttccacaaatgcttgactataaagctataattcgaatgattcaactgttacagtcgaacaaaacgtctcttgctttattacaaaattttctctcgcactactttcagatatgatttaatttgttccccaaaacattaacaaacattacttcgattctcaaattcttttccccaaaaactcaacaacgagaaattaatgacactgctctgtttcttctgtctgttgtatcacagcaa

SEQ ID NO: 102864 - DNA, 513 bp, Mimulus guttatus
  Intron number 3 from transcript mgv1a013159m (locus mgv1a0 13159m.g) derived from phytozome v7.0 (chr-ID scaffold_26; pos 1714995 to 1715507)
cattgtgttgccgcattcaacctgcgatattattggtaattttatcggcccgtctctttatttttacgagaaattttgatttttgttcataggggcaaatgatgcaataaatgttgaaagctatgtatagtctaatttctttcaattcaacttgcatttgtgtttgaaataagttattcgtttcatatttaaaaaaagataaaaaaataaaatatgtaactaaagtcgatcattggtcaagttcgagtagctcggattatttatttatttaattctaaatcttttgcttatggaggtaagtacgagtttggttgtggtttgttgagtcattgagcgaagtgaacacatgagaagaaattaaactatccaaagtgttttcgaaacaatttaatgaaatcgaacatcattttaaactattttttttcttcgggtttttattttatttagtaattaagttaagtgtaagttatctgcttacggtttttgatataagcgtcggtttttgtagtgaca

SEQ ID NO: 102865 - DNA, 648 bp, Mimulus guttatus
  Intron number 1 from transcript mgv1a009992m (locus mgv1a0 09992m.g) derived from phytozome v7.0 (chr-ID scaffold_12; pos 2089963 to 2090610 reverse strand)
aaatccatttgccccggaatttcagacactctctggtaataattaattaatttaatatttctctctttaattactctttaattatacacatgtgatatatatatatatatttgaacctatataaacgaaattctattatttgagtaaaatattaaattattaaactaataaattcaaacgagttgggatcgaaaaaaatataatttaagcgatattattaatctatcgagtattaattagtttatcgaggttctactgtatatatacatacattaaactccatccgtttcttttattgcaagaacacatattttttattaaatgaaagaacaaaaatattaatgaagtgataaagaaaagatttaatgtattaaattaagaattaaacctattaatttatttgattttaattatttgtaatcatagtgaatctaccttaaaggaacacttaaaaagaaaaaaaaaatggatcgttacgttagtggttaaaacccaaaattaccctttacacgtattaagataatcaaacctattaattacatgcatgctcttttctcttcaaataaatacttattagcgacaagggtaaaaccggtaatagtttgaaaaaaataatattaatgaattattattgcaggtgtcttgtga

SEQ ID NO: 102866 - DNA, 507 bp, Mimulus guttatus
  Intron number 1 from transcript mgv1a003461m (locus mgv1a0 03461m.g) derived from phytozome v7.0 (chr-ID scaffold_8; pos 1111075 to 1111581)
cagctacaaaggtttgttttccaattcaattttttttttcttcttctggaatttgtgcatttttgtaaggtttggggaaaattgaaattttgatatatctgaagtgttcctggatattgaggatcttttgattactgatagcgatgagtgaaaatcttattggataaattggaatttaccgtctgtgaattgagattagagcttttttgatatagttaagtatcatagtttctgatggaaaatcgaatactatgtaaatttctcgattcgatgcaatataatccctttgtttgttgttattcctatgttttggataagagagatgatctgattctgaaaattctcgtacacagtagcaaagaccattttgaatactgttgtagggctgagtgacaagttcgattaatttcggatgatgtgttgttgctgtgaatggcttactttttttgagagctaaacgcccgtttcttttgaagcagttgctgcggtttccgacggattaaaagc

SEQ ID NO: 102867 - DNA, 580 bp, Mimulus guttatus
  Intron number 2 from transcript mgv1a011981m (locus mgv1a0 11981m.g) derived from phytozome v7.0 (chr-ID scaffold_58; pos 277020 to 277599 reverse strand)
acttacgaccccaaggtataaatcataaagtaaatttgtgccagctggtatgaatgaccgtcttctatactttatcctggaatgttgatttttttttttggctgctgcgtgtaatttcgtgcaacaacgaagcatcttatcctttgtttgatattacattacctagataagttgtattacattatcctttgctcaggaatttttttaatgttggacttgtgttttggtttatgctgaccaatatttatgccacccccagtcgctcgtccactcaaatacttgcttgagacgaaaatgaaaagcccgtttgattcttgacatatctatcctatgataagtgttggatcctgttgattgtaaccattaaccattgtgcagcactagaaaataattatcttgtctggatttacgttttgtcttgtttgttcatgagtatataaagtagtttgaatttttagtttagcctgaagtttattctgatgatttgtctgattaaatcaaatatgagactcagtttgccactatacttgcttcgatatatttaggatcttgatctgcgaaagcctggagtacgtaagcc

SEQ ID NO: 102868 - DNA, 715 bp, Mimulus guttatus; identical to SEQ ID NO: 102677
  Intron number 1 from transcript mgv1a017172m (locus mgv1a0 17166m.g) derived from phytozome v7.0 (chr-ID scaffold_8; pos 1681603 to 1682317 reverse strand)

SEQ ID NO: 102869 - DNA, 508 bp, Mimulus guttatus
  Intron number 4 from transcript mgv1a012372m (locus mgv1a0 12372m.g) derived from phytozome v7.0 (chr-ID scaffold_18; pos 539218 to 539725 reverse strand)
gatagctcgtggtctcttcaggacaaacgcggaaggtataataaataataaatttgaactgatctacatcactaaatactttccgaggtttgtgaacaagtggtatatgtgtataatgtttttttctcgagttgtgtttgttctctgtattttaagaatattaactgctttgtagtgtttaagaaggttctattgctctacaattagttaaggtgattgatgaattaagaattaattagcctaattacaaaaatgataacttattcttgatcccatggcttcaaatgaggaattatcacaccttctagaaggtcaatgaataatcgatcctctcgttcgtaaatgtcttcgacatttttcgagaaaaatatgtaaaactacaatttattttgtttttgcggtacgtgtcagttttaatctcgggaatatcattgtaaaatcttgctgatcatacatctaataatatgtgttctatatctataggcacgccggagaagttcgattaata

SEQ ID NO: 102870 - DNA, 640 bp, Mimulus guttatus
  Intron number 1 from transcript mgv1a010803m (locus mgv1a0 10803m.g) derived from phytozome v7.0 (chr-ID scaffold_2; pos 2106260 to 2106899)
gcctttgcctgtacgacgccaaggtgagtttatttaataatttcatatttcgtcttctgtttagaaaggggagggtttcctgtttgatgcgtgttattttgaatgcattaactcagcaaaattgggtgaaatcaattttggaattctgaattagctaactgagagatatatttattccttctctcaattttgcgagaaacaacgtttaaacttatggtgttatgatcaattgacatgattacttttgtcccaaaaaaataaaataatgaatcgaaatgctgcttacaaaaacgattagctaataggagcatgcttagattcaacacacactggacaaagggaaggagagtttagagtaatgcattatcgacaaataaatcgacaatcgagaacagttaagaacgagaattcaacctgctcttctgtttgtatatatcttggttcgagcttacggattgctgcgagaattttttttgatgattatttttcctgttgcggatttggtgtttaaattttatctatttttgttcgtttactccttaagttacacttaatggtttcgtagttccttctttgatgtagttcttttgttttttcatgacaaggtacaaaaggttgaatttcatatcgacgtgtggag

SEQ ID NO: 102871 - DNA, 853 bp, Mimulus guttatus
  Intron number 2 from transcript mgv1a007866m (locus mgv1a0 07866m.g) derived from phytozome v7.0 (chr-ID scaffold_12; pos 2110356 to 2111208)
tattaagaagctctttgttccggttaagcccaaaggttagtctttgggcctcttggcccatttatcttggaagaatacggtttttgtccgctaaatttgcaccgattccacgtgtggtccttcatgttcacaaaaaacaaatatgatccctcatgttttaaaaaatcaacacttttagtcatttccgtcaattttccgttactactgacggaatcaaacgtgtactttatcactatcctaaccgacggactcatgttaaattgacggagatgaccaaaaatgttaaattattgaaacacgatggaccaaatgtattttttgtgaacctagggggtcaaatgtggaatcagtgcaaacttgaggggtgaaaactgtaatttttccgtatttaattatttatgagaaatggccgtattattaacttgacaatacatgaacataaggctttaataccacttaggctaagttatagtgatagttcttgaatttgaaattatactagaatgtattaattaaggtatatatgatggtcttttactataatgttttttaaattgtcgtataaaaagtcattgtcgacatttttttatcttcgagttaggcgataagctttagtgatagttcttgaattcgagttacactacaacgtgtgtttttttcgagaattttttttcagagaaattacactgcaacgtgttaaggtaatatatgatcatcttttattcgatgtttttaaaattgtcgtataagaagaggttgttgacaatagctcatattttcaaccaaacaaggcctaaacactgtagggattaatgcagataacgcagtagtgaacggagatttcgaagaaggc

SEQ ID NO: 102872 - DNA, 232 bp, Mimulus guttatus
  Intron number 1 from transcript mgv1a000559m (locus mgv1a0 00559m.g) derived from phytozome v7.0 (chr-ID scaffold_13; pos 2113944 to 2114175 reverse strand)
acgcaaacacacatccgtaatctgttccttttctggtacgctctccccctttttattttgtcgctcatcctttttattttcttctttcatcccactgtattttcccctttcccctgaattttagttgatctgtttttttttattttttcattgttgtatttttgcttctgagctttgattgtttaatcgttgaatcaatattatgtcgaattcaaacagttcaccggacttt

SEQ ID NO: 102873 - DNA, 645 bp, Mimulus guttatus
  Intron number 1 from transcript mgv1a012447m (locus mgv1a0 12447m.g) derived from phytozome v7.0 (chr-ID scaffold_20; pos 315108 to 315752)
aagcggcgattgaaatttgagtttttgaatttaaggtaaatgaattgagtgaatgttccttactttggattttgggcagttgcaagtttgagtttgttccctttgggcattgatttcacacttctgaagttgtattttctaaatttattcccaagcaatcatttttctaaatctgcttttttttttcttttgtctctctgaagttttgtgaataaattttgttttgttgatatggtgtttgtgatttagccccttttggatttatttatattagaaaaggctgtggatgaattatttgcagaaattgtttattgtgcatgctaggtgtttgatgaattgatttgtggtattattattgtaaaaagtccatcttggcaaatcagttgagcccttttaagggcaaatgagctgctttgaatgctaatggactaatattaaatctctctctttctcttaactattttccgcttcttcaaatctgttaagtttgcatattagtggagatgaagcatattaaaaaaaatattgaatagttgtttgttgaaattgtgaatcttttgtatgcaaggtgtttgatgaattgatttttttgtgtcaaatttatttttttctactccatctaggcaagtagttgagcccttgcaa

SEQ ID NO: 102874 - DNA, 431 bp, Mimulus guttatus
  Intron number 1 from transcript mgv1a012519m (locus mgv1a0 12519m.g) derived from phytozome v7.0 (chr-ID scaffold_109 ; pos 115667 to 116097)
tccagacctatttaccaagtaaaaatctattttctctcgtatttcctttacctcttctgctagtaaggaacttctgtagatactgtagtgttagtgttgattctagttatttatgttttgtgcatcgtaatttattcagtcgctcagttagcttgtgtgtgtgtgagaaaatcagtagaatccgaatcacatgttcgttgttaatttctatgccaacttcagataaagtcagattgattgtatgtttcgtcttacttgtaaaacaatctgtatcgtatttttagctgcattaagatctttgattcgtctagtggaattccggagtgtcattctgggaattgatgctataatgttgtgctctatttaatcatgcgtctcctctcttatgttccgaagggcattcagccgctcactgttagcagtttgttgca

SEQ ID NO: 102875 - DNA, 727 bp, Mimulus guttatus
  Intron number 3 from transcript mgv1a026631m (locus mgv1a0 26631m.g) derived from phytozome v7.0 (chr-ID scaffold_149 ; pos 466408 to 467134)
ctcccctccattcccggaatttctgatagtcctttgttagtttcctttatttttatatgaacttcactttacatttttatatttttagtttatcatacatgtatgtgtgtataacttaaagtgggaataatctaatagcatcttcaatacgtttaatttgtttagaaaataattgaatttcttcaatttttttataaagtttaaaaacaggaattttttaatatttaattctgttgatttttcttataaatacgtttatttgattctgttgcttgagcttctcttatgtgttggctctttgagatgaaccgaagtagtaccataattacttgggtaaattactgtattcatctgagttaaggtcaaattacgaaaataccctatcttgtttgggtaattacatccactcttcaattatgtattgttttactgtatttattcccctgagttaaggtcaaattacgaaaataccctatcttgtttgggtaattacatccactcttcaattatgtattgttttatgaaaaaaagttcatcatttcgtagataaatttgatactataagggtgaacttgtaaatcatttttcgtaatttgacattatatcaggggcgtctgtaatttgcccagagtaaagaaaaaataaaattgagtactaataatgtgattgatttgacgaatcctggatggcaggatagctctgatcgcgggattgacggtgggattac

SEQ ID NO: 102876 - DNA, 403 bp, Mimulus guttatus
  Intron number 1 from transcript mgv1a018782m (locus mgv1a0 18782m.g) derived from phytozome v7.0 (chr-ID scaffold_58; pos 549162 to 549564)
cattggccggtaactattctccagtttgtacctattttatcccattcgaactcctcgttttgaaattatcataagatgtgtctattattttgtaaatatttaattttggtgcatcagaaactgtattttttcaaaaaaaaaaaaaaataagtaccaaatgaagaatattccacgcaatctagaagattatgttgaggggtgattgtaaatactcaaattacaaagaaagaaagatattttcgtaatttaccctatgttgtattttttggaattgaagtatccatgcatataagattatattcttttcacatttatcatcaatttgatgtttggaaagtggtaattaaaaacattaattcttatttcagggaggctagattctaacacaagacagaagggagat

SEQ ID NO: 102877 - DNA, 768 bp, Mimulus guttatus
  Intron number 1 from transcript mgv1a000699m (locus mgv1a0 00699m.g) derived from phytozome v7.0 (chr-ID scaffold_5; pos 1831543 to 1832310 reverse strand)
gtttcgaagttcgcgagatccagaaatccaatcaggtttttttgtttggctctttttcagtatcgaaaccgcttctctgttgtttctatttttcgaatttgttttacttggatttaggttttagttatcaattttttcttcgatttggatgttgaattatatgaagctaagtcttttgttttagctgtgtttgtttagtcggtacttgatgagttctttcttatagatttgaagtttgaccgtttgaaagtaatgatagtttgccgaaagctgaaatacttttccaacatttggaagtgaaaaatgttggttgcctaagagagaatatttgatttttgtcatgttttttttaaactaaatttctgcttaacttctgaagtaatcttttcttctaacaagaatgagaaggtgttaaatgagttgaccagacgatttctcaccacatgtttcatacattttttagattcattcgttgtaaactcactgttcggtagattggggtttggtgacaatttcaggggttcgaaattcgaatctctttcgatgcttgtgtgttgtaaggctgcattataattgaggcaatttttgtttaaaaataaaacagtctttcttttttcgtacaaaatccgatgtggctttgaatgtttaacttctcctactgaatcatttttattttgtattttttcaagtttactatgatctattcaatatcttgaaattccactatttgcaggagaagctcagagttgcagtattagtttcccaggc

SEQ ID NO: 102878 - DNA, 942 bp, Mimulus guttatus
  Intron number 2 from transcript mgv1a016280m (locus mgv1a0 16280m.g) derived from phytozome v7.0 (chr-ID scaffold_108 ; pos 804794 to 805735 reverse strand)
ctaataggagacgcagcgtcttctcagcgaaccaggtaaacccttcaatcttcgtgcaggcatgccttggaaatggattcatgcttgatcttaatttggacgagctaaaataaaacaaaaagctctttctttttctttttttttttttttttttttgtgattctaaatgtcagtagttttttttcagtcctttttttttctttttcttttctgtggttcgtcgatgaagcttattgttgtatttattctgttttataggcttttaatttgggttatatgtggaattcttttcttgggtagaatcgatatttggtgcatattgaaaatctaaggggatgattggtgtatttaggaatataaatagctagcaatgtagtattttttggggttggaatgaatatgagaaggagctatgcaaggatttcatttttagttggtttattttttatttttttacatttgggagaatacttttgttaaaattaacgacagtgtttatacctgatttaggaattgtgatacctaggaggaaatcactaattcaatacattttcgggaggcgcactagcagtaattacgcgtgcatgttttctaattaacatggccatgtctttttttctgttttgattgtactttattctgaggttattacacgtgtttgccctgtttctgcctcttacggtttccttattaagttgaaatgatttctagattgctgtcaatttttcagaattctagtactcgatatgaagcatgatctcgtagtttcgtagttatgtctattcgttcttcgctggttgctctttattgtatcgattataaatttttgagttattcctgttttttactaaccgggaattatattaaactttaaggcaattgaacatttttttatgcatgaatgcagcaccaggaataagtgcatcaccttcagaagaaaat

SEQ ID NO: 102879 - DNA, 690 bp, Mimulus guttatus
  Intron number 1 from transcript mgv1a019957m (locus mgv1a0 19957m.g) derived from phytozome v7.0 (chr-ID scaffold_37; pos 1177816 to 1178505 reverse strand)
ggagaagaagtattggagctcatctagggtctgattttatccatatttttcatttatgcgtctattcttacatttcattgattacttacactcgattgtgctttcctgattgatgaataattaatccgattctgaaccttttctctattttccccctctggtcatgattttgttttttcggatgaaaaagtatttagctcgaaatctcttcgttgaaatttttatggagaatcgcgaattaaaattgcatatgcgtgtacttaatttgatttttcttgtcctcgattttagatcaattgctgaagactagctatatctgtacagatcaatttgattgattattataactgtggccgcaaaataatttttggtgcggtgaaaatatgtcgaactaaacacaaagaacagtagcttagcacttcaatttagagtatttttgtcacttcagcttcaccgttgaatttcgtgttagtgataatgttgcttacttgctttcgactcgggtgatacttcttgtagtaaggttgtgttacatagataaagcggcttggtaaatatgatgatgccagtggtcgcagctgtataccgtgtgagatgtgtttgcgatacatagcctccgaacgttttgtatatgctaaatcttttcaatttgcagggtaaatcgaggtatccttatcctgttggatacaa

SEQ ID NO: 102880 - DNA, 618 bp, Mimulus guttatus
  Intron number 1 from transcript mgv1a014484m (locus mgv1a0 14484m.g) derived from phytozome v7.0 (chr-ID scaffold_164 ; pos 556993 to 557610)
ccacgtgtcctccccctccgtctccaactgcggccgtatgtttctttcccacctctctctctctcttcattccttttttttctctctctctttaatatatttaattatattatatttaatataataattaaaaaatatatattatatatataaataatgcggggcgggtctacggggcgggtataggcaacctcatccccgtacccatacccggtcaaaaaaaaatttcaatccccatacccgccccattatttttcgggtcgggtaatacccgaaaatttcgggtcggggcgggtcaaattgccatccctacttttggttctctccatcaatttaccgttagtccgtcagttaaggtagcgatgggcacacacttttaagtatgttagttttaacggaaatttcacgaaaatgacttgcattttttaaacatgaaggactgaatgtgctttttgtgattataatggaccaaaatggaaaaagatgcaaacttagggatgaaaactatatttttctcatatatatatatgtataacccgattttgatcttccattttttttcctctttgttcttcttcaacagtgagcattgataccggtgctgccccaggtacatac

SEQ ID NO: 102881 - DNA, 510 bp, Mimulus guttatus
  Intron number 2 from transcript mgv1a020383m (locus mgv1a0 20383m.g) derived from phytozome v7.0 (chr-ID scaffold_123 ; pos 631678 to 632187)
aaagagctcagagaaattactgccaatcacccgttagtattttcaattttgattttattttattttttgggtaaattacaattagacctgagttaaggtcaaattacgaaaaaaaacccactcatgtttgtgtaataacaactatttcacttatggtgtcaaattcaacataatcttccagattgttcagtggaatactctttagtttctaaaaatgcatttatgatgcaccacaatctgatatatacaagccaaaaaacatatcttatgatcattttgcattaaaatgtggagatcgaatgggataaaactggtacaaacttgagaatattccatataatttagaagattcgattaaatttgacaccgcaaggatggacgtgtaagaagatttttagttgaggggttgttgtaattactccaaacaacagggggttgtcttaattttacccttatttctttgaattttgttggttaattttatttaatttttttatttgaaggaatatt

SEQ ID NO: 102882 - DNA, 867 bp, Mimulus guttatus
  Intron number 2 from transcript mgv1a006394m (locus mgv1a0 06394m.g) derived from phytozome v7.0 (chr-ID scaffold_608 ; pos 25844 to 26710 reverse strand)
tccgctggcttcaagtccagacctcctccgacgttgtaagccttctatgcatcatctgattttgtagcttggatagctagtcatcagagctttgttaatttcaatataaagctttaatggctcctttccccagtcatcgaagaaaagaataggaaaaaaaagttaaaaatgtcatgaaagtgtattctgatatatgtatattgttgtcaaacatggtactaagcttcgctagattatagtaagagaagtaaacaaaactcaagaaaattgtattttcctgtctaataacgacaacacaagaagggatagggtaggcatgcggggaacagaagaagattttccaatttatacatgaattattactgtttttcgattcttatttgccagtttcatgttaagaatactaacgtactaagtatcaagtattttttcctctctaaatcttaaatgacattaaggaagttcagtttcataacatacagaatgcaggttcgtagctttagaaaactaatgtaaggtaataactaatttctccgcgaagaagaatggagtggtgatttgtgtgtagatagcaattttttaatttttacttagaatttggaaaaattgacctaatttgaggctcaagagattgattagatatggatgtcgcctgtgggactctgaaaaaattattgcctacagaatgcagaatactgattcttctttttcaaagtaataattcttgatcaatacttatgatgggtgcttgtttcggtatccgattttttttgttcttaaagcaactaatttgatatttgctgatgtgattgtactatcgaatcatctgtaggaccttcattctcagctaaaggaattgattccaga

SEQ ID NO: 102883 - DNA, 235 bp, Mimulus guttatus
  Intron number 1 from transcript mgv1a006394m (locus mgv1a0 06394m.g) derived from phytozome v7.0 (chr-ID scaffold_608 ; pos 26704 to 26938 reverse strand)
gcgtttctctattatccaagctgcgttccggcgctgtgagtattttttattttatttttctggaaaatcggctgctgtgactttgcttcaattgtgttaattaattaatttggatcagatgataagatgacgaagaattggtttcgtttgatttttttttttctctattttattaaaccctggaatctgttttgtaataggttcaacagccaggtcttcgcaattctgtccgctg

SEQ ID NO: 102884 - DNA, 642 bp, Mimulus guttatus
  Intron number 1 from transcript mgv1a003798m (locus mgv1a0 03798m.g) derived from phytozome v7.0 (chr-ID scaffold_83; pos 275698 to 276339 reverse strand)
ctaagcttttattttgcaaacgaagtttaaccagttaattatttgtgttggtgaagtttagccattagtttatgttctgcagtagatctatctgtacaactgttttggattacattatatgaatataattttggttttgctgatgctcatgttgtgaattggatagtgatgcatgcatgaagatttttgttacacttttattggttatattttttaccattttgatatgaagcgttgaattgtgagttgtgacactagatcagatctgtgtcaatcaggttgctggcaaatgttggtggcattttctcaatcttaattttttatttgtcttccctttttcttatccgagttaatttataaaatgtttttttttaattatttgagaagatgttcttaatatgtcaaaatagttttactctcaccttaggagttcaaacttgcatgacattgttgagaattgagaccattgtgccatggaacaaattttgttgaccatttgcttattttggaattggttaaagtgtattgaattttcatgttaggaaaataagggttttttttgtcccaatgtaacattgttatctaactgtttcttgcattttttttttatttcaatgggtgcaggtctcttcatttaccact

SEQ ID NO: 102885 - DNA, 893 bp, Mimulus guttatus
  Intron number 1 from transcript mgv1a010355m (locus mgv1a0 10355m.g) derived from phytozome v7.0 (chr-ID scaffold_55; pos 758363 to 759255)
aatcgccacacaatctccagtaatatttattaccctttaaatcttgctttagatttaatgtttgagtggaattaagttttcttgattttcaaattcgtttgtttgattcttagtattttctatgttgttggggttttgtccatttactctatgaattgttcattttaggtttccgaaaatttaggcaatgtcgatttcggggcttattttcattttattttagctgaatgaattttgagggaataatttgagaatgaaagtactgtttgtttatagtttgagaaaagacaagatacactgtagcagttttgaggcttattttcatttcattttggtgaaataaattttgagggaagaatttgagaagtaatgtttgtttatattttgtgaagatacaaaatacgtatcatactatagcagtcaaattgtcaaatcatgtttaaaggtgttggaaaaaagtattttagaacaagaagttgagaaatgaagggatgtttatttgttttctactggagcagtcaaatctttttgctgccggagtcaaattatgttgggaggagagagaaacattcgaaattgttttggagattttcgttgaaaaaattaacaaacaggaatttgtttcgataaaaataataaaaccaaaaatggaaatgcttccaaacactgccttaaggttttaccaaatatatgttgttgagattgatctgaatcagctctgttgaattaggtcaaaaatatgttacttagatgaatgagccgaaatcaaatacgattttcttctcactcctaatttcggtttcttttagagtttacaaaattgacgatcttcaaatcaatgttatacagtcattactagaattttgattttgcagaagcttcttcaatttcaa

SEQ ID NO: 102886 - DNA, 556 bp, Mimulus guttatus
  Intron number 2 from transcript mgv1a005385m (locus mgv1a0 05385m.g) derived from phytozome v7.0 (chr-ID scaffold_663 ; pos 8701 to 9256)
ggtgcaggttcaaccatcctcgtgtccgtagtgtaaagctccctttttttttcggcaagatcgaatttttttgtctgttgttgtggcgattgtttgttaaagagcgtaaattagagatgtttggtgtcgatcttgattggtaatttgggggaaaaatggaatctttcttgattcgatggggaatctgtggcttttagaagcgaagtagaatcgggaaaattgttaaattaggatgcttttacatgaattggttaagcatgcattgagttgaattagtgggatttggggtcaaaatcgtgtcttgttttagttgaccggacgatcaaatcgatatggtgtgcatgcattgaagataactagttgggttctacacgatttgatgttaaattctagtaaaaatggagtctttgttcttttagtgagggttataaataaattgggaagtgatatagaagtagagggtaaattgggaaaaaaaacgtaaaaaatttagtaatcgtatgaatttgttgaacatgcattaaagcaatgtggcttcgcttttatgatttaggta

SEQ ID NO: 102887 - DNA, 648 bp, Mimulus guttatus
  Intron number 2 from transcript mgv1a005919m (locus mgv1a0 05919m.g) derived from phytozome v7.0 (chr-ID scaffold_60; pos 1158130 to 1158777 reverse strand)
taactaccccgcggcgtactatccgtttgttaaaggtagaatttctttgacttagatttttgactaattttggttttttcattcatcgacatggcattatccaaaacttccaaaatgcttatgtttctgtgtaggaaatgattaccaaattagaaatgaaattgttttctttatctcgctttggtgaaaaggttcaatcgtcctgctctccaaatatctgtctagttacacaataatagctcattgtgaagcaattttttaattttgtagaaactgcagtgtagaagggtctttttggtttctaaaatgtgtaagtaaatgtttgtgaatttttcaatttttaaaattttgattgtaatctattgaaggtgagatgagatgatcttaaattcttcaaaattcaggtgctttttcggtatatgactgtgctcaaatcttttatgttctatctcagtgtgaatccgtctattttcctgttggctagccctttgttatattcctaatttgtttccttgaattttataatttgaacatagaatatttcgacttgttgctaacaaacatgtaatttcaatttgtcttataattttttttatttttggaagagtctaacgggacatgattgtgtttcagaccattgccagaaac

SEQ ID NO: 102888 - DNA, 1017 bp, Mimulus guttatus
  Intron number 2 from transcript mgv1a014048m (locus mgv1a0 14048m.g) derived from phytozome v7.0 (chr-ID scaffold_8; pos 329044 to 330060)
tctcgattgtgttttgcgtatttctagacgacgtcgtaagctgtttttgattgatttattttgtgttttttttttaatgatttgaaagggttagctgatgtgttttgagcctctattgaagctgagatcttgttgatcttgatcatatgctaccatgcagatgcagtcacctttccttttctggtttttctttttgggttttaggttgagatttgggtttatttgcttttggattgtaatgagttaatggttgtagaaattctgggttttttggaaaaataaatcagaacgaatggtccacgttgttagggtggattgaggaattaagcgcttttacataccgagattcattttcaaaaagtgttcgtaaatcagcattttaccctgtatcacatgaacaatgcctgttgttaacagaaggggaattgagatgcacagtgaataagacatgtttacgatataatgttttgcagcgaagaataatcgaagcaatttagaatgcagccgtttcaatgtgaaaatagtccctatgaatggtcgttttcctgctgtcttaaatcttgattcttctcttacaaattaatctttgttggatgtcaaaaatgatttttatatagaatagttagttttagcaaacatgtcgtaccgtacattttatactgttgttttctcaaatttatgtatgcgtaaggtggtgaaagaatgtacagctttcccttatgtcagatgtcggaattcactggtttttgcccaagttagtttctttagagtggtactggttcatgtacttgttaaacaaaccacaaacatgctttgccagcttgactgaatatctcagtggatatgaagagttcatatatgcattcaaattgtctctagacaatgtttcagttaaacaaccgttattctccatattatctgtttttcttagaagactcgtgcattaattgcaaaatattgaattcctagtctctcaccataggcttcgttgaagacgcgatagggaaatcagaatca

SEQ ID NO: 102889 - DNA, 963 bp, Mimulus guttatus
  Intron number 1 from transcript mgv1a005628m (locus mgv1a0 05628m.g) derived from phytozome v7.0 (chr-ID scaffold_4; pos 712084 to 713046)
ttttgcagcagaaagtaaacttctctctctttttttttttttttaaataattgttttatactatgtttcttgattacatttgttaaatttttgctgtaatgatttataatttttattttcttaccggttatgtggtctgatgatgatgatttttcccctgttttgattaattaagatagttgtgcgccttcttgttagtattcgatctgcgttccgtgttctgctgaactgcatttgtataattagtgttaaagttgtcatttttaagcggcatttggctgaaaaaaatgtattatgtgaaaccctaatttttccttctggattatgaaataaaatgcagttgacttcatgggctgttaattggatacaaggttggtttaaggatgggtagtcgagtcgtactttatgaacttgatcgaaatatgggcaaaaagggcaaaaagactggattttttttactgtatgaccagaatcttgtgaatgtaaaatgagaattttttttggaattttacgattaatgaaactctatgagaactgacggaaaatgcgtccacattgctttatctgtcggttatgtacttgttaaatcaagaaatggtttttcaaagtgttaaggaacaattggatgaaaggatcgttacagtgaactgttagaaaagctggaaaataaccgaaaataatatatgcctggttagtgttttttttctttggagcttattgcttgcacgaaaacctgcaattttttttttaatttattctcgagccaagttatcatgaccttcctggtttatttgtattcttaaattgcttttatttggttattttttaggcaataccgcaatacatatataaatgttaaccgaaaataatatatttgggtttttcgggcttctagaccgattattattttgtctggttatgaaagtgagcttcttgtcttcattacaggttgaagaacttgcc

SEQ ID NO: 102890 - DNA, 652 bp, Mimulus guttatus
  Intron number 1 from transcript mgv1a008713m (locus mgv1a0 08713m.g) derived from phytozome v7.0 (chr-ID scaffold_159 ; pos 462618 to 463269 reverse strand)
ctctccatcccaaaaaccccattattatttctcaagtaagcgtagtagtaatctcttccttcaatacatttcttcatcatctattcaagactatattttattctaattctgcgcatctaatactaattaatataaacatatctcattcattcttcttgcaagaacaacacattgtagtaattaattattgtacacatgtatattttgcttttccgatgatataaagtagtagtcgtttgaaaaagtcaaacaaatagagtgtagttttctaggttatagttcttagaaattaggatcagttgtttaatactcccactacactactatcttggttacttcacgtaccattgtcccattgccattgttttcccccaacacaaatttaagcttctacgtaccattcgcattcatttttcaaaacaaaatattatatttgatctcattttttttcccggtatattacattgttcttggacgagatttgctttcatcatgttgaatccaagcaatagaatcatgattgggggccactccctacaaacttctttatttccatttaatgcactatgttgaaaattgtattccaccatttaattcataatttaatgccttcataggtatcttcgtcggcccaatacattatacagcactt

SEQ ID NO: 102891 - DNA, 295 bp, Mimulus guttatus
  Intron number 1 from transcript mgv1a011925m (locus mgv1a0 11925m.g) derived from phytozome v7.0 (chr-ID scaffold_1; pos 1130586 to 1130880 reverse strand)
tgcagaattgtaagtgttccttcttttcagagtgatccaattttgattatttgttcattaatttattgagttttctacttcttgttgactgtttgggcttatgtttttagttggtttaaaatgattttgaatgatgcttgtggcgatttttatacgaggggaaggaatgccccaaaatcgaacaagattgagaattattttctctaaaattgggatgttctttggaaattcgaaggcgaaatacctttgataaactcttgctttaaagagatccatcttttttcgttgaaggtgt

SEQ ID NO: 102892 - DNA, 948 bp, Mimulus guttatus
  Intron number 1 from transcript mgv1a013421m (locus mgv1a0 13421m.g) derived from phytozome v7.0 (chr-ID scaffold_8; pos 727210 to 728157 reverse strand)
aaaattctcgagaaacaaggtttgattttcttttgcttctttactggagggggaattttgtcgatctccgtgtggattgatattcggtggatgcccgagttcgttattatttgtttacatttattaattatttccgtcatgagaattttctagattaataattccagttgtttgattcgttcattgaatgtgttgtgcattgatgatgaagaacatgaaataatatcatttgcttgtttgatgattgtttctagtaccaagctgattgttctcgaagaaattggaccattagaatagatgttgttgttgtttatagtaacacatatacggaacaagcctggattatgtcgaagcgggtgagaaaatatctaggagggcggggaatactataatacttgaaaattaacaaatctctgtgtgaaatactatgtttttgaaagtattgtggtgggaatgcacacttttctgattagtcacttggttgaaacgagcttgtttggaatggaaattaaatgatttatctatcaatactattttgttaactactttgatactgtggtttatatttttgtatcataactcttattctactgtttaaaactatggataaatattttgtttcgggctatgaaaatatctaagaatatattcgagaaggatcgatttactaggtgtaaacattttgtacctccaaagtaagtggtgcctttgtaagttattgctgatggcatatgggacagccaaatggatatgcatgtaaattgttatctatcggatcataggttcctttattatagtttgttggagataaaattcactgtttatgcaaaattataaaattcaatgtttgtgtgatatcttgattagtaattactataaacttgaagctccctctgtttcttatatcacacaggtgatagaaaagttctctttgcggataaagttcta

SEQ ID NO: 102893 - DNA, 976 bp, Mimulus guttatus
  Intron number 1 from transcript mgv1a011062m (locus mgv1a0 11062m.g) derived from phytozome v7.0 (chr-ID scaffold_50; pos 314183 to 315158 reverse strand)
tagcaagaatattgttttcggatccgttcttcaaggtgagctctctctctctctctctctctctctctctctctctctctctctctctctctctctctcgctaaatgattggaaattattactttccctgtgtagtgctattttgatctgaaaattgaaatgattttatatagatctgagtaggtctcgtttgcttactatatcggattagatcgaattggattggattaattaattatttagttagttaataagatgggattgaattaattaaggtgtaatttgtgactgattgtttgctgatagatttttaatgcaaaacagtttaaagatcactctcgtaaatattcagttcgaacttgcgatgattcgttaccaatatctgtcttaatggttcggttctatcccaaatagtgtgtctagatttttgcgttttgttgtatataaaactcaagtgtagattgtttgaatcccgtaaactgttggtaatacgcactgaatttaaagactttgagatcatgtgtactatattgagttagggctttccgtttttcgtatccgtgatcgaaatgagttgtatcttcattaaaaccgaaaagaaaaaggtctacaacttgtaattatgcaaatgtgaaatgtgtttctcgagattatttcatcgacttgtagagtagtcttgaacatcaaattcagttgcagtcgttctaaaactagatcagttcattagagagatcaagttgattgatcgcaagtacataattttgattccgtaccaaaattttgaactcgaatttgctaatgaacatatattgggtgataattaaacaatctggtcatatactccgtttaaggttagctacggaaattctcattctgaattttgttgagttctatttttcgtgtttatgtgctctcgatatacgatagtcatctggttcttttttatttatttttttaatctggatttcagggttgg

SEQ ID NO: 102894 - DNA, 753 bp, Mimulus guttatus
  Intron number 1 from transcript mgv1a017773m (locus mgv1a0 17773m.g) derived from phytozome v7.0 (chr-ID scaffold_268 7; pos 170 to 922)
ggaagctagctaatctcgaaggcttcgttcgacaggtaattaaatttgttttttcttcgtttaatcgtctttttttgtgcttaataatttaatataaagtagtaatagtatgatatatgtgttattatttttggtggcacattgatttgataagtcatactttaactagtgagatagggtgataagtgataagaaagcaaatgtcggggggcgagcgataaaaaaaaaatcgaaaagtagcaaaagagcaaatataagaaagctgggaaagaaaataatacttcctcctcaaggaaataacttttgtgcaatgtgacaaagtctttattaaaaattgcttttagggttacatattggaattatgtgacaaataagtccacttatggtggatccccccacacctgatcttaatggttatatgactaaccaatcatatatgctcatgcaattttatttttttaattagttttataataatgtaaatcagtagctaatgatgtgaataatcaaaatattgataattttgattaaagctaggatctttaattataataagacaaagggtttgatttgaaatgtttgtatattatagacttattgtttttgtattatgagctgtctgcagctgaagtccataaattgaaatttattacaagtttattgactttaattatctaaattattattttaatttttttgagaattttaattaatacaggctgataatttaaggcaacaaacacttcaccagct

SEQ ID NO: 102895 - DNA, 575 bp, Mimulus guttatus
  Intron number 1 from transcript mgv1a006873m (locus mgv1a0 06873m.g) derived from phytozome v7.0 (chr-ID scaffold_320 ; pos 134710 to 135284 reverse strand)
agaaccctttattgttagggatcatcgtggagaatgtgagtgtttttttctttttttttattatttttttcggagttttaaccagttttcacctacatgttggtaactctactctaaatcgttctttttctcgtgcaaacataacattcttagcttgattggccatatacatatataaacatatttgaaagaaaaaaaactcgtgtttgaagtgttaagatatatacgttttcttgttgataccaaaacatttgacttgatgcgtattttgtgaaacatgaagaaaaatgtatttgctaatggagtctgacttttatggatatctgctacgatctttctttgctttgttttcggtttttctttgaagtgtttttgttcgacgtaatgcgtttcacattttccatacataatagccaacttgaaaaataaagattactaggaattttagagatgcactcgtattagtacaatttgtaaacatgaactgattaatgccacaatgctgattcgcctttttcttttttctctttcctttttaagcatacaagaagcatcatcccccatctcttaccgat

SEQ ID NO: 102896 - DNA, 764 bp, Mimulus guttatus
  Intron number 1 from transcript mgv1a013392m (locus mgv1a0 13392m.g) derived from phytozome v7.0 (chr-ID scaffold_45; pos 372303 to 373066 reverse strand)
aagctagattctgggctgattttgttgacaaaaaggtactactttttttgccttgtgtactactattttatgagttatttttttatttttttttatgcttgtttggttatggtgacatgacataattaaataaaatataaaatttggatgctattgtcttttaatatttggttaggttttcaaaaactcataataggattcaggtaatgttgttgtaattttaatcatatccaatttgtgctgtcgaatcgaaatacggtggcagcggcggagaagattgccggagaaaacagaggaaaaaaactaattatccctttattgtgagtcgattaaacaacacaaatttccgatacgaaatcactgacaaacacagtgaaacctctataaattaatacaggctggaccaacaaaattttattaatattaacgaaatattaaattatcgaactaattatttaatacatttttgccttgttggaaccgaaagaaattattaattaagcgagattattatttttattcagattattaatttattcaggttctaatgtacaaaataaatcacaactatttagttactcgtataatttacctcaccaatcaaattaccaatttatcgttgttattaaatttcttgtaaataactcgtcacgtaattagaagaagtgaaactatggcctaattcataacaatgtcttgtgtaccaaacatttgatttcggcagtgtatttaataatttttaactcgatattctaattaggtgt

SEQ ID NO: 102897 - DNA, 934 bp, Mimulus guttatus
  Intron number 1 from transcript mgv1a024707m (locus mgv1a0 24707m.g) derived from phytozome v7.0 (chr-ID scaffold_4; pos 2481533 to 2482466)
cgtactgctgcagtcgcccccatcacctgctgcaggtaaaaatgattgattgttataataattatattgataaatcaattaacaagaaactaatcatatatatatacaagtcttgcaggaacggatgataaaacaattaaaattgctgtgagcgttgttgttccgattgtggtgtgtctattaatcctggctgcttttgctgtaatccgcgtgagaaaaagaatgaagcggaggaggccgcgtagaatccccttcgagggtaataaatttgttttttttctataagatatgtaattttcattcatttgtatttttttttttttataatttttcaattattgattacttttctttttacctagctagatggatcagaagataatgatgatattagcagtactgttgattccttgcaatacgattttggtaaaattagagacgcaaccaatgattttgcctttgcaaacaagcttgggcagggtggatttggggctgtttatgcggtaatatttaaacagtgatgaatatttgaacaagacacaaatgattacctgcagttttggtttaatttatttgactgattatatcttgttttaactccaggggaaacttccagatggtcaacaaatagctgtcaaaagattgtctagagattcagggcaaggcaatttggaattcaacaacgaggtgttgctagtggctaagcttcagcacaggaatctggttagactattgggtttctccagagaaggaaccgagaggcttctaatatatgaattcgtcgagaatgccagcctcaacaagttcctctttggtaactctgccttttttttttgagctttgataattaattaatgttattctgatcgatttcttgattattggatatgtaatactagaccccatcaaacgttcgtatttggattgggataca

SEQ ID NO: 102898 - DNA, 931 bp, Mimulus guttatus
  Intron number 1 from transcript mgv1a008501m (locus mgv1a0 08501m.g) derived from phytozome v7.0 (chr-ID scaffold_211 ; pos 328983 to 329913)
aggcctgttggccgtggtgcttacggcattgtttggtaattatttaattatttttctcgaacctcttttgtttttgttgttgttgttgttgttgttgttgttgttcttcattttttcatagttgtgattttagatgacttggtgttgacttgcttgtagttgacttgggtatgttgatggtttgaaggtgagggtttttgttcgttatgtttagaattttttttttttaatgtcagatctgtatttagattgaagttagcaatctttgatgattcgggcagagtagtgcaattgggattgaagttaattaccttttatgatgtttttggttgttcttcgtgtttttgttgaataaccatatgatgtgtatagatttagagtgaaatggattttgttcgacaaattttgtgaatttcgtttccggggaattaataagccgtttttttctgactttagttttggtaatatatcggtgaattctagctctagatctatataatctatgtagaagtaagtgcttgattccaaacgaggtgcagagagcaaatctttgctttatataaatcgtaggcgtttcgctgtttttttccttttcatttatatactccagcattgcgctaagtgtacgatggaactttgtggcgtcataaagatatataattaacttacaaaatttctctctctcaaaacaataatgactaatgtacggcagtattttccaaaaaaagaaaagaaaaaaagagaaaacgtgttacggaagtgaattccgatgctatactggattgatagattttgatttatgatagttgaaccagccacagttctttctgctgtgtctaaaattaatttggcagattgtgtagcttcgtgttgaatattttatattttattttcagtgctgctgtgaactctgaaacacgtgaagaagttg

SEQ ID NO: 102899 - DNA, 1011 bp, Mimulus guttatus
  Intron number 1 from transcript mgv1a012862m (locus mgv1a0 12862m.g) derived from phytozome v7.0 (chr-ID scaffold_55; pos 189707 to 190717 reverse strand)
cccaaatccgcccaaccttgacgtcgaaatagcaggtatctgtcttttaaaatttaacgaaaatgaaaattgaaaaaggttagacaaaatcaatgtttcccgtgggtttcttttttttttttgttaaaataacatttgtttgataatgttttaaaattgttattttaggggtttgatgtcgattttgtttgaaaactattgaactttggatatcgacctgcaaatgtcgatttcgtgggaggtaactcaacatttgtaggtcatttttaagtacactaaaccgacacacgtcgagtccaaatagcttatatcgacattatggtgtcgattattaggcaaaaaactcgacattgtgcttatgtcgagtttgttgcacatatatcgacatcttaacgtcgatttttggggaaaaaattcgatcagcaaatgtcgaatcgcatctgcgcgaacattttctgaaaaacgataacctcgctaaaattatacatcaatgcataccttcttaagttcttgcaccatagaatcttccattttgatatcttctgacatcatatttgcctctttgtaggatttgttgagttgtgagtgttctgaatgttgaagttttgtgagattatgtaagagaaggataaatgtttttttagattttggaaaatggagaagatgataatttggtgtaattgttaaatttttatggtattgtatcaaaatcaaaccagtctgtgtgtttacaattgatttcaatttcgtccctaagttattttttaaacaataaattctgtttaaaaattgattggactaaaatacccctaaattatacatttaaattttattaaaaataaaactatactccaattttttaagtcccaaactttttagtttcacagaaaaataattttactatcactattaatataatcgagaagaatttactaattaaaccaaaataattttcttaaaattctaattaaattagttacgctccgccggcgctcgcccactccgctccgc

SEQ ID NO: 102900 - DNA, 1023 bp, Mimulus guttatus
  Intron number 2 from transcript mgv1a011370m (locus mgv1a0 11370m.g) derived from phytozome v7.0 (chr-ID scaffold_24; pos 2041755 to 2042777)
gccgaagcttcgaataatgttcgtcccacgacgagttttattccgttaaaccaagttattgcatccaagaaacctaatcccaacaacttcaatacaaaggtagctagacttataatatatgttatatataaataatatatataccttatattcattgttgctattaatttatagtgtgatttaatttaatataatctgattttttttttcagcatcataataaagaagggaggaaactagactcggtggcgaagaacgaacctgcaactaagcgtccacgaatcgaaactccatcgccattaccgacttttaaggtatatatttatataaacaatttatttttatttttgagaaaattaaaggcaaaattaggttttgtcttttgcaaaattcaaattaaatctgttacaacaaaaataggctaagtttcagcttttctttatcgacaggtccgaaaagagaagatgggggaccggataactgccctccagcaattggtttcgcctttcggaaaggtaattattaattttatttttttcaaattaatgaaaggttaattaatttgcaaatttgtatatattctgtactaactggaattttttttttaattattgcagacagatactgcatccgttcttcacgaagcgatcgactacatcaagtttctccatgatcaagtcagtgtatgttcctcattaattatttgatcaaaaaaagtttcgaattttattatttaattaatactagtctcagtataatattttctgaaatttaattaattatttcttgattttaaatttcatatgttgtttttgctttcaggtactgagtagtccatatttgaatagtaaaccccctccaccgcatcgtcatcaggtatatattatcgacctaactcgacgatttcaattaaattaaatgctcaaattgcttataataactaattatagtagagttataaaacattttctaatgggatatttatatatataaattatttgcaggctgctaataaaacaaagg

SEQ ID NO: 102901 - DNA, 491 bp, Mimulus guttatus
  Intron number 1 from transcript mgv1a012041m (locus mgv1a0 12041m.g) derived from phytozome v7.0 (chr-ID scaffold_90; pos 490781 to 491271 reverse strand)
cttcttcgaaacgacgtagtttggtcgtccgtgctgtaagtttttcctgttcactctaatttcttactttccatttgtttttttttttttggtttgaactctgattgttgttggcgtgaatgttcgattttttggttgactcagttatgtactgagttaactcactacttgagcttcagatttctacaatgtggccacattttttttttttatttcttctcgaggaatccttgttacgtatatatagttacataaattttgattcaatgtaacaaggaatttatgtaaccggttctaaaagaatttagactctctctttttcccgtgaatgcgtatttaacgatttaatttaagactaattgctgttcaatttggttgaattatgtaattcattagattattttgtttgtttttttaccaatgttctcatcgtgagatattttttctccttgacagagtgaacttcctctggttggaaacgtagctccgga

SEQ ID NO: 102902 - DNA, 494 bp, Mimulus guttatus
  Intron number 1 from transcript mgv1a005840m (locus mgv1a0 05840m.g) derived from phytozome v7.0 (chr-ID scaffold_3; pos 928932 to 929425)
gaagtcgatcctgaaatcttgaagaggatcaaaaggtttgcttctccgttatcttaggcctcgtttgattgtcaagataatattagccaagataagattaaataggctaatgaaacccaatcgtattactggacttttgataaaatgttttaagaactataagctggtacattttattcttattattaatttttagagtgtttggataacaagcttattttttttaactcattataagattataaataaataaaaaggtagggtagggtaagatgtacttttttaaaaagatcttatttgctcttcattttaaaaaaaaattaagatttttttttttttcaaaatttaccaaacactatggaagagcttataagctctaaaacatcttataagctccttttaacatcttataagcttagccaaacaccctcttagtttgtgagaaaatgaaagtattaatgattataatgtgcagggttaagagggtgactaag

SEQ ID NO: 102903 - DNA, 576 bp, Mimulus guttatus
  Intron number 2 from transcript mgv1a022058m (locus mgv1a0 22058m.g) derived from phytozome v7.0 (chr-ID scaffold_54; pos 543434 to 544009)
aggtatctcttccttaccaattatatgcacttttaaaattcacctcacttattatgattattaactgcaagtgacatatacaccagtttttatttttctttttctttttcttttgagtgaaacgagaattaacgtcgagaggttgtggcagatgcagtgtgctttttttttttttaatctaagaattttgtttttgaatggcttgatcgagaattggggccatcaaatttgcactacatggaaataaaccagtttttcttatgtagcacaccatattattgtcacactttctgcttttttctatgtgttttgttcatcttttggattgtctcaagcttctttgcacgtgccgtgcaccatgtgacaatgtatgtgtatgcaatgtggagttatttgtgtgaaaaagttgaaatgcgtaatgcactgctatctgttcttattctgtctaatttctgtccatgagagtcgatgtttcttatccttttttttggatcaaagattaaattgactggtaagagatggccgcttttgctgtaaacagctgaagatagcgtatagtccccaagtaaacttcaa

SEQ ID NO: 102904 - DNA, 411 bp, Mimulus guttatus
  Intron number 1 from transcript mgv1a004821m (locus mgv1a0 04828m.g) derived from phytozome v7.0 (chr-ID scaffold_4; pos 1728334 to 1728744)
tttgttcgtcattcttgctttctgcgctgatttaggtattttttttcttctctgttttccttccgattatttgtttcccctgaacgcgcttctgattacttacttttgatttactcttgaaatgctggcatatcaattttgcatcttcttcgaatttcagttaattagggcatatagcttcttttctattcgatttttaatatttcctgttcttaatttggtttgaaatatacatttggcttttatgcagtagtctgtcagcctttgcctttgtatttcattggtagttctgtgtgattaaactcgtttagaaacaattacctgcggcatggggaatgaaatttgttaattgtgctcccatctttatgcagatacttttgattgtattacagtagtaatttgttaaaaggc

SEQ ID NO: 102905 - DNA, 820 bp, Mimulus guttatus
  Intron number 3 from transcript mgv1a006366m (locus mgv1a0 06366m.g) derived from phytozome v7.0 (chr-ID scaffold_6; pos 2048973 to 2049792 reverse strand)
cactcccgatcggagacggaaaacacaagctttaagtgagcatgttttaattatatatgatattttctagtgcatttatggttgcatctcgtgttttatttcaccattgcttgtcaatatgttgcttgtgttggtaaagtaaaacaagagaccctacaataaatgcaatagagcttcatattgtgtttggttttctttttaggctgattaacatttattaagaaaactaataaatgtgcatggattctagtttaatcataataaaatgactaaaaaaaaccacttttattaaatgcttaaccattaattgtcttaatagtaataagggcacagttgagaaaacacaataaatactttattggaatcctaaagtaataattattttgaaatgaaaaaaattctctaaaagaataaataaattgggaagggcagtatggttaattatgggtcgaaataggactgatcgaatcaaaattaatatttttcatgatttttaatattttctggaagtaagaagataatttcaatgacaatccgattttgtcttcagaaaattcgaatattataattttgaaaaaaaaaagatcgaatttttcggatcacaattggtaaaaattataaatttgacttcgatttccatcttttgtataagtataatacggtaagttttcgaaaatctagaaattgaagtttcagaaaaatattgctcgaaattcctaaacttcaaaatatgaatcgagaaattcgaaagttccattccgattttcactcatatgcgtgataaagtttataaactcttgtgcatatgcagtgacgtgga

SEQ ID NO: 102906 - DNA, 592 bp, Mimulus guttatus
  Intron number 2 from transcript mgv1a015370m (locus mgv1a0 15370m.g) derived from phytozome v7.0 (chr-ID scaffold_5; pos 991611 to 992202 reverse strand)
tggtttggcgctgcgtcatccctggtaaatccggtgtgagtttttctctttctttcttttttttttaaatatgaggaatttttagtaaagattactgcttttgtttgattctgtgtgtgtgtgtgtgtgtgtgtgtgtgtgatagagtgttaataagtagcaataagagccattggtatgttttttcttctgctatcgtcttattttcgtccaaaatcgaagatagcttcgtcgaacatgtctcgaaagatgcgtatttcaaaagaagaatttgaaataaagcaatgtatgtatgtatgtatattagtagttgatttatgtccgggcacgagtttttaagaatttccaaaccgtaatcttgaatataaatcgaaaagttcaagaaacgcatacttcgaaagcgataacgactgaaaattagcttatgaaatattagcttctgctttttcgtcttcaatttcgagctcttctttctattggttcagttttgttgatatatctcgattcaattttgagctattctttttattagactaaattattattccgatttgcagacggattgggaaggtgggtattatcctctgacgat

SEQ ID NO: 102907 - DNA, 744 bp, Mimulus guttatus
  Intron number 1 from transcript mgv1a003186m (locus mgv1a0 03186m.g) derived from phytozome v7.0 (chr-ID scaffold_65; pos 704501 to 705244 reverse strand)
catcagctcgtgatccgaagaactccgcgtttcaggtgatttttttaacttttttccttttgcttttttttttttaatttccttcctcggtttttccttttccttttccgcttttgcttttttttttttacagctttttttatgtgatctatgaacgaatctgttggaattgaccgtgaactgacaaccaatttctgtcctttgttgcttctcatattttatgttcagtttcagcttaatttttagcttatttaaatttagatattgcttattgtttaatttgctgatagaattgcttacataatggtgcaatttttgttgttctctgagcctgaatgtttgttgtggttttgattccgaatctagaaaatcaatgttttaaatgtatgctttgtaaccgctaatttacctaatcctggttgaatattcaaaatctcaaaaattattttcagcttcgtaattaatgcttcatatctcttgaatttcaaaaataatttaatgtgatgattgtgcttcatcacatttatactgcagtttgtgtatgcagtaatcttcgtttggtgccattgccttatatcttctctgtatggaagtagttggaagtgtttctcattatatttttcttcgatattatgttttaccgtttaatacaaagaattgaaacatgtgttcctttttctgttttatgcctattgttgcaggactaaagactgtgtttgatctggtggaaagttgtttagtatt

SEQ ID NO: 102908 - DNA, 614 bp, Mimulus guttatus
  Intron number 1 from transcript mgv11b023638m (locus mgv11 b023638m.g) derived from phytozome v7.0 (chr-ID scaffold_3 ; pos 1422990 to 1423603 reverse strand)
atcgcacttcatttcctgaagcttcatttacggttgtacgcaccaattccctctctcatctccttatcatgtatagtaaataatttttttcttagtttttccttgttcttaaaaaaaatattttattttctataaccagcacgtcatcatataatttttttttcttggttttgattttttatttttgaataaaaaaccaacaaatctcatacaatagagtaaatatggcacaaccaaaacatataatttgaatgaatcaattatatattgagttataaattgccaaaagccccttgtgttatcgggtgatggagtaattgcttgcaacaaggagtcgcgttcttactatcaattaaaagaacaacgtcttgttgcaactcctgtgcaagaatatgggtcgatggatttcaaggaagcaatacatattgtctaccatgctgttaattcataatcacgtggcggttctaaaccactctgagaaggtcttcaaatatttgtatcacatacatcaatgatcataaatttgtatatttcttgcacatgacaacaaatttggcacaatctcacaaactcaatcagatttctggtgcagctctcaaaatacaaagggagat

SEQ ID NO: 102909 - DNA, 514 bp, Mimulus guttatus
  Intron number 1 from transcript mgv1a018051m (locus mgv1a0 18051m.g) derived from phytozome v7.0 (chr-ID scaffold_140 ; pos 160545 to 161058 reverse strand)
caggtatacaattaattaatttttcatttattttcttcatccggccgagtataaatttatttagggtttataaatctgtcgtgattttctttaacaatggtgtccggaatttctgtctgagattataattaaaccatgttctattttggttcacctagaaataaaacaagtagaaaaacatgctttcactcctccttttggcaattccagctttcaatactcataaccaacattcattcattcccccataatactcaaaaatcaagaaattaaatttaatttatgcattctcattaattttcactgacacctaatcttatttaacttgcatgatcaatatatatatatagttaaatctgtataaattaatacagttggtactaacaaaattttattaatttagcgaaatattaaattatcgaacaaataattcattaggtttttaccgagtttgagaccagaagaaactattatttaaacgaggttattaatttactgtatatatgatctttag

SEQ ID NO: 102910 - DNA, 940 bp, Mimulus guttatus
  Intron number 1 from transcript mgv1a007276m (locus mgv1a0 07276m.g) derived from phytozome v7.0 (chr-ID scaffold_36; pos 84224 to 85163)
cccaagattctcgttattgaaggattacatccaatgtaagtgtgtgttaattagttatttatttatttatttactttaattattattgcatgcatagtagagaaaaaaagaagggctatctttaattctatggttgaggagtgaagaagattgtccacgtcatcatatatgacacgtggtcatctgacacgcactctttatcacttcggttttttcctatgtacatatttaccaaaagggtaaattacgaaacaacccctaaacttaggccaaataacaaaaaacaccctcacctgttcgtaattaccaaaaaccttctgatgtttgttctcgtcttacacgaacctccttacagtgtgacttttcaatgattttttttttatatttccgggaatagactttacacaatttcagatattttattttatttctcacatatttaacacgaggtatataatagattgtacatactttctgttaaaaaactcgatcaacagttaatcagagaggaattttggttattacggataggtggaggtgtttttcgttatttaatctaagttcatgaggttttcttaatttatcctaaaaaaataaaaataaaaaatcaaattctattacaaaatcgagaaaataggggagacgcaggatttgaaccataggcctctactctaaccaaaatcgaacctattggtatgaatttcaagactatcaatgaattttacatgtcttcgatactaaaaccgaagatattttcttttatttttaagaatatttatattactatagtataatactcttaaaaaaacatatttttatttaaacaactagttgtattatattatattaaaaaaaatgtttttgaatattttgttaattatatgcgaggcttctgtatataataggtacgattcacgagtaagagatcttttggacttca

SEQ ID NO: 102911 - DNA, 727 bp, Mimulus guttatus
  Intron number 1 from transcript mgv1a015947m (locus mgv1a0 15947m.g) derived from phytozome v7.0 (chr-ID scaffold_45; pos 827517 to 828243)
ccaccggaatattcgagtcccactgtgaatcttaggtgagtcagttcagattgtagattatattttcattgttaatagcttttattttctgggttttttttttttgtttgtttttttttttttgaatatatttctttgttgtgtaattctcaacttcaatcaaattgaattataccgatttccgggaattttggtaatttgagaagtcaagaaaactgatgaagtaaactctgctgtcacctttttgatttcctttcagttgtatgtgcgatgagcctcttataaaatgatgcgtacatactgttcgacgaaatgcttgaatgagataatcctttggatttttttttcttgatatattcatttatgacttatggaggctggcaatggctgcatatctacgagcacctgtgaaaatacatgtagaaagaaacgaaggagctacatattattgaaacataaattaacttttctgtaagatgaaagatgagtatgtatatgttccttacatataagtataaatgtgaatatgtatataacagtgcagatgtagttgttctagtttatcgtttacgacatgcaactgttactgcaaattgtctcttgattcgttcttcagtttattggttcaatccacattgattgcactatctctaatttcaaagcatatatatatatatatatgccgagattgttaagaatacatcgtatgctatttttcagcaaaaaa

SEQ ID NO: 102912 - DNA, 732 bp, Mimulus guttatus
  Intron number 1 from transcript mgv1a000383m (locus mgv1a0 00383m.g) derived from phytozome v7.0 (chr-ID scaffold_83; pos 669097 to 669828)
acaacttgggatatttcattaaaaaggtagacgatttggttcggttttgttgtctgattgctggtattgatcttttttctgcacagtttagatgcttggtctttataagattaatcacgggttttggggtgaaccttagtttttttctgtggttacatttcatatacgagctgtttcttatgatgccagattgagtaaatggaaaccaattgcgatggaggatcatataatttgttctggcttcttcgttttcatgaaactatacgcatgcttgaaaagcaagcactgaaaaggatcctagcaatcattataataactatattttgctagaatctgaaaatagtagccttctgtcttagctctctttccttatctgagatccaactttttctgcaagatgtaaagtcaggatacctatattttgatatgcaactggctcggattgtttcctctcgtatcttcgtttctgccatattatattctgatttttttatgagaacaaaaataagttttagataagtttaaagatttcagtggtatcagtttaagatgagttttatttagaatattggaggggttcaaatggctagctatattgctgtaacaatgacatggatagcatcttatattgctaaattattaagtattttaacattttgcattctagatctgatcactggccaatcattttaaattatgttcagaaacttcgtgtttggtgtcggctacaca

SEQ ID NO: 102913 - DNA, 661 bp, Mimulus guttatus
  Intron number 3 from transcript mgv1a013952m (locus mgv1a0 13952m.g) derived from phytozome v7.0 (chr-ID scaffold_24; pos 676213 to 676873 reverse strand)
gcaagaagaaggctgctgtcaagaaggaaggagaggtaataataactttagtttttttttttggttgccttttgtttttcttgtgtttaatcttctatattattattgacacaaatggtcttgttaaagttgtttggtttttgtgttttagctaggaaaattgaacatgactgtattgaaaaatgaaccaaaaccaggcgtgaaaattgaacgaattggataggaaatcggtactttcgaaaaaaatggtgatgatggtactgatattgtaggtgtaatttttggaaaataattggaatgttttggaatgaaattggataggaaattgtgatataatatgtattccaattcggaaattggaactgttggaattccgaatgaaagttattgcaccaaaatcaattttttttataccggaattggaaatttcagttccaatttccacccttaatgaaaacactatactgttttggactatggaaaattgttttcactatagacaacatgtaattgcttaggaagttaccataattttgtaggttgcatagccttgttatgagttaaacttttagttatcgacttttctaaattaatttgttaaaactttttatttgacttcactgcaggaggctgaggctgctgccaccgaagaggcaaagaa

SEQ ID NO: 102914 - DNA, 844 bp, Mimulus guttatus
  Intron number 1 from transcript mgv1a007208m (locus mgv1a0 07208m.g) derived from phytozome v7.0 (chr-ID scaffold_12; pos 1019622 to 1020465 reverse strand)
aatccccaggattactacaccggcggcgaaaagaggtaaataattccttaataaataatctatttcattttctacagtattctgggttcaatgatcaacttaaattctttagtagaaaaacagtacttcaattctgctagatagtttatttgtattcttgaacgtataggctccgatatactgcggtagatatactacaaccagtgaagtgatgagatcaatactatgaattcaatatatgatttagaacaagcataagtgtataatctaaaaaaatccaaaaatctgtgatgactcatgagttaaatttggcaaaattaatcattgaaatataactatatagtaattttccaagaagcccgatatatatagctttgattaaatgaaaagatgctgggttcagtgattaagttaaattcctttgtcgaaatttatttgagttcttgaatgtatagggggtccaaccaatgaattggttggtaaataaacaagaggtcagtactatgaagtatgaatacatgattgagaacccaaatatgtaagtgtataatctaaaaattccgaaaactctgcaagaggaaatgccgtacattttagtgacaaagtaaatttgacgaatcaatcgttgagaaacagctatttgtcaattttccaagagcccaatatatttatctttggtttaatgatgcgcatctcttctttccagagttgtttcttgattatttacgagttccttggaagtagttctcttctctatgtagggaataaactgtatatattatgtatcagtgagttgagttgtatatactaattagctcatgccattttgtttttttacagtgga

SEQ ID NO: 102915 - DNA, 1012 bp, Mimulus guttatus
  Intron number 1 from transcript mgv1a001664m (locus mgv1a0 01664m.g) derived from phytozome v7.0 (chr-ID scaffold_7; pos 168604 to 169615)
ttgtgcagtccaagtgccagtccctcagtgaaaaggttctttctgacccaatctttaatcctttattttggttgcatatttgcgtgattttagatatttattcctcgtttgatttcacaaaaaaaaaaaaaaaacatctattgcgacttgatttgaaatccttggtcaacgattgaggaatatgtttctgatttactaatttttttttggctttaattggttgatgatttggatttctaccaacacaattgataataacttgttgaagttccttaataaggattagattatgagtcctcttattggttaaaattgtaaatgcagttactggattattacttgtttaagttccttgagcagagattggctttagtttgttgatctcacatgaaacaaaacctcatttgtgtttccgaagaggaatatgaatatttttatgctaacgtgaaaatggaaatgcctgttttttcctcagcgaacgacttccaactgttaagagtggttactcgttctgtttttatgttaatataaaaatgcaaagaaaaaagagctattatggcgggcaatgaggttatatttaaacaaaatgacctagttttggttaaagaaaaaaaaaaaaagatttgaaggaagctattaataaccaccaagaaacttcttgctatttatagttcctttacccgctataaccgcttcattgtgccaggatagtccatatctcattgacctgttgtgagaattagccaaatcagactcccttatttcatctcaagaagactatggcatattccatggataaaacactgtcaccttttcttccaacaatttggacttggggggagggatcgggggttgtaaggccatgttataagaccattaaaataataaaaaaaacaatgtagtctcgacatttatctgatttgaactttatgtcttcagctcagcgtggatcttatgggatctttatgcagcaaataacatctgagcatgttttgcaggaaataagacagtt

SEQ ID NO: 102916 - DNA, 582 bp, Mimulus guttatus
  Intron number 1 from transcript mgv1a015059m (locus mgv1a0 15059m.g) derived from phytozome v7.0 (chr-ID scaffold_3; pos 2230004 to 2230585 reverse strand)
tcaacaaacctccttcactcccttcgtacccacaggtgaaattttacctaattttctgatttgtttctatccgaattttcctccatttcgaattttggtgtactgtgtgcttcgaacagctataattttgtttctctctctttaattttttttttttttttttactgggttgaattgttatccttttcctgtgtgtgatttactgcttgaattgttatatttttttactgttcaaaataattgaaatcttcaattttgcaggaaaccctaccttaaaaaataactacaaaaaaacagaaaccctcattttttgattcctttttcgagaagacaagaatttgttacagtaatttgatccaattaaataattttcggaataataaataaattaaataaatataatttgtgatctgagatttttcgtgtgtcaaacaagcttagatctttactcattctgattatttctgtcttaacccagtaaaatttcattttcaaggaagtgaaattatgttaaaaatgtcaccttttccccacatttgaatttatttaattttttattttttattttttttcactgcctag

SEQ ID NO: 102917 - DNA, 1006 bp, Mimulus guttatus
  Intron number 1 from transcript mgv1a007753m (locus mgv1a0 07753m.g) derived from phytozome v7.0 (chr-ID scaffold_66; pos 938390 to 939395)
cagtttgccgataaaggtctcgatttcgttttttcgtttttttcgatttttattttggttgaatgtgtctgctggtattgtttctaatcatgaatttggggattatggaggtagatatggaaggagtacttggtttctattttcgattgttttatgcaggttttttccgatatcgatagggttttcgtgttttctttgccggtgatttaaattttagtgcacgtcgtttaattgttcggttatgcggtttgatagtgtggttttctgatgatagcgtcgcagagcttgacctttgttcgtatgcttgtgaatgtagcatggaagtggtattctcgatcatatacctgtttttatttttgccaaacaaaattcagttttcacttgaaggatcgatgaagatgatttcgagaacaatttaatgtttaaacgttgattgtgtcactgtgctattctagctatatattttgttcgttcggtatagatggatgaacggatgaacggatgaacggggcgggtttatagtttgtgcgtgcatgcatgaattttcgaccaaggcgcatgcacgtacgtgactttggctcatgttttacgggcgagcaaatcaggaaaaaaaaaatcagtaatgaattggttttaatttgtttgtttgatcaaatttaatgttcgtttatcagctgatgacacaccatttctcgaaatcatgggaatgtatatttaagaaatttctcgtagattctaatgcagaagttggtttccgtcttaggggtgattaatcataaatggatgttaagtaattaaagcattcgtgtatctatctattcactacattaattcccatgttgtgatttcgtttattttgtttacgagtgtcccttttctaaaattacatgcacgttagttttacgtggcgaaaacttgtggtaagttattagggttttaattctttttccccatattttacgaatcgtattaacttcgttacattatttgggctttgcaggtattg

SEQ ID NO: 102918 - DNA, 869 bp, Mimulus guttatus
  Intron number 3 from transcript mgv1a008890m (locus mgv1a0 08890m.g) derived from phytozome v7.0 (chr-ID scaffold_48; pos 728492 to 729360)
ttattcttttggttgccacaggtcctttatgaaactttttaatctttgttgcatcttccacattctttctttatttgagtctggacctatgtatttgtttaaattgtaattgtgtgtgaccttgggtgagacttttgtgcagatatatcttaataaatccattgtgttgttatgtttattaatttgcatactgctgtatttttgtttcgggtttatattttcgcgtagatgatgaatataatttcaagatttcgagggttgatttgattttgctcctttaaactaacactcaatttgaaattacgtccatttttttcccattgcatcacctaccccaccccaatagttgttcgtcgcgattctattattatttttaataataaatagtctacccttgtttgttccttggtaaaaaattgtccacattattttactttaagatgcatgaactgcaattttttgacattacgtaactctaacctaaattgttttgacaaaaatagattatggcttaatgaaaattctatgtgcgatgagttggtttgcttgagtttaagtatcatagaaggagcgttggttgaaaatggttatgtgtatacacaatggtgttgtatttcctggaacaaactagtatcaatttatatagaactctgatagcaatttgtatattcttttgaatttagaaggactctaatttttatatgatccttgaacccattacacttaacattggtgaacacatatagatagaactatgtattactcttttatgtgttgccatctggaatttcatgaaatgttatttttcttaaagatagtttctcacacttacaggtatatttcaacaatatctggtttaccaagtccag

SEQ ID NO: 102919 - DNA, 724 bp, Mimulus guttatus
  Intron number 2 from transcript mgv1a006393m (locus mgv1a0 06393m.g) derived from phytozome v7.0 (chr-ID scaffold_16; pos 1877835 to 1878558)
ctatcaagattcagacagctttccgaggttacttggtacgtccacattgtttttagatgctgtcgtctactatctattttattttcgaaattgtttgctttattccaatgaaaaatgataatatttttcggcatcgatttaattaggcgttatttcgcctttggttaatgtagtaacattttccggggtggcacgggaaatttcgctcttatgtatcggatctgatctgatcgaataatatcttttttttttttttcgaaagtgcaaaactgattcagtttcgctcataaaatcagaatttggaatgaagaatcttgttccaaaatcataaatttcgaatccgaatcagcgaaaaatttgcatttttctttaaattggtattataagtgtaatttccgatttttttttttttttttttttttttggattttcagaaatatgttcaaaaattaaaatcaaatctaatatttattccaattcaatttctgaaaaaaatatggacaatcaaaaaaatcaaaattttcgcgatttgtaatgagaaatattgttccaaaatcagaaatactcggaaatgatttggaggaatttcgaaaagtttgttccaactttcaattcccacccgtaaaccccactacggcaaaccaaacgaggccgtaactcacgactccgagacaaaaacaagctaatttatacttgtttaaaaaaaatataggcaagaagagca

SEQ ID NO: 102920 - DNA, 889 bp, Mimulus guttatus
  Intron number 2 from transcript mgv1a006611m (locus mgv1a0 06611m.g) derived from phytozome v7.0 (chr-ID scaffold_81; pos 389037 to 389925 reverse strand)
ggaacagaagccaatctccaagcattgttgctcgggtaattagtatacatatttttagttgttagtgtggtaatcatttaatattaatatcttaaatacaatcattattattaaatacaatcattattagattatcgtttaaatttttaatcaaatcaatattgtttttttgttgtttttgtacttttgcattttttaatgaattcctctagaaaagaaaattatttggggtgtgccctgaaccccaaaatgtattacctattcatggtcgtattatttcgaaaaaatctagctatagaaatttttttgggtccgcccatgtagaggcaagtccacccttgccggcggcgagtccaccattgggcaagggtgaactcaagcccaccctcatttttttaatttgccccctatattaaaccatatttttagcccacccaaattttattaactagttcacccaaaatttcaattaacgcaaaagaagccccatattttattaattagcctactcaaaattcaaattaatacaaaatagtcccaaattttgttaattagcccaccaaaaatccaaattaatacaaaaaaaaactctaaaatttgtttttttcttttttttttttttctttttcgtttctccttttcctattttcaaaaaaatcctaaaaaaatctcaggggcgctgcccccgaacccccgaaaattgaagtccacccctatatcgaattcatggactcgccactgcgccatgcatgccacatgtatttgaagtggtatcaaataacatatttgtgtccaacatttgtatatcttcgtgaactcaatttttttttatatatatatatatatatataattgttagcaagttattgcaggagggatttactaccgg

SEQ ID NO: 102921 - DNA, 1007 bp, Mimulus guttatus
  Intron number 2 from transcript mgv1a011856m (locus mgv1a0 11856m.g) derived from phytozome v7.0 (chr-ID scaffold_13; pos 1269200 to 1270206)
gcaaactcaatatcctagtaagtacaattcattctctttatttaacacttttttcttttatttaaattaaagttgcgtgttattcggttgcatttgtcccttttctctcattctttaccatgtgtttcatttagtgaatccccacgcacaaaacgtgattcagagaaatggttaaagcttagttcttcaagatttcctcgatccatatgaattttctttttcgtcaatccttaagtgtaatttacatctctcgtattgtttgcaaattgttttacgtcagcgaatgtttatccggtgcactagggctatggtatttttggaatatacatatataaattaatgaaaaataataaaacatgcaagaacaagattgatgaaaccaatataattctgccaaaagttgccgtcccaaaagagatcaaattagatgaataaataattattggacaaagtacagcaaattaacttgtacaatatggcttgtgcaacagtttatctcattgacgataactctcttaatgaaaaaaatatatataataataaaaataaataataataataataaagccaaaaataggtgacttcattgatagttgcacctataagacttcattgtcatatttcttgtctacatcagcataagaaattaaaattgtcaattctcaaataacaatatgtatagggagtatactatttaattctacacgcaaaatgcattttggaccatcaattctatattgtatgctgcatataacctccaaatcaatcatcactaaattattttaatgtggtgatccaatcctgatcgatataattaataatattttaagattaattccccgttgattagcttaattaaaacgagttttttacgacattttataaaacggtttacgataaaataagaaatttttgaagcgtttgataaaaatctagagagtaagatataaagtgggatcactcagctataaatgtactgattttatgtatatgtatataggtaaata

SEQ ID NO: 102922 - DNA, 690 bp, Mimulus guttatus
  Intron number 1 from transcript mgv1a005580m (locus mgv1a0 05580m.g) derived from phytozome v7.0 (chr-ID scaffold_7; pos 3100192 to 3100881)
gaatatccgaattattgattcttgatttctctcgggtaagcctatcgtttaattttttttttttttccccttttgcttaggttttcaatcatttgatttcagggttcagtgtctggattttagtacatcttattgaaaagggaccttttttttcccaaaaggagaatttttatttcatgtggtggggtactgcttgtgattcttgatttcaagattcctagaatctcaatttgtttttttgtttgtttttttgttatttgttgagcaagaaaaatatgtgttagttggagtactgtatcttccagtagatgtaatttcaatttattttgtctgttttcttattgtctgcagtttttttgtgtgtttgtgtttgtgtttgtgtgtgtgtgtgtgtgtgtgggctcaatccctttctaatttcagtgactgtggtttcttgaaagtacggtttccgatttccgaatgtgtcgaaagggtcgtgcagatgttcttttagttgagctatcgaatttcgatatgtgatagagttgatttcatctcttaactaatttggattgttttgattgaaaatggatattgaatatatacacgagttacttaaaagctgctttaatttcttgagtatttttcctacgacaatctttcgtatgattgcgttttttcggttttgctaatttatgctttgagcag

SEQ ID NO: 102923 - DNA, 397 bp, Mimulus guttatus
  Intron number 3 from transcript mgv1a010446m (locus mgv1a0 10446m.g) derived from phytozome v7.0 (chr-ID scaffold_2; pos 2746742 to 2747138)
tgcttcccggacctgctatacctatactaaatcaggtaaagccattttgatttgcctgaaatttcgttgcgagatataccggactaaatccaatctgaacataagtttattatttaagaagctttctaagatgcattaacttaattaccggatttaaagatatctatttttctttttacgtttttcgactggaaaaaagcctcttttatgtcgtgtggaagaatttccagattatttgaattgaaggatggggtttgattgccctaaaaaaacatatttaatttgatttatctttattatttctgcaagtgtcgtatattatccgatattcttgatttatacaaagccagacctaataatttatctccgggtcgtattaaatgcagacatttttgct

SEQ ID NO: 102924 - DNA, 1018 bp, Mimulus guttatus
  Intron number 4 from transcript mgv1a008346m (locus mgv1a0 08346m.g) derived from phytozome v7.0 (chr-ID scaffold_11; pos 219622 to 220639)
ttcccgtcgggtttgttcattttgctgagagatcggtatgctggtttgcatttgtttatgttcaatgttgaaagattcctttttagctgttctggtttgtcttcatagggcgctaattgtttgcatataaattgtatttaactgcatgttagattttgcggtatttgtgttcttatgtaggaacatatttttattaccatggaagatatttttaatgtttaaaactcatgacacatggtcgaaaatataagagaaggtaatatttaacgtatacttctcttcttccttcctcacgtaaggagaagggaatgagtcaggtgattcaaaaggactgaatgaattataaaactgccatcagctattcgacttaggacatccgttcttcttttcgtttatacaggaatttgcatctgcgaatcatctgaatcttaaaaaggaaatacacattcaatttagtcaaaaagatctatagattgaaaaatctcagtctcacctcaagaaagttactacagaactatgttactgagatatgaaatgtaactgaatgaagagatattttaaattggcaaacaaaacctttttgctgatacagcgatgttacctaagtgattacttaagctgtctttgtgtgcaaaaattatcttcatcttatgtgacctggacttacttttttcactgtgagcaaatatttgggctataggtgtgcacatgcttgagaacgaacatttgcttttgggttattgcatgttttggtcatttaaatccatcttttgtaatttcggcttcttcacttatttgttacgtggtgattttaggaaattgaggcagtttctttagtagcatattatctatttatttgctgctcttttgcattttaatgttaaccaaccatattttggacattttgatccattttttttaattttgttactctgatcaacgtcactgattggttacattgttccgttctcttagaccctttttttttgtgtaggatcttgaaagagctatcaaggaa

SEQ ID NO: 102925 - DNA, 1023 bp, Mimulus guttatus
  Intron number 2 from transcript mgv1a005076m (locus mgv1a0 05076m.g) derived from phytozome v7.0 (chr-ID scaffold_195 ; pos 248143 to 249165 reverse strand)
gtgcaactagcgtatactccgagtctacggaagaggtatgaaaaattcaaaatagtatcacaaatataataattactctattttaaggggtacttaagtaattaaacaccatgaaatcacatgtgttaaaagtaccaaacacttgtgaattggttttgattgcgtagaaccttcctttatttcattttatcttgcatgaagccccctatttggttaacaattaacatctttaattgcagatttcatgcaagtatttttgtaacacaaatggggatttggtgcatgttttctacaatactaacaggaatttatgcaaaatttatttatttatttaaaactcacatggtacatttcttaaattaaatagcgaaaaaatcttttaattttccgcttctaattttagaatatttttttaagaaaaaagtatacagttgatagtaaaatgattatatatttctataattatcttggatgtacatatattatgtgaaaagaatatacataatatgaaaatttaaatttattccaactttcatcactactataattttatttttatttttcatattattgtaaattcattcaagtttcacctatatacactattaatgtttcatttttcatagtgcagtagtataattgaataaattcgttcgacttaatttaagaaaacaattcaagttttaaatgaaaacatgcaccaaaccttctcaattacaaaaacttataggattttttctccatagttaaaggtgtacaatgttaacataaatatggggatgaaacacaacgcaataaaatcactaggggtttgtgcaggttttccttaacacaagtgcatttttatgttgtttacccctctttgaacacatcaatgattattcgagcgataaaccaacacaattataacgtgtgtgtgtgtgtgtgtgtgtgttttataattttttaattttgatccaagggttcgtacttaatataaacgtcacagttgttggagctaaacatatacagtcctagtaaatc

SEQ ID NO: 102926 - DNA, 688 bp, Mimulus guttatus
  Intron number 5 from transcript mgv1a012015m (locus mgv1a0 12015m.g) derived from phytozome v7.0 (chr-ID scaffold_104 ; pos 61038 to 61725 reverse strand)
agctccgaagcattataagcagtacataattccgggtaattacgctcttctctgtcccttcttttattatctattactcggggatttaaatctttatcgaatcaaataacgtattgttgttccggaaataatgtacgtttgatcggaattgttttcttcagatgcaaagagtttccccattggcaaatcgaatcaaatgcatcaacccaagcaaggtaattttttttcttctatttatttctttttcttttcgcttcctccgaattcttgtgggacgaacattcttagatatctttgttgttcttgattctcgagacgtgaattgttttttgaatttgcgcaactcatgagctatttttcgtcttccgtgaaaatctggataaaaattgcggttttccatgtcatgagtaatttgcaatgcaacgtagattcttgaacaaatgagtatggtttcaaagttgccgattaacgttttgaacgaagtcactcttgtgcagataattcgtctgctaaagcttttcaagcagcgagaataaagccgcaatcaccactgttaaggtacattacgccacgaacgaaaatagcgcatcaatttcggttctgtcgcataaattcagcctaatatatgcaatgatgtttataatacagaaaaggaacttcaagaatttcttcaagtggatcatctcca

SEQ ID NO: 102927 - DNA, 537 bp, Mimulus guttatus
  Intron number 1 from transcript mgv1a022656m (locus mgv1a0 22656m.g) derived from phytozome v7.0 (chr-ID scaffold_113 ; pos 274154 to 274690 reverse strand)
tctccgctgtttcttgcacagtcaagccaaaccaggttacactcgacgccatcgatctctcaatttctaacttgtttgttaattatttgatgggttttatgattatgcattttattttttctgttctgattggtattttctgatctgtgatcttcagtgtttttccccaatttttttttttcaattaggttttaatcgacacccccaaagagatcttatgttgtcaagctttttaattattattctgtttctgttaattgatttattttcaattcaaaatctaatatttattatttaatctgcagctttaaacataattaaatttaaaaaaaaaaattgccatcagtcagattttttacttaagaataatttaatttatgcaaaaataaaattaaatgattattcatgaattagcatagtgggattttgtgattgatcgagggttaaataaataaaaaataaaaaataataattctccctttgattttgttgtatttgtcaggtttcgaatttgaggagggcttcgctttcattcag

SEQ ID NO: 102928 - DNA, 890 bp, Mimulus guttatus
  Intron number 1 from transcript mgv1a005447m (locus mgv1a0 05447m.g) derived from phytozome v7.0 (chr-ID scaffold_7; pos 1062479 to 1063368 reverse strand)
ttgacaggtcagaatagcctctccttattcatcatttcccaatttaatggatatttcaattaattcggaagaagctttttctccagcatatgtatatatagttttgtatttgattttctaaatttttgtcgacacaatgttcgagcatgatttgtgcaagttttaggttattcagcgtatgtgttttgatataatttgtatcattttttcgagggttttggtgggtctagttaattctcgattgaggcacgatagatgattcgaacttcaattttttggaacttgagtgtgaggaaattagtttgaattattttgagccgatctgttaggaaatagaattgtgaatttgatgcacaccgtgtagagtttgtgcatgtgggaacactgaagtttgatatactacactatagttggaatgctcgaaacaatatttattcggtgttaaaatgtttagaaacgatggaaaattgtaggagagcgttgaatgtcgtattgaagggtgtagctggttcatgtgtttctggacttcaatcgccataccatctcgaaaatcagcctgataaaaaaaatatctaatcagatatcctgatcaaaagaaatataggttaggaagaggagagataaagaagattggttatatttcttcgagctagacatattgttctagatgaccagttgtctaatggtaaggagtttctgatattttgaacatgactgtcatctgaggaattgcattgaaattaatttttttttttttatcattttccattattttctaactctagctgaattattttgaagcaacatcataatgcacgtttatttaagctaattatgtctgatttatttttacagttagtgtaaagtggcaaaaggaattgctctccaat

SEQ ID NO: 102929 - DNA, 851 bp, Mimulus guttatus
  Intron number 1 from transcript mgv1a005024m (locus mgv1a0 05024m.g) derived from phytozome v7.0 (chr-ID scaffold_54; pos 692329 to 693179)
tggtcgaaggaggcggccgtacttcttcttcgctggtaatcgactaattacgtaatcgaatctttgttccgtttttcaatttgtctgattaattgaagcattgagttttttagggcttgtttcgatttcgttttgggggaacgattgttttagggacgaatttgagaatgaaagtaatgttcgtttaaattttgggcgaaaaaagtattttagaggattttaagttcgtgggggccgaatgcgttaattttttgtatgatggggggcgataatgctaattatacacgattttttttcttcaattttaacgtgaaaaatagggattcgagaattgttggaggggccatggccccctatgctgcgcaactgatcgtagcaagaagtttttggaattctttttggtgaaagttttttgaaaagcttaacaaacattggcttattagtttgtctcttcttcaggtttttgtctcattttactccactattaattgtccaattcacattttgttgtggcttcttttgtgcagccgtaaatcgttgttttcagatcaagttgataaaatatatacttactcgtttcgtataagtcgttcatgattgtgcgtgcttgtgtgccgtaaaagatatatacattttgttctattgttttgagtttaggtcaggtaaaacggaaacttttccgctaaaatacgacctcagaaaatattgattcctaaatgttggattaataagctaatcagtgtctcactctgtcaatttttttccgtcagtttgttaatttagaaatcattataaataaaggaatcttgattttacctttacgatattcaggcataatcggtgcagtatcc

SEQ ID NO: 102930 - DNA, 894 bp, Mimulus guttatus
  Intron number 1 from transcript mgv1a014109m (locus mgv1a0 13209m.g) derived from phytozome v7.0 (chr-ID scaffold_51; pos 135760 to 136653)
ccgaccagatcgccgtttcttctctccgttctcaggtagttgtttctcactctatgttttggtgtttttagcgcgtgtgtgtgttttgtcgttttgctctgttctccgttggatgcttgatatggagttttcacacctggttgtgaaatatgatattgcatctgttgcgtttttaaacgttttgaaaatgacctagatgtccgcgagtacgacagcgatgatagcgactacgacgtcgttttatatcgcccagatctccgtgcctactctccattctctggtagttgtttctctcactgcatttctttgtgtacgctgcgtattgtattttttgtcatgctatttattctatattgttggcttgtgaattttgatatgtttctgttgcattttttacatctcagcaagctgtagatgtttcgatttacttgtatggtgaaggaattatctaactaaattatgtgtgatagtggttatcggaactgaaatcggatcgaaccatttttcgcaagatctagcgcacacagatctcttgtagttgtttctctcactccatgattctgtatttacttgtgcgttttcgtattttcgacattcttttcgttttacgttggttacttgatatatatgatgtggaattaggttgtcaaatatgtttctgctgtattttttacgatatatatcagcttagtgctaattgtgtggtgaaagaatcatctggatactttatgtgaaatagtgccttgttgacactgaaatcggatttaacgcgaaataaatttaaagttcaatctatttcttatatcgaagtgtagttaccagttaacaattatgttactgattttacttacatatacaggggtgtttgatccattttcgagacgaagcaacttg

SEQ ID NO: 102931 - DNA, 370 bp, Mimulus guttatus
  Intron number 5 from transcript mgv1a002762m (locus mgv1a0 02762m.g) derived from phytozome v7.0 (chr-ID scaffold_8; pos 157716 to 158085 reverse strand)
gcgttggtaaaatcttggttggcaagtgagtttctctcattaaattattcttagttctatgtagataaatcaaatgttgatgtagttagttattcatcttaccatttttgcgagttttcctatgtttctgttattaagagaaaatgtatctacgtgttaatattagtggttttttagtctttcaaaagccatctcctgcatatcaaaccctgtgttctctaatcctggttaaaaatttccaatttaaaaattacccagtcaacatatctactgactctctcttcattttctacattaacaactttgcatttattgaaaacaagggttttagatgataataactcgagagctgaattttttgaatgcaggg

SEQ ID NO: 102932 - DNA, 836 bp, Mimulus guttatus
  Intron number 1 from transcript mgv1a017211m (locus mgv1a0 17211m.g) derived from phytozome v7.0 (chr-ID scaffold_16; pos 1275409 to 1276244 reverse strand)
gctgtaagttattcctcttattttattctacttgtgtgtttttagtgtgcgcgcgtgtatgtgtgtgcgcgtgtgtgtgtatctgtgagataaattcagaaacaggcgaggctcaaatttgaaaagggaaggcgaatttattttttgcggagatgcattgttcgttttttgatctaaatttccttactattaagattaaatatattgactgaatcgaattattgatatgtgggaatggctatagttgaggtgtttgatggtggttatccaatacctgttgctttcgtgttagggttcctcagttctgtgtaaatcggtcaaaaattaacgtcgaagaacatatagatgttttaatttttagctatatgcgtgcgggttttttgtttcgtgaaggattatagagcagtggaaccattgcgcgtaccgatcccacatcattatttcgatttaaactttgatatctaggttgtagaattgcagtcaccagttataatatatagcttttgagtgaatagtaaaaattgtttgccggagtaatactactagcagcaagactgaatagttggtgattttcgtttatatacttcacagtggtggtggtggtggtacgggcatgcttgagctcctttgttttatacttaaagcatggtttcttaaccaaatcccgtgaattctatttcttgccaaacgtaccgagtttaattaaacccaaagaatttgatttcgttgatttagcttttttttttctcagaattatcagttgctgatttctaatttttttttctcattttgacattgcagactgtaccggttaaccctaagcctttcttgaacaa

SEQ ID NO: 102933 - DNA, 822 bp, Mimulus guttatus
  Intron number 1 from transcript mgv1a013014m (locus mgv1a0 13014m.g) derived from phytozome v7.0 (chr-ID scaffold_4; pos 505656 to 506477)
ttccacgattctgatcaccgattccattggggaaggtaaaatcaaactttgctcggtttccctgttcgtttagggtttcgatgagacgcgtgtaattggctatgggcttttgttttttatatgttgtgtcttccaatttttggggtggataatcaatcagtttggtattagatgcctttcttgttcaattatgacttgaagaacgtgttctctttcttttccttttttttttgggtaattggatttcagattattgggctgggtgtcaggatgttacaatttttttttatttttttttttgaattttgtgcatctcttttagtttagtacaattctaaattttattctgataaaaattgctgctttctggttcctctgaggttattcacagccttctgctattgttttagctgaaccaacaaaaaaattgtatattgttatgaatgactaaacatattttcttgtttatagtactattaaattctttttgttagccagacgtagatggacggtttcctaatcttcgaatactagattgtttatatttatgtctgaacttcaattccgtcgtttacttttgggtggttgtgatagtttgaaactacttttacgaattgaaaacggatggccttaaattgttatgtcagtgacatcataccatttaacatacgaatgttgtgttgtatagcaattagcatgccctcgaatgaaataactggagataatgtgcttgagcttataatagtactgtattatgcttattactaaatcgtaaatacgactcggttgctgaatgctctttaaatcttggttatcagtgaa

SEQ ID NO: 102934 - DNA, 487 bp, Mimulus guttatus
  Intron number 2 from transcript mgv1a004700m (locus mgv1a0 04700m.g) derived from phytozome v7.0 (chr-ID scaffold_7; pos 2718345 to 2718831)
caaaattctctcctataaaatataatccatttcaggtaatttttctcgctttaaatttctcattgtcaatacatttttagtagattgaaattctacttccgaattacatgatttttttgcgagcgtaaattttttccttgatttgttattgttgatgatgatgatgtttggtgggttttcaagaattaatcggttgaattacgatatgtttttttcttatattattgaaaaacaaattcagattttcccgcttaaatacgcaaatatgggttttgatgagaacaaattgagtacttttggtttcgttctgtgctaatttgattatcttctactggtgtcacaaaggtgtttgtgaaaaggtcgcagtgaagtgattatttgcttattttatctaattacatgtatgtatattctcttgaaatcaactcgattctgaagtatttaattattctccttttttacgataacctagccagttcgacactcg

SEQ ID NO: 102935 - DNA, 502 bp, Mimulus guttatus
  Intron number 1 from transcript mgv11b018174m (locus mgv11 b018174m.g) derived from phytozome v7.0 (chr-ID scaffold_4 8; pos 508463 to 508964)
aacaaggtcagctttcatcgacaaatcttctatctcttttctctttacttgtgtgtgtgtgtgtgttaactaatcctgtatgtatatgcccctcgaataaaatccctaattttgatggtataagaaatccctaattttaatggtatgtggacaccctaactttgatggtgtgtgaaaccctaattttgatggtgtgtaaagccctaattttgatggtgtgtgaagccctaattttgatggtatatgaaaaccctaattttgatggtgtatgaaaccctaattttgatggtgtatgaagccctaattttgatggtatctgaaaacccaaattctaatttttttttttatatatatgatttttgaacatctagtaccatgtttctttctcgggttcaatttgcaacaacaagatatcaaattctctgggaatgatgattcgattatgatttagtatttatattctttgaccgacagtgtggtgaggcaagttttgcgggaggtg

SEQ ID NO: 102936 - DNA, 509 bp, Mimulus guttatus
  Intron number 1 from transcript mgv1a012731m (locus mgv1a0 12731m.g) derived from phytozome v7.0 (chr-ID scaffold_44; pos 1236941 to 1237449 reverse strand)
ccaacaccctgtaagtttttattttttgttcttcgtgtaattctttgtggggacccttttgatttttgtccttcttctgtgaacttttgggtttatctctttccccaataaataattctaacctgattcattgtatgttggtggattaaccaaaaccaaaaaaaacattttagcttgtttgattgtgcgttggtggatttatatgtgaattgttgtatgagaaagcatccacagtttaacatctaacttatttctgccttgattaaaatattctctcagtcatcacaactttttttatgaattacgcaacctctttcaagttgtcttaaccaatttttttaaccttaaagtgactggaacttgtcacatagttactcatggcctcaacacttcaattttccttaaaaggtgggaaatatgatttagatttagattttaatgtttttttggttctttctgttgtgtgttctgtgttttcttgaacagggcttcggattattcaagggaat

SEQ ID NO: 102937 - DNA, 943 bp, Mimulus guttatus
  Intron number 1 from transcript mgv1a013922m (locus mgv1a0 13922m.g) derived from phytozome v7.0 (chr-ID scaffold_26; pos 716494 to 717436)
gccccttcgaagattctgtggcgaacgattcgtgggtacggttttttattctccgtctcaattcattttttccttgattttttcgatacttgttggatcgtggtttgaaattgaaatgttgattgggaatctctcactttgtatgtatcgatagtgtatatgaacacctgtgcgtaaataacaatcgttcatttgatttgaatgtgtaaaatttgttttgcccaatctgataattagaaatgtgtgttattgagagtagattaatttgatacttagtgtgtgtactgctatgctgttgggttatattccactttgtatagtgggagtaagtatcgaactttgtgatttagtttttatcaatttctgtcactttttttgctcttgatcaacaaaactgcaattttctcgtttgtattgtgtgggtcggttaacttgaaatagcgtaaatatttttttttgacaatattgggcaatgagagtgttcgttgaagtaggccagagaactatggtttgaaggccagcattttgtttttaatcctttaaaaaaatatttaaaattttaaaaaatcagcatataggaagccgatataacgaaattttggttactttttttaatttctagcaagtctgtttcgtttcttagttaatgcgttgtttgaattagagtagactattttgaattgctacggaaaaacaatgtgtttggctaaatgtagaagcaacacaaaatgctaccaaacattgccttaacattcttggtatatagtatgtgttttttacgcctcgcgtgattgatataagtgttttgagggcagattatttctgtgaaactagtttaaatgaatggttctcttttgaagtaataagaaattacgatggtgttaattcgtgtgcattttattcttcatattttcttacattatatcacgacttatattgtagt

SEQ ID NO: 102938 - DNA, 497 bp, Mimulus guttatus
  Intron number 3 from transcript mgv1a013471m (locus mgv1a0 13471m.g) derived from phytozome v7.0 (chr-ID scaffold_64; pos 187731 to 188227)
gccagaggcaaataatgtgagtttttcttgttgcttttgctatgaaatctgggctatggaatatgttagaagatgctcaaacaagagttaccaaatgtgattttttgaggataaataatttcatacattcggatatcggcattggcagatgagtaaaaaagagcaggagagaacatgaatcttaaaatgtaaaagtagaagacatttgcaattcaaatttttacgtttgatccacaaaccaactatttcttgcccctatgcatgagtaaatgctggatttctgcattatttgaatgtacaaagatgcatgctctgcttttaatcaagatatcctctatttacatatttttcctttttttttttttttttttttttttttttttcgttcttgtttatataaccggccgtatatatttgtttgtgggagacttcaatttggaatttttttatatgatcgatcatatgtcgaaactgatgttgaactttgtggagcagtt

SEQ ID NO: 102939 - DNA, 474 bp, Mimulus guttatus
  Intron number 1 from transcript mgv1a023039m (locus mgv1a0 23039m.g) derived from phytozome v7.0 (chr-ID scaffold_8; pos 843777 to 844250 reverse strand)
tagtgtgattgagtgcagagacgctgctcgccgtaagttagaacctcgataaattaataacctcgcttaaataatagtttcttctgtcccgactcggtaaaaactctactaaattattagtttgataatttaatatttcgttgagttaatagaattttgctagtcccgactctattaatttatagagatttaagtgatttagtatagccataaattattcattttgaaaagcaaaaaaaaacatttttaatatctagctagaaaataaatatatgaactcaaaataaacaataatattacttaaaaatgtaaatcaacataggtttttttttttttaaatatctttatagtaatagtgaatttgaaaaaacattgttttactatatgataaataaatttgacatgttcctaacaaaactataaattgaacttcctccagagctgccaagaagtgcaagatacgccatcgttttg

SEQ ID NO: 102940 - DNA, 449 bp, Mimulus guttatus
  Intron number 1 from transcript mgv1a015453m (locus mgv1a0 15453m.g) derived from phytozome v7.0 (chr-ID scaffold_104 ; pos 734469 to 734917)
aaggatacccgtgagaaaaaaataatgttttcgttcttccattttcacaaattcaattagtttttttgaaattggtgtttgaagatctaagattttgaatctgaattttattggattaattagttcgtattctacacgaatttatcccttttccatgtgtatgttttttttcagctgaggtgaatttggtcgctttttttgaaattgtatttcagttgctagggttctcaatcagcgagatttgtgaacccggtaaatttaaaggattagctgattagggatagtattatagctcgactgtttttgttttattacattgttgttgaatgtatgatcggatgatttatatggtgcaccatgttctaaacttttttcccccctattatttcgattgactgttctgattttttttgttcttcattccctattatgcaggggtgcacttctgg

SEQ ID NO: 102941 - DNA, 731 bp, Mimulus guttatus
  Intron number 2 from transcript mgv1a015453m (locus mgv1a0 15453m.g) derived from phytozome v7.0 (chr-ID scaffold_104 ; pos 734921 to 735651)
ggaatctcatgtaagtagaattcttcgactttctctggatatattgaattaatatgcagagtattagatataatttaataaagagtggtaatactgtattatgataagctaatttatcctgagttgttgaaattactcgttagttgtagagctttattatgaacatgtacttgttttgcacagttgtagatctttattaaggcaagaaaacgaaccaaactatgtgatactgacactgagattgattttcaagaattgagtcaatcgagcatagttcttgaatcatgacaaacattgcttgaacgctttgtttctttgataagatttgaagcatggtgttagcactttgagttaaaaacataactgagtatgtatagaaaaattacgatattttagctcaattttggacttggtttgaagtgaatccactggcatatacatgaatgatacttaacgtttcacctttctatttgcttggttcttccttttgttgtaaacttattctcatacgtttttttctcttattttctatgttaaatagagttttctctgtttattgaggtttttttgggttatgatttgatgatttcttattggacattatggcttagcatggttttgatggtgtaacactttgagtttttatgatgctgaggttgccatcaattgatttcttgttttctttaattaatttagacaaacaaagatccacaacataggggcaacagttg

SEQ ID NO: 102942 - DNA, 800 bp, Mimulus guttatus; identical to SEQ ID NO: 101362
  Intron number 1 from transcript mgv1a016715m (locus mgv1a0 16712m.g) derived from phytozome v7.0 (chr-ID scaffold_8; pos 1403508 to 1404307)

SEQ ID NO: 102943 - DNA, 518 bp, Mimulus guttatus
  Intron number 2 from transcript mgv1a014796m (locus mgv1a0 14796m.g) derived from phytozome v7.0 (chr-ID scaffold_198 ; pos 143492 to 144009 reverse strand)
ggtcgcggatcttacatccccacaaaggtaatatttgaagctcttattcaagcacgtggtaattttgatttcgtagcatgttattcaatttccggagcaataatttggcacttgtcaacaatatacactcgggctttagtaaagatttcttgttctcattgtgcttgacatgtaagcatatatcatttccgaaaactctctcagtaaccacatgaaacaaagatggctattatttcgtgattattttttctttgccagttttcatttcgagatgtgttgaaattctgtaaatcgagttgttttctgagttgagtgcaaaaacctatacggacttgtctaaaagctggatttttttttcattcaatcggaatttttggaaatgttattgttactaagatatagtaatattgcggtggaagtttctgttaatgtacatgtggaaatacacataaatagagtctactgcatctatattcgtatctaatgtaatggtatcaactttcagtctgctggagaag

SEQ ID NO: 102944 - DNA, 623 bp, Mimulus guttatus
  Intron number 1 from transcript mgv1a014796m (locus mgv1a0 14796m.g) derived from phytozome v7.0 (chr-ID scaffold_198 ; pos 144212 to 144834 reverse strand)
gatctcattgcgcttcaaatcccaccgaacaacaggtttccctctctctatctcacgaaattatttactgattctcgagaaccagtagaatgtttcttcagatgaaataaaatgaattaaaattaatttaatttgcaccgtaatttcgggtttagcaagcttttccctttttaattaggagttttttttcttcttctttgtttcagtatgattagagattcgagttacttcatggggtaatgtggataaattaattgaacaagtgtttgattgtagaagaaacaaattctgctgttattttttgcatttccatctcagttatattagtaattgtttagtgagtttgcatctcatttttgtttagctcagttctacttttgcagctataattatgttttaggaaaaatattttccgtttcttattcaatatcgtagtcggtcttgatctttatctgacttttttgtagcaaaattctgcccggaattttattggtgaattatagtcttattgatgtttgatccctcgtttacgtactgaaattgttgtcttgagttgatttgaaactcaacggttggtttttattgcagcgtgttaatttctcggacgttactcttcgctctca

SEQ ID NO: 102945 - DNA, 940 bp, Mimulus guttatus
  Intron number 1 from transcript mgv1a001362m (locus mgv1a0 01362m.g) derived from phytozome v7.0 (chr-ID scaffold_4; pos 4006472 to 4007411)
cccaaacgaggcggttaatcgtctcctctgtcaaggtttttttctttttgaaaccctaatgatttcattgtttaattttttggtgggattgttgttttcctttagggttttttctgtgaattatatgcattacttgcgtcttagttgctaagggaaccaatgaacacgaattaataactgggacattctgttttcaattgtatgaccctgtaatttttattttccttgctcccatattccagagcttttcatgaatctcgatatgaaaggaaactcttaacaaagtgttccatctttccgtttctggttaggtaatttagaagcagtggaactggtatttttcatattttcgctcatctgacttcgtaaagaaaaaacattacctgaacattgaggtctgttccccgagataagtaggttcaattcttgcaacaatggggtagtttttagctttgtcgggagatggtgcagtgaaatatctttcttgctttccaaagctttggtttttaaacggatcttgctggagtgcaagatttagttttgcacactgtgatggaatcacgcaacagtcatgtttctgtatgccttgattgcataattgcttgacatctctcgacttttatcttcgacaatgcagatagtgcccaactttgattttttaagtttttgacgatagctgatttccctgatatcactgctttcgtggctggatatgttttggttgtttgcactttgcagcagatgtactttatggaccttctaaccactgtttggagcttcttctgctattccatcaaataattcaacttgtgtattaaaatttacgttttaaactaatggatgtagctgccgttggattgttttaaagttgaaattgctttgtatttttaaacaattaaacttattatctgatttctttactattgttcagatcctttcc

SEQ ID NO: 102946 - DNA, 573 bp, Mimulus guttatus
  Intron number 1 from transcript mgv1a018105m (locus mgv1a0 18105m.g) derived from phytozome v7.0 (chr-ID scaffold_45; pos 1576642 to 1577214 reverse strand)
ctttgctcccttctgcattttctactcacaaagaggtaattttatcaaatccctttaatcccctaattaattaataatgtttagagtaaattacagccacccctgaggtaatgttaaattacgaaaaagaccccatcatgtttttggtcttatacgtccacttttacgttgtcaaatttagtggaatattcttcagtttgtatacctattttactccattcgagatccatattttgaaacaagttgatcataaaatgtgtcttttgacttgtgaatatcagattgcggtacattataaactattttttctttttgcacaaaacgaatacattccacgtaatttaaaagattctgttgaatttgacaccataaggatggatgtgttagaaatttatagttgaagagagtagttgtaattatccaaacatgagggtttttttccgtaatttgaccttacatcggggtggtcgtaattttaccctaatatttaattgtgtttttcaaaattatattttttttcaattttttttttctgcagggaaaatccagtgcatctttgaaggattcttgctt

SEQ ID NO: 102947 - DNA, 965 bp, Mimulus guttatus
  Intron number 3 from transcript mgv1a020754m (locus mgv1a0 20754m.g) derived from phytozome v7.0 (chr-ID scaffold_126 ; pos 806308 to 807272)
agatattgcagaagttggtcccaaattgcaacaaggtacgcaacaaatcttttaattcgtatcaaagatatatatatatatatatatatatatatatatatatatatatatatatatatataggggcagacccatgtgtaagcttgggggctccctctccagcagaattatttttttaccaattttctgctctttttcaaaatttgatttggtatttatcgatttgttatatgtatattaaaataaacaaaaatatttattattatggatttaaaattctaaacatcacagtcttgcatgtgcagatgctgtttaaactttaatgtattaggtcgtacgtagaaaaatcaaaaaacgaattaaacaattaattgaaatatgtgggccaaattctctagactagaatgattaattaattaattccaagtctattctactatataatccaagataatgttgccaaaattctttcaataattcaatgtaataatatatataggggcggaaccagggattgttcggtaggggggcgaaaatttgagagaggtaatgaaaatatggcggaggttcgggggtagcaccctcaaaatattttagggatatttacgaagaaaaaaaaaaaaagtaatgagttatagatattgttgtcaaaacaatattcataaacttgtataaaataaattgtaatatagtatacatttagttgaataagtaaaagtttttaaaaaaaatcaaaatcttgaaatacattgaaaactttaaatattgagaagcggaagaaaaaaaaatactttcttgattatgtcattttttttttatcatacgttgtagagattagggattgagactgtgaaaatatttgtttatattctaataatttaatttaattatataaaaataataattataaaaaggagcaatttgttaattctatttgttgcagatagatagagcttcaatattgg

SEQ ID NO: 102948 - DNA, 602 bp, Mimulus guttatus
  Intron number 2 from transcript mgv1a004236m (locus mgv1a0 04236m.g) derived from phytozome v7.0 (chr-ID scaffold_126 ; pos 483415 to 484016)
cagtctctcctcggcaaagccgttgtcggaaactggtatttctctttaattttggtttattagggttttctaatttcagaggaattttataatgttgaaaatcatatattacagcagttagattcatcaattgaagcagcaaatgttgtggtttcctattttagtatgttagtttatagaagataatgattcgacattgtttatgctattattattgaatctaattgagcttagcgtggatgtgttgctttattcgttagatttatcttcacagaaaatggtttcggtgcagagtgaacgtattctacaatttgcagcagtgttgattaattatgatttttgattatacattgttgactaaacttgtcaattttgattagcgtgatttaattataccgaaacggcatttcaatcatcgaaattgttttgtctgcacatgcatcgagtatgcctccaccagtcttgttatgtatacttatgtacagtgatcattcatgtggatattaaaattgaaaactcgtttctactcatgtaatagcattgaatcacgacgttttttttatttaggtgggttggattaatcgggcaatttcgtccgaaga

SEQ ID NO: 102949 - DNA, 1057 bp, Mimulus guttatus
  Intron number 1 from transcript mgv1a021476m (locus mgv1a0 21476m.g) derived from phytozome v7.0 (chr-ID scaffold_112 ; pos 10675 to 11731)
aaagttgagattcaaaattcacatcatcttcacaagtaattaacttcgttactgtttaattacaaagacgagattcttacacacgacttagatgcatgcccgaaacacaaatcaaagaaacaaactacgcagccggcgacaccgacgaatagagaaccaccacctccgccgcctccgccaccggtgccgccattattcgaccatcaccaagtccatcaccccggttcttgaaatccagggactcgtcgttgaatatgtcccaccatctcgccaccaacatcttgatatccgctcgatccatgttctcttcttttccggtgtatctccacggtttcgaccctcccacacaataatggaccactttgaccttatccagatccaccatctccgggtgccgccacatcatcgccaccaacatattgtatataggaagtagcggcttcgccacctccctaaagaacatgttcagaaaatcctacaaaaatcaagaaaaactagttatatatagcaaaccaaacaaataaatggcctcaaattaaaatgccatttgattaatgcgaacacacgggcgctatccgtttttataattgcatttaatttaaactgcgtttcaatttcccggagatcaataaaataaataagaaatatggcatttttacctgctccgcaaaaggtgttggaggagtgacatcgagagttcgtagtaattcatcgtacgtgtttaggttcggctcgaacatgaacatgcccccattgaaatagaaggtgggctccggtccgagttctttgggccatcggatcttttgggggcaaggtgggccgtacatctcgcataggcagtcgactactccgtagaaggaaccgtttggcaagtcgaagaaatggattctctgtttcggaattagaaacatcgtattgtgttagatagatcgtaaattactcgattggtgcacgcgcattcgggatttttaatactaataaatattctccgacgacgaatctaaaaagtcacggtatcaaatttgcagaggctacacctaaatctgtattgaggcta

SEQ ID NO: 102950 - DNA, 728 bp, Mimulus guttatus
  Intron number 1 from transcript mgv1a012109m (locus mgv1a0 12109m.g) derived from phytozome v7.0 (chr-ID scaffold_13; pos 2201088 to 2201815 reverse strand)
tgttcctggaggagtattgtctgtccctaattaaggtattctctaaaacctaattttatttaatggaatcgctatttgctgactttatacactgttgttcttcatcattggattttggatctgaattgtgttggcatgtgttatgttttttattcaactcttttcgctggatttagattgaggtgtgtctgtagcatatgcgatcgacgaaattgttcagttgttccaaaagtctctctttttcttaattaaatttgtattttttttttttttctttttttgaggattggaattggattggtcttcaatcggatctggacttggttttatgtgatctaactttgtttttcgaatccgggtcacagttgaaagaaatcacgattggtagatagatatatttggttcattggtgagaaaatttagggcaaaatttagtttcttaaatcagaaactaaattctgcataccaaaattctcttcattggatactaaacattgttgaaaaacatcgtcctctaatctctgcctgttggacaatttggctgtatcaagtcttgcccttgttaaagaagggcagtaatgtaaattaatattttttggaaattttatttcactatttgtttttgctgagtaatacagattaagaaacatgtgaattttataaagaatattcagttagattttgcggtttcaggtgtattggaagagtaataaagaataagagaggaa

SEQ ID NO: 102951 - DNA, 580 bp, Mimulus guttatus
  Intron number 1 from transcript mgv1a008287m (locus mgv1a0 08287m.g) derived from phytozome v7.0 (chr-ID scaffold_17; pos 1810674 to 1811253)
ccgtaaacccaaagctacctcgcccaaatttggaggtgcgcttcgattattttcccccctttttttaactgttacggtattttatgtactcgtttgtaatttctcgattgaattcggaatctggtgtaatcgtagattttagtagataattcttctgattaaatagtttcaggatttcgatttcgaggttttagctaatccgcgcacaacaattgtgtttctgtttggttttaatttcctctgcatttgattagcatccattactgtattcaatttcattcgcatgatctgtttttttttttctcttgaagagtgagtgattaaatcccttcaactaatgctgatgagttgacttcaattttatcaggcgatttatataacattttttgtcattgaaaatggttgaattctttatttgtagtgttgggtgaagtattgtgtttcatttgatcataacattgaaccataattgaaaaaatggcgtaatatcagcataaaggttattggatttatcggatcaaaaattaaaaaaatatatgtttcagggatattcaagaaaattctattcgtttgctttgtg

SEQ ID NO: 102952 - DNA, 686 bp, Mimulus guttatus
  Intron number 2 from transcript mgv1a013628m (locus mgv1a0 13628m.g) derived from phytozome v7.0 (chr-ID scaffold_58; pos 554041 to 554726)
ggcgccgctcaaggtttttttcttttttttttctctgatttttgctctgaatttattgatttttttggttctgagtttattgattttgatgctaaaaaggttaatcttttgattgattatctaatagaacggaaaatattgaaatgtttggtgaatgataaacaaattcgaatgtacgcaaatgatttctcatgttgctagctatttgttattgctcatgaactccacttcttttagctgtgttgccattgccaatggttagcatctattatgtgcaggagtgcgtttaagctgaggatcgagtctcgattttgtttatttttggctaatctagagagagagaccatatagttagaaattttacccataaatatttgtcatctagttaattttaccaataaaagtgacaccatatgacttactggaatattttttttaattattttgaaagatagacggcgaataatgtaaatctgagaggtaaaaaaaggcatgcaaaagaataaccattatcaacaacgggttctttaactggcaaggactcgaagaagatagatagatagaatgcagtatatttgttacattttagtttgtagaaagttctacatttgagtgatctatttacttttcccctttttttttctcgaatagaccctgctagtgctgctgcttctgcggccagcaag

SEQ ID NO: 102953 - DNA, 995 bp, Mimulus guttatus
  Intron number 1 from transcript mgv1a007032m (locus mgv1a0 04138m.g) derived from phytozome v7.0 (chr-ID scaffold_242 ; pos 91277 to 92271)
ctcgtctactcatcccgtaggtaaaccaccggattaaaaaaacccccaaatcaatcacgactttctgtcaaattaaatattcaattgttgtagccctagaatatatagagagagaggagtgggattgttgtgcataggggttttttatagaacagtaatagatagatacagatagatacagatagtttatatacatagatgttggtacaaaaacaaccgttgatgagagcgctgaggcggagccagacttctttggggtcgaataattcaacagggtctccttcctcgccttcatcatcttcttcgtggattcatttgagatcggttttgtttattgttgcttcttcatcatcctctccagttacctctgatcggttagttcctctatttccactctatttctttcttcttcaaagctttcggtttttggtcattttttttaaccctaaccccttgattcaagcttaaatcaaaaaaaaaaaaagagaattcctgagggtttttgcttatttcacctcagatctcaatccagaagtctcttttcaatttctactagtgtaaccaaagcccaaaaaaaaaaaggatattcctcgcaacatccctatgaagtttaggtgtgaagtgagggtttcggaaggtttggagtgagccgagggaggtgtagtgtgattcttttccctatattctgatcagaaagtttgtgagttttgggatttcatcaaagatatctggaaggagactattgaattctatcactgtggatgaaaatgctctaagtaggatggggcaaagacgaggccttttgtttgtttcctttgatttagagctcgaatggttaattatcttgactcaatgtttttgccagtatcgttctagggagaggagtgcatattgttattgtgaaagctgcatttcattcagttatggttattattgttcttttggtggaaagttatatgtctttgtgttgattgcaggggaagcctcaaatctcc

SEQ ID NO: 102954 - DNA, 988 bp, Mimulus guttatus
  Intron number 1 from transcript mgv1a011332m (locus mgv1a0 11332m.g) derived from phytozome v7.0 (chr-ID scaffold_129 ; pos 571496 to 572483)
aaggtccgtacattttttttttttatttttaatttttttatattaatttttgtttttgattttacatttgtaattgggcgattctttagagttatcatgtatggatgttaattttttgagttgaccttgaactgaatttcactatttgggggttagggttacaaggatgtaaaagaattaattacagtaaaacatcgataaattaataacctcgcttaaataataatttcttacggtcccgactccggactcctcggtaaaattgtactaaattattagctcgataatttaatatttcgctaaattaatagaattttgtctgtacgagtcttagtttatagaggttcaactgtatgtggtaatcttgcaaagtaaaatcatatgaagtttagacactcggtcaatggtttgaatgaaatattcttataggctaattcgcagtgtattttgtcgaatcttgctatttatatctcgattctgaagtgaattcggcatgattatttcatggctaagtgttgtttaactttagtcttttcggagtaatgaatgtatctcgttcatgctgtctctatacgcgtttgaattataataaagtctttacgggtttatttagtcgaaaaaaaaaaaagaaaatcgtatggtaatattttgctgtagtgttagtggcatgattgtatcgatgcactcactagtatactggtttctgttatcgatatataagtctagatatacaaaatgcaaagtgaaacagaaaaagacgagaactaatacgagtcgttgcaaaaagagtgaatgactaacaaatcttcaaaaacggactcgaaactgtttcttgatcgaatacatgtatttgtcacgatttttaatgccaaatagcaaaagccatttatgtatgtgtgtgtgtgtgtgtgtgtgtgtgtgtgtgtgtgtgtgtgtgtatctgtaatttgttttaatttatttttattattattattcaggaaaaagc

SEQ ID NO: 102955 - DNA, 877 bp, Mimulus guttatus
  Intron number 1 from transcript mgv1a010088m (locus mgv1a0 10088m.g) derived from phytozome v7.0 (chr-ID scaffold_108 ; pos 283901 to 284777 reverse strand)
gtattatcagagacactgatttgtggtatgttttgcttctgcgttcatccatttactcaattcaattgaagttaatcagattcttactgctttacaattgaatttaagcttgtctattgatattaggttatttgatttgagtttttacatgtgtggattatgatgtattatctgatttcgaattatttgatttcaattcgatacgcgtaagtgtcaaattctaataaggggtatgattcttcactaattttgtaggattgatgttttaatgaatctatagagtccgctttccggagagtgtagagtttggagatggagatgtagttctcgagattttgtttgcattggcttatagtagttgtcacttgctatattattcgtaaaataacttacgagtttaaacttatacgtcgaaggtcatctcttgcttatactatatatcttaactgctatttctttcgggtttatcatagtgttcttcactgtcgtctgagcatatttctttatcgtatcaccctgcggtttgatgttgacagtccaatttattcgtatatatgctatgaggatttctgtattgtgatcgatgaaaggttaggttttgataaatgtttaggtaaagaaaaacctttactgcaaacccaaatctactttaggtgttccggcacgcgcacacacacacaaacatttatatgtatatatgcacgtaagaaactttatatctccaatatgccaagataccgcactaatcgtatttgtgtacttattgaaacaagttgaccccatgcttttgtttatgtaataatatgtgcgatgggcccaatgcctttgtttgattacttcggtttttttgcaggaataaacgtcctgagtttactgc

SEQ ID NO: 102956 - DNA, 657 bp, Mimulus guttatus
  Intron number 1 from transcript mgv1a012832m (locus mgv1a0 12832m.g) derived from phytozome v7.0 (chr-ID scaffold_1; pos 3026838 to 3027494)
accgctttgaggtattttgaggttcctcgaatcaggtatggattattcccccttcttctgtattcctttttcaatttcatttccttgattaggatttaatcagaaaaagaaaaccttttgggacgagtaaactattgcttaaatccttattatttgttgtggtaattgggctgattgtacattttagtgtgcttttctatcaatagaaaaccaaaatctgattattattcaatcaattctgtaaaagaaacctaaattcttgatttccggtcagaatgttttcgtttgtttttcttgcttgtcggattcagtttgacaactagtttgaggcattgtatggcatgtcttgctcgtttcatcagataggtgcattcagaagtcgaagcactgatcatgttatgatcgaaaccgtgaccataatcttgggattccattgccaaagcagaaagcacaaatgtttctagcttatctttccttgcatatcttacattcgtgacacctatgagctgtgatggttgaccttattagcatgataataacgtcgtacattttgaacagactgaatcactcaatacttcattagttcatattcagctaatttgcaagctatttatttaattggcctttcattttttgtgtagcttttaggattgtgtg

SEQ ID NO: 102957 - DNA, 933 bp, Mimulus guttatus
  Intron number 2 from transcript mgv1a013608m (locus mgv1a0 13608m.g) derived from phytozome v7.0 (chr-ID scaffold_75; pos 584123 to 585055 reverse strand)
aaggtattctaatttctttctgcaatctctctctctctctctctctctctctctctctctctctctcttgtttgtgtgtgtctgtgtgtgagagaaataaattggcagcaagaattgatttttatggtaaatctcataaatctatagttccaatttgagtttttaataaatacatgaagtaaagatttgatttttatggttaattacatgctgaatataacaagcacaaccttaaaattaaggtattctaattttctctcttgtttgtgtgtgagagagaaacaaattgccagcaagaattgatttttatggttaataaatctcataaatctacagttccaattggagtttcaatgaataaatgaagtaaagatttgatttttatggttaattacatgctgaatataacaagggcaaccttaaaattaaggtattgtaattatctctctcttgtttgtgtgtgagagataaacaaattgccaacaataattacttatccgagcttaaatgaaaaaaagaagatttgatttttatggttaaatctcataaatctatagttccaatttgagtttcaatgaataaatgaaaaaaagatttgatttttatggttaattacatgctgaatataacaagggcaaccttaaaattaaggtattgtaattatctctctcttgtttgtgtgtgagagataaacaaattgccaacaataattacttatccgagcttaaatgaaaaaaaaaaagatttgatttttatggttaaatctcataaatctatagttccaatttgagtttcaatgaataaatgaaaaaaagatttgatttttatggttacttacatgctgttccgattttagtttcaataaataaatgaaaaaaatatttgatttttatggttaattacatgctgaatatatccttaaaattgacagga

SEQ ID NO: 102958 - DNA, 439 bp, Mimulus guttatus
  Intron number 1 from transcript mgv1a019087m (locus mgv1a0 19087m.g) derived from phytozome v7.0 (chr-ID scaffold_460 ; pos 12742 to 13180)
cgagggcaaaagcttccgtgttggtgacaccatcagtatgtgtttcttcaatatttttttcctattgcattataattctactttacttattccaattataataccctttcaaaatcgaaagctaaaaaaatttatgataaattacgtacatccccttgaggtaaggtaaaattaccaaaaaaaaaaaaaccttttgtttgggtaattacaaccatttctcaattatgaatcttcttacacgttcagtgtgttaaatttagtggaattttctagattcatagttgagggatggttgtaattaccaaaacatgaggggttttttcgcaatttcaccttacctcagcggctaaaaaaaaaactctatggaatttgttgttttattctctcaaaacctaatattagttatggttttttaatatttgcttttgttgcagcgttc

SEQ ID NO: 102959 - DNA, 571 bp, Mimulus guttatus
  Intron number 1 from transcript mgv1a004925m (locus mgv1a0 04925m.g) derived from phytozome v7.0 (chr-ID scaffold_81; pos 435576 to 436146 reverse strand)
ttgattttagtgatttattcagccagcaattttgtgtaagtttcttgattttatttattttattatgtgtaaatagttttcaatcagggtttttcttgatcattttgcatatgttctcatcttctgtttttgatgtatcaaagatgtgatcttgaaggttttgagtgtgtgttgatgtagttgatttttagaactgtgtttttcaacacgtgtgtgtgtgtgtgattttatttaggtttagtgtgtgtttcttgaactcataattatataaaaatcatcttcagtagaacatcgataaattaatactcgataaattaataacctcgattaaataatagtttctctcgtcccgactcggtgaaaacatgttaaactattaactcgataatttaatgattcgctaaattaatagagtttcctagtcccgactacccgtattaatttatagaggattaacttgtatggagttttgattacatattttcagaatttaaaaaatacccattttacccccataaagattgcatctttaattcttgactatgttctttgacaggcaaatcttgaaaac

SEQ ID NO: 102960 - DNA, 1020 bp, Mimulus guttatus
  Intron number 1 from transcript mgv1a009298m (locus mgv1a0 09087m.g) derived from phytozome v7.0 (chr-ID scaffold_3; pos 3820267 to 3821286)
gaagagcccaaacgagtgtatcaggtgtggaaagggaagaatgtaagctcttctttctcatatctatccacccccaaccggcaacccccccccccccaccccctttttttttttatggatgaaagatttttggtgggtttctgttaactctgttaatgtaatgtgcattttagttattatcatttttcattattgtttggtgatattatgaaatgggacttgctgggcagatctctctctctctctctctctctctctctctgatacagctaaatgactttaattcagttctaattcctggattcgtgtaactgaactttgtgtgtaattgtatacaagcttcttgaactcatttgactgtgtgtgtgtgtgtaattgtatataagcttcttgaacccatttgactgtgtgtgtgtgtgtcaattacttccaatttctgtattatctttttgcctttttcgagttcttttactctattgcctgagttatcctgccggttctttcgataacggggccgggagattgtttaagaagtgatctcttgccacaatgtatggtggcgtatccgtaaatttgtctgaattttatatcacaattccatgctcattcaagttagtttaatcttttattttgatgctacaatttgaaggaattagtgttctactgttgaatatacgagaacaacttttcatcgaacacttgtcgtaagatggtacgtttcttgatagtaaaacgtattaggtcgtttcggagtgagttgcttgtttaagctttaatacgataattttgatagtcccgtaatccgagttcaacttctattaattatattaatttttttttgttttccaataaatttttacctctaaaaaatgatacgcaacatccaatatcgaaaatcgaacctttggattagtgttcatgtgcgagcgtatgtttttgcatttcttgaaaatttacgtgtgcaattaattgtgggcttcgattttcttcgtgcagaaattcttctttggtgggaggttg

SEQ ID NO: 102961 - DNA, 1004 bp, Mimulus guttatus
  Intron number 1 from transcript mgv1a010469m (locus mgv1a0 10469m.g) derived from phytozome v7.0 (chr-ID scaffold_13; pos 2023434 to 2024437)
tgctcgaagctctggttatcgtcactccatttgaggttagtaagttcgatttcttcttcaatcttctagcaatttcgtcaatgccgttagattgctccttttttttttaattaaaagttgttgatttgttgttttaattaatgaattatcttactgtaacatcaattcagatagagattatctagttgctatgatcattttgatttttgagtatgctaaaaaatcgaggtgtgtgtggttagttaaacgaatcgatcgtgtttctgaatacgtgtcgacgaagttggactattggggattttaatttctatatgtgaggagaatcatgagtttcatcctctgtatagcatgacttgtggtaattactgtgtgtagttgtgaagacgtatattcgtaattctgataagagcattggtagtttaaacagttgtttaggtttctcaatgtgtacctggtttgaatatgtcatagacaacgatagatgagatgaatacaaacaagtgataactgagaactacaatgcaactgttgtttatccaactacaataatcgagttcaatgcgctttcgttgattatgtagcttatagagtcctggcatgattagatgtgaggtgacgaccttcttccgttgcacaaattagcgaagctttcgttgtaacctgctctccgcttcaatttgccctgcctaattctatactcaattgttgtgctcctctcattttctttattcacgaaattcgaaatgcatccattgcgcaaaatatgagcagttacagactgcaggttttctttgttatccttctgtttcagtttacagtttaatgtgtgattcctttgtggtacatatagcaaaagatctcaatctgttgtttctgtcgattggaagtactctagcacaaaatgtagttctaacttctaagtaattcctcctatagaaatataatcttaaagaacttgtgtgggagcaggtggtgaaaatcagacttcagcagcagaaaggatt

SEQ ID NO: 102962 - DNA, 926 bp, Mimulus guttatus
  Intron number 1 from transcript mgv1a009880m (locus mgv1a0 09880m.g) derived from phytozome v7.0 (chr-ID scaffold_45; pos 1426601 to 1427526 reverse strand)
aatcttccccctcgccgctccgttcacctcctcaggtccgtttgtaatttcttctactgtgtgtgtctgtgtgtttgtatgttttttttttccctttgtggatggcaatatattgcgcttaataagaacaatttcgacatttttgttgttcggattttttttttttttttaattatagtttgacggaagaaatgatcaaatttctgggaatttttgaagagactgaattttgagataatcatttttactagggtttcacgattatgcgatttacggatttgtagtgattgtagttgcggcaagtgctatgtttcgatttcgtatattgcggtagttactcgaaggatcgaccttaatcgagaacggaatgtatgttgagctaatgaaattgcagccatatgttaaaggtggccttatattggtaaccatataattaaaaatttgaaagatattgttgatatttgatactaagttagaagagctattatgaacaggtttcgtttaaccatcttgaattttgattttttttaattatttatttatagtttgactgaagaaatgagcaaatttttgaagagactgaattttgaaataatcatttttattgggtttcgcgattatgcaatttacggatagtgcgttttcgtttatcgtggttacaatgtagttactcgaaggatagacgttaatcgagtacggaatgtatgttgagctaatgaaattgcagccatatgataaaggtggccttatattggtaatcatataataaagaaatcaaaaaattattgatatccgatactaagttagaagagccattacgaacaggtttcagtttaaccatgttgatttggtgcttaattttattacaatttacggttgataacttggtacagttattgatgctcttgcaacacagcttcgggggt

SEQ ID NO: 102963 - DNA, 199 bp, Mimulus guttatus
  Intron number 1 from transcript mgv1a024244m (locus mgv1a0 24244m.g) derived from phytozome v7.0 (chr-ID scaffold_57; pos 1055488 to 1055686)
ggcgatcaggtttcgtgttcctacttttgatgtttttttttgttcattaatgttattttcaccctcttcataatattcttttagataaaaaggataacaaatttgcattaaatattttgtcatccgaattttcaaaaacaaatttgaaatttagtacaaatctttatgatgcagagtgtggagactcgtgttgtgacaa

SEQ ID NO: 102964 - DNA, 712 bp, Mimulus guttatus
  Intron number 1 from transcript mgv1a004854m (locus mgv1a0 04854m.g) derived from phytozome v7.0 (chr-ID scaffold_27; pos 1266123 to 1266834)
tctgtgtgcaaggttagctctctacacatttttttaccccctttctattcatttaatttccagttaattatatttattgcgtcataaatcagatttgaatttcacatctatattttccattattagtcaatttttaaggtgtttgtttgtgtatatgatttttgcttatgtggtgtttactgatcaacctagcataatttgagctctatcttgtcgaattagatacctgcgaacatgaatttgtttatacatcgcaatagcttgaaggttggaccataaatttgatgtttgattatgtcaacttaggagtaaaagaatgtgtgatacagtagaagctcgataaattaataatcccgattaattaatagtttcttccggttcttggctaggtaaaatcgtactaaattttgccatattcgtatacacttgtcaccgataaaaatcataaatgataaagtacgacagctaataagaaattaatgtagtggttgaggctttagtaatatacatacaatttgctgaaacagggcatgtgccaaactttaattcttgcaatgaaaatagaaaatgagagtttttttttttaattaatcagaagttgatggctaagagattattagtcaatcaccacatttgaaattgcagaagcttggatttatttcaaatataatgaagttatttcaaatgtatggcaatttcacaggaaggatac

SEQ ID NO: 102965 - DNA, 977 bp, Mimulus guttatus
  Intron number 1 from transcript mgv1a015215m (locus mgv1a0 15215m.g) derived from phytozome v7.0 (chr-ID scaffold_124 ; pos 794067 to 795043 reverse strand)
cggctgcggttccgccatcgcctcctcctctgttggtgcgtatgttacagttagatcaatattttttcgatatcgtaaaactatggcgtatggatttcgatttatgtaatttgatttgtatctaattgtttaatgttgttttgtttgagttgatttggggtgaacggtatttgtttctgggtaaatttcattgtgagaacattagtgagctggaaatttggtttaatcaatacttagaatcgaaagttcgatagtatattactggtcgaattcattgatatttacgtggcacaagtgaatttcagttcggcgaattacaactgcttctggatgaactttagttctttgattgtgaagctgctacttctgaatgatagggttgtgacttgtgattttgtcggtttagtagcattttagcatatacctcaaattctttccgatagcatgaattgcatagattagtcggtccttggtctagatagtacatcggtattcgctggatagttatatgatccacatgaaattgattttgcgtttgtttaggctttatcacgaccatcgattatctgtcccactccacgttagtgtttatccagaaacgcgcgcgggggggggggtggggtatttcgtgcctgattgtttcttatataccttggtatttaatcctctataagttgataatttttattatgtttaccaagttttatcagttgactttgtcctatggaaatgataattggtatggaaatgataattggaataggatatataaatatctcgatcatggtatcatatatatggcaaggaataagatgatcacactatgcttaatgcattctagaggcatgaattttgagtactaagatcgagatttttttttttaacttttatcttattcttggctttgctgctattacttggtcactccaacgaactattgctaagaatttttttttggccccattttcagccaccga

SEQ ID NO: 102966 - DNA, 936 bp, Mimulus guttatus
  Intron number 1 from transcript mgv1a011513m (locus mgv1a0 11513m.g) derived from phytozome v7.0 (chr-ID scaffold_270 ; pos 169803 to 170738)
tcaccctctattccactcccactccccctccagaggtctgttttaaatgaacttactttcaactatctctcatgagatggattactgtaaattaatttctttttcccatttttggtttacctctctaattcaatgttattttattaattgcttgtctgacgttctatctttagaccttcttctagcttgatcattatgacactgtattggaaccaaaataaatagatgaccttgggtgtgagttatgacattgtactatatatggaaccaatatagatagatgaagatgaccttgggggtgagttacgacactgtataaactagctatgtaatgcatatgattcgtgaattaaattgagacatttcacaatgtttggcagagacaacacatttcaatgtttatcagtagtttatagattcaggtatcaagcatgttgacatgattggctaattgtgttctcaacttagcttagataatctaacctaaccaagagatggacaacagattagggaacaccattcaagtgccaacgtgcacctacaccagaggagaagtaagaaagaaatcaagctaaagttcggatgaaaacaattcattagggtccaaactggttttgttttggtcccgtagatgctggtgcgggttcttttcaaatcggtagggaggtctgtgctcctgtttcattgtcatttcaaagttagctctcttgtgcacaaattcaccatacgatacactcgcatgcagttttaaggcatgccttatgagataaagttatctatgcaaacacttgagttggaaatgaatttcacatttgttgcgtttctaaacaaattcacatttgttgctcattaatgatcttctctttttaatgtccgtgtgatgattttctcactgttgcaggttttggttctggttctggtccaatatcaccaaag

SEQ ID NO: 102967 - DNA, 622 bp, Mimulus guttatus
  Intron number 3 from transcript mgv1a018175m (locus mgv1a0 18175m.g) derived from phytozome v7.0 (chr-ID scaffold_1; pos 868900 to 869521)
gttgcactttcaggtatataataacaaaagatcccaaataataacaattataataaatgtcagcttcagtttttgaataccgtttcgactttaaacgtgattttgactatttttcggtcttaatttgaaaagacacgaaatttatagttctttaagttagtaatttaattaattagttcaacttgaatcatcaagattggatgtcggctaagaacgatatgcatgaatgcgtccataactataatcttttgagttatttaaaattcataatgcaatttgttaccagacatccaatctaactgactcaagttggattagaaagctgactcaatgagctgtaacttccgtgctttgaattttgccagaatcaaactagaaaatggtcaaaatcacgtttgaagtcaaaacgatattagtaaagctgactcaagttggatggattagaaagatgaatcaaagaactacaacttccgtgttttgaatttttccagaatcagactagaaaatggtcaaaatcacgtttgaagtcaaaacggatattaataaaattgaaacgacagttaacatttcagtttcttaaatttaaatatggaacaggtgctcacacaatagggcaagcgag

SEQ ID NO: 102968 - DNA, 709 bp, Mimulus guttatus
  Intron number 2 from transcript mgv1a016950m (locus mgv1a0 16950m.g) derived from phytozome v7.0 (chr-ID scaffold_12; pos 499793 to 500501 reverse strand)
aggtggtgtcgagccgattcccaaaataacactaggtaaattcaatttatttttgaaattacttttttaatttgtcgtgtttgataattatatttcgattccgattgtagttgtttgaacactaaattgaattacagtgttgtactggattttgattgttgatgattggtagcattaaaagttcagttgaaccactttttatgtgtatacactatccagttaattctcttcataagaatcgaccatagttttaatttcaatttctccagttaattctcttcacaagttttaatttgtagctgtttaagatgttggtttgctgctgtttttgttgctgtcattttttctctatatccataaataaactatatgatggttaataaaatagaagtgacaactagtcgaattgttgaatgaggtattatatatatatatgagattttcaatatacttttgaggctccttcatgttttcgatcactatttgagtatttgttattacacttttgttgtaattttttagtggattaacctatttcgtagtggcttatgttaatattctagtggatttcgagaatttttgtatgggttttgacgagattatagtggattttaaattcttgctttggagaccgatttttagtgaatgaattaaattgacacgttgttgtcttatttttctttgatttaggttcttgcacaagcgggtg

SEQ ID NO: 102969 - DNA, 679 bp, Mimulus guttatus
  Intron number 2 from transcript mgv1a015337m (locus mgv1a0 15337m.g) derived from phytozome v7.0 (chr-ID scaffold_59; pos 1129037 to 1129715 reverse strand)
tgaagcacgagcggatagaaacgacagtggcgaaggtaattaattttaattttgtttctaatttttttttttagctctgaaaaattctgggttgtaatgctttgatttatctttgttcttttaagtatgtgtttgtgtcacgtattaagtaggcaaattgatttgcgtgaatttgtatatggaaattatacggaatcttcgaagaaatcattctctgagactaaacctagaaaataattgttcttgtctgggtatgaaatgtggttgaaaatgaaaaaggttgtgtttttagtgttcaaatttaaagtaaatgggaaaatgcactacttttttcctcgtcgtttcagctttcttgcaaattttatgaaacatcgatatgggtaattgaacaaattactgaaacaatttttttttagttttctactcagtatttcctcttccaatgaagtctatagtaacatgaatttcttagtattattacatctcttattaaagaacacatgtatatggaagttttttgcgttcgttttaatgtttttgtattaggagattttattttttcttctgatgcggggtcgaactttccgctttgtaataaatattaaacactgatatttttctgaattatttcctgtaataattcttaaaggcaaaggaagttcgtcggcttgctgataat

SEQ ID NO: 102970 - DNA, 673 bp, Mimulus guttatus
  Intron number 2 from transcript mgv1a005304m (locus mgv1a0 05304m.g) derived from phytozome v7.0 (chr-ID scaffold_161 ; pos 119278 to 119950)
tcgcctggagatatcgcgtttaaggtattattatgcatatcgatttcgtttgttaaagttagtagtatacactatcttgttatttagggaataattttgtgcaaattcttaacatgttatcgtaatatggttgatttcgcatgaaaatactacggtgcgtttggattaaaggatttgaatcaatgggtttgaaaataaaaaaaaatgagagctaaggatttctaatctattgtcaagcgactcaatccaaacaagctgaatggattttgttgttatggatttgaaaatctctccctcatattgctcatccaagtgcacccttataagtggttcggatatcttttggcattttgtacgaaggtgaaatgattgtgccatgtaattcccctttttgattctccaaataaaatatcggcttttttcgtactatgtcagtaattctttattaatttacattttctttgtcttggacctttgatgtcttgaagaaaaaaagtctcgcatgttgttgtgtatctctcttcttagatttttttatttatttataaattatgtgatctgtatcaacatcatttatcgttcctaattttggaagttcttggttgcatggttgattctcaaagttggcctttaatatttaatttcattttccagtcgaacttcgcaactctag

SEQ ID NO: 102971 - DNA, 1026 bp, Mimulus guttatus
  Intron number 2 from transcript mgv1a002499m (locus mgv1a0 02499m.g) derived from phytozome v7.0 (chr-ID scaffold_1; pos 2115743 to 2116768)
ccgggaaatattctgttgatttcagtttcttcaaggtaactttcgatacatataactttttttggggaaacaacttttggtatattagatcaattaatttatgcaggttttctgatgaggtgtgaattttgcaatataattggagtacacctgttgcttttattagctttatcatcttgtaaattgtttttttttttttttttttggcgatgagattatgtttcgttaactggtaacctgagatagggtttacattcgatgaattctatgtgcatggttgatgtcctgacttttcctgcactgatgtttatttgtttgataaaagtaaccattgaccatgatggattgttttttgtgtgagtagtccatttagaaattgcaacttagttaactccaaaactcgctattcttgaggctagagataaaaaactatgcctcgaaagttcagtgagaattacgataacagttttgaaaacgatacggaccaatgatttgtataatttgctgatttatatatatacacacacgcacacacacacacataatttgctgatatgttatggaaaattgatggtgtctgaagaaattttggctcagtcggggtaaaaggataatacaatctcccatcgtgcaattatgaaagccgttttcgaagcttatgtagcccttggctaacgtatttccttgacgttgtactttctaagagcaactattgctactagagattttaatttgaatttgtagcgcttgcaaggaattttctgcccgttgctgacttcactcatctattattttccttcctgtcaatttcttgatcctattattcctcagacctgataaatgttgcaatcctatttttcttattgtcttgaatgagttaaatttttgtcaagtttctctaagatgatttcagctctttgtgtgatcatctgtcgattcacccaaaattagacaatatgcccctatattaacatcagtttcgttgttctggataggcatactgcttgtatcggctaaataagttgg

SEQ ID NO: 102972 - DNA, 707 bp, Mimulus guttatus
  Intron number 1 from transcript mgv1a011833m (locus mgv1a0 11833m.g) derived from phytozome v7.0 (chr-ID scaffold_39; pos 69072 to 69778)
gatttggaaatcaagctagcaatccgtctcagcgcgtaaatcaacaacaacaggcgccaaacccttttggttttggcatgcagaacaaaaatcagtcgagagggggtaacgattttggatccaaaccaaatcaaaacaaggttctttcctgctcaattccagcttcttacaattatttttttcttcgtaattttacatgttatcctgtggcgtgttactgttacttttcaaatcaaagaaattttagttacttacagttgtgtatgcaattcttgattctttgactccagccttttgagaatacgtggtcccgttcctccaatgtaaatactagtggtgcctcggttacgcggcaatcggagaagcaacaaccagttgctgatcacaagtgagtagatcccttctctatcagttcgtagagttcatttgtttctctttcatatatacttaactaaagcatgttttgatggacgtgttttttatgcctacaaaggtgcactgattctgaatcctgcaagcgcataatagtggattacttttcccaatataggaaaagagaatctagcccttctgaatattagttgcaaatttattttattgcagtctattattttgttatatttgggtgctgtgatttcatgttagaactgttttttttttttttggtattttatatgactaaaatgtattttcatctacagtggtcc

SEQ ID NO: 102973 - DNA, 986 bp, Mimulus guttatus
  Intron number 1 from transcript mgv1a008048m (locus mgv1a0 08048m.g) derived from phytozome v7.0 (chr-ID scaffold_1; pos 2352541 to 2353526)
tgggttaaaaaaaaaaagagagagagaagtttcaggtaacccttcttatatttctctcataaattattcatttgttgtttattttttttttttaatgttttttagggtttcatcctaagttgttgaacagcattaccagataattcatggatctgtagaatgtgtgtttttggggtaattttttgtttttatttttcctctcgtatagaaatctggaggaaaatctgtgattaataaaccatttttatttttatttttatgtttccttggttacatttttcttggcattggctttgaatatgtgatgattttattattattattattacattgatttgtccaaggttttcatgtgttacatgtgggtcaaatcttcttggaatatttttttatgtctgaatagcccatacaagaactggatctaggctgtatttctggacttgaaacttttagagagagaaagtgggggggagagagagagagagagtgaggatttttcttctttttttttcctccttttattgcggcattattattgtggatccactaatcttgtggttaggctttgaataagtaaaacttaagttaaaggtttagggtcttaatcaagcttgattttcttgtttaattaatcccgtcaaatttactgtaaataataacaaaaatagtaattcattaaaaactttgggcacaaatatagtaattgatggcgacactcacgaagcccttagctgtgccccgctggcactatcaccatcttaattcttaattatgtactccccacagccttaattaattatctcaccatctcaaatcattgctgattgaaacttcataatttgacataaaaaaaattcatttgccttaatttcttgcattttctatcaatatttatgttacaattcatttaatttaaaaaaaaaattggttttttttttttttttccttcaggtggtaggtaggtagaagctaggggtggtccgaaa

SEQ ID NO: 102974 - DNA, 737 bp, Mimulus guttatus
  Intron number 1 from transcript mgv1a017402m (locus mgv1a0 17402m.g) derived from phytozome v7.0 (chr-ID scaffold_13; pos 742148 to 742884)
tggtacattcttcttcttcttcttccatggatctcaatttcagttttatttttcagcagatctgattcgattactgtgtactttcgttgttcttatctttgatctgtgaaattttctgtttcaaccggatcaaagctatgatttttaggttatgtgtgtttttttcctcagcgatttgtttttgtatctatttttctacaagcatttgattttagggcaaatagaatgtttcaatttcagagttgactgattctgtatgatttagaggggattttttttcttcttttaaaattagaaatatataatgcagttttgtaatttttagatgctatgagcttgtcaagtaattgaaagaacattaatttatttattttcatacaatgttgttcatcttttcgaagcttgatttttcaatcagagtgcgattatttatcagtgtgttcgtattttattttctcgaagatacatatatattgtttgtgtagtgaaggagattcatttcattactgaaattagctctgtacacgaatgcacgaatgcgagacgatcgaattctaattgttgttgtaaaacatttttccgatacggtacaattgatatatgcctcgtattttattcttgattagtctatcggtgttggttttcttgattgtttatccaactcgagacaactttgcaccaatttaattattttacgtctgctgtatgtatggatttacagaaaaaggcggccaagg

SEQ ID NO: 102975 - DNA, 543 bp, Mimulus guttatus
  Intron number 1 from transcript mgv1a010261m (locus mgv1a0 10261m.g) derived from phytozome v7.0 (chr-ID scaffold_106 ; pos 621396 to 621938 reverse strand)
gattttggtataaatttctactctcttcttttttaatgattgttttgcctatccatttaggactgtgttttagggttcttgataacttcaccagatttatttttttgttgggattttgattctaatgctgaaatactattcttccctttataattttgattctgttctacttttcaggggcaaaaaccccccttgggttgattttttttttttttttttctttttttgggtgaaaagattaattagtaaatggaattatttgatcaacacccttgtaattaggatcccctttccttacaaaatggcaacattaactaatatttctattacagatgtaactgtatgcacaattttctgctgtagtaataatctgttggaaaatattcatgtctgctttttaaggcttttatataataattattaattactcagtttcttatcaagatgttgttaaaatgattcttgatacagcacacttatgtgataattctaacacgaatattacctcgtattttgttcagcttcgttaatctcagcaaattg

SEQ ID NO: 102976 - DNA, 1009 bp, Mimulus guttatus
  Intron number 1 from transcript mgv1a019796m (locus mgv1a0 19796m.g) derived from phytozome v7.0 (chr-ID scaffold_1; pos 1732245 to 1733253 reverse strand)
aaggtatgcgtcttttttttttagggctttgattttcaatgcagttcatgatgatggagcagtgtgttaattttgtgcatttttcattttgattcttctgctaatcgtttgggcgattgtttcttctgtggtttgatttcaacttttgttggtgaaaaaaaaaatggcggcgatttgagtttgtttacgcgaactcttcgtttgaatttgtgcacacgtcacacagtagattcatctagaacattggtatgggaaaactgctttcatgggagagggaactgcttttgcattgttcatttttgcagatggcaaaagcaatctctgtaattagggtatattttttactgtggttaatcgtgtttgtgaactagcttactgatcgactgatgtaaaaaatccggataaattgctgaatgtgtatcttgattaaactgttatctgtatcttttcctagtagcttccccatttatttttggattgttaacgaaaaacataagatcttacaatctagatggaagcatcagtaaacggataatgtgtctcgatctgagttttatgtacggttcagttagttgcttagtgtaaagtgcaacaaccttatcgtgtttacagacttcaaatgtatatacagaatggtacgaaagagtgaacctgaaaaaccgaagataatctttgttacatgacattaagagtataaaacattcatgtatatactttaagttgtgatatctacttcatgtatggagattcattttgttaaaattatacgacatgattttgttcgtgcagctgtgtcaactttatacatttttttcaaaatgcctgttattgaaacgattggctgttgttgcagattctgtgtgcacaatcaagataacatttatcatttcaataaaacggcagtaaatatgcttttgcagaatcagccattgatttgttttccccagtttatccgatcatcttattacttgctacctttttctttcagtgcctaacgacgaacaatcac

SEQ ID NO: 102977 - DNA, 519 bp, Mimulus guttatus
  Intron number 1 from transcript mgv1a013249m (locus mgv1a0 13249m.g) derived from phytozome v7.0 (chr-ID scaffold_140 ; pos 505228 to 505746)
ctaacgccgccatcgccggtcaactgccgccgcaggttcgatttcatattacatcttcatagtactttaattctacttggtagttcaaattatacacaattcattttttcttgtcgtagtttatgctattactttgtgacgctgttgaaaattggcagtgttggagaaaatataatggtaatagattttttatttcatggtaactgctgagtttgctgagtcgacccggagtcttgaattgaatcaatttggctgtagatgcattatgcctgttttcatttctagggtttacatttaagtatataaatcgtagacatatttagtgaaaccaaattatcaagaagatatgattaattgggaaagataaacagaaatggtgacgtcataaagtacaagggcttgttgttaataatgatagattggttaattaatccgtcggctattattttgtgcgtattcgcctgatggtgttttaattttttattagttgattaattaaattttgtttgatttttagat

SEQ ID NO: 102978 - DNA, 791 bp, Mimulus guttatus
  Intron number 1 from transcript mgv1a014312m (locus mgv1a0 14312m.g) derived from phytozome v7.0 (chr-ID scaffold_158 ; pos 116411 to 117201 reverse strand)
tttctacttcttgcttgccttcgtctgtggcgcaagttagttcatcctcttcttcttgtttttttattttatttatttatttatttatttatttatttattattgctggtttacaatttgctcttgtgggatttggccttaatttattggttttatttattggagatattaatattaaatgatacggcttaggcttttggttgagatggtcattcaatattattcatatgttttattaggataatttacggccattctcttaggtaatgtcaaattacgaaactcccctcgtgtttgggtagttacaaccaaaggcctcaactatgaatcttcttacacgttcattcttgtggcgttaaatttagtagaaatttctagattgtgtgaaacgttctctagtttgtacctattttacccttaccctaatccagcccgatattttgaaacaaaatgatcataagatgtgtttcttggcttgtaaatatcagaatccaaactgcatttttgcacaaaacgagtacaaaatggagaacattctatggaatctagtagattctgatgaatttgacttcataagggtgaacgtgtaaaaatattcatagttgagggaggtggttgtaattatccaaatatgaggggtttttttgtaatttaacattacttcagaggggtgaccgtaatttacccatgtacacaatgtttaaaatatgcactaactgttttccttgttttccttgtttttttttttttttttttttgtcttcattacatcacagtaccagcaggaatct

SEQ ID NO: 102979 - DNA, 687 bp, Mimulus guttatus
  Intron number 1 from transcript mgv1a023826m (locus mgv1a0 23826m.g) derived from phytozome v7.0 (chr-ID scaffold_235 ; pos 140020 to 140706 reverse strand)
tggctttcgggttcaataaggtgagtttatcctcaattgtgttttttttttcccttaacttttggttgatatattatacagagataatgatttcaattttggcccgctgtttgatttttgtgttaatttgaacgaagtagtttttttctttgggtaaatagtccgttagttttttgtcaaacttcaagggggtcgtctgcaaaacttaaaggggtttatcttcaaaatatagtattttaacgtttgacaaaaaactaatagaagagatacccctatcaaccacaaggaattatgtgctgatattacatgcatgcacaaggcgatcgtctacaaaagtttgtaactatatgcgggtcaaatgctatttaccttttttttttttttttttaaatgtgaggatgctatcccatcaaccctccttcttacctttttttgtttttctttttttactaatttagtcctaaattcacttttattcctacaatttcgtctcaaaaacataaaattgcaaagtcttctggctgggattgaaggtgtcaagcaaatatgtttacaacttaaaagagcgtaataaaaacataatagaagaagaaagaaattcaggacacaaccttaacaaattttgtgttatgtaaattcatttttgcattaggttattgatttgctgaaagggtcgttgctatcgag

SEQ ID NO: 102980 - DNA, 386 bp, Mimulus guttatus
  Intron number 1 from transcript mgv1a004375m (locus mgv1a0 04375m.g) derived from phytozome v7.0 (chr-ID scaffold_278 ; pos 239259 to 239644 reverse strand)
ccaacggtacttcagttcattcaaacacactcacacacacacacccgtgcgggtgtgtgtgtttgtgtattatcagcttttttggaagcatgtaataaattaaattaattggaaaagaaaagaaaaaaataaaataaaaacccatccgtgtttaatttaatttccgtttgttttgctgagcgaaacaagtttgaaaaaaagcgtatacggacaacaaattccacccgtgtttcttcattttcagttactcctctatatatacatacatatatatatgtatgtatatatatatatatatatctatgtatatatatttgcttatcttctttgtttgagttgtactgttttttttgaataattaattttttttgattttagggtggcct

SEQ ID NO: 102981 - DNA, 901 bp, Mimulus guttatus
  Intron number 1 from transcript mgv1a007497m (locus mgv1a0 07497m.g) derived from phytozome v7.0 (chr-ID scaffold_4; pos 582344 to 583244)
ctttatttgtttggattttagcctcaccttcatcggtaaaaaaaaaataaaaaaatctccttttgattttgcaagagccccaattattattattattattattattattatttttccttttttaattttaccaacttttctctgctatcttagattttctctgctgcttttttttctggttgatatcccttttttacttttcatttttgtgatgtgaggaaagggtaaaggtgggtgctttattggtatgtatgtggtgaaatcttgattttgtacagttggtggttgtttttttttgggtttatttttaggaatttgatgttactgtttttagagttgaaaatttcaatggggttttgaagatctggtgaaggaatcacatccattcatttctgctggtttgattgatgagttttacctgttactcactaattttgttgccttagtttcgaattgtagtaaggttttcatgtgtggtgatttattacaagttttaatgtttcttgtacttggggattaacactggttttcaactgtgttttcatctttgttccactgtatgaactttagttaatccactacttctgtgtcctatgtggtacttagatccgttcctcgtcagctgatttcggatctccgttcggatattccgatatttgttttaagggttttacattttgaaagtgctagtatattttcgtgggtacaatttgcggaaagagtgggtaactatgatctatcttgtaaattagttggagtgatttacggaaatcgaatggttttgtagtgttcgcttatgtttccgcaaaatgtacgagatagctaatgtgaagtatcgtaaattttcttaatatctgtatgttaacttcttttacaggttaattatatttcgatcatactc

SEQ ID NO: 102982 - DNA, 903 bp, Mimulus guttatus
  Intron number 1 from transcript mgv1a022698m (locus mgv1a0 22698m.g) derived from phytozome v7.0 (chr-ID scaffold_244 ; pos 307060 to 307962)
gtactggcaccggtaatggtattggcatttgtattgatattggtactggcgtactggtattcattacgtacacaatacgaaatatattttttattttgttttacttttctactactttgtattggatatcattgatcttactatttccatgatttttttttaaatcaaatatttaatttttacgataaattccctgtgcaacgcacgggtgaagtactagttaatatattaatgtaggaaaacaatcttatttttgtcaacaaatatagttattattaagataataagaatattcgagcatttaatttctatatgcatataaaatataaatacaaaataatttatgttataatcattatgataattcttatgataattttttaaataattactaatcttgactacaagataagttgtttgaaaaaaaaatatatatgctatcgatattcatataatataataaaatatttgggatagtgtattttattcaaattcatacgtttggctctagtatttaaactacttgcctgaataggtgcagaaggaatcaatgtataatcaaaattatagagatgagatatgattacactaatatattggaagaaatccatgaatggaaacaaatcaaataattttgtaggtttgactcggaaactttattggactaattgtcttgtaatctcgtccaaattagaaattatacaatatttccacaatcttcaaattcttctcaccatcaacgtatacatatacatatatatatctatatatatatatgtatatatgtatagatagatacatcttcaagaatcattccatcaaatatgagtttcatcactacttcatttctaggtctcgtctgcatactcaattttcatcaatttctcaaagcagaaaagctcg

SEQ ID NO: 102983 - DNA, 849 bp, Mimulus guttatus
  Intron number 1 from transcript mgv1a014363m (locus mgv1a0 14357m.g) derived from phytozome v7.0 (chr-ID scaffold_17; pos 1199508 to 1200356 reverse strand)
aaaaattgaaaccctatcttcttcaaatttccaaggtaaagtaaaattgtatcggaaaagtgattttagatcgtataattgcttttgctcttgaagaaaataggaatttctctcatcaatttggtagggttctcctcaactttttaaccaatcagtacgttttaggcagttgttttgagatttttctgcgaatttgtgtttcggagcaatatgttagggatttgttgtatatttgtctttgatattgtcttgcttcgttactgctaatattttatttggttgatatgtgtgtgtgtgtgcgtgtattagtgtgtgtgagagagagagagtgttggggtattttatgaagatgatttggaatgtgttttgaaaaggggaaaagtgttttgtgtggaaattgtatgaagtattttgttttgttttaagataatgaaaaatggggggtggaattaaacaaagctttccctatcttgctgtgttatggttatggatattgtttcgtaatacgatatgaagtatccgtgaaatgatgtggatatttaggctttgagatggaaaattttcacgaaattgaatagtgatatgatgtgtgtgtgtgtgtgctttccttcatataatgatatgattatctggcagattttgcatttatcgtggtttctcgttgaagttaaataatctcttacattagagtatgtacaattatgatgttcttgttgattactagctataagtagctattgtgtatgcagggtgatgggcttaaagaaatctcgtttctttgctaagtctttgtatgaaattactgataacctactgtatcgtctttgttcaggagcatttgcatcgttc

SEQ ID NO: 102984 - DNA, 693 bp, Mimulus guttatus
  Intron number 1 from transcript mgv1a025846m (locus mgv1a0 25846m.g) derived from phytozome v7.0 (chr-ID scaffold_11; pos 467170 to 467862)
tggtaagagtgtttttcatttattacgatctgatctgtctgattttgaatgaacacactgtttttcaaataactgtaaatttagaaataattttgatttttttcatctacatatgtttgattgaattcatcatcactaggggtgaaatcggagttttcagaccgtatttagcatttttatagaattttcaattttttcgggagtggaaaactaaatcaaatccgttctaagaaaaaaaaaaccccagaaaaatcagaaatcgcaatttcgaaaaatggaatgaaaaaaattgttccaaaatcggaaatttttggataaagatggagcagagcaatacggaaattccaactttgtactttttggagaataatcggaattctcgaaaattagaatcatattctaatatgtattacaattctgttccaaaaaaaatcggaaaaaacatttcaaaactttcggaattcagaatggttgttttaaaatcagaaaatttcggatcataatcgatttccaatttccacccataatattcatcactaacaattacggttcaattttggtgatttatgcagagtctcacactttttgcattcttcctatcttccgacgagaataaagaaacaacataaaaaaaagcacgggaaacactcgaaattattcaagatcaggcactaggaggtaagaaattctttg

SEQ ID NO: 102985 - DNA, 824 bp, Mimulus guttatus
  Intron number 1 from transcript mgv1a009068m (locus mgv1a0 09068m.g) derived from phytozome v7.0 (chr-ID scaffold_13; pos 1893608 to 1894431)
agcgtgtccaaattgattcgaaagttcaacgcaaggttagatttcagcaaagcttctgctattctatttaatgtggtgaagccgaaagattaagggttttaaatacctattttttgaaattaaactgctgatatgatgctctagctattttcttcaattttgagggtagaaataatatctggtggggattttgatttatgataagcaaaataatttgtttgttatcttgtttgattgctgtactaatagatattctgtttgttattatcttgctagaaaccatcgatattttggtgactgatagtacatcatatgttatatctgttttatcttcaagctaaattatgggtgggaagcgagtcagaattcataccaatttcaacccaagaagctttcgataaagcttctgcctttatttttattttatttttccaaattttggctcatgctctctgtatacatgatgtatgtctctgctataaaatacctattttttgctgttaaactagatccctgatttgatttatgcaataaccgatatcgttttccccctccttcaatttgcaacaagatatcatgtttcgtggggattatgttaatttccgttgtctaataaaatcagcaaaggattggtagtagcgtgagaattagaactaagaagattttgcagagtatggtattttggtataagattttagtcacaatgaacacttagaagggtgattgaagctttcctctcttattgcatttttgaccagtgtcctaatgcactattatcttgtttgactgacagtgtcgtaagacaagttttgtggggggtgttg

SEQ ID NO: 102986 - DNA, 760 bp, Mimulus guttatus
  Intron number 3 from transcript mgv11b018858m (locus mgv11 b018858m.g) derived from phytozome v7.0 (chr-ID scaffold_1 01; pos 23468 to 24227)
agaattggcgtgcctgttgaggaggtgggtgcaaaagagaatacgagaattacttaagaagaaaatgaataagataaattatagtttctcatggttactgtgatgtagttttcttacatgttcaattagaagtggtactatgaaatttattttttgggttgatcaaatagatagggtggctctttcaactgaacatgtgtgttgattttcagtgtatgagtatatgatatttgaaactaatttttcatggttctatacaatataaattatgtaattggtttattaattagatatgtttatcgatgatgcctcgagagatgcttaatatattattcttagcttgtattggaagttcttctttaaaaattggattatattatttttagctcgagatatcatttatattgttggaagagctttttatcttaagatgtcaatatgtattaggtggttgaaacttttttagatgattttgtctgtgcaagatgtgtgttaacctctatatacttgaattgattgtcttatggttttgtatatttaattttctatttgatttcttgtttatcgcacttgacatctgcaacctgatgatatttgaagagagatggtgaaatattggccattgtggatttttttttaagttgcattatgttttttttagttgaaagatgtactttatgttcgtcacataactatacttgatcaaggtatttctttatttctagttgtcattgaataacgttttccattactgtggttt

SEQ ID NO: 102987 - DNA, 1062 bp, Mimulus guttatus
  Intron number 1 from transcript mgv1a009868m (locus mgv1a0 09868m.g) derived from phytozome v7.0 (chr-ID scaffold_15; pos 454972 to 456033 reverse strand)
tcgccgcctaccccaccgcctgcgctcttgaagttcgctttccatcctttttaagttttctggattttttatcttctcaatctcgaagccacattgaattaatcgtctgtcttgttactaacgttagtactaaatcttaataattttgcttttggtaaccttgattttgcagaaattttagattatatttatgctgtttgaaagaatctcaacattgctcaagtattagtatataattttgaattaggcttgaccagagtacagaattctattcagatgaattgctgttgatatcaatatatctatctgctcattgacttaaatcacctattaggattgcttgctacacaacttgtgtaggcatggttattgcctaattgccattgttaaatcggatgcttccctttgacttatgtggtttagtctctagatttcaaatgtagcagtaaactagtcttgagccgcacaaatttaaagcaaatacacatttgtatagacaagggggaaggcgtgcttgatggggaggatttgaattattacataaacatcaattgggaccgaatgtttttttatatgatggaatttttccagttttagttgagattcttatattcaattcaagtgttctccgaatcagttttagaaaaactagtccatcttttagagatttttagactcgtgaactgatcttgtatacgtttgtcttctatcagtaactttggaaaaaaaacaagtattcactttaatgatacaaaatattcgaacaatacctccactgacaagaagttcatacattacagtgaagaagcgagatctcatacaaaccaaacatgggatttctctgaactagaaacatttgcatctgtaaatcatgtgaatgacagactacataaagtctatcatgttttgcacttttgtcaatttcgactttcatgtctgaaatcttgtcgtttgtttacacgtagtcacattttcagaaactccaactttttcatattctttataatcattgtttccctttaaataggtccacgcggcttcactaatccacgacgatttacc

SEQ ID NO: 102988 - DNA, 935 bp, Mimulus guttatus
  Intron number 1 from transcript mgv1a001001m (locus mgv1a0 00753m.g) derived from phytozome v7.0 (chr-ID scaffold_48; pos 142249 to 143183)
acgtcgtctatttccctcagggccacagcgaacaggttttgtttttatctctcttcttcttccaatcttcatttactggttagtgaaagttgctaacgtgcgcggctaccgtgcgcggcgcttactctatcaaaccctacccaccaggaggggtgtgtccagtagtggctgacttgcagcataatttgatcacatgcaaggattccatgattgtcatcattattaataattttatttaccattattaaatgcttatgacttattattatttcatatatatatatatatggttgataatgtgagctgttgtatatcattgagaatcatcacattggactgtatattacgagatatgagatttaaaactttggttagttttaaattttataaagtcagtaaaaaattaaaaaaaaaattgagaaaatacttagtggtccatgctaacgtgcgcagttgttgattgggttggtggatggggatttttccttttgctcttttccctttttctggtatttctacttgaccttataccatcaaaaaaaaagaaaaataatatatatatatatatatatatatatataactcattcaacacttctttgtcgaatgcaaattaattcacgaaaaatgggatgtcggcagtattaattgtacatctttatgttggagtaattgcaatatatccggaaattgaagttttaactgtagttgaattaaggtggttctatatttaattatgagcacgtgtaatgatgaaaaaagcgtcgcgtcttttctcagtcttgttttagatcgtacgagattttggccgtgtaataagaaaaacgagtctttattcagtgtatcctagtgcattcaaattttgttgtttgatataacttgtgtcgattcttttctctttttgtgctaatactcgatttgcaggtggcggcatcc

SEQ ID NO: 102989 - DNA, 808 bp, Mimulus guttatus
  Intron number 4 from transcript mgv1a017276m (locus mgv1a0 17276m.g) derived from phytozome v7.0 (chr-ID scaffold_13; pos 1452473 to 1453280 reverse strand)
gttgcattgaccgttgtgtttcaaagtattggcaggtgagtatttgttcttttacgattcactttgtattcataagcttattgatatctattgtcataggctttcgatccaggtgttcgtttattacctattagtgtattctacacgcgtatatgccctttagttttgtatagtgttagttttctctcttaggagcttaaaacataagtcttatataggaaatgaaccgaaccttgtgaattcttaattacttattcaacgcatcaatttcaaaatcaaagatgtagtcgttatagaactagaaagtagctgccacttattaaacgtgcaacaatttcatggagaattatattcattcgaagtcaaacattataagcagttttgaaatttaaccgtgtgttaatttccatggctctgttactaatttagtgaatgtggaattcagtagtggaagttaaagatggtaacttcttgaagaaagaagtactgtggttgcagtaacacctgtcgtcgttataagtttcgtttcatttatctatgatgtttgttttaagaataaaatgtagctgaaataaagttacaggtttgtaataaagaagcttatttgttatccaacttctattacatcattttcttcccaatagaaattgcgtggaccatacccttttacgaacgtttctagagcatagaaatatttatttcattgatttctacaagtcttttggtaatttttcctgcatgcccttttgacggttttcatatatttaatgcaggtgactaacttagtcggccaacttctgggaaacaa

SEQ ID NO: 102990 - DNA, 688 bp, Mimulus guttatus
  Intron number 1 from transcript mgv1a014350m (locus mgv1a0 14350m.g) derived from phytozome v7.0 (chr-ID scaffold_83; pos 862159 to 862846)
ccgcggaactgcaccgtggtaaaaagaaatgtcaaataattttttttctcattttttatatatttttattttaaaaaatatatatgttttaataatgtttttaattgaattattggttaagattaaactttaaaggaggtctctacaatggttttaaaatactaggggccgctgtgttattagattaaaccttatgggaggttaatataattattcagtaaagggtaaaatatatatttaaaaaaaaaaaagaaaatcaatgatgggtatttaaatttgttgctagtaccaaaccttaatggaaggtaggtgcctcaaaagaaaaactcaatggaggtaatcgtaatttttcaaatgaaagatggtttggctgtaattaaaccaaaatatagggaagtacgtgtaattccttaaataataaagaaaagtatagggatagaaacgtaaattgtagttttaaatgaaaagaagagagaattcgcaaacctaaacaaaagaattttatttaggcggtcttttttgatagtttgttatgacgcagtttaaatccgcatctacaatcagttttcagatccagccgtccaattgttccccttatcaacggtcagaatcgacgatccgcgtacttcaacgctattggtcatctcgaacagcggcacttctatataaatcactcgactaccacgtt

SEQ ID NO: 102991 - DNA, 464 bp, Mimulus guttatus
  Intron number 1 from transcript mgv1a020360m (locus mgv1a0 20360m.g) derived from phytozome v7.0 (chr-ID scaffold_37; pos 511322 to 511785 reverse strand)
acgttgattggtcttagtttgaagaaaacaaaagcaaagcaaaatgaagtgtagggaaacaaacatcaaaaagatgcttagcttctcgagggtgctgttccattttaccctttattcatcctattcagattctctctttttttcatttttatttttatttaatttatatattttttttaaatattatttttaaaataacagccttaatttgctagcagatttatgattgggggatgcctctaaaaactcatatttggattctgggccatcccttactttatactttaaatttcccccctccaaaaaaagaattatatattgttccaattgaacatagaaaaaaatagtaaggatcacattcttattacactactctcctacattctccttatttattacacacacacacaaaaaaaaaaaaacatgtttatttgtaccagaagatctttcgtactactcgtatt

SEQ ID NO: 102992 - DNA, 919 bp, Mimulus guttatus
  Intron number 2 from transcript mgv1a017660m (locus mgv1a0 17660m.g) derived from phytozome v7.0 (chr-ID scaffold_19; pos 1339765 to 1340683)
cccttcgcttaaggtaattaattactatcatttttcatttacttcgtaaaagagattcattcatacattaattcatctattcttatataatgccatgaatttccatttcagtcttttatttatttgatcaactttgagaaatctcagcaggttacttgcacaattttatacataagttatatattcttgcctccttttgctttaattcggatagccgtacgtggttgttgttatccaatccaagtcaatttttttttatggagttctattttatttgttatttttccatagtgaaacagatttctagttatacattccatacgcaaggaattatttttgtcccccaactatatatgtgtataaagaaagtgtttgaatctcggaattcagctcttagaatagttagtttcacttattagtgttttggctctcgattttaagcggcaaaattcaacaccggcgacttttaagtattcatgcacaatcgaacttcaattctctagtataatattttttcagaaatttaattctcgggaacaataactgccacttagatttgttggacgaaaagaaatgaaggtataatagagataaacttttgggatataagtttgtgtttttatattagatggtgattttgatttatttattcttgtaacgaaaggataattgatagagtgagaatgaagagagtaggagaatgagacatttcattttttcaggttgttttgtggagactggcatatttctttctcaacaaactacagtaaaatcatatttcatgtaatatgcatttttgtgattggcgagtaattactattaattaattaattaatcatgttaaggaaatcatgatgagtgatcatatttgcaaattcttgtaggtactagatatatcaaggtgtgagaggttgagctc

SEQ ID NO: 102993 - DNA, 433 bp, Mimulus guttatus
  Intron number 1 from transcript mgv1a013993m (locus mgv1a0 13993m.g) derived from phytozome v7.0 (chr-ID scaffold_1; pos 729789 to 730221 reverse strand)
ttgcgctgctctttctcgccatagcagtatctcaggttcttcttcttctatctactgcttttatttccttactgatttttgctttcgtcttcctttcatatttcattttcattttcttaggttacgaagtttcacaatttatttgagattcgatgttttaaactcccgatcctgattaattcaattcaaatattgaaaaacaatcgacctagttttctgatttgctatgtgatttgagaaaaaatggagaatcttatgttaagaagtgcgtcgatttttcttcccgatctagtaactatagatcttcaccttttccgtacttttttttccccttttgatcaatgtaatagcatatctccttcacctagggtttcttatatttgttgtcttttcatcctgagcgtatcccttttcctgcaggcaaaaaaagcac

SEQ ID NO: 102994 - DNA, 754 bp, Mimulus guttatus
  Intron number 2 from transcript mgv1a016356m (locus mgv1a0 16356m.g) derived from phytozome v7.0 (chr-ID scaffold_217 ; pos 243923 to 244676)
aagctaacgccgcacttatcgatttcattagctctgtacgttctcttttttcttatgctaaattgaaaaaatttcatgtgttaatttatttatttatttgttttctcattcagaataataatttgattcagttagctgatttctgtgcatttttgttccgttgttttttatgaatctgagcagagaatgatatggctaatattatgtgttcaatttggtttgtttgattcttatctaaaaaagaaatcagtttgtttaatgctacacccggtgaaatacactgcgtgatattaaccgttgatctgcacacaatcacacacacccatgtgtatgtgtgtttagtgggaagttatttcaccatatcaacgattaataattacccggtgtatttcaccaggtgtaacatctcgtgtagcatctcaaagaccgttgaatttgataatcaatgacaaatttgtagtcgatattaatatttatttaaataaatttatatgaaaattataatttatttataaatgaaaagatatatgtatttttagaacttaaatatgcacctctatatttttccaagttgttgttcgggtttgttgttccgatgtggtatatcgataactttattttgaagttcaagtagttgctcgttcgctattcttcttagaagtacacgagtctatagtggatgtattcgtatttcgtaattgtatgtttcgtgtgaccaggttattggggtgaaaaggaggcaagtatcactagg

SEQ ID NO: 102995 - DNA, 705 bp, Mimulus guttatus
  Intron number 1 from transcript mgv1a013418m (locus mgv1a0 13418m.g) derived from phytozome v7.0 (chr-ID scaffold_4; pos 824128 to 824832)
cgggatatcgctgctcatactaccttaaaacctaggttcgtgttttcgtcttttttttgcattattgtcttccactcgaatctaggttaattgtttgctatttttttgttttgaagtatatttagtgctgttttgtttgggtatgtttattgagaattttttcaattgaatataagaatggatgattcagataccaatgaaaaggcttcactgttgttcggaaaattgtccgccacgtttgcccttttgttttgaaagctttagcttcttcggaagaaaatgattgaaaggacttgtaaacaagtgctaagttgtatctattttttggtttcatctgctgttgcattcttactgcaaaaaaaagccaagaacttacatgattgtgtctgaattttaaggatcatcacttgtggtgtgatttaaactgtcaatgataaaatttgtcgatgtatatctggatatattttccctgcgcgtactaatatcatacgcatgcgtgtctatatctgattgagataaattaattttggcatcagccatgtagttgctaaagattaactatttatgttttgctttgtttctggaaaatatattcaatttcttcttctctacgtatgccatgatttgaagaacggtgtagtttgaatactcctatgttttgtgtatttttctgattctgcagaagggaaggacaagacacccaag

SEQ ID NO: 102996 - DNA, 936 bp, Mimulus guttatus
  Intron number 1 from transcript mgv1a008808m (locus mgv1a0 08808m.g) derived from phytozome v7.0 (chr-ID scaffold_178 ; pos 106905 to 107840 reverse strand)
cagcttcagattccttgcaaacctcccagtgccaggtgtatatatatatatatatatatatatatatatatatatatttatttatttatattttcagatttttgcaactttttcccccattgttttaatttcttttttgggtgctttttgtttagatctgatgtattatgtatatatatgttgctgcgtcaaagtttgtatgtgtccttttacacgagaacattcaatacaattggttgctaatataattaaaacaaaataaatggttgctaaaatagatgttaatttaaaaatattaattaaccttacaagtattcgatttcgtcgctatggttgtgcttgttagtgtattagatgaatatggcttgtcaatttgaagatcagaattgcaaatacttgatatatgctatctgttacatttagtcaatgtaattttgacatttagataaagtacattgactatatgtaacaccccaagaaatgtcaaaatgtaacactatgatagcatatcttattgtcaaaagtacattgatcggtacactttcgcctctgagggatttaaggagcagatacatgttcattccaacgggagcttaatcgaaattcctgataaatatttcttatgatgcattttttggtgtcgaagtcacttctactcgattcaatttgaagtgaatttatgcagtgtcagtgtatgcggcgtctctgcggaatcaatgcagtggtcttacgacacaagaagcaacagcgttccaactattctgttactaatgcagcaaaaattatacgcactaggcggcctaatggtaaacatttttttattttttttctttcttttcatatttaataacaaataaataaatattgtttcttatgttatattattgtagacggaaggaatatttcggataaatccggagaatagtcgagaggagc

SEQ ID NO: 102997 - DNA, 745 bp, Mimulus guttatus
  Intron number 1 from transcript mgv1a014729m (locus mgv1a0 14729m.g) derived from phytozome v7.0 (chr-ID scaffold_83; pos 1004584 to 1005328 reverse strand)
ttgaacaggttttccctctacctttttttttcttattgtacagttaaacgtctataaattaatagagtcggcacgagcaaaattccattcatttagcaaaaatattaaattatcgaaataatttagtagatgtttaccgagcagatcagaagaaactattatttaagtgacattattaatctatagaggttctactgtagtagttaactaattcaattgcagtatcttcatcttcatcttcataatttatgtggataagataagactgtagattaagtctatataagcttcagtttagtttcaagattaaggtaaaaaaaataaaaatgtgaagatgttatgtaggcactcttatagtagcagcaagattggaaagaatttaaggttttaaacttgagatttcaattaaactacctgggaattatagtttctcatttgtagtaaaacatggaggcaactaaaggcagctgtggtaggggtgttaattaaacgaatggggtcgagccaaatgcatgcttgttcaaacttgttcgagctttcaaactcgtgttttagctttttccgataagcagtcgagtcgaactcaaatgagctttaatcgagccgagcatgaatcgagctcgagtagattggttttttgaacatacttcattttgttcggtcgaacaagtcggaacaatttgatgccaataatttttttttttgttttttttattttgggtgaaaaaaacagtacttcaattac

SEQ ID NO: 102998 - DNA, 472 bp, Mimulus guttatus
  Intron number 2 from transcript mgv1a010529m (locus mgv1a0 10529m.g) derived from phytozome v7.0 (chr-ID scaffold_66; pos 1153710 to 1154181)
ccgtgagttttttatttaatttatatatatgttattttaatttctgaaatttggtgatttttggggggtgttttgggtaattatattttgttgggtttgtgtttttcgtgatatgggttcttgaattgattggacggagagtgactgtatgtaatttatttcttatatgtgtacgtatttatgtatctagatgcatgagtatgagtgtaaacaaatcgagtacaaggcatgtttgttcaagcttgtttgaatttttgtcgagctttcaaaaatttgcttgagagcttggtttgataagcaatcatgtcgtgctttaatcgagctgaatacgggtcgggtcgagctccagtagtttgaccttttttgacatatttttcttttctatgtggtattttctacaaatcccctgttcattaaatgctcgctaattacttccgttttcctttgtgcgtggattggatgcagacctaat

SEQ ID NO: 102999 - DNA, 681 bp, Mimulus guttatus
  Intron number 1 from transcript mgv1a007193m (locus mgv1a0 07193m.g) derived from phytozome v7.0 (chr-ID scaffold_1; pos 1019075 to 1019755 reverse strand)
tcagccaatccgagaagcctgacgttgcttataatgtgagtttccttgttggtttcttttattcatttatttataatttggggattctaaattagggcgttcagaaattgctttgaagagaaattagcaactgttctaaattagggcgttcagaaattgatttgaagagaaattagcaactgttattcttttaatttttattgggtgtaatggactaactagatttagttataattttccgtaagcttatcaataagttatgaaattttgtgtgttgacttgtgaaagtaattggaaggggaattttccctataactagcactttatccatattgtggaaggaatttaatatccagaaagttttacaaatcaaacttacttatcgtgttgggctttgtatacttgtttcttttgtagttatactaagctcttcaatcagttaatattggttctagtagttcagggctgctttacatgatgcactgttcttataaacgtctaagcatgggcgtcctgcttcatgtataataataattggatgttaccctttgttcttttatcctagaataggggtatatttatagtttagtggaaaaatagtagtagtttttaccttctgattgaaattttgttaagctatgcatttgtttatctatgttaattctgtcaggatattggagg

SEQ ID NO: 103000 - DNA, 535 bp, Mimulus guttatus
  Intron number 1 from transcript mgv1a002947m (locus mgv1a0 02947m.g) derived from phytozome v7.0 (chr-ID scaffold_7; pos 74435 to 74969)
gatacgttcgcaaggttcgcttttttcttttccttcgatttactctctttactgttttggtatctgcttttgacttacttcagatgtttgctacagttgattatttttatttttatttttccttttccgtttcctttccggggttgaaaattattttgtcactaaatggtgcaaccgcttagtgtttaaaattcaatctgccatttatgttgatccaatctagatgcagtcagtatgttcttttgcattggtttttttggattcttccaacttggatccatttgttcttagtctaatttggcaattctgttaccttttccgtccacttgaatataattttactttagtctgttcatatggtctcccttgattcagggtgcttcagtatatttatccgtgacttttagatgatgatattattattcaatctaagttgccttctttgctgctgcaattaattttatgttgaaagagtatctcttatgtagttttaactttggttcccaataggtgtctggaccagttgttgttgctg

SEQ ID NO: 103001 - DNA, 1009 bp, Mimulus guttatus
  Intron number 1 from transcript mgv1a013039m (locus mgv1a0 13039m.g) derived from phytozome v7.0 (chr-ID scaffold_186 ; pos 315055 to 316063 reverse strand)
acaaagactctgtccgccattctcaagatctcaaggtaactaacactctttctctctctagttgtgtggtttcctttgtttacacatttggcctttttaattattgaattgaagctgagatttttttattttaattttaatttttattattatattgttgggttatttgttgctattatgaatagtgagaatgttacatacatttgttgctattatgaactggtattataatttataacccccgtttaatacataaaatttctcgagttcgactgaaatttatgtctgcccttgccccttggttacatcgttatctactttcacgggctaccgattagcttgctaaattttgttttatcttcacgggatcgacttggctagaagtgtacgccatttgtactaacacgagaagtttaatgaataacgatactatttgagagtagaaatgtaataaacatagccgaaacaaaacaaaacatattctatgttgtcttaattttggtgcaatgtcaatcgtgttataccatgtttttcgagaattttaaactaatccctgaattaataactatcacatagatatggcctaaggcctcgtttggttggagagattagctatgattaactaaataatgggactttgtttgatgtttggtatccccaataacctgccgggtcgacccgcaaatattatgttctcatgccttatcttgcctttcaggcatgtttttttattggatcttccaaggtccaataatacaattgggttttattagattagttaattttatcttggctaatcttatctatgcaaccaaacgaggcattatacaaagaaaatagttgctgatgttagaccttgttttacggtggatttatattttgtaattagcttgattctatctctaaactacccaaccagattaaattcagggccctattggaaataaataaataaataataaaaataaatactcgtggtaggatattgcaagctcgcttttgtgcgaac

SEQ ID NO: 103002 - DNA, 761 bp, Mimulus guttatus
  Intron number 1 from transcript mgv1a012828m (locus mgv1a0 12828m.g) derived from phytozome v7.0 (chr-ID scaffold_334 ; pos 70840 to 71600 reverse strand)
gcttaagtgattgtcaagctcaagtcggaacctcggtaatctctaaatttccatttacacatgacacgacattcttgtttctgtttatatttttccgtttattttaagtcaaccagtaaattcaagtggtcaaatatttgtgagtcaatgacctaaatttggtttcgtctccacacattatccgtttttatccacacattatcgatttttcagaggtatatcttcttaaaacatttttgaaaatattttcaaaggtgaataagatgatttcaaaagaagcattaaaatatccacgaggcacatctattaggttattggaagtttggaacagtgttgctggaaacggacattcagctagataataagctacgttttcacttgaaaaatgcgagccaacctcagccaatcttataaaaagatgaaaagaaggaattgaatgtatattagttatatccgtccaaattgttcttcagctagttttctatttccgttgtttatttgttgcatataagtatatatttatgcaaacgcacatattatatatatgcgtttatatatttccgctgtctatcaaaagagctcttattgcgtgttagctattattgtcatgattgagttatcaaatggtggttcatttgatcttaatttggcatacattgtatacgttgtttgtttcgttgaatttttacttcgaaccgtagtatgtaatttttttttacgtgccccctcatttctcaaaaacaacaaaattcctgacagat

SEQ ID NO: 103003 - DNA, 789 bp, Mimulus guttatus
  Intron number 2 from transcript mgv1a002527m (locus mgv1a0 02527m.g) derived from phytozome v7.0 (chr-ID scaffold_44; pos 695033 to 695821 reverse strand)
gaaggatctttctcaggtttcaaaggattagcaacttctgttatttctttccgttattttttattttgacatggtgtttgttgcctattctagttctctcgttattgttcgtgacgaattgggattttataaaatgtaaattgcactctgtgttttcatcaccgtatgctgtcaagatatttatccgtctttcttccttagtggttttgtgttgtggcaaattttaagatttaagtaaattatactttgagtacttatgtataccttatgcaaattacacaaaattgatgattataatttagttcagaagtaattgtgtggagtgttgttcacttagttcggactatatcagtcttttggttaagctcaaacagtcaacagaagcacaagctttttttaggtattcattcgtatatgtggtagaacaatgacagtacatatcaggcgtgttttagcattccatttaaatctgtgaagatcttctatctccctagaattatgaccagactaatcgtagttgaacaacttagtattaaactttagaatgaccaaaaattggcagatctctattgagaaaatggatcgagtttgttaacggtttttagttctaggcatggtttagcatttttacctgatagagcagcggtgatcatgcaaagttatgttaaagcaaacttttatcctcttcatgtcagtgcttactattcagatttttttaaaaaaccacaaatcacttcctttttgttttggtaatatttttagttaatatatttgcagctttttaattgg

SEQ ID NO: 103004 - DNA, 493 bp, Mimulus guttatus
  Intron number 4 from transcript mgv1a006509m (locus mgv1a0 06509m.g) derived from phytozome v7.0 (chr-ID scaffold_18; pos 1516424 to 1516916 reverse strand)
ttcaggtctgtataatcacgaccttgttattgttttcagtatattttctcgagtactttgctatagcatgaagtatcaaagaagttgtgtcgttcaacaggtctgaattattcctcatcgctcggcaatatttgtactagtttacccacatccggactgagatctaggttttctcctcaaaaactgtgttacggtattcctttagaatgagatatgcaatcagtaatctaatagttaaattatccacccaaacatgacaaggaaaatctaacaaaatgttccctacacaaatagtcattttctgtgaaggtgtaaaacgttttaagccagatcttctattctagatactccattgtccagcttatttaatcttaagaagtcaattaaatttgttggtaatatctccaacatatatgtttttctttaacttgattgaactttctcgttgttgttggttagtaaatgttgtatttttccagattcgtgggttagt

SEQ ID NO: 103005 - DNA, 308 bp, Mimulus guttatus
  Intron number 1 from transcript mgv1a007930m (locus mgv1a0 07930m.g) derived from phytozome v7.0 (chr-ID scaffold_108 ; pos 861109 to 861416 reverse strand)
cccctgagtctatcaaaggattctcatctctcaaggtctacatttcagtattacataatttttttttgtctattattttcttcttattttgtttcaactgtaatttaagatgcaattttgattaaatttaaaaggttgggctttccagatattgagttatgtgttcagtttctgtggccttggagggatagaattttctagtattccttgggaattgagtttttataatgattttgactttctttctcttatcttgcaataatgaaaatgcagagcagtgatcaggagtccataaagaaactattaga

SEQ ID NO: 103006 - DNA, 368 bp, Mimulus guttatus
  Intron number 1 from transcript mgv1a020060m (locus mgv1a0 20060m.g) derived from phytozome v7.0 (chr-ID scaffold_68; pos 267257 to 267624 reverse strand)
gcagttgttccgttgctcctcgaaatacacacagagtacacactttcacaccctcgtatatacggttttgctcgatttcttgttcttgtttggttattaaaatttgaaatgaatttgtcctggtttatttgattctttgtttaagttgcatttcttgaaaattcgaagaattcaattatttaacctccattgtagctataagttagcgggatgaatcgaaatatacatggtttttttttttccgttgaaggagaaatagcgaaactcttcgtgtagtatcgattttggttcgatgaaattttaatacggttgatcatatgtttcatgttgcagcttgtggcagaagtaaaagaaaagctcgagaaaga

SEQ ID NO: 103007 - DNA, 806 bp, Mimulus guttatus
  Intron number 1 from transcript mgv1a014829m (locus mgv1a0 14829m.g) derived from phytozome v7.0 (chr-ID scaffold_104 ; pos 839686 to 840491 reverse strand)
aggactcgcgacgccgctaagcgcaatcgtcgcaggttttctttcactcttttcgtacagtattgtttgcgcctttttatttttccaccattgatggctagaagcttagaattagcgcacaattgatgaaatgaaacctagttttcctgtttagatacgcaattatcagactttaagaaaaatctgttgcaattaagtagattttggatgttgaacttttgctgatattgaattggtgtaattgagttggagttcatttctaatttttggacaggaaacaccattaatcggataagaagtctcgatttattttctttctagttgtatcatagttctggaaatggtaacaatcgtttatactatcttatgaatagacaaatgtttttaaagatgcggttgatgaaattattgatttgcattgctgaaaaagtttgaatctgagcgttaagggatcggaatcggaatcgattttttcttagagggctgattcggatcggggatatgttcgatttccagtcttaatttgctccatagttctaatactgttggttcattatattcagtgagattctttatatagtaataagattgatttagtttgaactactatgtttctatattgcaatctgaggacaagagaggctgtgaacgtcttatgtatgtccttcaaaattatcatctttctgtattcgccgaatcgcgggttaattttcgacgagttcctaaaacgattttaatgacaaagtaatttatattggaaaatgtgaacaggaggccttttcaagcgaaatttgcacctcaggata

SEQ ID NO: 103008 - DNA, 943 bp, Mimulus guttatus
  Intron number 3 from transcript mgv1a000008m (locus mgv1a0 00008m.g) derived from phytozome v7.0 (chr-ID scaffold_94; pos 383314 to 384256)
aatccagagtcgagaaattataaacaatacttcaggtttggacatgactgcttgaaactctcttatctgatttactggagtctaagtggtatttgggtttttgtactaccgtaataggatttactcaatatcatacctcgtgttgctgtatatgttctgaagtatcagagtcataaagatgtttgtttgtatgatgtgtggatgcaaaaagtttaaacatgcaagggatatagtgattactattttttgggaaatgtttaaaaactggtatgatgtgagtaggcctatgccagaaagtctgagaaatgcgaactaattggatagtgttaccaaattaaaagccttcaaaatgtctataaactgttcaaatactgggaacaataaaggtttatgtttttttcaatgtcaggtacctactaaacataagggcaatgtttggattcgttttgggagttattttcattttattttgaggaaatatgttttgagggaataatttgataatgaaactaatgtttgtttataatttgctatgagacaaaatacaatgtagcggtcaaatcatgtttaaaggtgttagggaaaatgtattgtaaaagaagaatttgaaaagtaaagtgatgtttttttttagtgaagacaatttttactgtagcagtcagattttttatagcagtcaaatcatatctgaaggagatataaactttagaagttgttttgacattttttttggaaaccttaacaaacacgaattgttttggggaaagaattaaagttgaatgaaaacggaaccaaacattgcgcaaggcttttctaggccaatgatttcctagtatctttacatcgttgtctacatttatgttgacctttatgatggtgacattgccctgtgatatttttggttctagtctacgaggtaagcatttatatcaagttcctgctg

SEQ ID NO: 103009 - DNA, 997 bp, Mimulus guttatus
  Intron number 1 from transcript mgv1a009630m (locus mgv1a0 09630m.g) derived from phytozome v7.0 (chr-ID scaffold_126 ; pos 751058 to 752054 reverse strand)
cacttttgccctacttgtcaagtccgtgcctatccgtttattcctccgagaattacgcagctgccacctacttgaaacaagaaaacgagtctgcacggttgactcggtcaagttgaccgagtcgtcagagtggaaaatttggtcccgttttatgtatagaccgggcgacgatttgataaacaaaactcatctttaatttttgttgtgtctagcttatacgagtatgcaggggatcttcaatataaagacaagtttctagtttctacatttttcgatacgtttggggaatcgaaacaaataaataatgttatttatatgtcatagaaatcatcccctaagtgataaaagaaaattttgaaattgataaaagaagacacaaatttgaacacttgtaataacacatacacaaaaagaacctacaaatattaacttcttaattgaagtcttatagcacacttgttttaattttctcccaataatcaattctttgaaccagaaatttgttggaattgttggtagaaagctgccaacctgctgtaagcatcaatcgtcattggctgcataagaagaaaattaacttttagtccttcaagtttacctcaatttgacatttggttcccttcatttaaacaaaaaatgaaaaacaattagtgcctcgtatttcaaaatttaatatttttggtcatttcaatcaatttatcgttagtccgtcagcaaaattgacgaaaatgaccaaaagtgtgaaatttgttttttgtttttttttttttttttgaacaaggaggaccaaatgtaaaattgaggtaaacttaaaggacgaagagtgtgttttcccatattcaaaatatataaaatgaacaattactgaattcaatttttcaacgatgttacgtttaattgaataatactcacttgtgattgcccggcaaagaacgcagataaaggatcggacatcaccggaggagggtgcaatcggccgtcttgttgtatatcccac

SEQ ID NO: 103010 - DNA, 535 bp, Mimulus guttatus
  Intron number 3 from transcript mgv1a024288m (locus mgv1a0 24288m.g) derived from phytozome v7.0 (chr-ID scaffold_382 ; pos 86413 to 86947)
ctggtgctatttgtcatctgtgtttgaacacataggtttgtccagactgttgcccctattggtcttgactgtttctcaagtatcaaaataaaaaatatcaattctcatgtatgttgttagacagcgacagtttctgtacagtgatttgaattccaatagtggttgtgtacttggaacaatcagaactagacatgaattagatatcttcaaattttacaaggacaagtctgatattgggaatttttactgcatgctcaaaaaattgatctttcagtaccatttcatcagttctctcttacgattgtgcattaaaaaatgctaggaactcatcagttactggttacttatcagttgtcacgtattcatgtataagtttgcaacattaaagtatttggattttcaacttttttttgaagtttgtgaaaaataagacagactcaatagcatgtgattatgtcatagattgactatgtttttctccttttcatcccaaatggaaggttatcgccttaggttggtttcctgcttattgctg

SEQ ID NO: 103011 - DNA, 966 bp, Mimulus guttatus
  Intron number 2 from transcript mgv1a025856m (locus mgv1a0 25856m.g) derived from phytozome v7.0 (chr-ID scaffold_7; pos 3225752 to 3226717 reverse strand)
gcactggtatatgattgcctttttcggtgaattacacctgcacgaaataactttaaggtccatgtggtatcagtaattacaatcacctctaaaacattgttagaaatcctgacggaatactgcgttagataagttattccattaatgttcttccgaactattagtttcagacagtagtgagaacaacatagagctagtgggtgacatggctcccccaatatttcttaaatccttattatataagatttataaataaagtctctggtagcattaacggcccgcgaaaaacaaatatagtgcatatcggtccccaggacatgaaatcctggccccgacaattgtttcaggggtggggctataattatcagtaccagagggaccttaaaattattttaacatacatcaggggtgtagatgtaatttactcttacttttttttggtaaattacacctacaccccttaggtatgctaaaataactttaaggtccccgtagtatcggtaattacgatcacccctaaaacattgttagaaaccttaacaaaataatgcattagataagttattctgttagggttttaacaaactacaagtttcaagagtggtagagacaacatagagctagggggtgacatggttctcctaacatttcttaaatccttgttatattatataagatttgcaaattttcctctatggtagcctaacggccccgcagaaaacaaatatagcccatatccatccccaggacatgaaatcctggctctggcaattgttccaggggtgtggttgtaattaccaataccagagggaccttaaagttattttagcatacctcaggggtgtaggtgtaatttacccttactttttttttttctttttttgggtttccccctataaattttcttgattttttgaatatgttaaaacagggataattttctgatacttcaaattacagtggctt

SEQ ID NO: 103012 - DNA, 475 bp, Mimulus guttatus
  Intron number 1 from transcript mgv1a000193m (locus mgv1a0 00193m.g) derived from phytozome v7.0 (chr-ID scaffold_37; pos 792362 to 792836 reverse strand)
aggtacgtatcagctttttcttgattatgattttctggaagtctagattctgttggttccattaagaagaagtaggagaattttttagataacttgatgatgaacctttaatgtttatgttcgactcccaaagcgagagactctaggtaccaccttaagggttaagaacctcacattttctatgctcatctatttgtgtgcttgcatgtgagtgcggtctcgaagaagatcaactgattagggtttctggatcagattattcttcgtagtttcgcatttggtaaaacaatcattggactagttgatttttttctgtaatttgcaaacatcaaagtgcatgtgtgttcaagacacaactaaaaccatgctggaccagcattgtcaatatgcatataggacttcatgtggaatttgtactcattctttctttatttgttttcttcctttactttacattcttcactttttgtgcaga

SEQ ID NO: 103013 - DNA, 289 bp, Mimulus guttatus
  Intron number 1 from transcript mgv1a002220m (locus mgv1a0 02220m.g) derived from phytozome v7.0 (chr-ID scaffold_48; pos 1287821 to 1288109)
tggacttgttctatcgattcttctcactaaattaggtaaacttggaaaaagggggctttatattttgaacttacagttgtcaattgagattattatgtgaaaatcaatgtgttttctcattttatgattcctctatgtaaaatgttaattcgtttctataaggagaagaagtgtttgttttttaatttttcggttaatcgattagtaatgggggtttcatcgagaattgtttgctttaaaatgatcacgattttaaatgttattttgtatggtctctcacaggggttaa

SEQ ID NO: 103014 - DNA, 867 bp, Mimulus guttatus
  Intron number 2 from transcript mgv1a007014m (locus mgv1a0 07014m.g) derived from phytozome v7.0 (chr-ID scaffold_63; pos 175944 to 176810)
ccgttttcgagaaccaacaccacttcaaagggaaggtactattcacgcgccaccgtattacgatgtttatttttttttttgattatttcggaggtgtaaataatttgtttctgctcgattttctgttgctgtatctattataggttcttatagaaaaaaaaaaggaatgcgaataatacaataagcgaatgtgctggaaagataaaagcttatttagaaacgtaggttagtgattgtgagttaagttgatattaagtgcttaactctataagttggggaaatttgcaaaaaaaatggaaatcaatttaaataaaaaaaacaggtacatgggtgcttttgaaattatagcttaaagcagcttattttaagaaaagcaaaaacaaaagtcgattttgcaaacacctaaaaacaaattatcagagaaaaaaagctcatattctatttctaaaagcttttgcaaacaccaccttaggtggtgtttgcgaaagcttatttaaatgtagaagttatagaccgtgacacgtgagttaagttgattttaagtgtttaatttttaaaagtttggggtgttttgtgaatttgttggatgattaacttaaatagaaaaagcagggttatgggtgcttaacaaaaattatagcttaaaattgcttattttaagagatacaaaagcaaaagttcaattttgcaaacacgtaataatagattatgagctagaaataaaaaaacaaaagctcgtaatctatttgtgaaagcttttgcaaacaccaccttagtttgatgattttgaattgtgaagatttggactgagttaagtttatctatcgattaggctgttctagacgtaggaacggggagcgggatcct

SEQ ID NO: 103015 - DNA, 969 bp, Mimulus guttatus
  Intron number 3 from transcript mgv1a017090m (locus mgv1a0 17090m.g) derived from phytozome v7.0 (chr-ID scaffold_70; pos 253386 to 254354 reverse strand)
gaagtgaaacaattgaaagattgctctgtatcaaagttcgtattcctttctctctctcttttattttgtgtaaattacgaaaaaacccctcccgtttgggtaattacaactacactcgactatgaatcttcttacacatcagcccttgtattgcaagattaatgggattttcaaggaaattgggaaaattcgccagtggtacgccttgtatcgcattcgaggttcacggtttgaacaagatgtgtcttttggcttgtaaacgtcagattttggtgcatcagaaactgcattcttgtacgaaccggagtacaaattagagaatattgcacgaattatagaagattttgctggaattggacgacataaggatgaaaattcacagttgagggatggttgtaattacgcaaatatgagggattttttcgtaatttgacctcacctcaggggtggtcgtaatttacccttttattattgtacattttgaaattacttattttcttagttcatgatgagttgcaaaatgtgtttctacgatgtactctgtgtgcccaatgtttgtgatggctgctcaactgtgcttttgcatcgaacaatttcaaaattcatcaacacagtgctttgtagtttgtaccgaaaagaagttcccgttcatattcaatgaaatcatatttaccatattgttttgagtgaattattttaaggataatatatgatatcacagcttctaatcgagtaaagttcgatatgatcacgacgagcgaaaaatgtaagtacgaccccttatcaactaacggcctcgtttgatagtcttgatatatttacctaatcaaggcctagtgcatgtactagatagttcgttccatgaatgtcgattcttgatatctatctagtatttgttatagactcgatttttattttactttttactgagattttggtttatacgaacattttcagtgcattgggcac

SEQ ID NO: 103016 - DNA, 674 bp, Mimulus guttatus
  Intron number 1 from transcript mgv1a003462m (locus mgv1a0 03462m.g) derived from phytozome v7.0 (chr-ID scaffold_15; pos 2506762 to 2507435)
gtctcgcttctattgctgctaattgcaggttaggttgctttgcttgcttgcttgcttgctacactctctcattttttcgtttctttaatggatttgttttattccgctaatgaacttataatcatcttttgttctgctggttgtgactatttaatttctagtggtaaattgagaatgatacaaatgaatttagtgaatgaaatagattttgtattttcgatccgttttcttcttaaacttacaacttatccttcactttcggagcgcatattgcatttttattccttgatttactggtagagtgatcctctagggctaaatgtagtattaattagttgattacagctcttaattatgagtttattattctcgtaaaatgaatttgtttcagtggacggagcaaccattttgattagcatgtcagattccaattctttgttgattgtccttggaatattactgtgacctgtattattctttagtggatattctttccagcctcacatgagtatgataatttaagaacatcatttctttattttcttttttttgttttttatccgttgttcttccgaagtgcccatgtacaattttgtaattggtacacaatatttaagtcagatattctcgggtatacaggaatctgagagaactagatttgagggagagcgaag

SEQ ID NO: 103017 - DNA, 674 bp, Mimulus guttatus
  Intron number 2 from transcript mgv1a020545m (locus mgv1a0 20545m.g) derived from phytozome v7.0 (chr-ID scaffold_113 ; pos 715606 to 716279)
attggattcgtctttgcacttccgagttaactcaggtgctcatgaacacacacacacacacactaaaaggtgctaaatcatgtttttcttgcatcttctgtttgaaatttatattagagggtttattgcattcaacacccttatatttagtctaattgctaagaactccccgtgttataagtaatagcaaaaccgccccctaaaaattagtcattaatagttgcatcataggggtgtttttgataatatttattacatggggagtttttagcaattcgatataacatgggttaaatcatgtttttcttacatcttgtgtttgaaatttatattagagggtttattgcattcaccacccttatatttagtctaattgttaaaaacctccccgtgttataaataatagcaaaactatcctctaaatatcatcatgtagggggttgtgtgctaaaaaaaagtgcatcatgggggtgtttttggtaatatttattatacggagagttttttagcaattcgatataacataagggtattgaatgcaataaactctaatcaaagaaacacagtagaaaaaagactaacattaattgttgtttcaagtagttatagtttgcagtgtgttacaattttcttgatcaaaattccccaattatttttgttaatatttaggtaaa

SEQ ID NO: 103018 - DNA, 853 bp, Mimulus guttatus
  Intron number 1 from transcript mgv1a018368m (locus mgv1a0 18368m.g) derived from phytozome v7.0 (chr-ID scaffold_16; pos 1750359 to 1751211)
ttcacataaagatcatcccacttctaattcttcaggtaatttttccgggcttttgatctatgtttgtatgtatgttatttcttttggggggtacaaactgttatgctcagggtacaactcctgttgggcattggtaattctactgtttttttttaatgattttgtggagttcatattaggcactagttgaagaatgtgttttttgaagggtgcaaagggaaggtagtgaataatactgatgtgattaagctaaatgatttgtgcatatacgaagataaaaatcatcggtacatcagaaagaaaactggagataaacatttgttgtttggatagtttataatttaatcaaattcagcttccaaattcggatacgttatgtacattcgatgaaatacgaaaacactacgaatcgcatgaatttgtttaaagtttatgtactctgtttttatcaagtaatttcgttattcgtgattcgattatggtttagcttaggccgtacaatattttggtttatatctgtttaggccccgtttggttggcaagataagattagccaagataagattaaataatctaatgagacccaattattttattggagcttgaaacgtccaacaaaaaaaactcattcgaaggcaagataaggcaagataagccatgattatttaattttggcgggtcgacccggcaatttattgaggataccaaacatcaaattaagtccaactatttagttaatcatggcttatcttggcaaccaaacggggccttagtgcattatttttatttttttattaaatctaatctgcatttcttaggatctatcgacaggaatccgcctcgtcagaaattc

SEQ ID NO: 103019 - DNA, 126 bp, Mimulus guttatus
  Intron number 1 from transcript mgv1a017300m (locus mgv1a0 17300m.g) derived from phytozome v7.0 (chr-ID scaffold_8; pos 945923 to 946048 reverse strand)
caggtgattaattaagctgaatcccatcattcaagaatattttgtttcttgtcaaaatctatataacattggacgaaaacaaaaattttctgatgtttcgatatttttcgattttcgcaggtacta

SEQ ID NO: 103020 - DNA, 951 bp, Mimulus guttatus
  Intron number 2 from transcript mgv1a023671m (locus mgv1a0 23671m.g) derived from phytozome v7.0 (chr-ID scaffold_11; pos 2239757 to 2240707 reverse strand)
ttgttcgccttcataacttgctcggaaacaggcgagtcttctgaaaagtatatagctaatcactagtagaaaagaataactttttgctactgtaaaaagccgtaactaaacgtatatatagatgcgtccgtgatattataattaggtcaagctctagttttgatcaattccgaacatacttacatacatttatatatatattatagttttaagtaatctgaaattaataaagttgaaataagcttacggataccatttcgtgtttctttattttattttttttgcatatattaatcgtgggattaattgtaaaatgttttgatgatttactatatatatttctttctttcacttcataattgcttatacattgtccatattaatattaaccgaaagttctatgcgcacacatatatacacatgggtatgcgtaattatgtgcagatctatggttaacagatacctaatattaacacggcattcatctctagtagcacattcacattagcagtatatgaactttgtcaaaaaaaaaacgtatactatttgtcttgtaatgtgcagcttatttacaaaatagatatactaatatatatgagatgaatttgctagtgataagagatgacgtacgaagaaggtaaaggatataactcgatctttaacgggagatcgaaaaaacggaaccttcatttatagtatacatttcttcaataacaatattagagagatacaattaagttgtgacagcattttatttagtttttattttattacttcggacttataaggagcattcatgcagtaattgatttacaattatatatagttttaattagaagtaaaaaatcagacaaaacatacgtaaagacatagcaatccggtcgattaggttttcttgtttaacgacattcgatagcgttgttgcaggtggtcgctaattgccggtagaat

SEQ ID NO: 103021 - DNA, 846 bp, Mimulus guttatus
  Intron number 1 from transcript mgv1a009057m (locus mgv1a0 09057m.g) derived from phytozome v7.0 (chr-ID scaffold_102 ; pos 688528 to 689373)
gcccgaaaccgattcaggtgagggaaaagaagacttttcaattgtgagtacacagagttgaattgcgtattgaattcaagatctggcttgtgtgtgtattttgattttttacttggatttattttttgttgttcaagtactgaatcagagatcatgattttcaattagggttgggttgagttttgaaatggggagtaaatatttgaacagagatcagcattttgtgatggcattgttttacttaattgattatttgttaattttagtattcgcaaccgatcgaactccaatttttcagttagtattgtcgaagaacctgaatattgagtattgattgctttaactttcattttagattgataatcggaacatgttctagatattcggcctacgtttagtgacgagctatgtcttgtacattgtacttaaaagacgatgaatagaaaacgaagaagtatgataggtttcgatgttgcattgaagatttgaaatcaaactcgtactatttctcaacgaagataaatcagtttcgacttcatttaatttaattttatttaattatgaattgataggttttagcatatatatttttcaacgaagaaatccgtttctacttctttaacacttcaaatgatatgtattactatttgatgtttttgaatatcacatgaatttgttgtagttatcgacttgagttcttttcgtcgaacttcgtaaacgatataagttagattttatcgttttttttttgtcttttttctaaattaatcttctgtttgttgttcgtcttgtcttaattcttccggtacaggtggcatttaaaacaggtgattacagacagcaagt

SEQ ID NO: 103022 - DNA, 580 bp, Mimulus guttatus
  Intron number 1 from transcript mgv1a023488m (locus mgv1a0 23488m.g) derived from phytozome v7.0 (chr-ID scaffold_89; pos 534207 to 534786)
gtatctcgtggagaaaggttacactcccctcaaaggtacgtttttcggggtgataaattggtacaagaatcaaattttgaaacatttactaataaaataagttgataattatttatatgttaacaaactttctattgaacattgaagataataagatattacaaatcgtaggagaaaccaatgattgaactatcaaaacctaataatataattcttaacataaaccacccctaatttatttttagagaaactagaaaaggcaaaactagatatatatttatagattttatataaaatatataagttctaacaatattattttattcataaaaagaaaaatcatattataattcaacaataagtatgaaaaactattaaaatttacataagtgtatgttgaaaaacaaaattgaactggtcaaaacccctacttacaaaacaaaaactggagggtccgggtgccaaaattgatagagtagaacctcgataatttaatactcgataaattaataatctcgtttaaccaataatttatcactgtccagattcggtgaaaacgtactacataattattacttcg

SEQ ID NO: 103023 - DNA, 867 bp, Mimulus guttatus
  Intron number 1 from transcript mgv1a019697m (locus mgv1a0 19697m.g) derived from phytozome v7.0 (chr-ID scaffold_220 7; pos 5290 to 6156 reverse strand)
atttccaggtggcgttttcttaatttatgaatatttatttcacctgattttattatattctttataaataggccaaattgcactttactccctaaaaatgccttttttgcactttctcacctcaatatagaaaaaacgagactgcccccttcgaaatatacaactcagtcccaaatgtgtattttcggcttaattcttgtcggattgaaggttaatttcgtcttttaaagctttaggtgtcatttaaccttttttcaccctacattacaatcactacgaaaaacaaagaacaaattttgtcgaatttgaaagaaaattttgtctaatttggaagtgaatttcatcaaattgtgaagagaattttgttaatttgtgaacactaagtacctttgaaaggaggattttaaagcagaagatgtaaaatgacatatacacccctcattcggtgagaattagaccgaaaaaatacattttgagacaaagtccactgagttgcatatttcgaaatgggacagtctcatttttgtattttaagggggaaagtgcaaaacatgcacttttaagggagtgaagtacaatttacccttaaaaatacatatttaatttatcatgacacgccggcgtttctaatttgaaatagaaacaaataaaatattaaattacatacaagaccggcatcctatttttctagcatataatatgagctattgtgacaatattaaaacctagggtaaaattaccgaaaaatccctcatatttagataattacaatcacgtccttcaactttgttgcgatataactatcaatatatctaaataaaaaaaagttgtttaatttgcaggcaattgcaagggaagcaagaacat

SEQ ID NO: 103024 - DNA, 802 bp, Mimulus guttatus
  Intron number 1 from transcript mgv1a016801m (locus mgv1a0 16801m.g) derived from phytozome v7.0 (chr-ID scaffold_20; pos 953177 to 953978 reverse strand)
ccttggtacgtttttaaaaaatcttttttaaagatttgattatctctcttaatatatctaaatatcttatatataaaagaaagaaacactagggcaatctaagacaccctagtgcacatttgcaaaaaaaataacactttttttttattgcagtcaatttttttcttctaattacttcacatcaaatctcgactaagcccaatcctatccacaacactatattattataattgttattattatttttatctcatattatccagtctattttctctaattcttctttgtttcatttatttaatgatcaatttcatgttatgacgattaagtttatatatatttttttcaaaatgagtttgtattataaatttgtatatatattaatgttgttaccgatatcactaataaattttattataattgttattgtcatgtattaaactaatcattattttcacttttgaaatgctatctcgtgtatcgctaggggggaaaatgatagtatgattaataagagtaggaaaatgtggctgttatgatatatttgagagagagaaaaagtttctacctttatttctattttttcacaaaataatatatatgcttcaaagttcaaactatctatccccaatattttttttttcctaatttaatctaggactccatgtggcgcttcattttgaaatttaaaataatttgatatttattattaatagcaattttctttttaaacactttactgattaaatgatggaactaattaccagcacgagaagcacaaggcgaagaaggacccggagaa

SEQ ID NO: 103025 - DNA, 973 bp, Mimulus guttatus
  Intron number 1 from transcript mgv1a001395m (locus mgv1a0 01395m.g) derived from phytozome v7.0 (chr-ID scaffold_58; pos 423158 to 424130 reverse strand)
agttcaattggctggttgaccaaactccaaagattgtatctcgggcaaaacagcttccggggtatatttctttcttttttccagcataaatcatcatcaaggaaactatgatgttgaacaaagtgtatccgtaatgaagctttacagcgaaatttgtcctgctttttttcaggggaagttccatcgagcctacgcaatctgtcacgtttagaggacttgagcatccgcggtgcctctctatcggggatgattccatcttttatcttcaacatgtcttctctgaaaaacgtcgatttctccaacaacagtttttcaggaagccttccattagacatgtatattaatctccccaatcttgagcagctgtttcttagttcaaatcagctgagtggtcaagtttcgggcaagatatgggatggtagaaatctttcggtcctatcattatctcgtaacagattcacaggttacatacctaagcatgtcggaaatctgacggcgcttaagtacctgtatctagataataacaacttcacgggtatgttgatggattcaagaataaactatgtgtttatatcttaatgttattttgaattttcaagaatcaacatgatgtttgtggcaggtgaattgccagctgagcttggtaatcttaatcttgtggaaatcaatgtcagaaacaatagtttgtctggtgccattccaatctccatgttcaacatatcgacgatacgtatgatggaactttcagccaatcaattctcagggcagcttccttcagctatagagctttctcttcccaatctacaacagctttatttgggtggcaacaaactaagtggtcgaattccaagttttatcaccaatgcttctagtcttgttgtcttagagatggtagaaaactctttttctggcccaatgcctcactttggtggtttaagactcttacaacgccttttaattggagggaataatc

SEQ ID NO: 103026 - DNA, 616 bp, Mimulus guttatus
  Intron number 2 from transcript mgv1a018170m (locus mgv1a0 18170m.g) derived from phytozome v7.0 (chr-ID scaffold_125 ; pos 422555 to 423170)
gaaacaagggaatttgaagccggggattacaagtatgtttctaatttatctctttatctttcgtgcatgatgattgaacaatcgtagataatttatgctgcaaagatctattctagttacattgttaaaataatttcgatttttcttaaaagatacttagtaatagtagatttttgctaagcttaaaaaataaataaaaaatctcttaagggccgataatcgcaacattactcgaaaaataacaaacatgtcattccagccgaatcatactaggtctggtcatggatcatatgctggactaaatatatagaactttgtgcttgttcgacaaacatatgtgtatttttaaattgttgaagcaatttattttttttgcgaagacattattttaccatgacggtcggaaagagaaattatcgaaattgtttttggtaaacatttttaaaaactgaataaacagaaatttcttttggtgaaataatatgaagatttgtgaattaaaaacgaatcaaacattgccattctttacttttgaatattcattagttcattttttaaatgttgtcacgatgtgctactcatattatattggacaggagactcgtaatctatccca

SEQ ID NO: 103027 - DNA, 993 bp, Mimulus guttatus
  Intron number 2 from transcript mgv1a000423m (locus mgv1a0 00423m.g) derived from phytozome v7.0 (chr-ID scaffold_1; pos 416382 to 417374)
tttatttgcttctctactggattctggtctgcaaggtgcttaaataatgctactccgctaatatttttattcttcttctgatcatatgttgcaatttttgcagacaccaacgtttcaaatttgcctcttaaactgaactgtattagacttaagttaggatgatttagtagtcatagttactttctggaacttttcttctgatattgcttgtgataaattaattttcaagttccccagttagctattgcgggataagacgagacagataattcaattgatttgtgggtcatagatgtcagaaaaccattaatagagcagcagagctatcaatatgtatcccgttgattagggtaggcactgcatacaggtttttttgtgattgttcgcatattgagtatggaaagtttcttctatggcaagccttctattgaatccttaacttcaaatagtcaaccacaaatacttctaattaccttatcttgttcatcactaatatttgaacaatagtcagttgcatttatctcatgaattttctaaaagggagatttaatagtcagttaaataaatgatggacatattgcaacaagtggctctttcgtggggcttaagatatgctcacaagaagcagtagaatggtttagtttacaaattactatttcatgtaagcgagttggaaaagtagttgcctacattgtctacatgcatccacgagtcatagttgttattttttctcctcgtgatggatgacaaaatttcatctctgcattgctttattatttcttctcatcctggtgaatgcacaaatatttcattctgcatcagaagatcttctgttgagactgactcaacccttttttactacacgaagccgggagacttccaatttggagattaagtcaatccttggttccagcttttgattcagtttccatcaattatcagtttatttcaggatttgacttcgcagtttattgcttatatactacagggttg

SEQ ID NO: 103028 - DNA, 739 bp, Mimulus guttatus
  Intron number 1 from transcript mgv1a025816m (locus mgv1a0 25816m.g) derived from phytozome v7.0 (chr-ID scaffold_109 ; pos 38064 to 38802)
ccaaaaagctccattttaagggtgcaaggtgggattaaaccttttaaaattcgattcatttattaaaaaaaaaaattgaatatttttgtaacaatttttatgtattttttccggtggaaatttcataacaaaattgaaaattcattatttttttacttaaattatacgcttaactaattaccattataaaactaggatgattggattcaaaataaatgtgcacaaatgagtaatatcattaaattcaaaataagtagtcgtaatagaatccgattttcttctctaatcatccttatgattccaaacgtgacatatttagattatagaaacaagtgtgattttatgttatcgtgttacatttacttttactaattctatatgaatatttcagccctgactttggtcaactacctcgattaatcagtcaaccaagcagacttgatatggttaacatttaacaatatcatccaaatctcattttaatctgattttgattttgttcactttacatttcaagcagattttacataattatatatatacatattatgaatatatacaagtgtaatatttgaatatatacatctataaagttgttcaagaattacataatttttcgtagtctgccgtaacaaatagtgattaattttactaattaggaggatgtatacgagaacgatttcgacggttgttttaatttttttgataagtggtttcaattatcaagtgaaaggagacg

SEQ ID NO: 103029 - DNA, 267 bp, Mimulus guttatus
  Intron number 1 from transcript mgv1a001648m (locus mgv1a0 01648m.g) derived from phytozome v7.0 (chr-ID scaffold_89; pos 664595 to 664861)
ttggagtaagcacttcactcaaacttagtttcttattactgctatttttgctttgcgttctcttttctcaatattattatttaattaattaaaatatttgctgttgaccccaaaaaaaattcgttgttcttctggcttatgattggctttgaagtgagtactggcttattcttgattatatatgtataaaaacttgtatgtttttccctttttttttgaaattttattttcgtgttcaaataattaacttctctgttgttgcagggg

SEQ ID NO: 103030 - DNA, 461 bp, Mimulus guttatus
  Intron number 1 from transcript mgv1a000025m (locus mgv1a0 00025m.g) derived from phytozome v7.0 (chr-ID scaffold_18; pos 47703 to 48163 reverse strand)
tgctagctgatctctgcatccgtggcaatcccaaggtctgaatttattgtttgcctttttatctcctcttcactttttgtttaatgacatttattcgtgctttagtggcccaaaatggcaatacacgatttcctcttattcgtttgttgcttgtttttaacatgcttaaaattggttcgttttggggctacgtgaaggattggaaagtcgtttttctgtttgacacgtttaaattgctttgatctgtaatcaaattccttaaatttttatttcttttaattctacgtagtaaaccctaccggacatcttacagattggagtcccatgatcttctagtatatctatatcaattgttttttgttaacgtttctcattgggccatttcttttaggttcgcttgaatcgctaatattgtttaatccactggatttttttatgaaaaagcttaattaatttttagg

SEQ ID NO: 103031 - DNA, 740 bp, Mimulus guttatus
  Intron number 1 from transcript mgv1a024210m (locus mgv1a0 24210m.g) derived from phytozome v7.0 (chr-ID scaffold_26; pos 8071 to 8810)
ttggccgtgagagagccattgttctcaatttagaggtaaaaaatcctgcaattttttttagggttttgttattttatcgaatcatttatgcatttttctttttgtttgttgtgttttgaaattagtgcaatatttgatttaggaacgtgtcatttgaatcataaattcgatgcccttctcttctttctgttaggttgccctcaactttggattttttgatttagggttacagaatagtatgactatgttggaatctgaattaaaacctctgttatttatttgatttcctttacttgtatttttaagccaaaaggcgaaattgaggtttgggttaatttgacttttctggtttcaagtttatctgccttaggaaaataagaaataaaataaattaatgcatttaattgggatgaaaaggttgaaatgccctttgataatgtaagatttcttgaaatatctgaagtatgctgttgatttttttgaatttaaggctaagaggttcgattttttcagttcaatatgcaatcaatgtttggttgttttttagatcattttagaatttgattccgagcatgcttacagttattggttcaatacacaattccacatccggtggtgtttatgtaaaatattgctgaatctgaaattttgttttggatgtctttgattcgacactaactttgtcctttttcatggtgcatgcagcatatcaaggctattattacttctgaagaggtgag

SEQ ID NO: 103032 - DNA, 761 bp, Mimulus guttatus
  Intron number 2 from transcript mgv1a024210m (locus mgv1a0 24210m.g) derived from phytozome v7.0 (chr-ID scaffold_26; pos 8771 to 9531)
tgcagcatatcaaggctattattacttctgaagaggtgagttatatttgtatgtattcttcttttgcacgttatctgtatttttttattgtatctatattttcagtgatttaaaatcagttggatcactgagttgagtagaattcattgccttttcttctcaatctaaatttcccaaatattatctatgaagtccaagaaaagagaatgcatgttcttgaaaagtgattctgtgttggaatcattgaataatttagacttagtgtgcggtcgttatagcatattagttgaccaagattacaatcataatgattatgccttatttttatagcaggtttaaggactagattttacttttatgttagatttataggtttgagcactagattatgactcataatgaatattaacataattcacatcgggactttgtcatcccggtcaaagtaaaattatcggctttttacgtaactacatatttgatagatggaaaatatgaccagtagtttcttatacaaataaaaagcttctatatcattcttgtatggtacagcctgttatgaaaatgatagaaagtgcttctcaatttttgcttatgctgtttttgcaattctttattttccttttgtatccgttggaaactatgatttgataataatggaagtaaatcaaatgattttaaattctcggtgatacctaagttacaatcttcaattttttgaataatccttctttgtcaggtgttgcttcgcgatccgttgg

SEQ ID NO: 103033 - DNA, 862 bp, Mimulus guttatus
  Intron number 1 from transcript mgv1a011215m (locus mgv1a0 11215m.g) derived from phytozome v7.0 (chr-ID scaffold_52; pos 17083 to 17944)
cattcaagaaagtccagattcagagagacaacacggtaaccatcactgattctcgtttaggttgaaatgaacattatttacttttttgcttttagggcctttgctatattcacaattggtctgattagggttgggggaaatctgggattaattgattgcttgataaagatggaacaattagtatatcgtcaattgatttgtgtttttactttttactattcattgtttgggtaaatacggccccctgaggtaagggcaaattacgaaaaaattcttacaaccaacccatcaattatgaatcttcttacacgtccacggtccacctttatggtgtcaaattcaatataatcttctagattttgtggaatgttccctagtctgtactcgtttttgtgcaaaaatacagttttttatgcaccacaatctgatgtatacaagccgaaaaacatatcttatgatgatcttgtttccaaatgtggagctcgaattgggtaaaacggatacaaactgaagaatatttcaaaaattccactaaatttgacactgcatgggtggacgtataagaaacttcatagttgaggggtggttgttattacccaagttggagggtttttttttttgtaatttgaccttatctcagatatctgaggggtggacgtaatttaccctaattttgaatgacaaaagataggatttttgctagacaccaagtactgttagcctgtaaactgaaatggttattaaagaattaaactttctttttatatgaaattaatttttcaagcacttgcataaccaattacttttttcttttttctaaaaaaaaatattttgtgtgataaatcgatcaagcagacatttg

SEQ ID NO: 103034 - DNA, 846 bp, Mimulus guttatus
  Intron number 2 from transcript mgv1a022047m (locus mgv1a0 22047m.g) derived from phytozome v7.0 (chr-ID scaffold_116 ; pos 492261 to 493106)
accgcgtcaccccaaaaacttcgccggcgatgtcctcgatggcggatcactgtatcaccgccaaacgaagagaaaaaaacccggagaagatagaagacgggaagaaagaagagaggggaacgagagagagaaaaaaaaataatagaattagggtttggaatggtatattgcgttatttaaatgtgtgaggaatgctatatctatgataaaaagaatttgtgttggtcttctaaataaatatatatatatatatatatatatatatatatatatatatatatatatatatatatatatatatatatatatatatatatatatatatatatataaaagttaaattacggtcacacctgaggttatggtcaaattatgaaaaccccatcatgtttgggtaattatagccacatcctcaactatgtataatctaatgaaaagactcatccggaggtaaaaatttagggatgttaattcgagaaaaccgaaccgaaatctcggaacaccaatatgtcataccgtttaccaaactaaatatacgatttggcttggtaaataaccaaataacataaattttatgtaaaacctgactataattactcaaacaagagagtttctttgtaatttgaccatacttcaggggttgccgtaatttgaaaaaaaaaaaaaaaaacaggcgtagaagataaaagaaattgtgtttggatttcctaatcaaaattctctcatacgacacagacctcaaacccaaactaaaccctaatcataaaccacagccgccgccgcatatggagaccggcaatgctgagcgaagcactcatcttccccaagaaatcaccgaagaaatat

SEQ ID NO: 103035 - DNA, 857 bp, Mimulus guttatus
  Intron number 2 from transcript mgv1a007975m (locus mgv1a0 07975m.g) derived from phytozome v7.0 (chr-ID scaffold_123 ; pos 120382 to 121238 reverse strand)
ccggtacattattaaggcttccagtttctggtaaactactatgtgataaatattttctgttacttttttctttaaatgtgaagtgcagtaattggaataaatttgttcaaaaatgattatgtatttacgatatcccttttcctcattttcgtcaagttgaaatggaaaatgtactgtattccactctttgtcatctactgtattacgaaagaatgcacgtgtttggcaatttactatgttaaaaagggaaaggagagattgaaaatatgttttcggtaccacaaccgcatggtattcattattcaggcaataagtggtgcatgctgcaatgaaaaggattcccaattaaaaaacgaaaatgaaatggtactaatacattctctctgctctgtaaagactagtcaagttaatgtggtaacgttcggaaacagagaacgtgtgtttatatatgcatcaatcaggaaatggtagtcgtaaagacctctgaaaaaactctgttgttttgctaattattataatttgaggcgattacgaaacgaatagttggagtctctgctctgtaccaattaaagacggcctctcgtcattttttaacaaaatttacacattacatggaaaatatacaagttttctccctttctgtattcgaaaatacttttacttttgcagatcaaactatcccccaaaatctggttgagttacgtgaagactgtaagctaatccgatatttctttttgtttttgacggtcaatcatttctaatccgatgttttttttttcaacgtttcctaagtgacattttatcctttgtcttctccctaatcactgttcaggtaaaggagtctacagaatcttcgt

SEQ ID NO: 103036 - DNA, 608 bp, Mimulus guttatus
  Intron number 2 from transcript mgv1a004180m (locus mgv1a0 04180m.g) derived from phytozome v7.0 (chr-ID scaffold_75; pos 85123 to 85730)
cctaggtttttctctttcttataatctcctgtttctccctctcaatctctcaatgctctctgattatttattgtagatccatcgatggactttggatttctatgaaatggatccatttatttatttactttttttgtcgcgatccggatttcctttgttaatgcggtcttttcaggcaatatttttcttcataagctttgtagattgtttcttactttcggatcggttagtaacctctgttcaatttcccaaatgaaacactatctcgatgaatctaaatcgtatcgagttttagggttctattattctctattatgcattttgggacattttttgaatttaattccatttttggcgttgtgttcttgtcttcgttctctctatctaatgcatttgtccctcttcttcacttgtattgaaacactatcttgatgaatctaaatcctatggagttttagtgtactattattctctattatgtattttgcttcatttttttttgaatttgcattccatgttcaagcattgttttcacgtgttcgttctttctatctaatgcatttgcccctctctcttaacgcgcagtgacacatctgtgggtattgcaa

SEQ ID NO: 103037 - DNA, 723 bp, Mimulus guttatus
  Intron number 1 from transcript mgv1a004395m (locus mgv1a0 04395m.g) derived from phytozome v7.0 (chr-ID scaffold_106 ; pos 691079 to 691801)
gtttcgcagtagaaggaaggtttatcttactagaggtacatttccgcgctattttatttattatttatttatatgtttggatgatttttttgtagtactgtgtataaatttatttttcagaggtttatgactgctcctgattagagtgatggttattattattaatttttttgtgtactttaaaaaaaaaatttgggtgttctaatcaaatttcgttttgcatgccatcttcaccagttctgcttctcctttacaatgtatatgcaaaattactttatgctattatgttggttgttttgcattaacggaaacttaatcatagattatctcttctgggaatgttttgtgaattatgacttttccttttagtaatgtttatgcagaagctaagatctgtatagaagaagttcactgaatttgagttctctatgattgtctctgttcttggtgaatttgatgaatagtgtgtggttgttgatatctatatcagtaattaatcaactagagcatataatcacttgccaagtaatacttgcatcatgacagaacacttgactgtattagtacagctggttgtttctcgattgggtaatttatttatgtttccattgatattgttgttgcaagttaatttcatgtatgtgcttttgactctttttaatttacagtgtttctttttgttgaacagagtcaagtaataatcaacttaataccagttacgtt

SEQ ID NO: 103038 - DNA, 756 bp, Mimulus guttatus
  Intron number 2 from transcript mgv1a024769m (locus mgv1a0 24769m.g) derived from phytozome v7.0 (chr-ID scaffold_238 ; pos 248382 to 249137)
ttgagcttcgcacgtgaccgtttcgacattttcaagtattgccattgctgcaccttatcgcattttctgtttaccaatatcagataatttatattttttatccgttggcctcgtttgtttgggtagattagccatgattaactaaaataattggactttatttgatgtttggtatcctgaataatttgccgggtcgacctgcaaatattatgttatcatgtcttatcttatgtcttatcttactttataggcatgtattttattggatcatcgaaggtccaataatataattgtgtttcattagattatttaattttatcttggctaatcatatctgggtaaccaaacgaggccttggaagatatatccaaggaaagcatagttaaataattaaattcatgatgttttgtgctggtatatgctggaaatttctggaaattactaatgtatttgatttttatagtgtgggtcgaacagagaatcatagatctaataagtactaaatctgatttgtgttatccatactttgattttttttttttggagtaaaagatgatgaaaactggaaatataaaatatatgtttttgcttgttaaagatttatgatttttaatctgcgagggaatttgtgttcgatgttatggttgcgaagtactgtgctaaatcgtaggtcaagtaaattcgtcagtctgatttcaagagttttaatattacgttgcaggtcattgtccaaacaagatatccaaacaattgtag

SEQ ID NO: 103039 - DNA, 777 bp, Mimulus guttatus
  Intron number 1 from transcript mgv1a015150m (locus mgv1a0 15150m.g) derived from phytozome v7.0 (chr-ID scaffold_55; pos 990367 to 991143 reverse strand)
ttattgagatcctccggcagccagctcccgctccggtcatcctcagtcatcctatgcaccaccgatatcaacaaactataaacataatgcgaggcggcacttccacagaagtaaaaagcaccacccacgctcctcatattctccgggaactgcttgtagtaaaactcaatctgtccaatcgcattaaacgcctcagcgaacccactcagcgtcagctgtgggaccagccacatcgctgacatggcggaaacagggccggaggcgggccccaccaaagacctcctcctttcctccacaacggcccccacgagtgatccgagtatggtgaggaatattccgattcccattctttggaggattgtgatgccgccttcttgttttgttagttggcggagaaaagggacgatgactcggtcgtagagcgggacccacagggtgaggctgagcatggcgaagactatgtaagaggcggcggggatttggaagcttccgaggtgtctgttggattggagtgcttggaagactacgtactgttgctggactccgatgtggtagaaaatggctgtgagtgaaactgggatcactcttagtacgcatttgagttcttccacttgttgtgtggtgcagaggctccatggattcgaggctgatccgtctggttttatttcgtcttctgctgttattattgctgctttgtccaagaatctgatgagtaatcgacgaaaaaaatcgttttaagtagatttcgattgaaggatttgatcatatcgaaaacag

SEQ ID NO: 103040 - DNA, 245 bp, Mimulus guttatus
  Intron number 1 from transcript mgv1a007343m (locus mgv1a0 07343m.g) derived from phytozome v7.0 (chr-ID scaffold_2; pos 3058279 to 3058523)
gtttctaggtatttttcctcttctctggcagtcctgagtttcttaagtgctgtgttttaacccaatttgattcgtgtttgttacaattttccatggctttgcgaatagttagagtggtgaaatttctacaattggggattatgaatctactattgctgttggtaattgcgaatacaggatcgtaatttaatgttttgtttatccaaacagaacttgtcttgctccgctcgagaggctaaagctgg

SEQ ID NO: 103041 - DNA, 472 bp, Mimulus guttatus
  Intron number 2 from transcript mgv1a025090m (locus mgv1a0 25090m.g) derived from phytozome v7.0 (chr-ID scaffold_196 ; pos 516819 to 517290)
caaggtatgtacttcacttgtatgtatatgtatatgtatatacacacacacacacgcacgagaagaatttggattactgtttttcacattttatgcgtgtgtgtgtgtgtttgttgtggcagaatcaatgatggctgttgcttaaagttttaaattgttttgattggttgattaaagaggtggatataatcaaataatgtaatctgtgaatgtttttttgaagcagatatactgtttgataagttgtctgtatcagattaggcgaaactgatgatttgttcttgtacaaattaaacatgacttggtggagttctaataatgaattaataatccattttttttatcataaaaaaaattgttttaaattttataattattgctggattaataagctccatctctgtttttttttttttaatttcaaatgctttgatatagtttaattaattaataagtgcaatgtgtttgcagg

SEQ ID NO: 103042 - DNA, 636 bp, Mimulus guttatus
  Intron number 1 from transcript mgv1a003378m (locus mgv1a0 03378m.g) derived from phytozome v7.0 (chr-ID scaffold_8; pos 3427985 to 3428620 reverse strand)
ggttgtcttggaaattggttgattcttccaataatgtaagtgatttcctgtttcatctgtttatcttgctatttcttaaactcgagtttgtttccacttttacccccttcttctcttgcatgattgttgcagtacatcaattaatcataatgttgattcagtttagtctttgtgggtgttgtttgattaggaaaatggggcattttttagagttttcggcatctcgttttactcgttaacgatgtctgtttggataatgatgacataagtttaaacaaagtaagaacatgctactagaatgttagatagaccaatcgagtaacagttgatgccaagagctgatttgggttaggtgcatttagatttttcgacacgctattccaaatgatatttcaactacgaatgcattgagaatcgtcgtctcttcaaatactactgaactttgaaatgatttatttttttatgtcaatttgtcctttttttttttttgagtaatgtcaatttgtcccttatcgaagtcggcttatgtggactgctctatacctgcattttacatgctccatcggttaaatacattttcttacatctaccttgtgcgaagatgaattcattaagttttctgtacattacatcagg

SEQ ID NO: 103043 - DNA, 642 bp, Mimulus guttatus
  Intron number 1 from transcript mgv1a025447m (locus mgv1a0 25447m.g) derived from phytozome v7.0 (chr-ID scaffold_290 ; pos 153708 to 154349)
ccatactatcggcaatcttactgaaagaatttgtcccgaattcgtattatacagagatgttatctgaaatgttgtgacacttgagacaacatgcagcggaaatataaagattaaaagacagtactcagaattaaaaatgttcacaagtaaagacttgtgaacttgccctttacaggacggaaaaatatattaaaatcagtattccaagaatacaaacagaagaggtgcgaaaacttcttccttatgaatgaatctttttcaagatcattcttacaatcaaatctagatactaaaagaaaaatattaaaaattctagatttcaaagaatgtactcgtgaggagtacgtaaagaacttatgaatgaatcactatcttgatcattcttacaaccaagtctagaaacatatatactatacaatctagactacaaagaatgtacttatgagaagtacgtaaagaatgtactcataaggagtacgtaaagattgtactcatgaggagtacaaacgaccgattctaaaaccactctaaaactctcgtgaatattcttcagccctcggtttttatttcgtagaatcgattatcttccttgagtattgaagtcggtatttataggcattccaagcatccactcctcagccc

SEQ ID NO: 103044 - DNA, 751 bp, Mimulus guttatus
  Intron number 1 from transcript mgv1a008242m (locus mgv1a0 08242m.g) derived from phytozome v7.0 (chr-ID scaffold_1; pos 800340 to 801090 reverse strand)
aaacaggtacggattattttgtcctttttttttcggattagtgaatttaagtatcttattgtatatgcgttcgtgttcttcgtaatgtgattcgccgtaatgaaagggatataggggtttgtggaatgattgattagaatgctgacacaaccaaaatttctagtgaaagcgggatcctagattaaatagaaatatataaacgattcaatttatagattttcgaattttagggattttgtttctaaagtaaaattaaaaaaagacaagcatgtttgaattttatagtgatatcttgatcttagttagttttttcgtcatttatgcatataagatagtgacaatagtttttatgatctttgtcgtgtgcgtatgttttgtatttccagggcgagaattaggaaatgagaatttgacatatttgtattatgttaccatacgatcatttttttaaagaatttgaaatcatttgcatggtctcgttctattcttggctatgcttgaatattattgacgtagcagtgcatttacttctctgaatcgatctatttcatctgctgcaatgttactgtcgtttatattttcaaaggtgttagcagttgcatttgtcccacattgccaatttgtcgggaccttataatgtttaattcacgtgctgaaaaaacaaaacggataagtaaattagtggtaataatattcttgaaaaactatcgatgaaggtgagggagcctggtgcaagaggctcatacttgaa

SEQ ID NO: 103045 - DNA, 682 bp, Mimulus guttatus
  Intron number 1 from transcript mgv1a020196m (locus mgv1a0 20196m.g) derived from phytozome v7.0 (chr-ID scaffold_7; pos 1800095 to 1800776)
acttccaggtaattaatttatttatttaattcaattactccctattttcataatattttgtaaattaatatttctaacaaaattattaatttaaaaaaaaaaattacactcataataaagaattttttttaaatataaggaagacgcaaattaatacattatcagaactctaaaatgatatatactcagggaaaaatccctaattcgcgatttttttagggtactaaaaaatttgaatcatatagaaacttttgtacatagtattttttttggaataattagattaaataacacaataaattaatacatgtgatatttggacattgtaaagtacttcctccgttcctaattaattttcgtttttagctttgcataaatattaagaatctcaataagtgcgtcttgatttttagaaaaaaacacattaaaagactgaaataaccatgatcatataaaaaacgtattagagtcgaattaataagattaaaataggaaatataacgcgtttaatgcagtattgaaaatctaaagtgacatatattatgaaacaatttttttttttaaatagacagttattatgcaacagatgtagtaagaaaaaaattattaaaaaaaaacaaaatattttttttttacaaattttggtataatttgcaggcaatttcaagagaagcaaaagaat

SEQ ID NO: 103046 - DNA, 668 bp, Mimulus guttatus
  Intron number 2 from transcript mgv1a005119m (locus mgv1a0 05119m.g) derived from phytozome v7.0 (chr-ID scaffold_126 8; pos 3613 to 4280)
aaaggtgaagtcgacaggtattcttttgtatgttcaactcgggattttttggttccgtttgctttcggttggtactaggattagtttgtgatttccttgtgcgaatgttatgattttatgttggttttccttacattcattcaccatgatggatttgcgaagataattcttcgcggtcagttacttgaagcctgactccccaaaaaagggataagaaaaaaaaataatgaagacattcttctttcttatgtttgatttatcaatagttaagtggttatatttttttccctgtgtgtttataaatgccgttaccgttgtggacttatgactagctctatcatagtgaatcgtggtcgatcttttcaattgaatgcagtgcacatttttttctggtatgatcgccttaaagctttctttgagctgagaaattttaatgttctgaaaagtggtgttaattgtggtaatgcttaagtactgaacagtagctagaaatcgaaagttattcttcatgttgaagttatctcttttcgatccttgattcttatatgaaaacttctttctggtggataatctttcaaatacatttattttcaatgtattttcaagacaacatcctgactaatttgtatgcagtaacgaggaacttaaacaatccattaagcaaatca

SEQ ID NO: 103047 - DNA, 278 bp, Mimulus guttatus
  Intron number 1 from transcript mgv1a013991m (locus mgv1a0 13991m.g) derived from phytozome v7.0 (chr-ID scaffold_18; pos 486776 to 487053)
gttctctgttcatctcgcgcttggtggtggctcaggtattttttctatatatgcatgatcgtatcgtaccattcagttacaattcacccgattcatcgaaattatatatgcgtacattggtttgtagcgttttttgattcaatcggctgttgatccgtttcaattagttgcagtcttctttaattattaattttgagcagcgtttaagaataattgtttcattttctgtattgcgtgatgcagtagctgacgtgttgttgtggaagaagtggcaccgg

SEQ ID NO: 103048 - DNA, 824 bp, Mimulus guttatus
  Intron number 2 from transcript mgv1a009646m (locus mgv1a0 09646m.g) derived from phytozome v7.0 (chr-ID scaffold_7; pos 631184 to 632007)
gggccccggatttcacactccacgagttcattcatgtgagtcaactcatgtgtttgattcattaatttaatcaggtttgccggttgagtttgttcctttccgatgtcagtatactgagagtgagctgtttcactgttttttttatgcattttatttaaattttgtcttattgttattgttattaattaaatcgtttttgttgtttgttacacgtgaacctgtcgtgtgagctgcctatgtttgatttcgatcgggaattttccgattttggaacaatttttttttattttttattatgaattccaaaattcatttccgaattttcgaactttttggatcggagttggaatatttaagagattccgattttaatttttgattttttttttcagaatattctgatttttatcccgaaaaaacatttataacatcaaaattattatgtatttcacattgcaaggttactgaaatttggaatttttcgaattccgtagacttcgattttgttaagttttctcattccgattccgaaattatgatttcttctgatttttttggaatgcaattggaattagtttttgagttcctaaaaaattgatttttttgtcagaattgtattgaataacatttgatggggaagttaaaatatttacgaacatttcgttctttaagctatacattaactgagaagcatcgattaatctttctttaaatgatgctcgatggttttcttttcttttcgattctattgcatgaaaaaagtacttacataccgatgaaatttacgtatctcactactaattaacacattccgttggaagaaa

SEQ ID NO: 103049 - DNA, 289 bp, Mimulus guttatus
  Intron number 1 from transcript mgv1a010671m (locus mgv1a0 10671m.g) derived from phytozome v7.0 (chr-ID scaffold_8; pos 3250416 to 3250704)
gccgtcggattcattctgcaatcggccctaactttgtaatttatctcattttcttcattgctttcaattattactgttcttacgtttcatctattcctctctttttttttttttttttttttttttgatttatgcgatttgaggtttcctctaggtcaattcgtagttgaattcttcgaaaattgtcttgtttttatccaatttatttattttttgtgcattttcggtaataatatttatcctgcaaaatttgatttggagcaattgtattgatggtggacaggcataa

SEQ ID NO: 103050 - DNA, 752 bp, Mimulus guttatus
  Intron number 2 from transcript mgv1a015225m (locus mgv1a0 15225m.g) derived from phytozome v7.0 (chr-ID scaffold_181 ; pos 302288 to 303039)
gcctccaccgactctttattcaggttaattatttgatgtttgtttctgtgtgttactctgcttctgaaatcagttcgatccggtgttatatagtgactgcaagttgaaatttagcagttttatagtgttgaaagtgtgagttgagtgggtgattttcctatatatttaaaaaaaaaaaattaattactcactcggttataaacagtgatataatcgtgtgcttactgcgtagtaatcgacagtgacgtttaccttaaaagccctaagaaattgattggaaacacatcacattgggggcgtatttggtttgtgtttttcgtagtgtcggaaggaattggggatttgaaaggaacaattatgaatatattttcggttactatcgagttagttgtaaaatattatctccttgaatacacataaaaatggtacgggttcaatctctactatccatatggaagtcgagtgtctgaaaacttcgcagaattaatgaacaaaacacaaacggcagcatatagctaaggttttttcttttcatagtagaatagtatggttaatacgaagagaaagcagaagtaatctacaaacacaactgcatatgcattttactgcacggttactagttaatgttgtcaaaatttgtttcaatttcgttgtgtactagtcctaaagatctatgtgtgtgtcctacttcacgaaccttttaactgtctctcaattattcttctacatatttcaggtcatctcttctctgc

SEQ ID NO: 103051 - DNA, 515 bp, Mimulus guttatus
  Intron number 5 from transcript mgv1a002370m (locus mgv1a0 02370m.g) derived from phytozome v7.0 (chr-ID scaffold_122 ; pos 39739 to 40253 reverse strand)
caccagatccttgcccggttcttgcttccattgcagtaagtacctttctatgaattgttctttagaattattagtcttttctcccaattccatgagatctaatgcttttatgtgacctgaacatagtgaacttactttatgctgtgtacataacaacctggttttcactttaagctaaatatgagatatgtgacatcgtgtcagcaaatatctaggtttgttcttcgaaattggttcgtagtagcattacataaaaagctgttttgagtttggaccccattttggtaaggttcacatagcccacttttggtttgtttggttgatatgtgacatctaagacgtggtatttgctactgcagatgtattaatcctctacatcttatattttaagaatttacatcagtggaattcatgcatgttcagtgcaaatttccacttctatgtgatgctctcttgcacctcctgaacctctatgtttgcttctttccgacctaacgtccttgtgcaggataagg

SEQ ID NO: 103052 - DNA, 527 bp, Mimulus guttatus; identical to SEQ ID NO: 101889
  Intron number 2 from transcript mgv1a009019m (locus mgv1a0 09019m.g) derived from phytozome v7.0 (chr-ID scaffold_56; pos 1213955 to 1214481 reverse strand)

SEQ ID NO: 103053 - DNA, 953 bp, Mimulus guttatus
  Intron number 1 from transcript mgv1a023471m (locus mgv1a0 23471m.g) derived from phytozome v7.0 (chr-ID scaffold_35; pos 1331041 to 1331993)
tcttccatcaaggacatcttcaacgccaaattaaggtatgtttatattattaacttcaagaaacatgttcttgcatgatcattatggttttacgaccgttgatcaactaatttttccggcaattttgaccggaatgctaaaacatgtgcattgcacgtgatatttgcagggataaaattgtccattcacatacatcttatattttaatataaattaatcatttaaataaataaaaaaaaaaagaaaaaaaacagagctgtaacccaccgccctccgaaaacccaacccatcccaaggccaagccaacatcccatcccaactaaaatttcaatagtccaatatccgccgccagggattgtgaggacggcggcgatggaggcggagcaaatctccgccgccatagagcagaggttgctcaaggataaaacggtgccgccgccggctcccgtacgaccatcatcaagaaacaattccataatcagccttctctacttgtcctctccaaaaccctcttcctttccccaccgttttcctttcctacatctcgttcctttgattccacctctccctaaccatcttctccgttttcctcttgttcgtctcttccccgcacccactgccgtatgcttccgctttcgagatatcactttcgtttatcaacttgagcagagtgtgttgagaaagagggtcggaggtggtcgtttgtctgtgttgggcctgttatgcttattttaatgttgattcgacttcgaatttggttgttgtttgggagaatttgggatttagggtttttctggtcggtttgttgcaaatccagatattctgtgagttgtcgagttttcttttattaattatcaattgataatgtgtgtttgtgcgtgtaattatcatcttcaataccttagatatttatttttttctaaacataattttttttggggcacagctgcaag

SEQ ID NO: 103054 - DNA, 543 bp, Mimulus guttatus
  Intron number 4 from transcript mgv1a004863m (locus mgv1a0 04863m.g) derived from phytozome v7.0 (chr-ID scaffold_2; pos 808212 to 808754)
caagtaagtactatatattattgtccccataagaaaccttactggcaatagcagctgctttgccttacttaatttttgcaattatatattcctaccaaatggcttttgttttgtatgttaaaaacctgatagcacttgcattcatctatctaaaatggcagttattaatcgtgaattgcctagaactagcctagctatagtcttctttccttttccctttgtgaagtatgttacatttaggagatatttgatataacttcatcttacttttagtttcttataaccctccatttcatttcttttgctgtatgtgattgatgagaagttttctagttaagatttccttaattttggatgacgattatagttttcatgtgcacatttgtatggtcattgtatgtgaagaatgtgatgtcttagcgcaatctctgtaccttagcaattacttcttccccattccagcaataatctatgtttcgttactgggtcctgatttttcttactaatattttaaaaaatctttatttttgcagacattctttg

SEQ ID NO: 103055 - DNA, 755 bp, Mimulus guttatus
  Intron number 1 from transcript mgv1a010387m (locus mgv1a0 10387m.g) derived from phytozome v7.0 (chr-ID scaffold_6; pos 1083410 to 1084164)
aaagattattcgtttcagctttcgtgaaatttcaggtattcccgccatgatttcttccttaatatgtacgttacctgaattagatttgttgtcctgggttaattgatttttctatgatcggaaaaaaaaaccccccaatttaagttcttattgcgtaagtagatggtgtgattttgtcagcttatatgtgcggtttatgtttgttgaactgattctagggttaaggaaagagttggtattctcgtaaatatattgtatgcacttttgactttgttcaatttccctttttctgggttaatttgcttcagttgatccaatcgtatgtttatggggtatgggttacctttgtatcatgatcaattgtaaaggggaataaagtaaaaaggggaaagaatgaacaaaaggtctttcggttgtgaattatgtaatactgcaaagtttcgatgctttttatatcgcacttatccttcatcgagaagtgtaagatttggatcgttaccgaagaaagtaatcgaaggattttgtccgtttttatggttcttgatcctggtttttttttttttctgtctaattttgtcgggacctttacttttcttttatggttcttgattctgttttcgtttagttgaagtttcaattgtacggggtttatattcttcttcccagcgatgtttgttgcctatgtatgattcttacactgtttgttttatgtactttcaggttctcgtcgaaacacagacgacttcttttattga

SEQ ID NO: 103056 - DNA, 789 bp, Mimulus guttatus
  Intron number 2 from transcript mgv1a010387m (locus mgv1a0 10387m.g) derived from phytozome v7.0 (chr-ID scaffold_6; pos 1084738 to 1085526)
atttgagcagggtatgtttgtcttttttttttttttaattatattgagctttttttgccagtttttattctgttaatgcatgcacggaaatttgcaatgtcggaagatggaaaatggctcgatttttctttgtgtttggtatttgtgaggattaatagataatgcatgatggaaccttcatttgttgcctcctttgagctttacatgttttcacgatattgtgaacatctggtatcactgctaaattaaacgaacacacacgcgcacacacacacacacacactgacacacacacataaattaaaattaaaaaaagcagcaacatcaagaaatatgtttgaagttattctttattttctcttcgttggatacattaggtggcgggcaacttttccatttatgattttctcatttacaccaatctcttatttattttttattatttttatttttttattatttttatttttcttataacgaatatctgtgttggggtgtggagatcagtataatcaccatgcttatttttatttatttattattttttttttagtgtaattcgtgttagttgcaattggagaaattggtatattcgtttatgtatgaaacaaataatagattatagtattgacctaccaactgatattattggagtatggactatacgatttatgcataattgctattcgtttatcattatgctatcatctctcgttgttcatcagtaaatttaattaataatttggcaatcgaatttagggggagaagcttctcggaagtctgggtgga

SEQ ID NO: 103057 - DNA, 1050 bp, Mimulus guttatus
  Intron number 1 from transcript mgv1a008824m (locus mgv1a0 08824m.g) derived from phytozome v7.0 (chr-ID scaffold_30; pos 1955312 to 1956361)
tcatcgtagactcactctgtttcatctcgcaagtggtatgcgtttcctttttttccccgtattttatgctgttgtgagattcgatttgccttctgaatctgtgtaatgaatgtatacatttggcgagtaatcgtgtttaccgattgtttctgttctttatatgtatattataaatatattgtgttggtgtcgattagaacaaatcgatttcaatttttgctgaggtccattgttttaattctatacactctgttcttctagtatgtttgattgagctatggtgatgatgaggttgacaattttggtttatgctggaaggagaagtaatttatgctgtgttaatcaattactaagtattgattaggggtgtgaacgagtcgaatcgagtcgagccggacgcatggttgttcaagcctcattgaatttttatcgagctctcaacgttgtatttgagcttggtttaataagcaatccggttacgaatcgagctcgagtagcttgtttttttttttacatattttatagtttgttttttaatcgagctcgagccgagcttcatagcttatcaaatgaaattatgtgttcaatctccgtttgttttaacaaatcgagatcaaactagcttttaacaaacggtctcgagtaaaatgatttattaactcttcaattatgctcatttatagtaaataatcaatcttggtgtactgcaatcaaaatttatgacagatataacttatatcatttgatttagtagtttgtcggtcggagtttggtcacgttgtaacagcttttatggtaaatgtagccagagagggtgacgtggcatgcaaattctcagcttccatctgcattaaatctttgaattcattattacagtacactagtattgctttattatctattttctttaattaaatttacgtcgatcttcaagaatcaagtattacaatcatgagtttaatcttcgatattgttgggttgaaaaaaagcttctgatgatctgaatgttttccagcggtgccacagttgcagtcatttgggctttgggct

SEQ ID NO: 103058 - DNA, 772 bp, Mimulus guttatus
  Intron number 3 from transcript mgv1a017779m (locus mgv1a0 17779m.g) derived from phytozome v7.0 (chr-ID scaffold_85; pos 504631 to 505402)
ggctcgtgaaagaagagagctatgtgaataaggaggcaagtgttgttgataatcaagaaaatggtgatttggttgatgaaattggtgataaagatgaggttttgatgaatgaaaatggtgaagaaaaaagatgaaaattgaataaaatcttgatttttttgttgttttgtgaagtttgcatggttttttctatgttcttttttgggggttatgaagtttgtggtgggtaaaaaattcaagtgttgtgtgaattgtggtgtagggaaagtaattaatagctaagtttattgttgttgttttgatcatttgatacaaggattgtagatttttcctatttgttcatgaattgcttttttttttttttttgtttagtttttttctagttgattatgactaaaaagtagaaattgaaacaatcacaagaaaaaatgcaattgggcaagctatgtacgacgaactcgatctagaaagtgttggtgcggaaatcgaactcgaatcattagacgtcgcactttctagtaggggtgagatcggctcggatcgggtcggttttagcctaaaaccgaacctggaaccgaaatggtcggttcacgaagaaccaaaaaccaaaccggtcggttcatgtcggttcggttctagtcggtttttcggttttttttttcggtttcggttttttttcagttcctaaattttcggttcggtttcttaacggttccggttttcgggtcggttttcagcccttttttttctctaaactaaatttaaataagcc

SEQ ID NO: 103059 - DNA, 838 bp, Mimulus guttatus
  Intron number 1 from transcript mgv1a014657m (locus mgv1a0 14657m.g) derived from phytozome v7.0 (chr-ID scaffold_16; pos 2400602 to 2401439)
cgctgcaaaaatcccccaaaatcccctcccctcaggtaacccactccgccatacgcatatctatgtgtgtgtgtgtgtgtgtgtgtgtgtgtgtgtgtgtattatttgtattcggagcaaatgcccaattttttttaagacttgtcagcgaaaatttgattttgattttaattttttggtgttgaataaattataatttttttttgtgcttaccagctgagagtctgtctaattttgattttgattttgattttttgattattgagaattttttatttttttatttttgtattgcgcagaagctaattttagtttcaggctgtgacattttttttctaattaggttttcgaatgggatagtttcttgttaagtattgggattttgagttattgaattatcttattccaatttgcagtaaagaagaatcaattggtttccaaagttttgatgaaccctaacttgcagaaatgaaatgtgttttattcgattaatagtgtttttttttctttttcctatttgatgttttatgtcagaatcgaaagagtacgaaaactacttcggattttttcccatttagaatcgaccatcatgggtgcctaatagtagaagtgtagaacctcgataatttaacaaccttgtttacataatatgttgactcgaaagcagcgtgctaataattatttcattaaattaatatttcgctaaattaatagaatttaatagaatttggctgatcccgactgtattactttatagagttttaactatataaataacttctctccgctttgcattgatgcagaaatttctcggaaatttcacccttctacaaacgca

SEQ ID NO: 103060 - DNA, 304 bp, Mimulus guttatus
  Intron number 1 from transcript mgv1a013559m (locus mgv1a0 13559m.g) derived from phytozome v7.0 (chr-ID scaffold_19; pos 1196488 to 1196791 reverse strand)
caccatcacccccaccccttcttatttctccacgcgtatgtttatctctctctctctctacactttttcatttctcttttcttttcagccttttcaattcaaattactatattattttattttatttgggtgaaattgatttcatgtattaccacttacaatcactgctttccttgaataaatttggtgaacatatttgagtagcttcaaattggtagaccatgtttttttttaggttcagttagttttagattcttacaattgaattataaattgattttttttttttttttttgttacagtg

SEQ ID NO: 103061 - DNA, 766 bp, Mimulus guttatus
  Intron number 4 from transcript mgv1a007036m (locus mgv1a0 07036m.g) derived from phytozome v7.0 (chr-ID scaffold_92; pos 365892 to 366657 reverse strand)
aacaaactgggccccaaggaaaagttgtcagcaaggtttggaattgattatttattatgtttgcaacaaataggcttagacagtcttgcccgacatgcaaaatcatcatattagtgggatggcaatcacttgtgctccacatatgtatttcatgctgagatgtgattttaaatcccctattggtgtttgatgttcttctcatcattaaatatgaggattggcttacattactgtgaatataaatgattgtagttcaagttccttcactaataatggcaaattttctttcctgttaattattgtatctactttgaactagtattttgatcttcttcaagaacaaaagaggaacaaattgtcgaaagaattatggtagttaagactttttaactgagtaaccatacttgaaattaagtcacttttgctattactttttcctcctaagacttgctgatatgttagtgtatgtaaagattaccgtctctaaaatgttttaaataggtgcctttagcaactagacttgtatgcttccaatacatgttaaacataaattcgctagccccatctcccataagttattggatccattttctgcttagtgcttggataatatttgatatttattcgtaaaatatgtgagacaagtaaatcgtttggcgttgttgcatatattctttgtttctcatatcctttgtgtcatgttctagcgcttcattgtattgataggttcatggtattatggttgcaggtttatttgtgtgagaag

SEQ ID NO: 103062 - DNA, 541 bp, Mimulus guttatus
  Intron number 1 from transcript mgv1a013948m (locus mgv1a0 13948m.g) derived from phytozome v7.0 (chr-ID scaffold_24; pos 336227 to 336767 reverse strand)
tgggggattgccagaccggaaaaacaagctttctggtaatatttttcttacatattcaaattacaaaaaaaacccattatgtttggataattatatccagcccccttaactatgaattttcttacacgtccatccttacggtgtcaaatttagtgaaatcttctagattgtgtggaaatattctccagtttgtactcgttttacgccattcaagctagctccacattttgaaacaagatgatcataagatatgttatgtgtcttttggcttgtgaatatcagattgtgggtgcatcagaaactgcgttttttgcacaaaacgagtacaaactaaagaacattccacggaatgtagaattatgttgaatttgacaccataagggtggacatgtaagaagacacatagttgaggggtgttgattgtaaaatatgcgggggtgttttcgtaatttgactatatctcaaggggtgaccgtaatttaccctatttattaaattgttggttaattaattatattaaattaattttggcagataaaat

SEQ ID NO: 103063 - DNA, 646 bp, Mimulus guttatus
  Intron number 3 from transcript mgv1a009000m (locus mgv1a0 09000m.g) derived from phytozome v7.0 (chr-ID scaffold_26; pos 1491866 to 1492511 reverse strand)
tcaagccttctctgctcggcaccgccgcttctcaggtgacattttcttcgtcttcattccttttagtgattatgtatttgtaatttttgccttgtacattggtatagcactcacttagagctccatgggttctcgaaccgatttgattgacgtgagttcaagaccgattctcttaggctttgtttggtttcaaaaattagattaactaagattatataatccttgtgatagtccaattttacaatggactatgaggggtccagtggtaccaaccaaacaagggcttaggcttcatttggatttaggatttggaggtgaggttttcaaactcgtaacaaattgatcggacttgtttgtatgaattcagtttttaacgaactatgaatccttaacgagcattgagttaatttttgagccattgtggtggatttcaaattctcccctcaaatttaatattttcatcttaaagcaaccttagatttcatggccattggatcgataaatccaactttgaaatgtagttgcgggaacctattttgtggattttttcttctgctataagcttggcatcatctataatatgttaatactctccgttgtgaagctaccagggtatctactattccttctaccaggctttcaaaaa

SEQ ID NO: 103064 - DNA, 746 bp, Mimulus guttatus
  Intron number 1 from transcript mgv1a010247m (locus mgv1a0 10247m.g) derived from phytozome v7.0 (chr-ID scaffold_113 ; pos 721167 to 721912 reverse strand)
tgtacggtgaagatcattatatctgcagatttcaggttggattatcatcttgttgcttagcgaaatattaaattatcgaactaataatttagtagatttttactaattgagtcgtgggaccggaagaaactattatgtaagcaaggttgttaatttatcgaggtatgtgtagaatcttgatttgtgttgttggaatttgctttgattggatgagttttcaactgtggatgtgacatttgtttgctccttagaaattggtttttgacaaggtacaattgtatggtgtgattggttcttgaattctagtgaggaaaatataaagatttttccttactttttgattggtattacctttgattcgctttcgtctacgtaagttttcctgcaagatcgaaacatgaggtaagtattctttatgaaaagatttaaatttatcaaaattcatacgtaaagaatcttgaatttttctcgtttgtaatgtacttggatcgagggtttctgcgtggctgtgattttattgcttcgatccatgattttgacttatccgttcacgcaatcatgaagaataagatgtttttcgaataattgttttttaaggacaccataattcttctgagtatcggttcatagttctctgcttctatttatatacaatgttatcgaacaaatcggacaaccaattaacgaacactttccttattaatgttgtaggagcctggtgatatagaagcggagttcgaaaaaat

SEQ ID NO: 103065 - DNA, 559 bp, Mimulus guttatus
  Intron number 1 from transcript mgv1a008454m (locus mgv1a0 08454m.g) derived from phytozome v7.0 (chr-ID scaffold_4; pos 2164325 to 2164883 reverse strand)
tctctccgcttcgcaccggcgcctctccaggtactattatcatttgttgatagtcctcttttcctcactcgtatgttggtgatttgaatttgttattcgtcgggttttaggtttttggttgcaattctgattggtttgttacgaactcttcagattatagaaatgaatcacaagtgaattaaaaaaaaaaaaatagagtttagattggaatcgatattaaactgaattttcgatcaaatatagcgagaaagaacaccatgatgggagtagtacctttttttttgctgccaatgaagatttagtattctcagaaaacatagcttgggtgtaattattgattcgggtgaatcgaaataaaattagatttgcctggtcactatataccattcttctttataattttcactagttcaatgactggaagatgtgctgaattcttgactcttattgattttctacgtaatcctatcattactctttgactcttgagttatatgtgcactgtttgctttgtgatttcaaagtaaaaggctatttcaagttcgagcaacaatattgc

SEQ ID NO: 103066 - DNA, 968 bp, Mimulus guttatus
  Intron number 2 from transcript mgv1a012992m (locus mgv1a0 12992m.g) derived from phytozome v7.0 (chr-ID scaffold_60; pos 989630 to 990597)
aaggcgcagcgtcttcggttttcattgaggaagcagtgagtgttcgttcctctcgtttcttttatgcttaatgcatattttgcagtaatatctttttcatagtgattaattgtcttctaatagtggatatcgtctgtttttcgattttgactgattgtagtcaacactaataaactatcagtggagtagtaaaagaaaaaaaaatctaatctgaatgaatgaacttcctaaagtgtcgtttttagagtgagaaaagcgactttagttcaatagagaatcggctaaaaacagagaaaacaaaattacgagtctgttgtaaaacggcagggcaaataagaaacatctttgtagttaccgttttatttaaaaaacgggaattgccctaccattttacactagatgggtaatttttttttcctttatgcaatattttgacaatttgtttctactttttagccatatttagtcaatttaatgcagtaaatttttccatactaaaacgaattcaaattatccaatcacttttgtctgtttggagaagaagacgaatagaataaagagctctgttaaatgggccgtcgctacttttcctctcgattcgtattgccataatctcagtactctcgacattattgatcccataagtatgatttcctggcccactggtattcacatgcaaattggatttatggtctgataaccaatagatataccttaaacattcgactactacttatctgccttgattttgaattcggactagggttaatagacaatataataaaactccgtcaaatgtttgcggtttaaacttgattttttcaagcatataaacaaaatttagtccataatcgatagaaatatcgcggctttctgatgttttagtgacgggattttaagtgtgactagtttattattctaaattctaattactcttgtaatatggtacgtattatcaggttcgtcta

SEQ ID NO: 103067 - DNA, 474 bp, Mimulus guttatus
  Intron number 1 from transcript mgv1a008780m (locus mgv1a0 08780m.g) derived from phytozome v7.0 (chr-ID scaffold_332 ; pos 163758 to 164231 reverse strand)
acgccaccgtctacgtcggcaatctcgaaaccaaagtactcttctcttgttatcgctctgtcagtgtttactacctattattttcttcaaatggcctagggtttaagtcaaatatcgtttctagccggcatatttgcatctgcttaagttaattggggcaatgatttctttttaaatgatgaactctagagatttagaagaatgcttcgtctttttcctccatctgtgtgtttttgtattttgagtttatttccattggaattggtttctcaattcagttatctgttcggaatcggagtaattttatttttttaaccttttatatacctcgaattcaaatgggaagagcgaaaaatgtattgtcgtttattatgtgtaactcccactttatttgttccccttttgaaatgtatggggtcatgcgataatttaaaactttttttatgtgcgttcgcaggcgagtgaagagttatt

SEQ ID NO: 103068 - DNA, 986 bp, Mimulus guttatus
  Intron number 1 from transcript mgv1a015573m (locus mgv1a0 15573m.g) derived from phytozome v7.0 (chr-ID scaffold_29; pos 1113453 to 1114438 reverse strand)
tctcccgctaaaggtactgaataattcaatttttttttttttccgattccacagtttgttatgcgattagttcttcagtgttagtttttatttattttttaataattatattgactgatctactcgcttcaagtgagcaaaatgctgcgaggttcttgctggtttgatttgtgaaaaatcgtcatttttttggggtttatttgttctattgaaacggttcatttatttgttaattatttaaataagcttcagcattttccacaattttgttgtgtttttgttctaattagtctgtattggttgcaactttcgtgagactcaggatttagaataagatgatttttaattgtggataagattgaattttgctccttgagctgtgttagatgcataagaaaattaaaatcgagaccaatgaatggtgtaaataggtgtgtcttaatgtaaatttcgatcctttggcgaagtccaatggaaacggtgcccattttagttccgtgtgtgtatatatatatatatatatatatatatatatatatatatatatatatatatatatatatatatatatatatatatatatatatatatatatatatatatacaggtgtgtctaaatgtatatttagatatgtcgaagtccagttgaaacggtgcccattttagttccgtgtgtgtatatatatatataacttgcagttttgagaagaaaagaagccctctgcgaagttgcaaatgtcatttccataaatcattcatgcgttggattactttcattcgtttaactatatacgagtatagttgtttaaattaaatcgattttcttacggttgatctttgaagacaaaataattcaacaactttgcattgtcttttgtagttcttgtggtcgtttaaattgtttacaatttttttcttggttatgtatctcgatatttatgtacactgcagttgattcggccaagaaacaagacccgaaggctaag

SEQ ID NO: 103069 - DNA, 957 bp, Mimulus guttatus
  Intron number 1 from transcript mgv1a024152m (locus mgv1a0 24152m.g) derived from phytozome v7.0 (chr-ID scaffold_17; pos 2096588 to 2097544)
aaaagtgctataaaataacctaacatagcatttataaagcacaaataaatagaaaaacaatacaactaaaacgctatagaaaatgataatagcatttaaacaacgctataaaaaaggataatagcatttaaataacgctatcaaataacgttattagcactttaaacatgctataaaatgcagcactgtgataacgttcgtaaagcgctatagaaacgtcttgacctattatagctccggcagacatagcgttttcaaaaacgctataataggatagtatagcgtttttgaaacgctatggatgaccttttttggtgtagtgtcccttcaaaggtggtcaaacaaattgaccggttagtgttaatggtttatcttatcccatattatattaattacatttgcttacaaatacacacacacatgtatgttattatgtataaaagtgatgcattattattaaccacgtacatttcaccggttgtaattagcacaaattttgataggattaggaataatttgatatatatctatctctgcatattagaggatggagaaggattaaattaacgaaaaagaaaagattgtattttctgagataatctaaatatatgaaaaaaactgtcaactccttgaacaacaataaagattcattattcttttattattaatttccaactaccaattacaagtcttcttcttacattttctctctcattacattacattgggtttacataggaagtttcgtcaaatgaaaccacctccttttgtcctcctattcagaatctttaaatccagtataaatggtttttctcgtaggccacctcgtaccaagattcacatgaattaatagattctctctcttttttttatcgtattatgttgttttattttgatatatagatagatacagaatattgatatatatatatataaaaaaaaataatggatagttct

SEQ ID NO: 103070 - DNA, 697 bp, Mimulus guttatus
  Intron number 1 from transcript mgv1a000792m (locus mgv1a0 00792m.g) derived from phytozome v7.0 (chr-ID scaffold_8; pos 1351467 to 1352163 reverse strand)
gtggagcaagatgtaagaatgcgatcctttcttgtctgtcgaagattttctccatcttagttcttgtagtaggggacctatcatgacatatttatgaacttaaaatttaaccatattactctagaaaaatatgttcttgaatatctagtctgcaatttcaatactcgctgagcaaaagaatttcatgtatgtcccatacatttagattgctgacagacatttcctctatcattcagtaaacagaaaactaaagcttaactcgttcgaattgaatcaaactggaagatttgaacgtgaaggctatcttgaatttcctgtttatacttcattttgtagtgctttacgcagtaaaaaataatattgttgatgttaactatttcccaaattttcctttaaatattctacaatagttgtttaatcacaaatttaaaggattgactaatattacgactcagatgttgctacttgtgtaattaacaatttctatccctcatcgacatttaattgctattagaatgatgtggacatatgctgctggttgattttttataagaatgtgtacattaaaaaatgttgatcttaaacttgaatatttgaagatgttcatattgcaagtgaagtattaattcttttctgactccaaactaatttaagtttctttttgttgggaaggtgaaagtttgtgatatctgtggag

SEQ ID NO: 103071 - DNA, 525 bp, Mimulus guttatus
  Intron number 2 from transcript mgv11b024308m (locus mgv11 b024308m.g) derived from phytozome v7.0 (chr-ID scaffold_1 4; pos 860691 to 861215 reverse strand)
tctgtagaggactcaattttggagtggagtgtcgggtacttgtgatataggaagggagcttttgctcgtttagtttggtcaagaaagtttgttttgatcttccatgagctgtctatgactggagctccactcgccatgactggatcttccatgagctgtctatgaaggggcgagtgtttttggtgatacaggtgctcggaactgattctggaggaacaagagagattgttgaacacaattacacaatataaccgatcttcatcctttaggtaggccggggggtccgaattcttgcgaacaatcttcaattcttgctcgagaattcaaaagcaaggcaataaataggattaaaaggtagagaaaaagttgagagaatgtacttgaagaagcacatgtttcagaagtttggtgaggtacttactgtacaagtgcatgagaataaagtaggcattttgcaggagattgattcatcgacattctatataaatagtgaaatctctgttatttgtgcacgagagtgtaatc

SEQ ID NO: 103072 - DNA, 769 bp, Mimulus guttatus
  Intron number 1 from transcript mgv1a012147m (locus mgv1a0 12147m.g) derived from phytozome v7.0 (chr-ID scaffold_311 ; pos 15021 to 15789)
gctgcgtgtccactatcattgctctgcagcagcaggtaattaaaactcatttctcctaaaagaattcgaaatttttttattatgatttttcgattctcttgcatgagctaagattagttctgtcattttataattaataaccaaaaaccagaaaaaggaaaaaaacttgatcaaagaatcacttctagaatatatattatgcataaagcttattatatctgcttaaaagttgctatgagctggtatatataaactgaaccatgttgtgtatatgcactacatagttttgccatctaagatatatatatatatatatatatatatatataacatgtcaaccacttttaatttttgtaccaaataaaaaataaataaataagaaaaagaatctgaaatacgtatctttgggcctcgtttggttgccaagataagattagcgaacataaaattaaataatccaattattttatcagacctcgagacgtcgaacgaaaaaagctcaaagacagaataagccatgataatataattttagcggttggacctagtaatttatttggtataccaaatatcaaataaagtccaattatttaattaattttaactaatttctccaacaaaaccaaacgagcattgttgaatttatcaggcatatatatatagttgggtattttagtaatattctaatgtttttttcttcttttttgtgggataaatatgtaaataataattaggtggcatcactacaagcagagctgtcagtagtgca

SEQ ID NO: 103073 - DNA, 697 bp, Mimulus guttatus
  Intron number 2 from transcript mgv1a012088m (locus mgv1a0 12088m.g) derived from phytozome v7.0 (chr-ID scaffold_1; pos 4464405 to 4465101)
ttgccctatcttaggttagtataattgttattttttccccatctaatatttgtttgttgtgagtaattttattttgttaagacttatatgattgagggtaacaaattatgaagactcagcttatcgcctaaaaacaaaaaaaaatgaagtaactaaagatatttttggattggattgtaagagctttttaagtttgttgtttttgttgtgtgactttaaatatgtagtttccttatgagttgttttgaatcgaaaacgagatcaacttattaagacatgagaattatatgaatttcttgattacgagtagaaattgttgagaaatagggaggggtaagtagctccactttaattgaaatccatgttgatctgtgtggaagacaatttaattcaatgcgaaaaactcttgtattggttgtgatgaatggaatattcgatgttctttagttttgatggttacgtgtgtacgtgtcattttgtgtaataatcacttcctctaaaagctccatctaatgtggtaacaaagctcgaatctcacaataaaaaatttcaccagcgatgctccattaaatagtatgccggggcaggcgtgttacacgtgtagagttactacatgttaaacaagcatttcatttaatttttgtattaaaaatattcaccgcatatttatgatttcagagaagaaacatcatcacca

SEQ ID NO: 103074 - DNA, 502 bp, Mimulus guttatus
  Intron number 3 from transcript mgv1a001260m (locus mgv1a0 01260m.g) derived from phytozome v7.0 (chr-ID scaffold_125 ; pos 74203 to 74704 reverse strand)
tcttcaaggtaggctttctattattctcaatatttttatatctatcctataaatcaactttttatggcgctgcatgtgtaatattttaccttgcaattgtggatactgtaatattctcataataataatgaaggtttccttagttaacattataaatttttatataatgaattaatattggaatatggaatagctttctggacttgtacttttttcctttagcgaggtgcagcgattgatttattcgtttattcatatcctaataaaaaacacaaaccacctcccccaccaccaccaccatcttcgaacaaacacaccttaagtgtatatttaatagaactgccttatatgttgatggtgtgcaactgcataagtgtactgctgccccctacattcacgctatttgaatttgtgatataagctgcatcttcatctttccattatcttttgtcatagttcaattttgacactggatactttttgaccaggggaatccgagcta

SEQ ID NO: 103075 - DNA, 371 bp, Mimulus guttatus
  Intron number 1 from transcript mgv1a001260m (locus mgv1a0 01260m.g) derived from phytozome v7.0 (chr-ID scaffold_125 ; pos 75393 to 75763 reverse strand)
aaaaggtgtggcaattcgtagcatcagtttgtataatacgtacatattttgatgcaaaactgacataattacttttcattaacctagtgtgcatctcctttattggttcaatattactttttactttacggacacatttcctaatttaattaatttactcttctgtcctgaatttttctcgtactttttaatactgttctcactgtccacctatgatggattgtatgaatatttttttgattagtgtacggtactattaatatagtgaatgccaatcttgagtgtttgctggaaatttatggaagtttttgtctggtgtcacgacttgatttgcttgtaggaatcagttctgatcggttgcagcggccttg

SEQ ID NO: 103076 - DNA, 423 bp, Mimulus guttatus
  Intron number 1 from transcript mgv1a006166m (locus mgv1a0 06166m.g) derived from phytozome v7.0 (chr-ID scaffold_119 ; pos 291821 to 292243 reverse strand)
ccacatacataaatgtatgtatcattgactataacaattttgactatcaattttttttttttttttttttttttttttatgttttctggattcaattattcgattttgtttattttccgtctacaatgattgattgttattttcctgaaaaacaacctatagtggattgattcacgatccaaattctttgtcttgagcttgatggactttgcaaccgattgattatgtatacaatgtgtggtttaatggtttgagaatacattatggttacttgttgggagtttgaatttacgagcttgatttttcttggcaatggttgtggtgtattacatctagtgttgcttctaaggtatcaccatttgctacttcattagttggccgcttttgttgtataacatgttttgatttcatttattctcaggt

SEQ ID NO: 103077 - DNA, 785 bp, Mimulus guttatus
  Intron number 1 from transcript mgv1a006987m (locus mgv1a0 06987m.g) derived from phytozome v7.0 (chr-ID scaffold_26; pos 16731 to 17515 reverse strand)
ctcttctttcccgctcagttactcgcatcaccttggtagtgtttccttctttcgtttcttctggtaaaaattttcgtttatatgtgtattttactgttcagtgccatatttagggtattcgccggagggaagttatttagttcagagcttgtgattttatatgttttctgaactaattgaatttacttgggtttttatcaaagatgtattcgtacgacgttgtaacccttaactgctacagtagtcactattattgggtttaacggttatgggggtttttgaccccatgaaattgattataagagatccaagaaagatatgccaatttttttcattgttgctcttttgtgctttttgtcgatgaatttatttgggaaagcaaatatatgttaacaaaaatgtgagatcaaagaaaggcacattgaaatttatatattgtttgggaatatatatcttgaagttttttagggtttttaggtttcgtctcccacacttttggctacttaaaatggatgttaagtttgaagtacatgaatattttgtgtaatttatgtgtcctcttcctttaattcttcttcagtttctctgtttcttggaaacttgtgaacagagaagattaaattttacacgagagattccattacattgtatgactttctttagtctagcattcagagattcaaatattgataaagattctcgtgcttcctctttggcttcagttgtttttggaattgacatatctgtgatatattttctggtggtatttaaggcttggagaaact

SEQ ID NO: 103078 - DNA, 656 bp, Mimulus guttatus
  Intron number 1 from transcript mgv11b019845m (locus mgv11 b019845m.g) derived from phytozome v7.0 (chr-ID scaffold_5 6; pos 31170 to 31825 reverse strand)
tttttttacatgtacgtttgtgcatgtccatttgagcgagtgtgtttctgcatgtttgttgatttgtattaatgtcctagcattgaagtttgtgttttcatgaacctttttgcgaatgcacttttgcgtgagtacctttgtgcatgattttgtactcttacttatgggcgtatcttttgtagcgagtgtttttgtgcacgtttcttgatgcgcattcttgtcctcgaactatagcgggtattttcatgatcgcttttggaatccaattttgaccatgttcgagtccgaatttggaaatttgacattagacaggaaatgtagccagctgaaatagctttctaatgccgccagaaccagttgatttggagtccggatgagaaagttatgctcgacttcgtggacactaccgaagatgttgagggatcctctcttctaatttgattttattttcctaattgcaactcttttcttactctttgatcattgttgcttcatggacacctcattatcaatttgtacctaaagaatacttaatccaccaattaaaacagaaatataaatttatccataaaaaaatccacgtaaacgtaagtgttgagtgttatttctacactccactgtatctttgtatctagtgttctcgctgttgtttggtt

SEQ ID NO: 103079 - DNA, 895 bp, Mimulus guttatus
  Intron number 1 from transcript mgv1a013982m (locus mgv1a0 13982m.g) derived from phytozome v7.0 (chr-ID scaffold_20; pos 941960 to 942854)
gagcaggtattcccgcagtcattttcatatatatgtaatatttttttgttttagtacgatgatgaatatttatatattttactaattgtggaactatttttttttttaattcaaatcatgaattgtttttttattttaaaatacatattatatgcacattacattttgcgtggcgctgggattcaaactctcgacctcccatacgagttgagtggcgattcgacaaatttgtttatgtgcatgatttttatatagggtagggttttattatttttaaaaaacaaatttaacaacgcgagtactaatgaatttcttattaaaaatgaggaagatctatgaagagaaaaatgaactagatggcataattagtactaattactcgattcattacacgaataattaaggtggttcttgtttttataaaattatacctttggttttcttacatttccttgtccaagatatatatctatgttattaagtaacattaatattgtaatttgctaaaaatgatgaaatttacaagaaaatttattctatttatttatttcaaaaattcgaatgtgtaattaaaatatctaattgaattattcatttccatggattttttttttttcgatttttaaccctaacacaatttttctacatgatataataatttattgcgcaatttgagaaaacttccttagatctactattatttgatgtaataatgatgacaacatttttttttgtttcgactgaactacttactttccgttttatatttacaaaaataccctcaaacactacggttcagcgcacgctaattaactcatccgccttctggatctcaatattaaatgatttatttatttatttatttatttttgtacatatatataggttgaggaaa

SEQ ID NO: 103080 - DNA, 646 bp, Mimulus guttatus
  Intron number 1 from transcript mgv1a005665m (locus mgv1a0 05665m.g) derived from phytozome v7.0 (chr-ID scaffold_45; pos 923705 to 924350)
agccccgacttttctcccttcgttctctcgtcaaggtttctctctcttctctctctctctcttctctctcttatctctgtgtgtgtgttcatttcccgtgtttttttgcaggattgttttaatcattttaaccaattgcttttttgcttgctcataaatcgagaaatacgaaattaagaagaaaaaaaaattcatattccgaaacacggatctctcgggatttgattgtttatcggactgcctgtaccgattatcgctgaatctggtgttgtgattggctggaatttctattttgtctgtgttcgtgagctgatttctgtgatctgcgtttttccccttttcaatttaggttaaaattttgtcttgtcaatacatgtgtttaattaggtttttataagaagaaaaaaatgctgatctgttatttatgcttgatttaatcattttctaattttattttatttgcatagaaatatttggccgtggataattatcagttaaagaattgggataaccagatgaatttatttctatgttctggaaatgggcattaaatttatgttgcttcgttgatgtttctgaagcattttggtttaaatttgtgatttttgcaggttgattgagattgtttgacccagagaaaaaaaat

SEQ ID NO: 103081 - DNA, 820 bp, Mimulus guttatus
  Intron number 1 from transcript mgv1a007802m (locus mgv1a0 07802m.g) derived from phytozome v7.0 (chr-ID scaffold_2; pos 1954276 to 1955095)
tgggcgataggattctagctgagaaggtacgttctgtattgtatgaagaatttgtaggatttaaattggattttgaagcaattcttgaactcgtatgttttagcttgggggtcttttcacttttgatgtgtatttagattgtcttgtatatctaggtattaataattgtagctttgtattgagattgtgtggtacatttaacatatctcattgttcttcaagaaacattaaaaagtggacaagtgcttaattgaagtgttgagttagttactttcgtattgccagagttttagatgtgtgaccttagtgaggcagtagggtttgatcaagattcttgtgtccagaaaacgaaaatcaattttaaataccatttgtggatgccactattgtaacctacatagttccattttgtgatttacacattttacgtgtgagttcaaggttgtagtgcttttgttattttgttatcgaaaagcctttaaatgttgtagtagataattttattatgatacgtgggcttctgtttttgttttcgatgactggatgttaattagttcaagttgcctagggtgaaaatcttactataacaatgagtttcaagactgaaccagggcatattattctctgatatcatgttcatttcgtcaaaaagtatatgcggatcatatatatatgtgaacgtataagttgtagtgtatccgatttagttttatttgatattaagatgaaaaatgttataaatagtatgtgatttatatgctaaatcttttgggtggtttttccaggtttcttacatcttcaggaagcctgagatatcgga

SEQ ID NO: 103082 - DNA, 1021 bp, Mimulus guttatus
  Intron number 2 from transcript mgv1a009597m (locus mgv1a0 09597m.g) derived from phytozome v7.0 (chr-ID scaffold_122 ; pos 329607 to 330627 reverse strand)
ccaacgccttttatcggtatattatatacatagtagtttctgcttttttgtaatcgtaacgggattttaattcacacaaaaatattttacgagaaacaaaaacccttcgctattttgttatcaagttaattatttgaaaattatattttcttctaaaattttctacgaaatattttcactaattacaataaaagatccaccactcgaatccaccacttgaataatttagtgagaaattttatttttgtaagaaattatagtttttattctcagtaattcattattgattttgttttttaattccttttgcattttgtatgcttgaatttatgttgcgggtagaagaaaaataacaatttcatttgtcatttgcaccttggaaataaaaagaccaaaaaaattgaaatcacgctcattcaattttaaatatttaactcaatgtgcaatattattaataatttattgtatttcgaaaatgtaaagtgctattaatattttttaaaggtgcaaagtgtcaaaattttacatttcaagggtgcaaaattagattaagcaaaattgaaatcaatagtttgacctattgatttgatatttaatttattgcgctatgttcatgtgactacttgtttggttgacttttacatttttttatgaatttatttattccataatatgaatatattatttttttattttgtcactacattttatatttaatttatggaaaaaatacagtttttgcccatcaagtttgcaccgatttcacatttggtcccttatgtttcaaaacttcaacatttttagtcccttccttcaatttcccgtgtgcccatcactaccttaactaacttaacagactaacggtaaattgacgaaaaataacaaaaattgttaatttattggaacaatatgagggatcaaatctgaaaacagtgcaaatttgatggatgaaactgtaatttctcgtttaatttatatttaattttgtacgtacttgcatgcatgcaggagctacagagaa

SEQ ID NO: 103083 - DNA, 488 bp, Mimulus guttatus
  Intron number 2 from transcript mgv1a014684m (locus mgv1a0 14684m.g) derived from phytozome v7.0 (chr-ID scaffold_17; pos 181895 to 182382)
gcttggtgaaatcgtgaccaccattcctacaattggtacgtttgtttcgtttgtggcccaataacattcttctgtttattgatatttttcagtttaaattgtttggttagttgtatgatattgtggcccacttcaattgataattttccccctatattatacctatatatctatttagcccaccgaacttttattaattacccttctaaatccaaattaatggtaaaaaatcggtattttttcacttttgtcactttattaattcttggttcatcggtattttgtcacttttgatgttttgaaacatatgtcataaatttttattaattcttggtgtatcggtattttgtcacttttgatgttttgaaacatatgtcagaaattttagtctaaaaaaatcgtgattttccctctcatcaattcatatgcatacataggatatccaactggcttatcttggaacttctcgtaatttcgtgcaggattca

SEQ ID NO: 103084 - DNA, 737 bp, Mimulus guttatus
  Intron number 1 from transcript mgv1a000606m (locus mgv1a0 00606m.g) derived from phytozome v7.0 (chr-ID scaffold_48; pos 383429 to 384165 reverse strand)
cgcttcctgcccccgtgatctttacgtctgtaaatgtaaggaattctctgttaaatgtgtttcttttttttatttatttttagttttttatgtgggatcctctttgaatttcttgacagtgtttgttatgtgttgatgttgtccgatcatctgaagagaacattggggaaataactctgtgttcggaaatgcccactgtctgaacataaatttagcctgtaattaatttattttagatcttttttttttttttttttttaatgttgatgtttcttgattgttctttctttgtgtccatgcatgcgtaattgactggttcattttgctattaattacaactgattatattacagtcgttgtatgatggtgttcggttctcttgcagttcttgattagttgatttcatcatgcatgtttttgtgtaatggacgaatcttgtaaataattataaatcacatataatttctgctattttttttttttttggttaattttgtgatcgtagttgtaagtatgtcgaatccgagtctcgatttgtggaggtgcagagtgtttttttttctttcaataagtttcggggcgattagtggttgtgacttgtgagtgaagtaaaacaagaaattaaaatgtatgagcaaaattaatcctctgttgtgagatttcgtatttactttatagttaagttaacaaacagtttgcatttttttttagtccgaacacaaggtatcggacaagca

SEQ ID NO: 103085 - DNA, 944 bp, Mimulus guttatus
  Intron number 1 from transcript mgv1a001924m (locus mgv1a0 01924m.g) derived from phytozome v7.0 (chr-ID scaffold_87; pos 292854 to 293797 reverse strand)
ctcgcgcggccctccttcatacttcttagttgcaggtgaattttttttaattttttttttctgttccccatgttgtgtattctggtttgggggtgtgtttacttcattctgctttcgtttttattgggtttgtattgggaaattgtttgggatggatgaattgtatttagacatgagtctactctattttcttattaatgcaattgatttgtttttatggatttgtgcaagtgtaagactcatgcatgagttcagggtttagggggagcaatttgattggtgggcttctgttaggatttggtgaaagttgggatgagggttttaattttgtttgcttagtggcacagaatgtatgtttggcaaaagataaagttagaaatcctcgttttcattttatcgtttgatcggtttgactgtatgcaaattgtatagttcggaaagtataggaggtgggctcccgtattgttacttcttttcttcacttgtttagttattaatatgtaatttctttttatgtgccaaagatggcggtttcttataatcatacgagtattgttacatttatgtaactttgttatacgttcatattggtcgtgctagctactttgatactcgtattatatgccgcattttcagtagtttaacaagggatagtagtgttctgtttgcttgatatcggtttctgttttggtctcaataaacaagagtcgggcactgtattttaacttagttttaacaaacgtgggttactttttaatttttttgtgttggacaaacgttcagctattttcacgtttttattactggttggtccgtgttggtgctacaaggcaaaatttacactggggaaaatgttttctttcttccttggttttggtaaagatttgcttacgttcgtctttgtttcagagcgagtgataggttgaaaaaggtctcgagcaagc

SEQ ID NO: 103086 - DNA, 949 bp, Mimulus guttatus
  Intron number 2 from transcript mgv1a022713m (locus mgv1a0 22713m.g) derived from phytozome v7.0 (chr-ID scaffold_8; pos 2725291 to 2726239)
aatccgaatactagaattttggcgctgaaaggtgaatatctctaaggttttctggttcataggttgtttatttctgttttgatgtagttaataaattagagttcatatttagggtgctcattaattttctattagtgcgtgtcatttatgatgcattcgaacacgttggacttatttatatgtagggtgtggagtactttgatgatgttagtaaaaggcgatagtaccttggtagttctgactttagattacttaggtgctgatttatacaacagtttgtctgtttgacaatctaaaatctattaaaaaataaaattacatcgaatagtatgcattacacatattagtagaaaaacacttatttgagaccctttgagaataatgtcagataggaatatgtctaagtggaatatggtggtacttccctctttatgtctaagcgtactgcccattgttgtcaagtgagttcaaccctcaagtccaataagattaactttaccagaactgtcgccaattataacttataaggatgagcagacaacttttaaaaatgaaactaggatccgatgttaggctcccgatgtgaagaatgacatgatcatgtctccttccatgctgtgttgaagctctcattacatcattattttttcatacaaggtatctcccatgcagttaataaggttgttgaaatgaaaaaaataccaacgatcaactttaggattttgttgaaaaaaatattgtgttgattcatattacacttggtttctaaaattgtttgtgacgcatactcgatacgctatccttgttcacgagggtcataaatggggtgggtccgattaatttctattgtaaatagagcattcttttctttactgttggtccaaaaattgaaaatattagttttcttcttgaagctcaacttgccggaactacacaagaccacttgcaa

SEQ ID NO: 103087 - DNA, 1046 bp, Mimulus guttatus
  Intron number 2 from transcript mgv1a015962m (locus mgv1a0 15962m.g) derived from phytozome v7.0 (chr-ID scaffold_69; pos 915122 to 916167)
gcgaaaagtggattccagtgccccgatatccgattgtaggtactctctgccctctctactttaccctagaaagggattgaagtttgattttacattactttgaattgattttccgatcttacttagtttctccaaaagtgagtttttaggttagtttttacaatgttataatcattcatctggagtttaattagctatgtttttcttcgtcttcattttcgactttttcgctgagtgcacgtgttcttacttgttccattttaccgattttcaaacatttggttctcgtctatatcaccgtttccaaaattttgtaacgagatgcatctagaacatatatcaaatatgacgaaaaaaaatccattttcgttatacttgctcgtaaaaaaaaaatttgcttcttccagtttcgatggtgattttatatttctgtattggaatttaccagtaagataagttatgtattgagcagaaacgtataaatatgaaattctttagtaataattcaaccttttcaagtcattatcggatcgcagaaaatatgaagagggtagtattagatatgtaacaaatttgtcttatacttgaattggacaagaatatcaaagagaaggcaaaattgtgatgaaatacagaattatatcgaacaattagtggcttggagagagagttgagttttctcaagaatttttgcggttcttacaaatcaatgaaacctttgctggataattatggtttgctgattgagatgattgattaaacatcgttggattaggaacacattgaataacagagtgctgggagtgaataagtttgagccgaattaggtatatcagtgttatatatatggttaagctgcctattttactgttttgtttttgtgttttcagtttttcccgtttaaataatttaaaatttgatagctatatatttttgttgttctctcttgctttctgtgtttgtcaatgcaaatattattttggtggatgatggtatcttttatttccataggacaaggctggttgctgtggctactcagaaattca

SEQ ID NO: 103088 - DNA, 590 bp, Mimulus guttatus
  Intron number 1 from transcript mgv1a012856m (locus mgv1a0 12856m.g) derived from phytozome v7.0 (chr-ID scaffold_13; pos 560287 to 560876 reverse strand)
cgccgattattacttcgattcctactcacatttcggtaatttaccccccttgtaaaaatcgagtcttttgtgttttttttttttttttttttttttttttctccttttgaagagtttaactgtgggttaagatttttaatttggagtttgaagtattgattatgctgagtttgtatgatgtgtttaatttttcttatttctatgccgtctggttttttcgaaagatgttataaacggttaaattctgtttcaaatgtgtagattttgttcactctcctcttacattggtttcgctttcggtttcggtttcaaacattattaaaagaaaggaactttaagctaaaaccggatttgatttaagataaaactaaatagacggtctgaagatgaaaaaagttgccccctttttcgatcttaggttttttttttccttatgttaattattgctgattggaagatttattaatcgttacctttctaatcttgtgcaggtatccatgaagtaagtaccgaactttggaattagacggacttacgcttttcgatgcatttgtagcatgtggatcgggaacatcctcttttcatttcag

SEQ ID NO: 103089 - DNA, 654 bp, Mimulus guttatus
  Intron number 3 from transcript mgv1a026360m (locus mgv1a0 26360m.g) derived from phytozome v7.0 (chr-ID scaffold_176 ; pos 40019 to 40672)
tatttagtttggcggctttacttggagtcacactagtcagtggctgatcttcaactttgtcttcttttttttcctgaactaagagaattgtttacgatggcttttacccttaatcttacattgttctttgtttccatttattttttattttcagattattctatgtgaattggtccgaataacacttgtatgcgccggaaatacctggacgggtaactccttgtttgggcttgcctctgtggttagtaataaatcatttgccctactccgctcttaggtagatgtttgaatttcatctaccgagaagtcaagttatgtgaaactgaagtgtcttgatttcaacatttcaatgtcacgggagttatttatataaccagaaataaggtcacaactgttatatttggtttatctctaacttgcacgtacttctatcagtctatgtattactaataaacagtgagatgtgtagaacctatggcaactttatttgttattattactctttgtaatttgaatgagtattagctagttaagaagtactttagaaatatttggtcatttggcatttgttgttcccacattttattacttttattgttacattcgtacttactctttatgcagattggcgggttgcacatttcacttcccaat

SEQ ID NO: 103090 - DNA, 487 bp, Mimulus guttatus
  Intron number 1 from transcript mgv1a017415m (locus mgv1a0 17415m.g) derived from phytozome v7.0 (chr-ID scaffold_4; pos 809722 to 810208)
tagagtaaaactcgatctgttcgcagaaccctctggtatgctcgctcaactctgttttttgtttttttttctgcaacttcgatttatcctattatggtggttcagataataagattgagctaattttaggaatattcaacagcctagcgttttaagatatgccttaatttggctttgccgtgttaagatataggatatactattgaacagaattgctgttcttttttggttcggaagacatttgaattgctctagttaatgtttcgtgatgccttgtacaattattggatttgatgtttctcgtgtggttgtttctggataattagtactaggctcttgagaatagaaaagctgttgttcttttattatatttccgtaatatatatcgaaagttcagttttgttttcttatgtttacgaggttgtgtttttgtttgttattaacgctattaggagatttgggtggctcctctggtcaggaacaagtt

SEQ ID NO: 103091 - DNA, 766 bp, Mimulus guttatus
  Intron number 1 from transcript mgv1a026923m (locus mgv1a0 26923m.g) derived from phytozome v7.0 (chr-ID scaffold_98; pos 217137 to 217902 reverse strand)
aagtttccaggtaatttaatttattaaatttctgaaaaaacacagttacacacagtagaggtgtgtatacagctggcggagatgatttcacaaatgaacaatttcttcaattttctgcagaaaaaaacaaaacaaaaaaaaaaaaaaaaaaggatcgtaatttcattgaattgttgcttttttttttttattaaaaattgagcagctttttcgaggaatataatttatgttccgggctttcgcccttcagttattgtttgtttttgtcactttgttgctaattttagccaaacgaaattaaatttaaataaaaaggaaaagatgtacgaatacaatgatgaaattcttatttctttcaacctgaattcatctcagtttcccgatttgtctagaaattacagaaatatcttttccagaaaaagaaaagttcttcacacttgaatatgtttttgggaccataagtaatttttatttatttaatttaaaaaaaaatttgtaaaatgttttgtttgaacacttcatgatttggcttttcccaccgctttgagttatttttgttattttttattttaattgttgttgaatcagtgcagttaatttcatgcctttattttatgtgttgaaatttgaatgttcattcatcaatcaccattagtaatactaaacattagtcttattgaattaattagttaattaatacaaagagctgtattatcaaatcagaaaaacaaatggagtgtgtttgtttctttattttatcaggaaa

SEQ ID NO: 103092 - DNA, 935 bp, Mimulus guttatus
  Intron number 2 from transcript mgv1a002272m (locus mgv1a0 02272m.g) derived from phytozome v7.0 (chr-ID scaffold_45; pos 1508004 to 1508938)
gatcttctaaacccaagtcctctaaacaaaaagaggtgaatttttttttttgtttaattgattctgtgtgtgtgtgtgtgtgtgtgtgtgtgtgtgtgtgtgtgtgtgtgtgtttgtttgtgcgattttcttttgattgtttataatcggtgattttgtttaatcgattttacattggagtctattggaagattgataatgttcctatttcccccacttgttcttgaattttaactcttttttgttcctattggtttcgtatgtttaactcttttttgttcttgaattttacttggtggatattgccatcactataagcatgtgttagatgatatgcagattgagatttcgggaaattagtatatgttatacatgggcttcagtaattttttagaatgcaaatacgtaaccgattcacccggcactaagaaaagggaaaccatatacaagatcaagatgttattgattttcgctttgacgcgctttcaagataaacgtgaaaagaccctctgtctccacgcctttatgtacaaacttttttgtaaatctgagattgttgatgtctggtagtaaattccgaatctgtatggttgtcttcgcattatcttaagacttttattatgtgacgccgtcacctgattcttgcggcatgattagattcaaaagattttctcaaccacatgtgcctttacgaatgtgtctgaatgtgcgtgtgacttctcccctttctttcgatctgaataaactatgttctgcataatcaataaatttgagacaaggttacgggtgcttgtaattttctgtcaaaatatcaacctgttttttattttctttacttgttatatcgtccttttctgttaactggttttctgagagttattgcttatatgcatctattccgaatctcttgcaggttatttatcaagaaataatag

SEQ ID NO: 103093 - DNA, 474 bp, Mimulus guttatus
  Intron number 2 from transcript mgv1a004613m (locus mgv1a0 04613m.g) derived from phytozome v7.0 (chr-ID scaffold_22; pos 1343962 to 1344435)
gccttactcaagctgcaaaggtccatcttcatcttattcatacattttttttttgtaatcaaatactgtttttacttgttctgcagcatctctgtttttttttcttccttttcttatatacggtaaaaggggtatcatcaagcttctaggtcaattttatgcatatacatgatgtgttgattttgaagccaatgccgatgccccagtccactcatttccgtcttttttaccgtaataattggattttctatttctaactgagaagaaattgtataacactagtttagatgtcaaacaaaggagaattaaatgagattcttcctcggtctaatactagaaagtagaaacggagaattaaatgaggttagtaggtgaagagggaactagctaacttatcaagtgtatattggcctctttttttttggtatggtatgcgtaatagttactgatattattgcgttacacttgcaggat

SEQ ID NO: 103094 - DNA, 905 bp, Mimulus guttatus
  Intron number 1 from transcript mgv1a013423m (locus mgv1a0 13423m.g) derived from phytozome v7.0 (chr-ID scaffold_148 ; pos 557659 to 558563)
gatttcactgaattgttccatcacaaaatattcctgtaagtaccatctgcttaatatttttactttcttcacaattcttctctttttacagaatttcgtaccaatgtgttgagtttgattttgatgcttgcattatgtttctggattcgcaaatttttaattcaatttttttttaattctgtttcttctctttatttcgtaattctggttagaattgagacctcactgtgtttctctctttctgtgtgtgtgtgtgtgtgtgtgttcttttgatagatgttgatttttttattttttttttgtacattgatttatttattagtttagttcttcccccaattctctaatcaaatctaaaacctttcaatagaagaattaaccacataaattatgtaagtatacaaatggtgttgaagttttcataccccctgtttcgatttcgctagtgccgaagtttgtcgatcttattcccgatgcccgtgttaatctatgccgataatttagtatttttattgctgaaacatgccgattcgtccagaagtttcttgatttttgtattcgaagagtattttccggtctataatgcctaattcaaatttaatttctccaaaactcgtcgtttgttacctatttaggtacggatttcaaaaaacgtcgtaattcgtagcaactatatggcccaaaaaggcccgtaatacttcactatttgttctgcatttagcaactttaatccattttcgccttcaaaagatgtttccgttgaaaatgaatctaaagtgcgccaaattatttgattgaacaataagatataccaagattacacttaattcaatacataacactcgctcctcgttttttgctgaaaatttttcgtccgaaaactgcagaatcggagtaaaatcgag

SEQ ID NO: 103095 - DNA, 398 bp, Mimulus guttatus
  Intron number 1 from transcript mgv1a002057m (locus mgv1a0 02057m.g) derived from phytozome v7.0 (chr-ID scaffold_30; pos 1523723 to 1524120 reverse strand)
gaagcagttggaggctattcaagctgttttatcaggtccctttcatttttgcattggtttcattgattatagatatgtatgtatgttgatcaatttcaattgaatttttaggggggaaataaaagcaacctaattaaaatttgttttggaggattgcaaatttgtggcttttcaattttcttttattgcacttctacaactgcattcttatatgcactgtttaagtccatatgaagaagctttgatttccgaagtgctcccgaacacggacgtatgtgtaatcggtcgattatgagggctattgtgatcatcaattgttattctttttagctttgtatatgaaatttggtaattgtaataatgttgatttcaatgcaggtagagattgtttctgtctg

SEQ ID NO: 103096 - DNA, 544 bp, Mimulus guttatus
  Intron number 1 from transcript mgv1a008033m (locus mgv1a0 08033m.g) derived from phytozome v7.0 (chr-ID scaffold_69; pos 838540 to 839083 reverse strand)
ggttacttctgcagaaattacacaggtcaattttatgcctattttttatgtttaattatttattcgttttgttgtgtttgagttaaaatttgcatttgggtattaattttcgggtgggttaactgttcttcatctttactgtagctcgtagaacatcaatttatgttagggtttatattttgggcagagagcagaaaccaacaaatttttagggtttcttgattttccattttccccccatttttagttaaaattcatcaattttttaatatatttgtaccgaaacccgaaacccgaatttagttgcagaaagacttttttctgtatgagatgtcaaatgtttacagatgatgttctgttcttgtaggtggttctttctatatatatgtgtgtgtgtgtgtgtgtgtgtgtgtgtgtgtgtgtgtgtgtgtgtgtgttatggacgggtttcgaatttgaagtcgatcggatgataaaaagaaatattgacatttttcaaacttgtgcagaagatttttaccgaatacagacagccttttgcact

SEQ ID NO: 103097 - DNA, 1070 bp, Mimulus guttatus
  Intron number 1 from transcript mgv1a011949m (locus mgv1a0 11949m.g) derived from phytozome v7.0 (chr-ID scaffold_37; pos 460141 to 461210)
ttgttcaagctcttgttgccaccattctgtttgcggttagtgcatttcgttttcccccttttgttatttgatttgattgattgtaaaaggaattatgatttttgtgcatttaatgtgtcgatgtctgtatgaaactatggaatttaatgttataatggcaaatatacaaatatagaattgaagtgtattgaattccgatagaggtggtgatggtggttagagaacaatcgtcttttgagtggagaagaagggggagattaactgtggttttcttactatctatgaacaatgatcctagaatcataattgcgatcgtcgatcgaataatactgtttttcctttttcaaagttgttcttaattaatagtcaatcttccgtttgttttgcgaaattgagtattggatcacagagatttatctatctttagcatggatgccgaatctcagatttatatagtttcttataaagaacatgtgtgattcatacatactcgaatgtggtaatagtgatgaaaaattaccgtgaacactttgaattatttagtcattagaagcttaaatggtgagcattagccgagtcggatgattaactacaccctgattctaggctgatgatgcaattttaaaaagaaaattaaaaaaatcagtagatgccagtcttgcgtacaaagtttcgtgaccttctacttagataattgaattgatttgctagtatttaaaggattccacataaatttcttatagtatggatggacttttcctcgacaatcgagatatttatgtgattcaaagtgatttgattagttattgaagaaaaggatccgaatcttgatcctgtatataatgattagcattggaagagaagtatctgaaatatgattgcaattacatctagctaccgatcaattttgccttcatttatttgggatctgttcatcgtgatacttccatatcaaacagtaccataataatttccgattatgctccacaatcataatttctgacgcaaacaaacgaactatattttctcatgcaggtcactaaaaacgacaccgaatctgaatccaaaca

SEQ ID NO: 103098 - DNA, 954 bp, Mimulus guttatus
  Intron number 1 from transcript mgv1a023242m (locus mgv1a0 23242m.g) derived from phytozome v7.0 (chr-ID scaffold_196 ; pos 446143 to 447096)
ttctctgtaagctttatttgtttatttatttagttgcatacacattacattctgtttagctattgatttgtgagtttttcaattctctcttacggtagggtttaaggtgtgtaaaacacaatgtggatttaaaattagagattgaagggatattaaataataaaaaaaaaaagataaaaagctggggtcttggaatattttcgtcaatcgataaaaagattaatcggagtagaaacacggtatggtatacagtgatatatatatatataatctctagtgatgattcgataatgatttaatacgagtcaaaactcttttggacagctatgttttggacgtcgtagatggcgtgcttcagttttactgtcataaaggcttcttttggacgtgtctgtaagttacgaggcttgtttcctaaaaaatctagcttcgaaactttcttgcgtgaaagaaaataaactacgtttctctgtaattttgagtagccttgtttttcgcatgcaatttctgaattctagtgtatattatctcgtggtgatatagcgatgtaaattctgcgataaaatattccggtccaaaatttttattagtgctttattaggacgacttcagtaacgccttttaaatgcaaattcaagtgaaaaaagagtgcaagcgcaaccaaattttggaagtttattcaaaaactaaatgaaaattcagaacttcattgacccgaggatttatgttattagtgatctatgtcttcgtttttttcagaaattgcagttagttgggttgttctagcaactagatacgttggactaaatgccaaattaattcaaaagttgtccaaaattatattttcctgtttttccatcagtagttctttagaatctatcaaagtagtaagtcatttgatcctacttcagcaacgcaggtctgtcacatcattctactaattcaagaggggtc

SEQ ID NO: 103099 - DNA, 570 bp, Mimulus guttatus
  Intron number 1 from transcript mgv1a013304m (locus mgv1a0 13304m.g) derived from phytozome v7.0 (chr-ID scaffold_17; pos 1218565 to 1219134)
caccaacgatcaatttcttcgaaccccgcccactggttctcaccattttctcattcatatatattattactcatttcagtttcgttttatttgatttttcttctattttttggcatttcatctagggtttcggggtaatataggtttaccttttagtataatgggattgatttacattttccttttgctttctatatttatctattcaggttctttttaattattgatttcaattattttagaaattgatgctttattgataacatttgatctgcttgttgagaatatgattttttagtgtagtaagtataaccaagaggaaatatgtagtctaataagtttacaaagtgttaaatataataatactgttagtgttagatatgtgccctctctaacacttactgattaatttgtcgactggaaacagacaaaattgattttgaatatagttgcctacatcagatcttttgattgaattgttgttgatgttttacgatattagggactgatggatcattcgaaatttctatgttatatgttatgcgcttcgctcgttttcaggtttggttt

SEQ ID NO: 103100 - DNA, 820 bp, Mimulus guttatus
  Intron number 1 from transcript mgv1a015911m (locus mgv1a0 15911m.g) derived from phytozome v7.0 (chr-ID scaffold_24; pos 345299 to 346118 reverse strand)
ttcgttatccgtcgaacgtttttggatcaaaggtaaatttcagctctcaatcattctgtcgatgtgattcatgctaaattctttgccgattactcgatcattcatgatttcgcgctcaattttcctgtctagagtttgtgtttgtgttttttttttttttttttttctcttgattgttgaatttttcatatttatttctaggaggattggggattttaggctggtttaagggtgaaattaaatttctttgagggtaaaattatatatgtggcagttcaattgaaattaaataggtcggaggcggtggcggagcaagcatagggccaaggggggccatagccccccttcatttctcaaaaccctattattttatatagaaatataaaaaataaaattgtgcataactgcattaatgggacccctcggatttttttttaatgcatccggcccccgcggactttaaatcctggctccgctactggactccgaggcgatttggaaagaatttatcgtgtttcatgtgattttgatcgtaaaaaattatgtatttttccacttgtttgtagaaagattggctttttttcacatgttatttagctttctaacctcgatcgttgatgtttggagtagaaatagctcgtttatttagttaagtaagaatgcatggagtaatgttctgaattaagatatgctatgtttgacttaagtcttattacaatgctcgatgatgctctcgtgcaggatctcgaactgatcgagccttgaaataaactcgtagtatacagaatttcttacagtatctagacatcaccaaaacacg

SEQ ID NO: 103101 - DNA, 816 bp, Mimulus guttatus
  Intron number 1 from transcript mgv1a023771m (locus mgv1a0 23771m.g) derived from phytozome v7.0 (chr-ID scaffold_149 ; pos 312511 to 313326 reverse strand)
tcaatcgcccagagtggaggcggctgagagcttgggtaatggaataggtgatgcaaattgcaatttcttccattatattgtactatgtttttagtttgattgttgctgcatgcatgttcatataatttggaatcatacatacatatatatatgtatatatagatatgtttgtgggtttttttttctttttctcttgatagaatccgacaatcgaagtggctaacttgtcgacatttatgaacacatgaagttcgattcttgaagtagtggggcctttgaattgatttgccaactaaaatcttgttgatgcaaatgtgtcgagtttttaagattagtggggtaggtgaggaaaaaacggaatcttgaaataatggaattgaatttttttttattttttcgttttcgggattggtgggtttaagaactgtgtagttcaccttcttcgattatttggttaaagagacaaataaggacttgtgttgtattgtattgctttcttgcgaagtgagtcgtgttttcttgtaagagtttttttattgttactacggacaagtgaaatctcgtttcttttcggtttccatggtggtaaacacaaacacttacgtagtgttgactttcttgaattaatttatcttgatctctaacgataatttgtgtcggtggcgtacggagaaatttgcaactgcggttcacttattatagcaactcgagttatattggttgtttcgtttaagatggtatgaacaaattgattgctaatagcatatttttcgatttgtaggtgattcggtttcgtgctctgttggtgctagtttt

SEQ ID NO: 103102 - DNA, 731 bp, Mimulus guttatus
  Intron number 1 from transcript mgv1a004058m (locus mgv1a0 04058m.g) derived from phytozome v7.0 (chr-ID scaffold_29; pos 1560095 to 1560825)
tattaatcttaataatctcagtaaccacttcaggagtaaaagtctcattgggttatttcattactatgcataagttctttagtaatcaattcaaaaaaacttcatctaattttaaattacatgctcaaacataattcaaatgctacaaatataaaattatcttctaaaaatttaaaactcaaaccaaaaacgctattattttgctctcgagctattttcccgatttgttcgaccctacacccggtgaaaaacaccgggtgggtcttctgctgccacgtatctcttttttgaattttataatagattccccgctagggtttacctttaggggttttagaaaaataaaaaaaagaacacgtgccagcagaagacctacccggtgtttttcaccgggtgtaggatcgaaggaacctattttcccctatactgttaaaatgaaatgaaattgattccaaaagttctcatttaactactaaacagtaatataatattcgtaaaaaataaaaataaaaataaaagaaaatacaaaaatagtaaatagaacctcataatgtgttcacaataacagctagcaaaccccactctctccccaccacccaccacagccatttacccaaatctcagatccaccaaaccctctttaatctgagccgtccattttcaaccattaaactctatttatacctctcccccaagcattgtctacacttgccttacgatcccttcttctt

SEQ ID NO: 103103 - DNA, 875 bp, Mimulus guttatus
  Intron number 2 from transcript mgv1a016884m (locus mgv1a0 16884m.g) derived from phytozome v7.0 (chr-ID scaffold_245 ; pos 290043 to 290917)
agtccgtcacagtggaaagaagaacaagtacgttttcttcaattagtttctctgattccttttttcttttccaattagtggatcggatcatttgggattttagtaggttatattaatgttatttgaattgtgttttggataattatccgggtcagaaaaaaatgcttgacggaattcttagattgcaaactgaatgatgtgcattacggaagaagagctcaccgtaaacaggaatttttagagtatcaatattggatacatcgcgtatcgtatgacacactagcttactatttcatatttgcagcatctgtatcgtacataaattcttgctcgtatattttgatgtttactatgggacttaaaaatttatgaaatagttgctcgtgtgttgattacaacggctaatgcgagtatagaaaacccgatgccagtggaaggaatgagattatgagcatataattctctatttatcattataaattgctaatagtcttcttattttaacatgaaattttgattaattaactgagcttttttaaatgtttacaaatgtgagagcaattctcgcattaaagaatgctaattgattgagattttctaaatgttcaactcaatgtatattacttttcagtctttgcgccaaattcattcgataaccaagattttcacgtatggaagcaaaagaatgttaattggaaagaaaagaaacaaattattttaaagaaaatcggaaatagttttgtcttgcaggtcgaggttataacctattgcgaagaggtgcgaacacaaactcgaaaatctttagtcagcctaactagttttgcttttggtgtttcacagtttgtgattgtatctcttactggctggggattgct

SEQ ID NO: 103104 - DNA, 1023 bp, Mimulus guttatus
  Intron number 3 from transcript mgv1a009983m (locus mgv1a0 09983m.g) derived from phytozome v7.0 (chr-ID scaffold_122 ; pos 474476 to 475498)
aacttacggtaaccacttctaattgggataattagtctctcaattcattgatcattgtttttgttcttgttggttgtgtttaacatttctgatttgaatcgtttgatgaagtttaattttccctggtgcattcatactgcatatgcgatggtaacatcatgcatagatatggttgttcatagtggtcaggtatatatattgctagttactctcacaccactattaacttgatcgaaatacggatctaccattttaaagacagtagagctttcaatatttttgaaaatagttggagataaagaactgttttacttagtgattgaaaacgcctatttactttttggtatgcctggagataaatttaccctatctatcccgttattgttaatgacatgattgagaaagtgcggattggggcagattcttatttatatacgtctcacgattttgagtagatgatctaatggtggatcaaaagagtgtttgattagtctcgttttgttttgcttgaatgatgaatagcctaaaagtaaaatgtacaagcacatttctttgcaggcaatgatcgtacttaagaaggccttttatttgtttgttctctatgatgcgagattggtttttcagataaccatttcactattaaaatagtgtttttaattttctaatctcgctccaccattattgaattggtctctgtatttggtgattttatgtctaaaagtcgtgcaacctaggttgatatgtatatttatatcgtatcaacccgtgtttcctgtgaagtgagtttctatgtggtcatttgattcaatccaatgacgtcacttcataaatgtcatttttctttggcgaatgaatgccaataagccaaataaatttaccgaattaccaaagtatcagaaattcgtcatagtagaagtaaccgagacacttttaaactccctacaattctcttacttcatcgtttttcacatttaatgattaactgtaggttcttttaggagaaggctactacgctgaaagaac

SEQ ID NO: 103105 - DNA, 426 bp, Mimulus guttatus
  Intron number 1 from transcript mgv1a012417m (locus mgv1a0 12417m.g) derived from phytozome v7.0 (chr-ID scaffold_361 ; pos 38574 to 38999)
aatctatcctgtgccctagcgtctccaaccccgaggtacaattaaaattactcgattcaaaacttttcattttttatcacagtaaattgttgatttaattcagtcgcactctttcgattttgtgtaattcacatcgccatagaggaatgtaattttttctgtaaataaatctggttgatttgttttcttttcctctttaatttgtccgatttttgtttttttattttattttctgggcattgttttggtatgttactgtcattggtgcaataggagtgtctccactgttttttgaagtatgaaaagagaatatatatatgggttcttgttttttctttatcttggtgaaattgctatgtttatacggagatatggcattctattaagctgttgattgttgtactttgtttcagtttgcgaggaact

SEQ ID NO: 103106 - DNA, 832 bp, Mimulus guttatus
  Intron number 2 from transcript mgv1a012417m (locus mgv1a0 12417m.g) derived from phytozome v7.0 (chr-ID scaffold_361 ; pos 39003 to 39834)
ccagtgccgctcctgttaaagagcagaaagtcaaggtaatggtcttttgatttttttatattcagtttgggggtattgatttacaaggtatacatcttcatatgagaagtatgcttgcgttattgttgattctgctgatcaatataaactgagaattttgaagaacttgttaaaagtcttaggagtcacaaacttgtagtttcttaccctcataagcaagtgtaaggggacattttttcgatttgactatttaatgttgtatagtccggattttgagctatgctctaaatttctgttatttttggaatttgtattgtaagattatgactgatatctttacagtttcttctgtgaagatttggtattttttttgttttgtgtgtgtgattattgtgctcctcccttgcttttataacattttgcgtgtcatcgttgagaactatgtatctaattgacgaaacaacagtgtacttgacattctatgtttaccattgtcatggaaagtccgattttatgtccactctaatgcacccgttctattttgtttaccttgtgatttgtttacgagctgtaccacttgcaaactcatgagatcatatggataaaagcatttctgtgtagttgtttaaaaggttttgcagttatgttagtagttgctaatgggacgtgattcagttaaaatgttatgagtcttgtaatgttggtttgctgatatgtgatatcttcagtgtaaatcctaactatctacctatgcttgcaaaaagctatgtatgacattacagcgtctttataactgtaacattgttttgttgcattttagattcctttgaca

SEQ ID NO: 103107 - DNA, 879 bp, Mimulus guttatus
  Intron number 1 from transcript mgv11b023851m (locus mgv11 b023851m.g) derived from phytozome v7.0 (chr-ID scaffold_4 8; pos 39150 to 40028 reverse strand)
cattatcgggctcggtattgcgggccacccctcgtgtgggccgctgtgctgaccgatgtggggacgtgtttgttggtgatctctatcagcatgtggcttttgagaaagtgcacgagaaagtggcacggaaagtgcacgagaaagtggcacagaaagtgcacggaaagtgcacgagaaagtggcacggaaagtgcacggaaatgttgtacgaaggaccaggactagttgtggaggaggagttttattacaaattgtgatttgaatgaatatttttttttccttgtttgaagaatgatgaaaagggttttaatgatcggtaaaattggcatttggatatttgtttaggaacaaattatgggcagacattttggaatgagttttttgcaagaaccacccctctgtaatttcgaattgtcgaaaaactcctcgtgttaaaaaaattagcaggaacccctcgatgaaaattagtcaaaggcaaaaaagtccttgacagcatgtcgtgtgttgtacgcgcggcttgtgtaactgagagtgtaatttttaacgtgaaaagtcaaaaataccctcttaaattcttttataaataaacataaatctaattgggtttaaatgtaaataatagaaacttttggatctaattataattttcaaaatttcttacccaaacaaaaattctacagccgaattaaaaaaaatagactcaattagaaagaaaaaaaaatagatctcaatttaacttgtcttcttcccaaatttcctcctcctactgccgcccctttcctcccaccactggccttctccaatcttctcctccaccgacaagttttcttcaccaacgccaagtgcttgaatcccccagccctccgccgttcatcggta

SEQ ID NO: 103108 - DNA, 389 bp, Mimulus guttatus
  Intron number 1 from transcript mgv1a013455m (locus mgv1a0 13455m.g) derived from phytozome v7.0 (chr-ID scaffold_320 ; pos 128320 to 128708)
tctcagatcaacccctttgcctcgtcatcaatccggtatgtgtgtgtgtgtgtgtgtgtgtgtttattcatttaccatatgatgtaactaattgctggcaattcttgaattttgtttagctttcttgggctttacatgttttcgatttattctataccaagcccgattaacttttatcggattatattctagtgtatatatatatgtgtataaatccatatttatacacacatttcctggtgtatatgtgtggaaatcaaaggttaaaattaaccagtctgttttcttgtctgggatttgaggttttgagtatggaactccgaaccttgaattattttttatttatttattttattttccaggtttgaaattttcgattaggtcgataa

SEQ ID NO: 103109 - DNA, 729 bp, Mimulus guttatus
  Intron number 1 from transcript mgv1a009719m (locus mgv1a0 09719m.g) derived from phytozome v7.0 (chr-ID scaffold_3; pos 3019980 to 3020708 reverse strand)
caagagtactagaaaagaaaaaaaaaaaagccaaggtaattttctctgctgccctttttcttctttttctttttgtttgggcccctaatttgatgttgaaacattctaaagatcacatttttttttctctgcattttcatctgtcggttttcttgctgcaaatttcttgtcaaaaaaatgagatagctttttttctcaaaaccctctctctctctctctctctctctctctctctctctctctctctctctacatcggcgaattggttttcttgaataatttggtgtatggtaagattatcaagatttcagcttttttattttttatttgtttgtggctttggattatagctgttttttattttgttctacctgggctatggtttgatctgtacatttctgataaattttttaggttatataatgttgtgggcccatctctttcttgctcatctctctgcaaatctctccaattttctgccactctgttttagatttttttttatgtgctgaatctttttttccatgggaatttttgtcagcttaaaaatgacatctttatccctgaattcttgtctgaaatttgattgaaatcatcttctgtaattgaaaccaaatgatctggttagggttttcaagaatcccaatttctgaaaacatctcattcttctgaaaccctacttacatttttcttcaccaattttggcaggggtgaaaaagtaaatcttgt

SEQ ID NO: 103110 - DNA, 769 bp, Mimulus guttatus
  Intron number 1 from transcript mgv1a009771m (locus mgv1a0 09771m.g) derived from phytozome v7.0 (chr-ID scaffold_23; pos 683945 to 684713)
cccttcaaaatccccatatcattcttagtagaacggtgtgtttgctcttacttttccttttagggtttacttttttctccatggtttgtttattttcttcttttttcgtgcttgtgttttggtcgagatttgatttcggtgtttgattttgggtttctgggttgtattatggttcaatttgtagctagatagttgtacatggtatctctgtgtttctttttttttttttttttttttttgtgtgtgcgtgtgtgtttttccacttatatataagctgctctgtttcatttctttgtgctgtttttatttaattttttttttctttatcaattcgagttctgactttctggcatttgtctattggagtaatgtagttctcttgtggtagtattttgaaatccccatttgaaatttgtttatgttttacttattggatactattgcttggtactgaagtggaggggaaaaaaaaagaattaaagtcgcactttttattaggttttcgtgtatttttgttttaatttatttttgcaaaatatatgttctcgtgtttttgcaaaaaaaaaatcgtatttttttctataattgatgtgattattttctgattttgtccttcctcgagtagatttgttaacaaatcaaattccgagaaccctagaaatctttgttcaattgctgtttgatatgtcagcacaaaattattttaatggaatattgtttatccacctcaacaggtggaggtgaaaagggctattccgaggaacgagca

SEQ ID NO: 103111 - DNA, 897 bp, Mimulus guttatus
  Intron number 1 from transcript mgv1a001938m (locus mgv1a0 01938m.g) derived from phytozome v7.0 (chr-ID scaffold_44; pos 1062621 to 1063517)
atcgaggtcactcatttttttttttatttttttttttgagattatgtttggaagggaggatgtgaagtgaaaaagttgctatcttttttttttttttttttggttttagttctgttgaagtcatgaaatctggagtcagtgagtttctccctttgtgtttgtatttgaattagtggctcttgaagtataaatcggtgtgatttcaaagtataattgtgtaagtttgtttctggtttgaaatgtgattctcggattgtgtaatgcgatttgcattacgacattatgttttttaagttgagggttgttttgtctactggaggcattattgtgacgcatgtgtagattgatgatatagattagtgtcagagaatggatgaaaaccgaaatcagatagtgattttaagaggaacgaggaaattcaggatcgttatagtcaacgacaagcggaattggttgtcgttttcggtaatgtctaggctgttattaatatgtatggttttcatgctttttttattgtcgggatatacttttcctcgacatgttggtttatgtgattgctcgaccttaaattggtggtcggcacatttagttaataaagaacaaggaaataagtgttccccctcgttgaacttttgagagacgcttttttttttattaccatttgtggcttcgaagatttctctgcttctgaggtatctgagatagtaaataatatgttccgtttggcattttctgatctgcattaacatgaatgttattgatgcttacccgctttcttgaaattgcattccgtctataaatatagatattaaaatttggatgttattagactagaaacgagtttccgtttgcatggttgtaggaatctggaaagatatacattgttctggagtactg

SEQ ID NO: 103112 - DNA, 520 bp, Mimulus guttatus
  Intron number 1 from transcript mgv1a018256m (locus mgv1a0 18256m.g) derived from phytozome v7.0 (chr-ID scaffold_24; pos 388118 to 388637)
ggtataactcaatcggttctgagggtaaattggtgcaatgtcctacgatcgagtagcggcagccgacaaccacagtgtggatcaatataaatgagattgcacataaaaatgaacgcatgagtatagctcaattgattacgaggataataaattattgcaaaatcctaggatcgagtattaacagtcaatagacgcagtgtgaaaatttaaccactaataagaatcggttacttgaattttttttaattaattaatgcaatcacaaattcaatattgaaaaatcacaagaaattttccttttagcaaagtgactaccaaaactataattaacattgtcccaatcccataatcatgaaagtcaattgttcccacaatccatgaaaatctcaaatcaaacaaaattattattaattatattattaatattttattacaataaaaagaacatgaagaaagtagtttcactcttacaataataaactaagaaaaaaatcccattaagcaaaaaaaaaaaatcttc

SEQ ID NO: 103113 - DNA, 634 bp, Mimulus guttatus
  Intron number 2 from transcript mgv1a018256m (locus mgv1a0 18256m.g) derived from phytozome v7.0 (chr-ID scaffold_24; pos 388967 to 389600)
ggactgaatttgggggtggtactcttcatatccaggttgattggatttttggctttgttaatttttcaatttaatcgccgattttttctgtcaatttgggatttatgggttttcctaaattgaggttttttagggttcctaaattgggctgttttaggttacttgctgaagtagagttgtgtttaatttagggatagtgattttctttttcttttttttttcgattttttttctttcgatttttaggttacaagtgcaatttcttcgatttgggagaatcgaagatggggtagaatttatttgtcgaaactataaattgggtcttttgcaagtaagtttcttgaaatgttttagccaggatctgaaattttggatacacgtaggcatcgtcttttagttaagttcgtttatttatcgaaactctatattgggtcttttgcggacaagtttcttcaattttgttactaggggtctgaaattttggatgcaattaggcgtaattgtttagtttgatttcgagtttattaaaaacgataattgtggtgaatgtcgaaagatacgaaactaaactgtatcggttatggcaaatgcaacccgattaaaaatcgcaggttagcaaagcacacagttggac

SEQ ID NO: 103114 - DNA, 397 bp, Mimulus guttatus
  Intron number 2 from transcript mgv1a013335m (locus mgv1a0 13335m.g) derived from phytozome v7.0 (chr-ID scaffold_60; pos 909786 to 910182)
acataggtaacaatccttcgttttctttcatttctaaacaattacggcttacatttcctggttccttccatgctttgatttcttcgtttctttcttgacaaatctttatttcgttttttctattttatcattagtatagctctttacgtgtttgattttaagaattgatggctagtcttctgtctaatttgcctattgtatttgcatcgtcgtttacttctgtacacaacgacatctcaaagaatttctggtaatctacgactacatagttgctttaaacaaaaccggccatactttttgtactccttttatgcatgtggactgtataaatatatttgtttactcatcttttgacgttctggtttttttatgattaattgcaggggactacaaatat

SEQ ID NO: 103115 - DNA, 891 bp, Mimulus guttatus
  Intron number 2 from transcript mgv1a009074m (locus mgv1a0 09074m.g) derived from phytozome v7.0 (chr-ID scaffold_247 ; pos 240138 to 241028 reverse strand)
gcttgcctctccacgaaaccgaacgcctacaaaaggtatatacgaaatacctcattaattaatatatatatatatatatatatatatatatatatatatatatatatatatattcactcccactttagagatgtaaatcaagaatcatcaatgatatgaacctcacaattaggattattcttttttgcattatcctttttaaaatttttgatttcatagaaaaccccaagtccccaatagtactgaaaaaatgtcaaaaaaaaaaaaattatattttaggttaattatctttatctttgattaattggcttaaatacatataaatatatggtgaaggagatagataataaacaaacaaaatcatgataaatattgatgggaagttgttaaatgttcaccttaaaaaagcagaagacatgcatgaatttaattaaaaagattcacaactattttcatatcattaattaaattaaataaaacatcctcaaacacctcattataaatgtgaattgtgggtaaatgtaaatatctttaatttattcttgtccctcattattttcatcgaattcttcactcactgcaagagaaaatggcattattagtattgataccctaactgtgatatacaatatcaaaagttgtcactaaaaaagagtgcatgtcgtcactaatatctcactaattttgttatcagttaatccttttttgttgtcactagatagaattagtgatacccctattagtgacaacattgtatttttttgtgtctgaccatgcatatgaaaacatatgttgtcacagggaaagattatttcttgcagtgactttgatttctcctatttaatgattttttcaggccgaaatttctctttgccgagtctacaaaagagc

SEQ ID NO: 103116 - DNA, 734 bp, Mimulus guttatus
  Intron number 2 from transcript mgv1a012272m (locus mgv1a0 12272m.g) derived from phytozome v7.0 (chr-ID scaffold_75; pos 295812 to 296545 reverse strand)
agggtaaaatattttctgtttgaaatttctattttcgtgatctatatgttttttgctaagtttcaccattatctcgatctaactttttttccctgtttggtataatttgattagattatatgtattaaattatatgccatgctttgatatgttaaatttggtatctaagaatgcgacttaattgcaacgagggtaattcttttcggttgtttgaaatttgaatttttgtcctccgtgttgtttttaccaaatttcataattatcttgatttgacatttgtccttatttgccgtaattcgatttgtaacatctttggctcgggttgtattattaggtgtattgatttgctaagtaccgggatataccgcttctgctaagtttcatcagtatcttgaattcttgattggtattttttcttgtttgctctaattagtttgatttgtcttgcaaccttttggtttcgtatgatgtttattttctattttttgtttgttctaattgtatgtgacttagttctaaaacgaaaatgcatgctgaaagtttggttcgggttgtctgtaaactacatctctgagtttggcagaggtgagaacttgtaataagtgatcttcattatctcaatgaggttcacttagtaagggcaacgtttttcaactaattctgagacgattataaacatgtatatatatatgtccataggcaattgaaagaagaagagagcgtaggagaagtgg

SEQ ID NO: 103117 - DNA, 701 bp, Mimulus guttatus
  Intron number 2 from transcript mgv1a008029m (locus mgv1a0 08029m.g) derived from phytozome v7.0 (chr-ID scaffold_21; pos 588749 to 589449 reverse strand)
aaggcaggtttacaccacaacataatcaaactcctagttatttcaaactacatttcttgatcggaaaaattgaagtatccgttttttatttattttttaactgtctaatgtttcttcattttagtagcatggtcaattcaactcaacaaggggttatctcaattctaaaagatttgtactacatgtttccgtaatcaaatgtcgcttaggataatctgacgtggcatttgtctatcttggggtgactgtagaaaaagttaccttgtccacgaaaaaaatagaaaaatactaaaaggtcgcacgtggtagaaaatatgtcgatgttagtatgtatgccccttctgtatattaatgattttcgtatatttccaagttcaagttttattgctcgagctgctttaaaaaactgggccgcaatatccatttataaataatttagttaatgaaaaatcttattaattgcatttacacattactattatttgacctacaaaatcaacggatgtggcaactgttaatggaatcactttagttagtcttgcacaatgcaatttttacggttccagttgattttttcgccgttagccagaaacttagttgttcatttatatacgttcttgtttgattattccttccatgttatactaaactggatctgtttaacagacttaccaaacactctgcgaaaagcatccatcctt

SEQ ID NO: 103118 - DNA, 692 bp, Mimulus guttatus
  Intron number 2 from transcript mgv1a007958m (locus mgv1a0 07958m.g) derived from phytozome v7.0 (chr-ID scaffold_24; pos 825587 to 826278 reverse strand)
ctagtttctacaagctctgggacgaacttcgaaaggtaaaattgtcgtttttatgtgtcgactgtcgttgctttgactcgcagagtgtgcatatggtgtatacgtatacagtagaacctaaattaataacctcggttaaataatagtttctctcggtccgactcggtgaaattattgacttgataatttaagaattcgctaaattaataaaatttccccggtcccggctgtattaatttatagaggtttaatagtatctgaataagaaagaatgagcgttcatttctagaactatgcagttgatagtgttatgcatctgtggtgattaaataacgagaaatggagacataatttcttttgattgcaatctttcagcatagaaaactaactattactagacatcgtagttgaaaaacagagtcttgataaagcaatattttacgaaccttggtttaaatggtgtggcgtgaattttcgaattttagtatcgataatttttttttggttttagtttgtcccttttgatgcattaacttgtgttcttgtcttgttgtttaaactcgacaaaaaaatgaagctcctagggaatattcttcaatatatactcgatacttttaaatggtctcggcgagaaactaaaaccctccaaattcttactttgattttcgacgtgaaatgcaatcttcacagga

SEQ ID NO: 103119 - DNA, 538 bp, Mimulus guttatus
  Intron number 1 from transcript mgv1a009109m (locus mgv1a0 09109m.g) derived from phytozome v7.0 (chr-ID scaffold_2; pos 2292845 to 2293382 reverse strand)
gcgttgaaggtgtccgctcgtgccaagtattcgatctttcgtataaatgctatccctgttttctttgttttcgtatagaattgcattgtattgtttgctcatatattaagatgaatgtgaagtagtacatagtacgtgcgtaaaaccgaacttaattcttgagctatcatcagcaggagaaacccgaaaaccgaaaaccgaaaaatattgacctgcatttggactaatagtgccaatttcgtttgtcgaaatattaggtatctaagaaaatttagtgtccgttttcacagtatcaagaaagtgaatcccgtcattgaataatttgtatcacctttcaaaagatgatttgtaacaactttcaaaagatgatgtaaaatgagagagataaatgttaaatcttgaagagagaatcttgataattacaagaaacggtaggcggcgtgagggtttagtttgattgctagcgtatatatataacagggttgatgggggccactaattcaattgtgcaaggaacgcttggcaaagattgggaagc

SEQ ID NO: 103120 - DNA, 923 bp, Mimulus guttatus
  Intron number 2 from transcript mgv1a009239m (locus mgv1a0 09239m.g) derived from phytozome v7.0 (chr-ID scaffold_36; pos 253707 to 254629)
aaactctcaagtaccctacatacttgttttttcaggtccactatttattttctctttatatttttaattcatattaattaataattaatgattgttaatttgatcacatttgttttttaaaattctaattttttgaaagtgaaaaaaaattaatttctataacgattctgaaacataagaaattttggagaaatatgtttcgagagaataaattgaaaatgtagtagtaacgtttgtttatgatttgagatcagacaaaatacaaatcatatttaaagttgtttgggaaaatgtattttaaaagaagagtttgaaaaataaattgatgttttgtttgttttttagtcaacacatttttttttaactatagcagtcaaatttttttacccgtctgaaggagaaagaaactttagaagttgttttgattttttttttttttctttcgaaaaactaaacaaacacgaattgccaaaatagaacaaaataatgtaaatagaaccaaacattatttattcggataaaagtgaaacaaagagaaccaattaaacattggtttactcggatttcaaaattccaaataaaaaaatattttaaaatagaatccacgaattgccaaaataatgtaaatagagatatttagtaatacggatattaaaattatttttaatcgatcccaaaattcttgaatttagttttgaaatttaaaatcggatcgatcaatacattttgaaaattttatatataatctcgattattgatttaaaaaagatgtttaaaaaccaaattgttaggatccaaatcgaagaaaatgtttgaaagttggaatttttcgaattgaaaccggcgtaaattcaaatgtttcgttctaatttacgcccttagctaaaatatgatcatatgaatttgtaacagaggcgtcacat

SEQ ID NO: 103121 - DNA, 713 bp, Mimulus guttatus
  Intron number 3 from transcript mgv1a009872m (locus mgv1a0 09872m.g) derived from phytozome v7.0 (chr-ID scaffold_24; pos 1024045 to 1024757)
ttgagtttcttgatctgaaaatcggatctccagacgtaagatgttatctcctttattacctgaaataaaataaatatcatcttaaataatagaacagttctaattatgttcaaaacaatgaagtacctgtttaagaagtgatttagtatgaagtatgattaatgggacttggaaatcggacataaacttcggatcttttccagaagtaaaaatctaatttcgattccgttccaaaaaaaaaaaatcggaaaaatcgaaaattaaaaaattggaatgaaaaaactcgttccaaatttggaaattttcgaatcggaattggtggaattcagagatttccaaagttttagtcacctactcacctagcatataaaatgaataataacattgatattataagtgtaattttcaaaaattaaaatcggatccgaaatgggaatctcatacgtatttcaattccggtctcaaaataatcgggaaaaaatcgaaattggaattttcagaattcagaattcagaatgaaaaatattattcccaaatcagaattttttggatcggaatttccgttcctatttcaaccctacttataagaaatcaaaaggctgatgaaagcaattgtatgatttaagaagaaaaaaaacttactatcggcacgaattttgcggttgttgaatgacacagggcacagaactttgctcgatttggagcgaaggatt

SEQ ID NO: 103122 - DNA, 864 bp, Mimulus guttatus
  Intron number 2 from transcript mgv1a017594m (locus mgv1a0 17594m.g) derived from phytozome v7.0 (chr-ID scaffold_174 ; pos 260972 to 261835)
ttatcgtattctctacaagaaacgtacccgccgaagtaattcttcttcctttttttatttatttatttttcaaatttcagcaatagaaagttatatcagtttaattgtgaataaaatcatttatatcgaatttcagaaaatatattataggctatttagggtattttgtttattaatttcagagtttacgttaatgacacatagacctgcttttccaaataacaaatgatatggttgacaatcttggtgatctacgtattcgatttcatgggcaaaaattagttgtgccgttgggtgattttatgcggaaatgattattacgtgacagataatatattagtagcggtcgtaaattctgcgataaaactttgctttagctttgcttagaagtaagcaatttttgttttaatctttgatgaacgaaagacgagccgagatgttatgtttcttgtattctcgaatcttggtatttcgcaattatttgcatggttagattgctttatattcttacacttcggactgaaacaatatcgttaggactcgatcgtcatttggtaaaaagattgaaggaacttcggaaggtagaaaaactggatatgtggtataatcgatcgtttctattgtgcaagtggaaatacgggagattaaattatctcaattgttatggttaactctatcaatagcaaaatatgaagtgacaaatcgtctagttttcatcgtaatctaagaacgagaagattccctgcttatcttaagaaagaaaaaaaatggaatcttgattgcgaacatattgtttgatgattcattcgtgcgtttgcagctcttcaattcatttttttattttgtttcttgcagttgttcaat

SEQ ID NO: 103123 - DNA, 721 bp, Mimulus guttatus
  Intron number 1 from transcript mgv1a007605m (locus mgv1a0 07605m.g) derived from phytozome v7.0 (chr-ID scaffold_64; pos 733569 to 734289)
ggggagatagattgattctgggctcttttaatctggtgagtttcgatcctttttcttttcatttatactgaaaaatcaacccctttttttttattgtttttattttttcttattcgagaggttcttgatttgtatgatgtgatgatagatccgaaatatttaacagttgtgttatgtagactgtagtttgttatgttttgcttgtatattctgatgatctttgataatggatcaaagtatttgttatgaagttaccaacgaagaaagatgattgaatagatgctttcgtatacttgaaaatggagagtgtggatttgttctgcatttgtgttttctgggaagaacagtaacatgaaattgttacgtgtacaattgagctactgggattttgtacttgcgagttataggttgttgtttgatgtgcagtctaggtgtttgatatgtgtcttctgtgaaagcttgacttggaatgctatccttatatttttatgttttttccctaattttttttttcaaatttaaatcactcagatttatctgtgttgcggcgtaacaattacgtaaagttcgttatgctaagatccagttacgagtggggcaaaaaaacacggatgatttagattttttttttgtgcaccgataatcggcaaatacttattcatgtattaatttctgcatttcatcagctatttggagctaaaagggtcgcttttgcttccga

SEQ ID NO: 103124 - DNA, 946 bp, Mimulus guttatus
  Intron number 2 from transcript mgv1a025818m (locus mgv1a0 25818m.g) derived from phytozome v7.0 (chr-ID scaffold_111 ; pos 155659 to 156604 reverse strand)
aattcgaggtaaaatgctctttttacactgttgttgttcgactctatttattgaggggatgaattccaaatagagggctattttagtaaattcaactaattcgttctatagttatttgatattttcccgggttgttgtattttgagctgtaaagtcttggtgtataataatgtagaaaagttggtcagtgactgcaacatcatcaaatgctatacgtttattaatctaattcctcagttacaatgtgcaaattgttttccttatttggcatgtaatgctgctctcgtgtaaatttagatagaatctgccacgtaatgttctggaaactctcgggcttaaaagtagctgtaaaagtattgcagaacaagataaagcctagcagaaataccaaaaacttgcagctctttcagtttgtctaagtttaatgtatgttctggataatgtgttatgctttatacataataatatagggcaaattacggccacccctctgaggtaaggtcaaattacgaaaaaaccgttcctgtttgggtaattacaaccaccctcctcaactatgtattttcttacgaaaacccccctcatttagtaggtcgtaagggggggacgtgtaagacaataaatagttgaggggttgtaattacccaaagaagggagtttttcgtaatctggccttacttcagggggttgaccattgtttgccctaatattacatatatactatctatatgtcattctacatatttttcaaggactttgtaggatatagtctcagtgttgtatggacagtttcaccgaatacaacccttcttcatagttacgaacttagcttcatatttcattacatataatactgtttattatgttcgatatatttgctataaatattgtctgtttgaaatgtttcacaggtggcattggcgaggcacaccggaaaacagcaaac

SEQ ID NO: 103125 - DNA, 759 bp, Mimulus guttatus
  Intron number 1 from transcript mgv1a001480m (locus mgv1a0 01480m.g) derived from phytozome v7.0 (chr-ID scaffold_96; pos 450744 to 451502)
gctgatccaagctctgctcacaccaccgactcgtgagttttcatttttcctctcgttgacttttttaataattttttttttctctcatggttgctgattttaattcaccaacttgtttgaaagtttcaaaattcaaggtcccctttttcatgtttgatgttatatgtattgttgattttttttaatttttttttgttggttttcttgggattcttttacatatatatatggtaaattatggcaacctctagataaggtctaattacgaaaaaaaccaactgacgattgcatcacccctcgtctatgaatctcttacacttacattcttatcttaggatgtcaaattaaaaagaatcttctaaattccgtagaatgttctctagtttatactcgttttatactcgttttatgcataaaacgcaaaaatgcagtttctgatatttacaagacaagacaagaagcacatcttatgattcgatcttgtttcaaaatgtataactcgaatgagataaaatgggtacatactggagaatattctacataatctagaatatactactaaatttgacaccgcaagggtggacgtgtaagaagattcatagttgaggggtggttgtaattaactaaacatgaggggtttttcgtaattgaactttatcttttagtgtagccgtatatattagaagttgattttgctgaaaaaaattgaattgttgaaatccaggaagagtagcaaacgggactattccacagtgatac

SEQ ID NO: 103126 - DNA, 527 bp, Mimulus guttatus
  Intron number 2 from transcript mgv1a007019m (locus mgv1a0 07019m.g) derived from phytozome v7.0 (chr-ID scaffold_1; pos 3883474 to 3884000 reverse strand)
cgtgtcataacaagaagacgctgaccggggttagtgtatttgtactccttgttgcttggtttgcttcttgaattagacactgtattttatccactgctctggagattaagttgatttctctagcttttggcagtgatttgatttagtttatcggatagaatttggatttcacatcatttattccgagcttcgaactttttcgtactcaattttgtagtagaataaaatgctcttggaagctcaatgttagctggtcatctagaagcgtttcaataggcaattaattacctaggatttttatctggatttgcttcagacttcaaatgtattaactaaaccttttgacaatctgcattaggtaaatgtagcattgtttttttgtaataaaaaccagctactcttccatatggaaaattattctctttggattttcgcctcatttgtgttatactatgatgtgtgttgttctttattctgagcatgttctctgggtccaatccaggcatctagcccgttgcaagtgaagt

SEQ ID NO: 103127 - DNA, 780 bp, Mimulus guttatus
  Intron number 1 from transcript mgv1a007535m (locus mgv1a0 07535m.g) derived from phytozome v7.0 (chr-ID scaffold_18; pos 1393259 to 1394038)
gttcgtgagcggtgaaaacggtaccgttcgatcatgtaagtttcgtttgtttctcctgttttttttttttttttttgattattcgtagaatatgttagaagcaggtgaaaattttaatttttttggattagagatggtaaatataatgctaaattgttcttgacttggatttcagtttttttaggcacgagtttcggatctctattgaccgatgcagtttcgaatgttagggtttttttttgcccctctaaatagcacttgaaaatcgaggaattagtttttcgtctaagtttattgattcagatatttattcgcttcgataaaggtctaattgtaattaattatgcctaatttatttgtagaatagctgttacgagagttgttgaagatgtagtaattagcaagagtgaaatattctataggatactaatccagtgaatctgatttactgattattgaatctgagaatttttaattacacgaggtgtgtcttcttcggaattcctcatcgcgttttatttggctttgttggtgtctcgatatcttgcaagttgagaaagtagtgattgatagaattcacagttttatgttcacttaaacgagttgaagattcgtgttagaatctggaatcataaatttccaagtcctatatgtagaattgtagatttctacttcatatgaagtaccaattttttttttatttttttttaatggtagttgactatttttcctttaataattgcaggtaacttattgcaattgattcccttcgtatttgct

SEQ ID NO: 103128 - DNA, 568 bp, Mimulus guttatus
  Intron number 1 from transcript mgv1a015354m (locus mgv1a0 15354m.g) derived from phytozome v7.0 (chr-ID scaffold_58; pos 170650 to 171217)
aacgcgtatgttcacttcatctctttcctgtttgtccgtcttgcttcaagagaactatcatatttttgtttgatatttagaaaagactgattgggtatcatgtcagctgcatttgtggtgctgggttagcagttttcctggataatttaaacttccagcaagataattcggcaatctttcctttaatttcttccatcaaatcatattaaatgtccgtcatcatattttaacatcaatggaaactgaagctgccttcctaccactacctcacttttcttttggcaaagagtcctacaccaatctagggttattaccaattctggcttttgcaatgacttctatgggtttacttacttagtttccttcagactgtttactgctgtaatctgtcaaattccccagtaaacataattgagagctgcatcaactcaagattcctttactatgagcgtgtaattgctcttatctggctcgaatgctgtttataatttgtgtgcaatggatttaaaaactttatatgttcctgtttccaggctggagcacttgctgcaaagaaccagcgtgatct

SEQ ID NO: 103129 - DNA, 387 bp, Mimulus guttatus
  Intron number 1 from transcript mgv1a008979m (locus mgv1a0 08979m.g) derived from phytozome v7.0 (chr-ID scaffold_27; pos 1846559 to 1846945 reverse strand)
acccctctctctctcttatccactgcagttttcaggttactttctctctctatctctctctccgctctcagtttatttattgctcgtgtatggttgattttgtgcaatgctttgtttgatggttgattttttttttttttttcttttaatagcatattgatttaattaatcgcagatattattttgttgatttcaatttaatctatgattgcgcttgattttggttttgcatgcgacgaattttagttttctggttgaattgagttgaagattaactttgattttgctggttaatcaaaattgtggtttaattttgaattgcattaaccatctctgagtggttggttctttcttaattgtttatgtttgaaaaattaaacagaaaga

SEQ ID NO: 103130 - DNA, 687 bp, Mimulus guttatus
  Intron number 2 from transcript mgv1a005280m (locus mgv1a0 05280m.g) derived from phytozome v7.0 (chr-ID scaffold_1; pos 4095857 to 4096543 reverse strand)
gcacccaaggataaagaacatccatgtcacctttgatctgtatctacgcactcctggttcattattctatatgttttctagcttcatcgttgtattttcatttcattttttttaactatttttgttaaaaacaaaaaataagaagaaatagaacagttacaaggacaattcatctcgtcgaacgtttgttctctgtcaaattttcggccaacttatgttgtacatgctatatatgtggtaaattgagaaatatctagtgttgtaagatctaggcttctatagattttccatcgtgtagacctacaagatctagaatcttcttgtgtattcctgataattagcccgtgttatttttcggaaacacaaaatttctctcaatcaagaaattgcatagagcatataggcgcaaaatataagtgctgttcttcctatctgtgagtccagatacatacttcaatacactattggaccgtccagctcatactatataattatatcgacagtttgtaatcaagaatcatattggctggttcgttcttttttattgcaagatgttgactcatcattcgtgttaaactaactgctttcttaaactttttgaatgcatttattttatattataattcattgtactctgcaatccatctttcaggacacggcaagtttgagaccataggagccctcgga

SEQ ID NO: 103131 - DNA, 900 bp, Mimulus guttatus
  Intron number 1 from transcript mgv11b018808m (locus mgv11 b018808m.g) derived from phytozome v7.0 (chr-ID scaffold_1 08; pos 266985 to 267884)
actcgactcgttggctgcctttgtcgtcgggcgcagtgtgcaaaaactcgatctttgatttcattgtcaagatgctttgctacatgtactttgcccgtttttgcattttgccaccttaacaaaaaatatttgcacggcacgcccaaaaccatcattttgactcacttaaccacctcgggcgaatttttagtcgaatcttcacaaattatggcgttgcgcgacgcccaagactaactagatgggtttttttgtctttttatctgaagatatcatatcgggcgaaattgaaagtttcaaggactcaattgaacttaatttgaaacttgcccgaattcgaaattgattaaaataagggtaaattacaaccacccctgagcccgaggtatggtcaaattacgaaaaatacccctcatgtttggataattacatcttgcccctcaactacgaatcttcttacacctccacccttatggtctcaaatgcaacataatcatatagattatgtggaatgttctctagtttgtactcgttttgtgcgaaaataaaatacagtttatgatgcaccacaatctgatatatacaagccaaaaaacacaccttatgatcatcttgcttcaatatctggagttcgaatgggataaaacgggtacaaaattgagaatattccatatagtctgaaagattgcactaaatttaagattgcactaaatttgaaaccgcaagaatgatcgtgtaataagatttatagctaagggagttgattataattacccaaataggaggggagttttcataatttgatcatacctcaggggtggttgtaatttacccttaaaataaagctttgggttttcttctcccacaggagtttctcccccattaattttcacattcatagtt

SEQ ID NO: 103132 - DNA, 577 bp, Mimulus guttatus
  Intron number 1 from transcript mgv1a012013m (locus mgv1a0 12013m.g) derived from phytozome v7.0 (chr-ID scaffold_613 ; pos 8282 to 8858)
ggtatgttattattttcgattgtaaataactttttattttcttttcaccatttactctttttttttttttcttcaattaaatggataacgcgttaaattatggagccatatttttatatcagagtgggctaaaaatatacagggttcctaaggatttttaccgaaaaaatagcataaaataagtaaatatttataaaatttaattaaaatatcataaataaactctttaaatactagatatatacccaaaatatgataggtaaaatattccaaaactctttactaactccttcctattttaattgtggttttaggcgagtgtacaccatattaaaaagaaaaaaaaatttatgataaatctacgaaaaacctaataaagttacttaaatacccctctctttacctgtttgacttaaatacccttctctttaggagtattaagggcaaaactataaataaaaaagtataataaacacgtaaatacgtggcaaacacacgcgcgcgcgcacatacatatatatatatatagtcttaaatttaatgaaaaatacttgggattacatacaacaggtgcggc

SEQ ID NO: 103133 - DNA, 841 bp, Mimulus guttatus
  Intron number 1 from transcript mgv1a006439m (locus mgv1a0 06439m.g) derived from phytozome v7.0 (chr-ID scaffold_454 ; pos 3158 to 3998)
tctggaactcaaccacatctgatcacagcactcaggtactgtttcgatctgcttttttttttttttttttttcagattcgtttctacatattggtgaagatgctctgttttttgtttttttttttttttagttctttttctgtctaagagaaaagctcaaaatgttgattcttttttactgaactactcttttcagttgtgggctatccatgtcatttccggtattttgactctgcttttggatcttcgattcgatgtgtttgaattagaagtcgcatgaattcattcaaattcaaggcagattatcacgaaacccggttttaaggcaccaatttgtttacattggctatgtattcgttgtttgtgaatttggaggtttatagtactcaattttgctcattgttgaaataataatatttaggaagacaataattgtcgtatttttggcttatttgttatactcgggcacttgaaagaaacgagaactatggctactgcattatttgctgagttgtgctcacgtacttactcggatcttttcgcaaatgaggttaatgtagtgtttataactgcgagttttgtcgtatttcatctttccgataactttagttttatactttctgaatttgctctatttgcttatgcttctaaatactctgttttcttgttagcttattagaatctcgttctgccctccaaattgcaatttcgtgggtgtcgattttcgtattgtgctctttcaagtcttattattaataatacattcggtagtaatctgataattattgtcgcgtttggtttggcagatctgggacttcaatctgggacagttgaggggaaa

SEQ ID NO: 103134 - DNA, 1007 bp, Mimulus guttatus
  Intron number 2 from transcript mgv1a015961m (locus mgv1a0 15961m.g) derived from phytozome v7.0 (chr-ID scaffold_188 ; pos 369368 to 370374 reverse strand)
gaaaagtgagttttttctcttctcttttatgaggatttgcaataggctgatagttagattttaaccatggttacacttacactgcaataaaatggaatttggatcaaatttgaaactctataagagttacctcaataaatttagaattgttatatatgatagggataggtaaaatcgcccatcgttcttgaacaataagtgctccgcatttcttcttggtcaaattacgaaaaaatcccacccgtttggataattacaacagtcccacaactaagaatcttcttacacgtccacccttatggtgtcaaattcaacagaatcttctagatttcgtgaaatgttctttagtgtgtactcgtttgtgcaaaaatgaactagtttctaatgcaccacaatctgatatttacaatctgatattcacatcttgtttgaaaatgtggagctcgaatggggtaaaacgggtacaaactggagaatattccacataatttagaagattccactaaatttaacaccataatcataagagtggaagtgtaagaagattcaaagttgagggtgatggctgtaattatccaaataggagaggttttttcgtaatttgatcttatctcaggtgtggtcgtaatttactctttcttctttaaggatatatatgttcattaaatgaaaaggtctactgttcatgaaatcagtcgaccaagtataaattcaaaaattacggatttgttatgcaacttcttgattatacttgctaaactcgtaatgtgttggcttataattcttgttcatcttttgctaacattagcataagtgggttattgtttaaagttcttagtcatagcttggtttcgtttagttcgttgtgtcatttatttgtcctacaaatagcagtggagttgtgtatccaattcaaattctgagttctttattgtgttaatagtttgccttcaagaacaaaaaaataaatatgtatctatttttgtgatgttttggatggcagaatc

SEQ ID NO: 103135 - DNA, 660 bp, Mimulus guttatus
  Intron number 2 from transcript mgv1a005219m (locus mgv1a0 05219m.g) derived from phytozome v7.0 (chr-ID scaffold_18; pos 1776964 to 1777623)
gaagccgaggtattttcttgtttcttcgactgatttgctttattgtcttctgtgtaatgtagatataccaatataactgactttttagatgatctgattcatattatatttatgccttgataatgtttccgttttactacgaatgcatgtgtttacacatgtcgttgactgagagtggtgaatacgtttcggtcttttgatgttacaatatggatatgttgtatattacgttttctttcagtgaattacttaacatcagggtgtggagggtaaagataaaaccatatttaacgacgcatttgactggacaaattcattgtcgttttatcgtatacattttctgttgtttactgtgttgaactacttatcgttttgttcgtagtggtttcttcttccctcttgtccttgacgcgattatctcatatttttcgagctgtatagtttagtcaaattgatatagtgatggagttgatggttattgttcggtgatcattcaaatatttattcatagtcagataggaatcttttcgaatcactatttaaccatgttataatatgttgatagttcctgttataatattttgatagtttgattcaaccatgtaatgactattgactccaatatttcatctccttaaatttacaggagtatttttcaaa

SEQ ID NO: 103136 - DNA, 719 bp, Mimulus guttatus
  Intron number 3 from transcript mgv1a006335m (locus mgv1a0 06335m.g) derived from phytozome v7.0 (chr-ID scaffold_15; pos 2581334 to 2582052 reverse strand)
aattaagaccattaggagtaagcggcaaaaattaggtaaccttactgtaattaaatttgtttcttgatatttcttttgatagttcagtcaatgtacagcatataaattatacgaaagttgtattgtatgaagagggatgaagtttgttggtcaaacacaaaactgcccatttggctttttaacctgaatctgatataattgtgacttttcagcttcttcagcaattagtaatactagaaatatcaatatattttcatttttttttagttcatgctggtttttctctgttgattaaatcatgtttttttgcttcatgtttgggcaatctcaggcagaaataacacggtcaagaaaccggtagctgtttgagcttgtcattttggttttaattagtatttcgctagtatctttaagtcattttcatttgtttctaatggcgattcccgtagaccatgtggtatgaaattgtactttgttagaatgttgtgaaaactggtttggtacttcttgcttagatcattagttgttacagtagagtcataggtaaatacgtaaggttaacggtgtatagatagtggcaattttgagttctagactgcattacaattttcattcgtaacatatatattgtaactccaattatctggttttctctgctcacttttcacatgggatacctcccagatattgacttggaagcaccccacgagccaattgat

SEQ ID NO: 103137 - DNA, 879 bp, Mimulus guttatus
  Intron number 1 from transcript mgv1a005779m (locus mgv1a0 05779m.g) derived from phytozome v7.0 (chr-ID scaffold_109 ; pos 386434 to 387312 reverse strand)
ctcgtggtgatctctgcatcatctccgaagagcctgtaattcatctctcaaccccacccctctctctctctctctctctctctctctctctctctctctctctctctctcacacacacacacacacacacacacacacacacacacacactattagttaattgatttgtgtatatttatgtggtaatggttttgcattcaccgattcaatttttgtttgtaaaagttcgactcaattatgattttccacaactggaatttggaagtacagtttgaatttgagtctaatgtaatttaattccactattacgaagcctaaatgactggcaaagctgtcatttagtggtgtaaatttctattttaagctgtgtcgttaatcgtttatgaggataaagtaattggtggttgcgccaattcaacctcctaacatatggagatcctaatgagtagacatatccagaaactggagaaatttttgaattgtaagaaaggaaaaaaaataaaaaaatcgactaaaaaattaatgtggccttggcctctgagcagagtagtgaatttgtgaagccaatgcaattgcccgttgttcgcttgatcattaaaccttagttttgcgtttcttcctgtgcctattagttctctcacagagatgtgaaatatatacgatcgccgctcgtaattgtcagtttgagatcctgtaatatgttttacgtaaatggttgtcggtttattgtgaggtaagaaaaaaggttttgactagaggtgaattttttttgtgtgtgtgtgtgtgtgtgtatctataaaggtttgacagggttatttattcgacatactttgtttgatatgttgttgattctgggaaatattctgcaggttgcaccat

SEQ ID NO: 103138 - DNA, 529 bp, Mimulus guttatus
  Intron number 3 from transcript mgv1a014217m (locus mgv1a0 14217m.g) derived from phytozome v7.0 (chr-ID scaffold_159 ; pos 545954 to 546482)
cttttgcctctctccagatttctcgctccccccaagtatgtttcttttctcactctttaagtttgctctttactcttgacacactacaacatgtccttgctaatgttcctgtctgtctgttgggtacatgcaataaaactgaatgtgttgctactaatttaataaataatagttgataattatgatgtttttatgtttactttgaagttgatgtttttccatttcatgtagttgtatctgctacattatgcatatctgagataccatgtgtatgcgtgtgccatgaatatttgcttgaatgtaggatgtttatcggtgtgtagtttagtctctcaagtatgaatttgatgtgtacaattgtgaatgataacttgttctccttaactgtcattgtttcttgatttccttttgcatgtcctagattgttagttaacaaatgtttgaattttagttgagttgtggaatccgttaaatgtgtatgtattaatttgcaggggacaagcacaaggtggtagaggaggtagagggg

SEQ ID NO: 103139 - DNA, 600 bp, Mimulus guttatus
  Intron number 1 from transcript mgv1a007529m (locus mgv1a0 07529m.g) derived from phytozome v7.0 (chr-ID scaffold_102 ; pos 932566 to 933165 reverse strand)
taaaattgtaaatttctcttcgcaccctttttttttttcttttttcttcaagaaagatttgatttttattttctctgtagaaagtgataattgcgtcgtttttttagggtttactttttctttcttttttttgtttgttaaaaaaattcgatttttaggtatttctgtagctagaatagttggtggttggaaattgtttagggttttgaaattcttgaaaaagtcaatttttatttatttatttatttgaattattgcttctttatttcactggatccgtattgattcatgactgcgcgtttgaatctttgtttgtttatataggaaaaataattgcatacccatttcagggcagcttattttattttattttaatttttttgtttttgtaattttcaattaatatcctgttagaaaaataaataaaaacgtgatctttacaagcttttaacgaattctaatcaatcttttttgatgagcatattgatttcttttcgcttgcaattaattgaatttctctgtttattccaagtctaagtttcttgattctgctgcttgtttcaagatcaaggcccttctattggccgggctgagctgagt

SEQ ID NO: 103140 - DNA, 505 bp, Mimulus guttatus
  Intron number 1 from transcript mgv1a015827m (locus mgv1a0 15827m.g) derived from phytozome v7.0 (chr-ID scaffold_4; pos 3570995 to 3571499)
acggtaatcttttctttcttgattctgcaacctagttttgctagaatttgtatatatgtatatatatatatatttccattatatttttattttgataaacagacatgcacttatgttgatatatgtattttatgtacgtatttatatgtatgtatatatgtacatgctttggtcgatctgtatgtataatcaagatgcatatacaagggtttgtctgtaaccaagagtttttggcggccaaagtaaaactgcatgtataaaaatctactaacaattacaagatctctgaattcaaattttgtgtgctgtttaattattattttctctcttctaacttacttttatgcttacaagttttattttctagctaggaattaagatgttgaactgtaagtaattaaagtccataatgaagattattattgtcaattgtgggcaatctcaaatcataattacatcattaaacttgtttactttgtttcagattgtggagttgagagtgcac

SEQ ID NO: 103141 - DNA, 1018 bp, Mimulus guttatus
  Intron number 2 from transcript mgv1a026272m (locus mgv1a0 26272m.g) derived from phytozome v7.0 (chr-ID scaffold_299 ; pos 262200 to 263217 reverse strand)
tggagagagaaagaggcatcaccatcaaattacaggtcatcggtattataagttcgaagaaaatcattttgtatgtgtacataaagtatgtgcgtactgctttgttgccaaatgccaaattaagatgaatatatggagaaaattgtttattagctgcgtgttagtcagcacatgtatgttgtttatgtttcttcatagcgtacaaaatgcatgtgacatagtaaagaatttattcgacatgtaatagttgaaaagttatggctttaactcttcatgtactcaaattagatgcagccgaattaagtcgttgtagaacttatatggcatgaagacttgtataaagttgttttatattgacttggggaatacatttaggaactactaaaggttacttgtgaatagggaaaaaatgacacttgagtagaacttagttttctttcttgcaagggatatcatgtaacttcaatagtttcaaggattttatgtgtcaagctaaggtatcacaacctaaaaggccatcctatttgatgaaagaaagcgaagaaaaaataaaataattgcaatcaatagttgtaataaattgatctgaggatctcatccaatcttgatctagctacaagcatgaactttctttttaaatatggaaagaaaaaatgttaaaaaccagggtagcttgaaatctatctttacctactagcactagcatgttgcatacactgtctcctatggttggttttcgtgatgctcgcctgcattctcacatagtgcaaacttgagaatctacaatatcattttttgtcatctaaaattttctctatttcattgtaataagtttacttttcatttgtctccctgtaacttagaattccaaattttttatatgatgagtaaaatctaaagtatgaaccctcaactgagtctgttgttttcattgtgatattttagaagagtcattattgagttttggattttttttttttttttttgttttgttttgttttttgtataggctgcaagg

SEQ ID NO: 103142 - DNA, 836 bp, Mimulus guttatus
  Intron number 1 from transcript mgv1a006592m (locus mgv1a0 06592m.g) derived from phytozome v7.0 (chr-ID scaffold_7; pos 2574245 to 2575080 reverse strand)
gcttgattcccctccttttccctctttccaattcggtactgctgcatttcttttgagattaagaaaaaaaccctaatactgcatccattaccgtcctttttcatttttgagatattaatcgtgtaattaattattttttgtttacatagtttttattcttaatactgtttttactatggggtttatcaagaattttaccggtgacgcttgggaatatttataaattagagacttcagtagaactagtagttaacctgagtaaaatatgttcttaatcgtaaacgattagattgtacctttgtcatctgatcattgtttacaagggttagttttaacatagaataagtgtttgaaactccgaagtagttaggaggtgtggtcgtactcgtattcatgtttttggctttagagaatggtaatgtagttaaatatacatcggttgttaggagtttggttgatttggaaaaaaagaaaaaaacatttaattgatttagttttcccctgccaatacttttccttttctgcatgattggattttttttcttgactttttaagcacgaattatgactttgacatagttttgggttccatcttctcggcaagaatgcctactttgcagaaaagtgagtgaggaaaattttgaaataagcatattataagatacttgccatttttctttcgtaaagtggtgaaaggatattgttgctggatcttcgtaagacagtgtctctcttttatgatgattatcatgtctgccttttgttttgttgtctgtatttaatagactctcaatggtctttctcttaaagtttattttcatttgtttcttacagga

SEQ ID NO: 103143 - DNA, 807 bp, Mimulus guttatus
  Intron number 1 from transcript mgv1a007004m (locus mgv1a0 07004m.g) derived from phytozome v7.0 (chr-ID scaffold_17; pos 32534 to 33340 reverse strand)
tgtccggaattgatctccagatctgctccgcacaggttttttttttaatagctcttttaacttgtatgatttgtttctgcttgacattttgcatcgcattttctatatgttttttgtagtgtgtgtgtgtgtgtgtgtgtgtgtgtgtgtgtgtgtcgaaatttgtatcctggattgaaattggcatcaaatctgttagaattgtgcacccgttcgcttacgaaaaccgatatggatgtgtgtgtgtgtgtgtgtattattgaattatggtgatgtaccttgtgtacttagcatggaataatctgggttagtgagacgaatgattatttctaaaataataaattccacttgaagttgaaagattaatcataggctcatagctgaagaaatcttaggatacataatcatatcaaattaaattgtatggtggcgctggtattttatcacgagcaatggaagcgtgacgcacctttttttacctttttttttcttttcttttatgtaatttctctttgtgggtagttggaatagaagtcttgaaatttacctctggtgcatcctgttttggtcctcaaattaagccggtgttagaaatatttgttagccccgtttattgctcctgtgtgtgatgatggtttagctgatttttatttgctgccttttctccgttgatgcttatttttttattaaaattctatgtaactactttgcaattctagtgcatgtttgagcataatttcaaatggtaatggccgataaaatctgttctcaggtggatcaatcaactgactttactgagttaacaaa

SEQ ID NO: 103144 - DNA, 1055 bp, Mimulus guttatus
  Intron number 2 from transcript mgv1a004406m (locus mgv1a0 04406m.g) derived from phytozome v7.0 (chr-ID scaffold_247 ; pos 41664 to 42718)
actcgcggcttcgattataagcaaatctggcaaaggtaagcacctactgttgacttcttataagtaacgtacctagatgtggtggattttgagtttggttgcttatttatgttaggtaggggatacagttggttttacatttttgcctgttctttgtaatgaggtggaaaaatgatcaaaagtaacgcaatagaatatctgaatgaagttggcatttgagcacgacgtaaaaactagttggttgttaaaagcaggaaattcccctgttatgatatgaagattgatttgaatgaacttctaaaagcctttcatgtgacttctaatttagtgtccattgtcgggagacgtgtcactttgaagagtgaacaaattgctcaacctgatattggtttcaacagtatagtgttcgccgtggaaatctctcctttttttttttgattttttctatttgcaatttcacgactgatttattgcataaggtaatgcatgatatgacttatcagcataaaatttggtctcacaacagaacttcgcaccaagtaatgatggatgatattaattgtctctttactttctcagcgattgagatagattgctactggaggttttgaaattattatttattgaaccttaataaatgttattatttatatatttgggttttctttttggctaggtaaatttgtttctaaacctcagtgattgaatatggggttagaggacaaatttgtcattaactttacttgttccgtattttattgtgctactattactttcttagctttggttattttctccgctttgaggattttgctaaactaatgaccttttcctctaaaactttgacaaaaaaaaaagcagttcacttttcatgatttctcttccacattgttgtaaaaatgctgcagttgttagtagatttgtccatttaaatatgattttctttgctgtgaccatgttttctgcattctgttagctggacaagttaaatgaccacgtttactatatgattttttttatcttctgcagcacttgtttcaaggcagtttgttgat

SEQ ID NO: 103145 - DNA, 439 bp, Mimulus guttatus
  Intron number 1 from transcript mgv1a015482m (locus mgv1a0 15482m.g) derived from phytozome v7.0 (chr-ID scaffold_54; pos 1199245 to 1199683 reverse strand)
gccaaggtccaaacaaatatccaggccaagctcaggtagggatattttttgtttttgtttttgtttcgatcgattttttttttttttttttccgatatgcattatatattttgaattaaaattctatattctatgattaattaaaccgtatgtttatataaatttattacatgaccttctatatatttgaaatatttctttatctccgagcatatatatatggactgtgattcgtgtaccgtagtggtaatcggaaaggatcgggaattttcgtttgtgaatgaatattacatttctcaatttatttatttttccattcttctcataatttactttcattgttaattttcctcacctaatttattttgtttctttaaaaaaataaatctcaattttagtttaaatttactaatttctccttttggttctataatggtag

SEQ ID NO: 103146 - DNA, 590 bp, Mimulus guttatus
  Intron number 1 from transcript mgv1a007948m (locus mgv1a0 07948m.g) derived from phytozome v7.0 (chr-ID scaffold_122 ; pos 624218 to 624807)
tgttcttcttctttattgggtaataacttctctctctctctctctctctctctctctctctctctctctctcttcatatataataatataatattttcctgccttttcttatgaccatttcatgcaaatctcgacacaagtaaatttttttcttttgattcatcaattgacaaatttcttaatcagctgtgatctgggtttttgttttgtacgatgatttctagaacaatttattaaaaaaaaattattttgttttggttggatcttctgttcttagtggttttcttgatcatcagtttattttgtatatgtatataattagtattttttgatttattacaaaactgctgaatttgcgaaattcgattctgtttttattattacatgtatcttctgtgctgtcaatcatgaattactttaatttattatagaaatatttgattaatcgattttactttcaatttttttctttttcgggatgaattcgaatcggattataggacaatatttatagaatatatattttttaatttaatttaatttatttatttacagtgaggagaatactgattgattaattaatcacacca

SEQ ID NO: 103147 - DNA, 635 bp, Mimulus guttatus
  Intron number 1 from transcript mgv1a006527m (locus mgv1a0 06527m.g) derived from phytozome v7.0 (chr-ID scaffold_8; pos 3143523 to 3144157 reverse strand)
tacctcattatcatcggtgagcacatcccttcgatttcaattcaatttcttaatttcaagtgaaaaaaaaatagatatttttgcaaggaacgcccctgtgtaatctctaaatattgaaaaagccctcgtattaaatatattagcataaagccccctaaaaaaaattagtcaaagccaataaggccctacgagctgaatgtgcgttgcacgcgtggatttcgcaacttgcggtattttttttgacctgaaaagaccaaactaccctttaaaacataaatttagaaaattataaattgaatcccatagtttttgtaagactcaaaataaaagtttcataattttcttttatatttaaattttaatgtaaaaaaattattttgtaaatttaaattgaaatatttttaaaataatattaggggtaattttgtcatttcattgaagtaacaaaccaattttaatataaggagttgcgggctttgtaaatcgtaacgtagggggcttattgctaattttttttaacataggatttttttcgacaattagagattacacaagagggtctgtgctaagaactcggaaaaaaattgaatctttactcattatatatttgctaattaggaattttattacagggg

SEQ ID NO: 103148 - DNA, 717 bp, Mimulus guttatus
  Intron number 1 from transcript mgv1a019956m (locus mgv1a0 19956m.g) derived from phytozome v7.0 (chr-ID scaffold_354 ; pos 149750 to 150466)
acggtgctcattttcgccacgggatccggaatcaggttaacgaatatcacaatttcatttgagattctaataaatatcataattaattttaccaattttgtattatctgtcatattggtgaaaattagttgttcgtgagagtaggctaaagactgttattttcttctttttgattgaatttccattgtgccacctgtttttttccctcccctctattcttggagatcaattcatattgcactttaagagaaaatcgattttgggttctgagattatatacaggtggtgtttgcaaaagcttatttaaaagcagaagttagtgattgtgagttaagttgctattaagtgcttaaatctataagttgggggtgtttgcaaattagttggtttccaactaaaatagcaaaagaaggtacatgggtgcttttaaaattatagcttaaagcagcatattttaaaagagaagcaaaagtaaaagcttgttttgcaaatacctaaaaacagattatgtgcagaaaaaaaaaatcaatctatttataaaagcatttgcaaacaccatcatagtatacgatggttgtttcagttaaccaagaatgtttaccatgttatgtaaagaggaacttaactaattttatttgacatatttcaagcatcactagttaccatgtttcattatgtgtagcccgattcggtctctgatcgaggcaggctttggtg

SEQ ID NO: 103149 - DNA, 660 bp, Mimulus guttatus
  Intron number 4 from transcript mgv1a001463m (locus mgv1a0 01463m.g) derived from phytozome v7.0 (chr-ID scaffold_229 ; pos 31510 to 32169)
tcaggtatggttttagataagatcgagtcgaaactattttgatgttggaacgcataatggtggaaattggtacggaatctccgaattctgccgaataattctgatttggaacgatattttttcattctgaattccgtaaaatatttcctattttttttgatattttaaacggaattggaatatagattttggttttcgaatccattttacttttccgaaagttctgatttttcccgggaattccaaattatgcttacgatatcgataatattatgtatttatattataagtggctaagaaaatggaaatttcaaatccgccctattctgttacgaatatcttcaattttggaacaatagttttcattctgattccgattttaatttctgaaaaaccgatttttttttcttctgaaaattagacttacaatatcaatattattgtgtattttaaattatacgtgatgctgattccgatccaaacatttccgatgtttgaacatttcttttcattccaaccaatttccgatatttgtttttttaatggaattgaattagttgaacttccgaaaaaaaaaggatttttttctgaaactaccattgtcaaattttaattttatttgcagtactatcgtctgtatcggggcttgacgctgctcag

SEQ ID NO: 103150 - DNA, 463 bp, Mimulus guttatus
  Intron number 1 from transcript mgv1a000145m (locus mgv1a0 00089m.g) derived from phytozome v7.0 (chr-ID scaffold_210 ; pos 92499 to 92961)
cgtaagtgcacaaccttgttttaattctaggaaataaaattctcgtttcggtatttatttattttttcccccttttccttaccattatcaaaaatattctgacttgtttatatttgtgccagtttgagagcctctatgtggaaaacttgtgtaggaactttagccatgaataatcgtcccagccaatgagtttgcactcgagagatccattaaaatgttgtttcctgaaattaaaaataaaaaactaaaaaaaaaattaaatcttgcataatttgagtttgaaatgcgaaaaagaaaaaagtgcaactttacagcatctgaacaaacacatgaacaaacacagagaagcttatgaagaacgtagccttctgcatgcatcatagacatctgtttttactttttataatatattggtttttcaaactttgaaaaatgacatgaactctgaactgctattcgacag

SEQ ID NO: 103151 - DNA, 481 bp, Mimulus guttatus
  Intron number 1 from transcript mgv1a005139m (locus mgv1a0 05139m.g) derived from phytozome v7.0 (chr-ID scaffold_29; pos 32590 to 33070)
gaatcgagttcttcgttaatcttctctctattcaggtaaatctctacgatcaatcgtaatccgatcgttgtatttattttacttttttcacgatttgttcttgcccgaaatctagaaagaaggaatgtgatgcagtgaatctgctttttgtttgtttgtttattgatgttttttttggattaaaagttgtgatcgtttcttaccttgttgattttaggcgatgagtaaaagaagaaactaagctacgtaatcagctgaaaccaatttaaattagtagcttcgttgtttatttaattaggttttccctactttgttgaatattaggaatcgagctgtaaaccgatcaattggccggtgatctgtgcttcgttcttactgcttttcgtttcggcggctacaaagattgttttctttgattattcttgcggattttgttgattttgttttctttgtggattttttggtgtgtagtattgttata

SEQ ID NO: 103152 - DNA, 676 bp, Mimulus guttatus
  Intron number 1 from transcript mgv1a003327m (locus mgv1a0 03327m.g) derived from phytozome v7.0 (chr-ID scaffold_45; pos 1431667 to 1432342 reverse strand)
tcaaattctccgctaagtgttatttgccattgcaggtaattttccgccatttttgcttctcttcatttaaaccctccctcaattcaccatctcctttctccagttttctcatttctctgaatatactattgccagatctacgtatctcgatcctctttaggtacaattggattttgatcgacggagattgagtttggtttttttttttttaaatagagattttgtttttttgtgttgtaatttgcttaatctgcgttcaattgattttgccaattgttttctctcgctcaaattcaattatgcgtgcgcgatgtatagccccctgcatgtgtgttgttttgattctgtaacggatttattaattttagtaattttgtgcgcgttggttgtgatgattttgctgttaaaggtttaagctttgatctcatgattttattgaagattgataactgagaaaaaaaattagttttatctgttaaaaatttcttgatgaatgattactgcaagcaatttccagtaacattgcaattaatttgggaaatctgctgatctatgttataagtgcttatttattattgtaatcggattgtttcggtgtttcaacattcgtgataaacttgccacttgttgctgttttcttttttttttttttttttatttaacaggtgtggagatt

SEQ ID NO: 103153 - DNA, 273 bp, Mimulus guttatus
  Intron number 1 from transcript mgv1a022089m (locus mgv1a0 22089m.g) derived from phytozome v7.0 (chr-ID scaffold_7; pos 1754603 to 1754875 reverse strand)
cagaggcggaatttccttgctcgagagccccactggtacgatcgagttcacccttcgtttgattcaattttccttcttctttttttttttttttttttttttttttttttttttttcatttgtatgcataattactgtaaacactcgaatccggattcccccttcccccccccccccccccccccccgtttttttttttttttttctgatttgtagatgttagttaaatgggtgattgggttatggtaatcagggaccggaaaaaccctaagc

SEQ ID NO: 103154 - DNA, 128 bp, Mimulus guttatus
  Intron number 3 from transcript mgv1a008640m (locus mgv1a0 08640m.g) derived from phytozome v7.0 (chr-ID scaffold_17; pos 1260578 to 1260705)
aaggttgacagttgatttttttttttttttttttaaacttgatttcaaatatttcttatcctttgtatttgtaattttctattaatatttttaatccttttctttgtatcaaaaacaaaaaagaaact

SEQ ID NO: 103155 - DNA, 913 bp, Mimulus guttatus
  Intron number 4 from transcript mgv1a008640m (locus mgv1a0 08640m.g) derived from phytozome v7.0 (chr-ID scaffold_17; pos 1260755 to 1261667)
gcaaggagtacaacaagaacaagcctactgatatagtaagccttcttatatggcattaaactttcttattaaaatatctcctgatagtgagagaattacatcttggatcttttctaagtcaattctatatatttgcctttgtggatttttacttcatgaggttttttagttgctgagcatgaatttcataaactcatgcaaaacaaagacaattgagcttgattttattgaataaattgctaagcatcattttaactatctcatgatgtcgacaatggcgaataggtcaatcaggaaaagatgtttgccatgatcagggcatacgttcagttccaaggttgttgtattgattctttctagctctaatgtgaagttcaactaaagaatattggtttatatatgcatgtgatagtcaaactaatgaaacattgaagctgcgccaggaaaacatagtaaaataatttcagaatattttaatttactgtattgatatgcgcatcttcagcggaatgagaaccgccagattgtaataaagtatgtgcttgaagaattttatgtttcgcctgtgtatgaaaagagaaacctggagtcaatatcagccaggtcattaataatgtctcaattcattttataaacgattatttgtatgtggcgtagtgccatatctaatcaagggaatgtcaaaatcaaataagaaaaaatcttctcattttatgtgttacgaagggtagaagaatgccgttctacttgatgcaggttgcattgtaatttatttccatttctttgtttttcggaatctcttctgttatgctagttttatgacatattgtatggatgttttgtctttgtgctttttaaataccaaatttaatagttgcggtttgtcgcctttgtccccatcttgtttataggt

SEQ ID NO: 103156 - DNA, 170 bp, Mimulus guttatus
  Intron number 2 from transcript mgv1a018490m (locus mgv1a0 18490m.g) derived from phytozome v7.0 (chr-ID scaffold_105 ; pos 491312 to 491481)
tttctacactcggtatattttattacatcgataaagtttaaagtttgttgtcttataaataatttaagtagtttgtttaaattgctgaaaagaaaacaaattagtaataatttgttgtatcactttgataggaagagctttacgaaattcttctctagaaaggatttgtt

SEQ ID NO: 103157 - DNA, 701 bp, Mimulus guttatus
  Intron number 1 from transcript mgv1a014695m (locus mgv1a0 14695m.g) derived from phytozome v7.0 (chr-ID scaffold_27; pos 1245227 to 1245927 reverse strand)
tacgtttgcgtgaactccggctccggtgagttcaggtgtactttgtctgtttatatgaatttgttttaattgttgttttttttttcaatttttgtaaccgaatatattactcgagtaagcatttattggattctgattttgtcgaggaattcgaaacgagattgagtacgttttagtttcgaatattgaatttaagtttgctgatatgaggtgatgtgaatttaacagtttgatttgtgttggaaatgtttgatagtagaaaatctatgaataaactgtttccatttgaaactccgagtgttgttgttgatgagttgcaaacagctcccagtttgaacttgggagggttttctggaagttatcgcattatttcgtttcgatctggtttgaagtaggagatttgtttattcgatgtgcttgtgtttttgctgtctttgcaaactaagattacttgaatccagtttttcctttcatttcatgttcatgttaatttgtgaaggaccaacggtatgttcggttgtggtttgtaattgttaacggcaagatgatttttgaacctggcttaataatgtgccggtttgatttggatagctaagtgtctaatcagtatgaattcttcatcaccgtgctcattgaaccttgttttctttttttttttttttttttttttcccgtatgaaggtttcacaggttgaaggatt

SEQ ID NO: 103158 - DNA, 636 bp, Mimulus guttatus
  Intron number 1 from transcript mgv1a015049m (locus mgv1a0 15049m.g) derived from phytozome v7.0 (chr-ID scaffold_60; pos 1349648 to 1350283 reverse strand)
atttcactgtcaaggtttcctttttttttttttttttttttttttaataataaatcacatctctgcaattttgcttgtttaatggcggaatagctcgtttattgactcttctttatttttttgggagtatggattcgatatatcttactttggtactgttttctgttagttatttgacttattttttttatttttatttttttctgaaacttctttgctcgatttctggaaatgatagcttttatgtttatttaaatttagctgaataaaattgattttttttaaattaggtgttggttcatgatccatggattttgtttcattttattgcaatttttatagatttttattgcgtttggtatccctatgttatatcgaatttgctaaaaaaaccctccatgttactaatattagcaaaaaattagatgcagcatacaaacccttaatggtgaaatttttaggtaatttggctgaataagttgaaacgtagggtgtttttgctaataaaaacaatacgggggagttttgtaacaattagagtaaagtagggtggctgaatgcaaataaaccgaaatttgacatgatcctttttactcaactagcttacttgatcaattttgttttgtgttttgcagg

SEQ ID NO: 103159 - DNA, 576 bp, Mimulus guttatus
  Intron number 1 from transcript mgv1a005422m (locus mgv1a0 05422m.g) derived from phytozome v7.0 (chr-ID scaffold_24; pos 1372045 to 1372620 reverse strand)
gtgctaaagtccttctctccagtcacttggttagtgtttaatttctttttaaatctttgaacaatttctactaaatttatttattccggcatttgattcaatcttattgcattcttcttttgtggatttgctcataccatttgttgtggatttagtatttgcagcttgtgattgtttgattttcagttccgttttttttttttttttcgagtataacttttctgttcttcgaagtttctaatttgttgaagtatgtttaatttatgaagaatgcgataactgggattcggttaatctttgtaattcgttgttctatgagcaattatgaaatttggatgcgttcgaattaaccttgatgcattcgtcctttgttggtgtttatcttttcatttcgtgtttgaatctgatttgatcataccatttttcgttattcttttcttccgactttccagtttgttgaagtgtgttggctataggctttttcattttaaatttttgtctgatttctgaattaattttttcttcggttttcgtttttcagggtcgtccaaaaggtgtgactccaaaatacagcct

SEQ ID NO: 103160 - DNA, 296 bp, Mimulus guttatus
  Intron number 1 from transcript mgv1a007687m (locus mgv1a0 07687m.g) derived from phytozome v7.0 (chr-ID scaffold_87; pos 1005809 to 1006104)
gtatcttctgacgacgattcagcataaatttacaggtatgcttcattgcatttcgaagaatttaatacgcatgtgtttaattgtgtgttttgtttgttatgattaaaatggaatggcggctgaaaatgtgggatttaggtttaccattttttttattcttttttgtgattcgaattatttgacggcggattgattttttttgaatttaatgattttaatctcatcaattattattttgttgtttttttttttttttgacagaattagttgttgattggttgatcattggaaaatct

SEQ ID NO: 103161 - DNA, 433 bp, Mimulus guttatus
  Intron number 2 from transcript mgv1a017945m (locus mgv1a0 17945m.g) derived from phytozome v7.0 (chr-ID scaffold_5; pos 3147472 to 3147904 reverse strand)
ttaatcagatttctgccattacctttattcgccaggtatatattattttttatgggaaaagtacagtttgcaccgttatgtttgcaccgattttgtattttggtccctcgtgcacaaaaatacacatttgattcctcatatttaaaaaaaataaacacttttagtcatttccgtcaattttccgttagtactaacggaatcaagtgtgtgccactaaaagtgttaagctattgaaacttgatggaccaaatgtgttttttatgaacatgatggaccaaatgtgaaatcggtgcaaacaagagggatgaaaattgtaatttccccttatctttatctttctttttgtttcttcttttttttttatttttcgtgttaattagtttgttttagtcctatagagtagtttcgttaaaataacaagacgtttccaaac

SEQ ID NO: 103162 - DNA, 745 bp, Mimulus guttatus
  Intron number 2 from transcript mgv1a011218m (locus mgv1a0 11218m.g) derived from phytozome v7.0 (chr-ID scaffold_26; pos 1405107 to 1405851)
aaacactccaccggagctactcagcctgtatgttcttactatatcacatcccttcaatctttaattcatcattttttattaaattaattacattttttgtggcagattggttttcatgatcaacaatgttcttcagtttattgccaaaaaaaaaaaaaaaaaaaagaaaaaaaagtcaaccctagtgtgatcagaagctattcaaagaggaaaattagataatacacttgttatttacaccgggtgaatttgaacgtagatctactcataatcacactcacacgcacacacgtgtgcttagtgggtagttatttaatcaaatatatgattcaaatccacccggtgtaaataatcaggtgtagcatgcatgtgttcattatatgtttccatacttccatttactactatatgtaactaaagtatcataatctcttttggaattagatggttggatttatgtgtttgattgctttggttcctatagttaatgaagattacgtaactcctgagttcgactcttgcagtattcataagctaatgcgaagcgatggttgctaaactaaaaaaaaaaattgtgttctaatttaggtaatcaagaaacctagtagtagtacatctctcggaagtctgtatggttgtatcgcttattttggatcatgaccaaagggaaaagaaagagctcgtaaattgtaacttgatttgatattgttgttcatcttgtgacaggtccaattgactccataca

SEQ ID NO: 103163 - DNA, 814 bp, Mimulus guttatus
  Intron number 2 from transcript mgv1a001710m (locus mgv1a0 01710m.g) derived from phytozome v7.0 (chr-ID scaffold_1; pos 3855403 to 3856216 reverse strand)
gtgatcttgcatctcgggtgcccaaaattgagcaggttatagatgttaaactgcatctgtttatcatatatatactagtgtagcggtccaagtttttctgagttagctaatgtttgaggtcatattatacttataattgtacaagctagctaccttatgaaagttaataaacaaagggatgaaaagaaaaaaattcaattgatttggttgctttacttgcggcttcacctaggaaatttataattgataatagcaccacgagggttgttgccttgttggttggggatccgtttttctttccattgtttctttcactttcttttcaattttttattcttctcaattgtattatattttataagagttcccatgtataaagaagatccatggaattatatcagggatgcatatcccgaaactcttagcaagtatatttagctaatgaaccttaacatgatctgtttcctgcttaagtggtttcctttcctagaatgcccacaaaccgaacgttattagttcattgtcgatttatagtagggctatcaaagaaagatacctctactttatgctctctttctcattgcagtttacagctgtcaatgacacgctcattatcattttcaccgtatgatttctttttttagaattcgtttgcttttattgggaatttgttttctttcttaatcttttttacatcgtctttgagcttttggatatatttgttttcattgtacgtgttgtcatgatgtgctttatatatcagaaccgattcattcatccatcttcacatgtcttctgttacagatattgctcg

SEQ ID NO: 103164 - DNA, 773 bp, Mimulus guttatus
  Intron number 3 from transcript mgv1a017718m (locus mgv1a0 17718m.g) derived from phytozome v7.0 (chr-ID scaffold_113 ; pos 253179 to 253951 reverse strand)
aggcctctctgtcaaggatcttgttgttctttcaggttctatatattacttatcttctaaagttagtactgcaattaggggtgaaaatcgttaggattaaatcggatttaattttgagttaccatttccaaaagattttttttcgaacgtaaatactgatttcgataactgtaacatccgaatttatttttaaaaaataaataaaattgaaacttcagaaattggaacgaaaaaactcattccaaagttgaatcttttttttttttggaattgggctcggaatttcagtaattaaacatgattttcacctctaatataattatcaaaaaataattccaacaatttccatttttttctaacaactttttttcgttccaatttccataattccgatttctgatttttttcatattattttcggaacatatataattggaattgatttttcactattgcaaaaaattaaattccctcgggattatgggacaatatattgtaaggtagaggtggaaataagaaccggatttcagattttcgtcgcttctaatccgatttttttttttttttttctaattccaaattgaagttttcaatttatctataacttcatggatcggaattagaatatactccgatccaattctaattatcgaaaataattaattccaattctcgaacaacttttttcgttccaattcccgtaattctgaattccgattttcacacacacacacacaggagctcacactatcggtgtcgggaagtgcatcgta

SEQ ID NO: 103165 - DNA, 679 bp, Mimulus guttatus
  Intron number 1 from transcript mgv1a026158m (locus mgv1a0 26158m.g) derived from phytozome v7.0 (chr-ID scaffold_308 ; pos 100597 to 101275)
gctagtcttcaaggtttgtctaattcaattccttttagtcctcgtttggtattattgatgggattgattgatttcaaattacgaaaatacccttcttgtcggagaaatacagtcattttcctcaactatgaattttcttacatgcccgcccctttcggtgagaattgtcaaatttagtagaatcttttagattgtgtgacatattctttagtttgtacccgttttatcccatttcagccccacatttagaaacaagttgatcataagatgtgtatattggcttctaaatatcagattgtggtgcatttgaaactgcatttttgcacaaaatgaatacaaattagaaaacatttcacagatattatgatggatttaacaccaggtagactgtgtaagaaaattcatagttaagggatggttgttttttttttttttttgagggttaagggatggttgtaattacccaaacatggggtattttttcgtaatttgaccttacttcagggtgactaacttaccctatcttatattcgtaggttttatttctttctttatttatttattagttatcaagatcttttgaaaaaaaattctttttttctaaagttgaattattgactgaatttgatataacttttttgcagtgttgcagctgtgttgtaaccatttgacagggaca

SEQ ID NO: 103166 - DNA, 795 bp, Mimulus guttatus
  Intron number 1 from transcript mgv1a001910m (locus mgv1a0 01910m.g) derived from phytozome v7.0 (chr-ID scaffold_174 ; pos 66888 to 67682 reverse strand)
ttaggtgagtttttcgaatactcctcagttcatttttttttttttttagttgcccatgttggatctgatttgctgtgtccgattgttttctgtttgaatgatttgcagcttcaatttgatatgtataattcatgtttgtgctgttcttttgccgagtttgggtttcgatatacatgggtagagtatgaggatttgattttagggtttctgttcgagctctactgattgggctcggggttatcttgatttagtggcaattgattgctttgggaattgtgagagttgtataagttgggttttttttttttttttttttttttttttttttgggtgtgtgattttgtgtactgccgtacgttggattggaagatgaacgaatctgggccgttgatgcttttgcttttgcttgtgtagtacctctagtatgaagatataggttttaattgtgttcttccgaaatatcggatcgttgtagatagtttccattacatgaacacgaatttgtctctatcggcatgtgattgtcctgctcgcacacatttgttgtctaagtaaagtgaatacagtaattacatctagccatatacgatcttgaactttgctttgatcgattagacatttgacagctggcacgattccattgatacgtaaacggtcgttgaaaagagttgtcgggattccctcattaaatatgatcttacatatggcttttgttatcctaataattgttctgatcaaaatcttaaattttccttttcagatagtagtccttttatagtgcagctctgatcatag

SEQ ID NO: 103167 - DNA, 750 bp, Mimulus guttatus
  Intron number 3 from transcript mgv1a012803m (locus mgv1a0 12803m.g) derived from phytozome v7.0 (chr-ID scaffold_7; pos 337791 to 338540 reverse strand)
ggcacgccctcatccaaataacatcctcgagtggcgtaagttgctccttgcctttatttattttattgcatggtaatgatttatgatgtgcctttctggaacacaataacatgtctaaacttgatgttattgcaatcaatttcatatgaatatataccttgatccctagtttttttttttgttttaattgatgtgttacaaattcatttgacattatatactccgtcttcgtctgagtgtgtgtgcttgctaaaaggcaaggtaagccatgataacgtaatatttccaggtcgacccgggaagttgttaggcatatcaaacatcaaacaaagtccaatgttttagttaatcatggctagatctccccaaccaaacgaagccttagtgtttaatgtgaaggccaacttgaagaataacatctaattcaaacttggagtttatcactcatattgaaaggaataaataccttgtgataagttttctactattatatgtcatatgggttactcaaaatacaatgaagggtatataaatgtaatatatatgatgccatcttttgaaatcccccatgattgacttctccacttgaactctattgggctcgcaaaaatgctccttactttatagtgtttttggttttgtcttctaagtcttcgatcaaagtattactgttttatttagacattattaaatccaaatgtttcttcatcctttaacttctgatcttttttttctttttgtgcacagatt

SEQ ID NO: 103168 - DNA, 874 bp, Mimulus guttatus
  Intron number 1 from transcript mgv1a012803m (locus mgv1a0 12803m.g) derived from phytozome v7.0 (chr-ID scaffold_7; pos 339108 to 339981 reverse strand)
aatacccttttgattttttgatttctcgatctctggtatgtattatgttgttttcgttcttgtttttcatttttggtcggtaatttggttttctgattacaggattgctgatttggttaatactgttggtttgatggttcgctttattcgtacacttttagggttagattggttggccgattgacctgttcttgttacacaagtttgttgtgttattaattctgggagtaaataagagaacaaattgattgctgtagtatttctattttttcgattttttttcgcagaaattatgtaagttagaaagaagatctatgaagttcattgcattttaggatttttttctgcacgtgcacttgctatggcgtatcacaaattttgagatgtttccttatccgtaattgcttcgattatgctgcaatgctgtcgagaaatagtaatatcttttgttaaatattgaccaggatgggaaatgagtcgggtcttaatagatttagcatttattataaagtgaattgcccgattaattatacgagcacgtggtagaaatgtaggatgcttttgaagaaatgacaccagtggatggggcagagatatagtaaaatacacgaagctttaactctcaagaagaagcaattaggaaggttggacctaatttcagcatgtgaaccatgggcttggtctattgagcacttaatctaatttaaacttaaactatcgggttgtcctctttcgaaattctgtcacataaatttgatgaagttgttcatttttaaaatgttttctgacgaaaagatcgacattattctcaaattttaatgacaatttctattttgcagggaacaaatcttgtgagaaggcagtggataagata

SEQ ID NO: 103169 - DNA, 961 bp, Mimulus guttatus
  Intron number 1 from transcript mgv1a008580m (locus mgv1a0 08580m.g) derived from phytozome v7.0 (chr-ID scaffold_213 ; pos 349569 to 350529)
aaaggtatacaatccgtatttatgaacaatctcgctcaatttaccaatttttacaaaataaaaatgcgatctttttcacctgatgaattgcaggttgacctttctttttttttttttcttttttttgagctgattttatgatgacagtgattcaatatctgattctgatttgagccttttgtttgattttgaatttttttagctgtattttgagatcagagatttttgttgttttttttcagctgagtgtatttccgtacaagagattcatgtatggaatgtgtgattaatgatgctcatgaatttaattccttgccatttatacatacatttgtacacactttgcaattattacaaaaaaaaaaaaaaatgaaaaaaataaataattgaagatataattgtgtgtataattaaacggatatctaacaaagattctgttttttttttccttaaactgtttgatttacacacatgtacaagtggatgtgtgtaaaatatgtatggatctatacacgtactactgtatgataggatagcggatatataacctagtgaagttcaccgagtcgagcatcgattgaaccacgaagaaatgttgataattgactattataactagttggagttattcgtgcacttttaggtttattatgagttcttgtttctgcgataagaaaccttttaggatgcgtttggataggaggattttagggaggaaatcaaaatcaatcgactcatttgacacggaatttcaaattcatacctcagtttcggttgtttttatgagcaattgtagtcgatttcaaattccatcccatctggactcattccaaatccttcgatccaaacacagcctaaaagttgtgattttgtttttaacgcattttttttaatctaaactgcattgttcttaattctctcgattcttgtctgacccccgctctttatatacacgcaggtc

SEQ ID NO: 103170 - DNA, 670 bp, Mimulus guttatus
  Intron number 1 from transcript mgv1a017727m (locus mgv1a0 17727m.g) derived from phytozome v7.0 (chr-ID scaffold_12; pos 286358 to 287027)
cctcaaacattaggtaataatactaatatttatgtgtattgtagttaattagttactctaccccaatgtaatctattatgttgcgctttgaatgttataatcctaggtaagaaaaagagagtgtcagttcccgtgcctagatctgctgaattgaaaacgaaaaagactactatgcaacatgtggtacctgagtcaaatgtgaatattagaagtgatgccacaggtattattgagtaaaattatattttgttcatttccttgttatcatagatgtaatattttttgtttttttgtagaatcaacacgtaaggaaaaaagagcatcatttcctgtgcccgaaactgctagcgtgcaaatggaagagtctatagtgcaacatgtaaacaatgagtcaaatgagaatatcactataggtattattcacttcaattattttcttgtttatttcacttattatcatatatatataatatagtttatttgttgctttgtagaatcgataacggatgtagttgatagcacatctgatgccaccaatggtaaatttttttttaaatatattacatatttctataagcataatttacaattaatacataaattatgaatttcacttttcttacatttctgttcaggaccagtgaaagaaaaacgaggtcgaggtctaact

SEQ ID NO: 103171 - DNA, 638 bp, Mimulus guttatus
  Intron number 1 from transcript mgv1a008140m (locus mgv1a0 08140m.g) derived from phytozome v7.0 (chr-ID scaffold_18; pos 2111378 to 2112015)
aagacttttgcaaatctaagcaggtctgtatatattttgtttttaacatacatttgtcaaagtgaaattgctgcttcacttgctttgaggttgcaataatcaggtggattttgaggtgaagatctgtaccggaaactgctacataacagaactgagccaccaagttgagttgacttctgccgtgattcttgccgttggatgcagcaccgaatggtaatatagaaatacacatacatataattaaagaatacggtgtttttgtagcccttttcattaacaagttccatttatttctgcaggccgaaaaattcaagtatcaccaaatgcctgagagcactgcctccttcttgcaagcttgtaataatgaataatgcatggaaaattgtattccaggagatgggaacttcaggcaaagcctccatccctagagtttgtcgaacttttgtgtcgtctttgtcagaatcggccatcagctgtgatcggccaagaacaaaacctctgttcgagaaatctctgtctatgccgtcttcatcaacaccttcaacatcaaagcaaactgaaagtgaaaactttttccatcatctttccccgaaattcttccagagattggccgcgctagaagccaaggggcaagatag

SEQ ID NO: 103172 - DNA, 1030 bp, Mimulus guttatus
  Intron number 2 from transcript mgv1a002802m (locus mgv1a0 02802m.g) derived from phytozome v7.0 (chr-ID scaffold_11; pos 728488 to 729517 reverse strand)
agaggctcagagagctgcaaaggctgcagctaaaggtgaacatctcctgcttgtttgttcattttctagattactcactaattttagtttgatgattgtgatttgtaaatggcacttgtggagttcatgttagttattagtgtatgtaaagaatttggatgcatcttttagttgaattgatttatcgttccaaaggcttatgatattcttgctgatggcctcgcggatgaagcagcactgacttaattgaactagatttgatttatgagtttgcatattcaatatagaatgttcagttatccgtaatctttaaccaagctattttgcatcactagttcagttgcagtattcgttttgttgtaactggtgcaaggggaattctaatgttggaagtcttattctacctcttctgtcattttatgttcaatgcaagtgttaattgacttattaagatgctcacgctgatgacttccaaatgctattacagttcatggttgtttttgtaaacagaagagcaaaatattggttgttatcaaaattatacataaatccatgatgtccatacagagaagtgctcgtggtagttatgatgatgtttatgctagaataagttttatttactgttggtgaggaagcaatttctctttcttcaaccaactcataaactcaatggtttagattgtgagatgcattgttactgtgtccgggggcatttcaacatgctttaaacttcatctctctgagtcaaaggacgattaatttaaagaaatccttcaatccacttatgttgcttcctggatgtagtagtaaatattagtgacattttctcatgaactacatcattggcagatagtattaaatgttaacttatagcatttgtggcattttttttaacctccgtcaaattgtaaatccgaaactcttatgtaaagtaacttaaatggaacacatatttgaagcaaacatactttaattggaaaatctcgtctttcaaggtcaaggaagtaagacatctgctgctgctactgtt

SEQ ID NO: 103173 - DNA, 409 bp, Mimulus guttatus; identical to SEQ ID NO: 101397
  Intron number 1 from transcript mgv1a014248m (locus mgv1a0 14235m.g) derived from phytozome v7.0 (chr-ID scaffold_137 ; pos 453183 to 453591 reverse strand)

SEQ ID NO: 103174 - DNA, 737 bp, Mimulus guttatus
  Intron number 1 from transcript mgv1a025981m (locus mgv1a0 25981m.g) derived from phytozome v7.0 (chr-ID scaffold_1; pos 435716 to 436452 reverse strand)
ctaagcttaatactgatcatcagcttaaaggtcaggtatgaatttagttttttgtattttaatttgtatatatatatatgggtggatggatatcggaatggaattattgagtttggattaactttttttagtcccaattgtcaaattatcaatttctgattttttttaatcgaaattggaattatatatgaaatttcgatcctattctactccgagattatatttttcaaaattctggaattcgtttatactttctgaatttcgagattacgatatgaaaattttcatgttttaaatatcttttttcctctttgatttcggacgattgtgatccaattctacccccaaaaatttcgaattttattcgaaaacgacattttatatgatttactatgacaatacatctatattatactagtacatatacattacactagaagtgaaaaatcgaaatataattttcgacttccgcgattctgatatgattcttttcctacgttcggaacaaagtttttcgttgcgatttacaaattcccattttttgctttctagcttttttttcaattttcttttttacttttggcatccgaataaaatcaaaagagtgtattaattctggttgaatctgatccgtccaatttcggccaagggcggaaaacaaaccctatatatagttgcttacaagtgaattttttgctgcagccaggtgcaccagcagcaagtcctgaagttggtca

SEQ ID NO: 103175 - DNA, 864 bp, Mimulus guttatus
  Intron number 1 from transcript mgv11b017274m (locus mgv11 b017274m.g) derived from phytozome v7.0 (chr-ID scaffold_2 43; pos 79482 to 80345 reverse strand)
attagggaaaaagaaaaagaaaaattaagagatcggtgtgcaaattgcaatcgccgtcgccggaattctcacaacctacacatcggccaaattttccgatacctatctcatcgcaacaatggtaaacttcctattttgactcatttttacgattatttgcctttttaccccttttttgtttgctatgtgaatttttatcttcccgttcgaagtttttcaatctatttgtaatttttgtggttgatgataatatgttctttctgtttttatttaatttttgtggatcttcaatgtagatctcatagtagtatatattgcttgtaaagtttttgacgaatttgattttttttttttaaatagttatatctttaatagaacattctttagatttcggaaaattattgttggcttaattggaagatggataaagaaaattagaagggtaaacaacattttttttttcattttaatttaatcggtggtgatcgatgtagaaaatgattatatgaacaatcataaagtattaaacttttaatgttttatcccatataacataacaaataggatcatatctacaaaattttcaataatattacataagttttttggagatcttctatgttaaaatgattaaataatatttgtattttttatatgtttcggaataaattttatgttagcatatatgtatatgtatattgttaaatatgtttatgcattatgatgtgaatcaggattaaaaaaaaagttatttagcgatgtgtgtaatcataatttaacgaatggtaaaagttgtgctcggtgttatttgcccttgtctacaaaacagaaggggttggattttccgaaaacacacccctttcc

SEQ ID NO: 103176 - DNA, 574 bp, Mimulus guttatus
  Intron number 1 from transcript mgv1a012941m (locus mgv1a0 12941m.g) derived from phytozome v7.0 (chr-ID scaffold_4; pos 3923898 to 3924471)
cagctggatttgcaggtcattttcttcaaatcttattctcctgttttttttatttatttattattattattttttaaaattggggttttcttgtttgatttgctgcttgaaccaatcaatgggttctttgctttgcttctacatatctgcttcgacaatggtggatctgcatttatttttcctctgttcttgtttttcacttgaaaggttgacttggtacgccaactgtttgattatattcctgtgagaaaatcaagaaaatctctcttccagttcatcatgttagtcaatcgttggtcaaattgagaatgatcggccaagaattctgtgcttctttaatttgtagctctgttacttgattggttaaaagatgatgtgggaaacaatgctgaaagggagaaggaatgcccatatgattcttaatttgtatatataaactcagcctcagtgtaaaatcaagacaatcaatctagtgacctaaataactgttttaactgctaacaataaccgaaaaatttacctgtctttttttcttgcaggaaatctctttgcctttgtgttgtttgtttcaccc

SEQ ID NO: 103177 - DNA, 848 bp, Mimulus guttatus
  Intron number 2 from transcript mgv11b009377m (locus mgv11 b009377m.g) derived from phytozome v7.0 (chr-ID scaffold_2 2; pos 636432 to 637279 reverse strand)
cttcttcttttcgtattccctttccgaaacgtggggttagtttttttttttttttttttttctttccccctttgttagcaaattcttttagtgttcaaatttcgtctgactaattcgatagacatagtctaacttccataagtgcttatgagtttattgcattgaggtggtgtttgcaaacacttttccaaagtgatttatgagctttttaatgtttaaaaaaaaactgattttgaacaaaaaaaaagctcataatcactttgaaaaaacgtttgcaaacaccaccttaatatctatgtgttatatcgaatggctgaagaaatcctcgtgttatgaatattagcattaaaaacccccttataacgaatttttttagcgtgcgcccccctatatcgggagttttatgggggcgtttgctaataataattgaattataggggggttttgctaataaaataacatgagaattttttttgacaattagagaaaacaccggggtgccgatatatgcaataaaccgaagtacttattattatctctgtggcggaggctgacaatactaaattattcaaaagataaaaattctctatataaaatagtagcttcttgaaaaataatgggggtcatggcccctcgcatgctgtttccgccatcgattactactacgaaccacttccgttttcgttggtatcgataattctttagatgggatttttttttcgcctactcatacttgtgcaaaaagatatttgattattaagcttattatcgcttaaaataacttttaatctttggcttgttcgaaacaatcagtctagtggttcatttgacgattcaaataagaaatc

SEQ ID NO: 103178 - DNA, 619 bp, Mimulus guttatus
  Intron number 1 from transcript mgv1a017122m (locus mgv1a0 17122m.g) derived from phytozome v7.0 (chr-ID scaffold_68; pos 444616 to 445234 reverse strand)
gaagaggcggagtacgaagagaaggtttctctcactaacctcttctgaaaccctaacttctattctagcgagctccaatttttgaaattgttatgctaatttatgatccctgattgttaattgttgttgatgattctttcaattagtccaatgcgtagttagatacgatgatatagtgtgactctgcgcgaaaatatttagggtttcatccttgttaatttgaaatttttacaccaaaatttcacccccccaaaaaaaagagagaaaatctatttggtgtttgatgtggaagaaattgaaattagctcaaaattaccgaatttgctatgaacctgcttctaaagagaagaagacgttcttgcgtttctcgaccatatacttctctttatataatttttttatatttgtcgatccatgagaaggctcaataatcgtttatgtcaagtatgttcgtatcacatttcaagaaatcccggactagacgagaatacaaacaggactttagactactgtcatattctcgtgtacatcttcacaaatggaatcttctagtgtttatgctctgaaagttgctacttttgcagtgcaacgaaatcaggaaggcaaatagcaactcaat

SEQ ID NO: 103179 - DNA, 543 bp, Mimulus guttatus
  Intron number 1 from transcript mgv1a016502m (locus mgv1a0 16502m.g) derived from phytozome v7.0 (chr-ID scaffold_245 ; pos 187402 to 187944 reverse strand)
tgctaatcagcacttgtttccactgagatcagccggtaaggtatcccgaatccactcgcagcattaatcgctaattttcctgaaaaaaagttgatatttttttaagctaattgcacatgctaatagataatactttcggattaaccttcatctctgaaatgaagaagaaattaatgcgtgtttccatttatcgatttattttttctttctgttttttagggttttttatttgttacattcgattaactaggcaggctttcgatatagttctctgatttatgaatattatgactttgcttttttactttgtagatgcatgaaggtatgttgacaatggatgatgcctttcttgattgtttgttatttttgaagttagttgaattcgtcgaccagataaagaaacagagaagccattcttgtttagaaaccaaagctatttcgttatatagttgaactggcaatttgtgtagaacattgattttcgttattgtgttcagcatttgatccgaaaaaaaatggcttttttgttgtccgacaggagtg

SEQ ID NO: 103180 - DNA, 1009 bp, Mimulus guttatus
  Intron number 1 from transcript mgv1a004456m (locus mgv1a0 04456m.g) derived from phytozome v7.0 (chr-ID scaffold_37; pos 13531 to 14539 reverse strand)
ataggggaatcgggggcggcgttatccatctttcggtatgtgattttggattttgtgtgttcatagattgtatgctgtgttttcgtttgtgtttgactgtgtgtagctagctgggtggatacttttgtgcgtgtgattgggaattggattctggttttattaatattgggagtgtttttgtggtaactagatttgaacgcatgtaatttggtagtaagtaactgaaattactaatgatctgattttactggttgattgaatagttaaggcatctgaatatgcagtgatatattagtttctcttgactattattttctggacggattaaattactgaaaagtagagacgaataatggaaaagcttcagtaacaaaatttatgttggcctctttttaatattgttttaaaactgcgcccaacttttattcttttatttatttttatttttttctggaatttatagttttattatcaatccccgtagtgactcttgaatcttggttcttgctgctggatatgttgaaataagttttggatcaagtgaggtccttgcccgaggttcagccaattataatggtcgaattaagatgtgcctctgttctttgtaaagcaaatggaataataactttatcttttatgttgctatcgctgttagtggaaggtggatgtgattaaagcaattgaatatttttgacacgattccaattcatagatgtttgattgatgtctttgtttttgcatcattcacgatcagtttgcagaatattggtagaactatatttgttaattgcagaagttttaccagatcacatctgatttttagaggatttttgggcactgccttatctgtctgaattgttaagtgcttatggtatttgaacttcataattgttcatcacaaaagtaccatgtaatattgatttcataataaggccaatgtattttgatcatgccgccttttaaagcctctatatcttctctttcagactgcagctgcccacagttggac

SEQ ID NO: 103181 - DNA, 739 bp, Mimulus guttatus
  Intron number 2 from transcript mgv1a020255m (locus mgv1a0 20255m.g) derived from phytozome v7.0 (chr-ID scaffold_213 ; pos 141323 to 142061)
aagctggacctgtccaaatcttcgtatccaatcatgttagtggcctaatttcctttgttgcttatatacttctcctagacctttacttgtacttgtctttcgttcgttttgtcgaatttttttaaatgatgcataagtgcttgttactgtggtccagttaaactttagggattacgagcatctctagggataacttgcctcagatccgttttctattcattatgtcactttaactatgtatatgttatcaagccccgaaagtatagcatattatgaaaatatctgtgtgatcgatccgctgtgcagacttgagtgattcctaacgattttttttttctaattttgatcgtgctttgaatatacatcacgttgttagagttgcctttacagtttgtctgtcatttgttatttaaaaacttctctcttcattatcgaaaactcaattaaggtttgttgtaattattttaaagtttgttgtgtacttaattctagaagacctttgcatctttctttgaaatgctccgttacgtatacttttgttttgtggaattgtttgtgatggaaaactatcaaccatcgtatgtctatgcttctaatagttaacaatactttgatattttgccttttggattgttttcgaaacaagtttccctttgcaattttttttcctaattctggcttaatagtttcgttctaattcgaaattttgatttcttgtttgtagttgattccggacgac

SEQ ID NO: 103182 - DNA, 785 bp, Mimulus guttatus
  Intron number 1 from transcript mgv1a002333m (locus mgv1a0 02333m.g) derived from phytozome v7.0 (chr-ID scaffold_45; pos 1034099 to 1034883 reverse strand)
cgaggaggctattaggttagatccgggttatgtgagggcgcaccatcgattgggatctttgtttcttaggtgagtttctcgttaattaagcttcgaatcttgattttgcgttttgtgttcgaacgaatctcttttctaattttgccgacataataatttcaaattgataacgctgaaatccgagaagggcctagagtagtcgataatttacgtggttttgatttagaaaaggctgcgaattagttgatttgaagctcatttattgtgtttctaaatcaaaatcgtgtcaaatcgatttcgtaactgttgtcgttgcgtagtgtgtggatgagaaataactgtttctcgattttgaaaatcgaggaaaatagaaaatgcgcacaaaaattggtaaaaagacaaatcttggtgcttgtgaatgtcgatgttcgtttggttttgaaattgtacaagcatcgatctgcattggctcgactgggttttgtttatattatgcgaaatcgggaacggcttatactgctcgttttgtcgtggctaatcacattatatattctttgcggtacattttggttcttcgatttcgtgatttccttggtttataggcccactatttaggtctaaaactaatcgaaagtgagagctttatacgaatctattgacatgaaaattctttaatttttgaagctattcttagattcgtctcgtatttcttgaatttaatattccgttaagtggaaacgaatctaattcctcaaagggtatccgcagtttagggcaggttgaaa

SEQ ID NO: 103183 - DNA, 689 bp, Mimulus guttatus
  Intron number 1 from transcript mgv11b002848m (locus mgv11 b002848m.g) derived from phytozome v7.0 (chr-ID scaffold_1 20; pos 304067 to 304755 reverse strand)
gaggatctgctaccaaaactttgtcaattgagaaggtatcgcgaaccaccattatttttcgtagttattgttgtgaaattgtgttgtgtttgatagagtgatttgaattttggatcaaaatatacagagcataaattatatatttgttgtgttgagtgggggaaaacaaaacaaagtgtatggtttgtatagatagtaaaagggttcttttggtttgatgttcaatagctatgaattaattccggtatgtttttggtctatctggaaaactactagcctgtgttttgataggttttgtggggcgattgtttacgtgtccgttgattgatattgatttggactgggatgttcttatcctctggtgaaagggaaaagtgatttaagatgaaaattaaaatttgtagatatttgagatcgtgtttaaatgttattagagttcatcatattatgttttcatctggcagtattcatgattgatgcagtgttgtttttgtggaatacttaacaatatgaaaggagaaaggagaaaaaaaaaatctgaaaattgattagattaaaacatgtgttttaagagtaaatggatccttatgaagatttagtgtgagttatggttgtattgaacttttcactaataaccgtattgtttcaatgcttccagggccgaggaacacagcttaaggaaatcccta

SEQ ID NO: 103184 - DNA, 410 bp, Mimulus guttatus
  Intron number 1 from transcript mgv1a012954m (locus mgv1a0 12954m.g) derived from phytozome v7.0 (chr-ID scaffold_24; pos 1352699 to 1353108 reverse strand)
tccgacaacatttgcgtcgcggcaaatcgattaaggtacgtttaatcttttccgacgacctctaattaactcattgcgtacaaattataccaagcgatgcatctttttttcctttttctttcttcgaaattgcatttgttttctgattcttaacctatttttctggttaatttatcccgtagatcatgtgttattttttgatccaagactcatttctttgtttatgataagaaatggagctgtatatgtaattgattgcagtttaatttgaaatggtggaattcgccccttcgttagggttactattaatttcagattttaccataagtatgtggattaattaattaattaattttcttgaatgctttttgtcagttcattgttcaagattattaaagtttgagcaggaa

SEQ ID NO: 103185 - DNA, 860 bp, Mimulus guttatus
  Intron number 1 from transcript mgv1a022296m (locus mgv1a0 22296m.g) derived from phytozome v7.0 (chr-ID scaffold_118 ; pos 354067 to 354926 reverse strand)
attttcttcatattaagacgagaatagaaagtagtactaaacaacgtggctttcgtcgtcggagataccaaaacgaattgcaagttgtaaattaaacatagatgagtgtatattaatattatatgatcttagtggttatatctttacttaattaaaacttacttattattataatcgtggatgtgttaaaaattaaatgtctcttgcaactatttttagttagaatatgtaaatccttttaattttacagtttcacataaatacccattagttgatacatctattgatataaaaactttatgataaaattactccaatcattttaacacatctagatcataaatttgacctccaaattcatacattgaccagttgacccttaatcagcttttgattgtcgttgatcgtccattaaccaataaactttgtgaattttgtttttgaagtttttttttaattgtggctaaaatgttgttgaccgtgatgttttccttttggctgataatatggaagaggatacaatatgagctttatacaaagggagcccaaggacaagcccatggaatccttgaaagacctgaaaaaaggaataccggggagaaatctcctgacgttagccctctgacagttaagtcagcagggataatgaataatagtatgtgtagagaatagagtaaaaatacttaatcatgatatctttctttgggtgctatggttgtatttatacctaactcaagactggggtggtagggccctcctctaaccttggtcatacccacatgtgggtgtgatgtgatttccccgagctgcattgctattaaaagcgagctctttatcttgagtggtctgagtcagtatag

SEQ ID NO: 103186 - DNA, 273 bp, Mimulus guttatus
  Intron number 3 from transcript mgv1a018165m (locus mgv1a0 18165m.g) derived from phytozome v7.0 (chr-ID scaffold_233 ; pos 349915 to 350187 reverse strand)
gcggctctcaaggtgtattctgctgttttgtttttgattcaacaattgttcgtttcatatgcaactcaggtggactgataaatgttctgttcatgtgtttgtgttaccttttcttttgatgaaatatgcttccacgtgtgaagagtgaagaaaaattcacacggtattgatttatatatgttttggttaatttattgaaatttgtttcagttgtaaagggttatatcgatattgggtttaatgtatacatttaccctttttttcttggcagag

SEQ ID NO: 103187 - DNA, 902 bp, Mimulus guttatus
  Intron number 1 from transcript mgv1a026490m (locus mgv1a0 26490m.g) derived from phytozome v7.0 (chr-ID scaffold_159 ; pos 120253 to 121154)
catatattcaaattattattattattttttttattgtgtgtgcattaaaattatcagggtatagctaagaggcttatggaatcagctgcggaaaatagtattttccgttagatgtgaacggcggatacttgatggaggggaccaaaagtgaaattggacggatgaaaaggtgtaattctcactagttttcaaaattcgaaataaaaacattgttaaaaagtgggaatcgacataattcaaaattcagttcaagtttaatttcaacttgtgtaacacggagactccaacttctcattgtttttccgtattttcgaaacgtttcgtgtcgaaaactcgaaaacgcctgccggacaccttacgagtcattttacaatttttaaaaagttagaaacatatttgaatagctaattttcaaatattttttgttgcttctcaaattatttatatgatttaatgatgagttgcaaattaataattgatagtaaaatttattttcaatatatttgtataaaaatatataaaaagaatttgtatatacataaaaatttatatatgtttatacagaatatctataaatacacccctatacttttaatatttacacgtttctcctaaattcacgtttccccattttcggaaaaccccgtttccccgtatcacagtttctgtgtccgtaccacatagagagtccatatgctaccccttatataaacctcaactagtggcatgcattataaactcatctctcttctatccaaaaatcatggccactatttccggccattctctcatacttttgctaattctcttcttctccttcaactctttggcattttcaaagaggtgccatgcaaatgacaaaaaagccctcctacaaatcaagaaagacctcaacaatccct

SEQ ID NO: 103188 - DNA, 545 bp, Mimulus guttatus
  Intron number 1 from transcript mgv1a004224m (locus mgv1a0 04224m.g) derived from phytozome v7.0 (chr-ID scaffold_6; pos 730766 to 731310 reverse strand)
actttcgccacgtcagacaggttattattattgaatcatacataatacattagttaattagtaatttttaatgaatgattatacaattaaaaaagaaaagaatcgtttctactaatgcatttgtagtttgaaaatacaaattttattcaatacgttataaagatacgggaaaaatacaattttcaagcctcaagttttctctaattttacatttggtccatcatgtttcaaaaatccaacatttttagtcatttctgtcaatttttcgttaaaactaacagaatcaaacgtgtttccatcactaccgtaactgatgtagtaacgataaactgatggaaattaccaaagtatcaaattattgaaacatgagggactaaatgtgtttttgtgaatatggagaccaaatgtgaaatgagagaaaacttgaggggtgaaaattgaaaatttcccatatcaaaggcacacgaatttgtaataaataaatttttgtcatcatctttaatttatcaggaagaggtggggatcctcacgcgcagtctagcaag

SEQ ID NO: 103189 - DNA, 599 bp, Mimulus guttatus
  Intron number 2 from transcript mgv1a026761m (locus mgv1a0 26761m.g) derived from phytozome v7.0 (chr-ID scaffold_83; pos 377704 to 378302 reverse strand)
ctctattgtactactcacaaagggcgacgaaagggggtttctcgtggccgaagccgctggagtttccaccactgcacaagggtaataaagagtagttaacaaagtactgtatcgtgtatcgtatcgtatttcattttccatttttcattaatttatttttttggtcctatcaaaaggtacacacattctccaggaatatggacaaaggaacaagttgaggcatggaaacccattgtagatgcagttcatgccaaaggtgctatcttcttttgccaaatctggcatgttggcagggtttcaaacacaggttcttcattatattactcagttttcaagaatactttgttttttttcacaatttaacgatcgatcgatcgatcgatagatcgatgatctttatatatgaaaatgcttatcctgccgaattatataatgatacaaagtttttgtgcgcctaattatgtagagttaaacctctataaattaatatagttgggactagggaaattctattaatttagcgaattattgaattatcgagtgaattatttaatatgttttcaccgagagaaactattattcaatcgaggcggcgacag

SEQ ID NO: 103190 - DNA, 807 bp, Mimulus guttatus
  Intron number 1 from transcript mgv1a007146m (locus mgv1a0 07146m.g) derived from phytozome v7.0 (chr-ID scaffold_69; pos 207545 to 208351 reverse strand)
ttttcgtcaatccaccgttctattcgttttctccggtcagtaattttgttttaatttttctttttttgcaagtaatccagtgacttgtaatcgatgcttgcatatatatttttaattttgtggatcttttagagtatcggctgttttgagtttggggttttaagtatgtgctatttgtgtttctgaatttttggtatgtattgttttttttcctttttggtttgatatgaatttgtaagatggtcaacgatctgatagtacaaaggattactctttggggatgggaatttagttgggttgtgggaattttgaatttattcagtgttttctttcgacatttttagcttgtaaaatggtgtatagttgctttaatttatgaagaatgggtgtggagttgatgatgaagttattcacttgtgttagttgtaggcatagtacagagtacagacggctaatttctcttcggataagttgtttgaggtagaaccttttgcgggtttgttgtgccgtttctttacgctatttgatgtagttatttacttttgtctcgtgtttttatggctttgttttgttggaaaagatgccagcgtttgttagctcgttaaaagattcttatactgttgttgggttatttgccggtcgcctgggaaattttgtgaccaaagaaacttatgaagaatgaaacgggcgttgaagaaaatccacttaattacctgttgatttaatttttggggttggtttctgacatgcttgacttttgtactttgaacagataagaggactgccgatctggttcaaatagtggat

SEQ ID NO: 103191 - DNA, 802 bp, Mimulus guttatus
  Intron number 1 from transcript mgv1a001523m (locus mgv1a0 01523m.g) derived from phytozome v7.0 (chr-ID scaffold_36; pos 1616920 to 1617721 reverse strand)
aaaaccttgccgaatttttgtcgttccgatattcggtcaaacatcttccttgaattattcttatttttttatgttttttttttgtttttgatttaattgcctctctcgttgatttaaggtataatgaactaactcagtttaaatgtttaatttatgtgttgcaacagtgagaattgctggagtttgatatgcataacataatctgtggcaaatatgtttaggcaggcgattgatgcattgattatatgttgctcaatagcacttaaaattaggcggtggagaaacattgcattaccagtctgtaacagtggacaatttccacttagtgctcctgtcattactaagtcgtgctaaattaggcatttgatagacattacgccatcataaacatgcttgtttaatttattttgtccaccatgtacaccgtttgaattgagtgaattgttattttatttttatttagatatccatgtgtcggttggagattcacgtcgtgtcaagatttcgtaatgcatgcatattttgtttccttctattgtaggcggtggatataattttcggtgcaagtctttttagttgttcattgcattcactagtaataattgcttattacccttaaatagtaaataaaaaaataaactgaccaccatcacatctgcaactacatgtagttcaaaggcgaatatgcttgtggatattataggcttggtcctcttggttgttttgtgcactagatttccttttcttgtggggggttaattgattaattttttcttctttgtttttgtgatgcagagctata

SEQ ID NO: 103192 - DNA, 761 bp, Mimulus guttatus
  Intron number 1 from transcript mgv1a000504m (locus mgv1a0 00504m.g) derived from phytozome v7.0 (chr-ID scaffold_12; pos 2396473 to 2397233 reverse strand)
gtcggagtcttacgtcagcttggcgatctcgctgagtaattctctattccacaaatttctttgtccatttctctatacgaattgtttgtatttattgcacgaatttctctgttaatttatctgtagcaactctatgaatatctggagttttaattgtgccaacttggggattttttttcttccgttcggttcatgatttggtttataaaatgagatgtttgtttgctgttggatgagagttatacatgttttatattgtgctgagaagtaatttgtatttggaatcttttgttttccgaatttgtgatgtttctcttaaagttagttgaatatggaaagtaaataattgtccattttcttgagtgtcgtagaccctgctcatagtgttatgctaaattggggaagctttaacttatgaaattcaaaatggtgttgacatttgaaaattaggttacatctgagtgtgctaagaggtcgaagattaccctgatattgtgatatcaaattaggcaattatgtgtatctgcatttacatagtgaagcctgaaagataatttaactcatatgctgcataatatgcaaatgcttgtcctagaaagaatgataagaaaatgtgtgaccataagagcatctccacaaccatatgtatgtgggatgcgtgatgctgtttcaatatgatctttataatcacgatttcccaccttcgcaatgtaaactgaaatagcatctatggtgtcgcagatttgcagcagaagtttttc

SEQ ID NO: 103193 - DNA, 819 bp, Mimulus guttatus
  Intron number 3 from transcript mgv1a001851m (locus mgv1a0 01851m.g) derived from phytozome v7.0 (chr-ID scaffold_101 ; pos 405644 to 406462 reverse strand)
ccagtaacgaggtatgtgtggaccttgccatattatgggaaatgttctcaacctcttagatatttaatgccttatcgagttcgtataatgatgtcaatgctttaatttcattagataattaatagctggttgcttgtgtgatctcttatttttttcctctatatctgacttgcgaggatttggattgtgttatctgaattgtttacaaatttaattggctggagatatagatatagggtcaactatattggtaccaaaatttaattcagaatttaaagtggttgaaaatatagatctctgtccgaatgtgttggcacaaaaaaactgttcatattcattttgcctttttggttcacatttgtggaaaaaggggcctctaaaagttttgaattcttatgttgtgcttttgttagttaatttctaatgaggtgtcagatgaacagatctaaaatgagtgattggttagtgtctaaaagttcgttattccactagcaggctaattttgttggtggtcgattgaattggttttagtagaaactctaaattagcaactcttatagttccacacaaatttctgaaaatgctcagactaaagtatattttggaaaactgccacttagttgtatacaattttatcaatatcttactccctctcttttaattgtcttaatcttgttgctgtacacttcaggtttttgtgtgcaaataatttttctgttcttttttggcctttataagtttttatacttgaatttctctttatatggttttcattagtattatctactacttcattttttcttcaccttcctgtacaga

SEQ ID NO: 103194 - DNA, 834 bp, Mimulus guttatus
  Intron number 1 from transcript mgv1a008207m (locus mgv1a0 08207m.g) derived from phytozome v7.0 (chr-ID scaffold_18; pos 1331262 to 1332095)
agagctgtatccgcgtattaaatacactacagtgagtgagttcttggatacattgttgtaggaattgtaattttaagctacatgtaattattgacttttgtacttgtttgttttgtacaagaaaaccaccagcaatcttgttgaggacaaatattcatgtgtttttacactattaagagattattctgataattcatttgacaagttcacactccaagcaaaatatgtatcatataaaaaataaaatgaaagcaaacaattacgaaactgaaatgttaattgtcgtttcaattctactaatgccgttttgacttcgaacctgactttgacatatttccagtctgattttggcaatatttgaaacacgaaaactgtagtaatttaggttaactttcgaatccaacttaaatcagctacattggatgtcgtgtcacaaagttatgcatgaatcagtcacattttgaattttaggtaactcaaaagatcaaagttgttggcagtattcattgattaatgtatatttttttcatccgacatccaattttggtgattcagattggattagaaagctaactcaaaaaactacaaattctggtttcgggttttgcaaaacttgaagtgaaaaatgatcaaaatcgcgtttgaatatttatgtcaatagattaatcaattaacggactttttagaagaaaaaaataaaagatttggttgggatacaacaatttccgtaagtacaaggacttttggctaatttccccacatctaattagtaaacgtttttttaatggcaatttaacaaccactaaattaatattttggtttggataagaaaag

SEQ ID NO: 103195 - DNA, 490 bp, Mimulus guttatus
  Intron number 1 from transcript mgv1a013770m (locus mgv1a0 13770m.g) derived from phytozome v7.0 (chr-ID scaffold_4; pos 1641898 to 1642387 reverse strand)
gtatctgttcaagtacatcatcatcggagacactggtaattctcgtttctcgatttcatcccttttcaaattcccgatcgtttaatgctgatttaattttttttttagatcagggtttgtttgggggtttgtttagtaggattttgtttatggtattcttgtttagatttcttctgccttttgattgcagtttgtagaatgtagactgtaatgaattattatcagtagtcgccggagaatttctggggaaagaaaaaaaaaacaagtcaatgataaatcatcagtgtaattgagccgataaaaatcgtatctttatgggactaagcccgtctatctgtcgaaaatattgcaagtttgatggaatgggattgattttaatgtagattatccaccaatgtttgaaaaaaaaatgttatgtaactaaatcgaaacgaaatcccttcataattttttggaaataatgagtttgttttgcaggggtgggaaaatc

SEQ ID NO: 103196 - DNA, 496 bp, Mimulus guttatus
  Intron number 1 from transcript mgv1a016786m (locus mgv1a0 16786m.g) derived from phytozome v7.0 (chr-ID scaffold_63; pos 732665 to 733160 reverse strand)
ctattgatttctgaattaggggtttcaatttgggggtatactctctgaattgctgttcattttaattattattaaattctaaatttgctgaactttttgacgtgattagtagattaattgttattgatttctggattagtgttattcttccattgcaatcaaagtcaaactaaactactcgatattcgattcgaggatcggttggttaaagctcgtttgagttatgttctcgctcgagttcgactcgattgcttatcaaatatcgagatcgataaaattcaaacaagcttatgcaaccatttatgataaacattagaccattaattttttaccgataatctgatctttttgttgttaattgttatcaccatttcatttgtttgctatcattatcaagattctctttcatgtttcgtttttttttcaattaactttctacgattgtaaatccgatatattgccttattataggtctggtgaaattgccgacaacttt

SEQ ID NO: 103197 - DNA, 760 bp, Mimulus guttatus
  Intron number 1 from transcript mgv1a016712m (locus mgv1a0 16712m.g) derived from phytozome v7.0 (chr-ID scaffold_8; pos 1403548 to 1404307)
ccgcacccatctccgccggtttgtttcgatttcctgttcgtcaaactgttcaattttatttttattttaattttactttttaagctttgcctctttgctgattttcgtaatcgatttagggttggatcttgttacctttaaccttgtttgattagcctcggttacttgagattgttagatctggttaaaatcttaagtttaggggaagggcgtagggtttggttaaaagattattattacaagtctccgtcagtttcttagtattgtgattgttttgatcttgttctgtgatggattttacttgtttttactagccctgattcaatcaatacaaaatttcgggatcggatcaggcttttgagtagtcaaactgtcgcattggagatcgaattgtagtcaaactgttggaagaatattagtattcgttatattcctgtcatcgtaaatcgtagttgatttgatcggagagtgtttttcagtttgttgtttcctttcagtattttcagtgcagatctaatgattagtcggccggcttagggaatatagtccgaactagacattgttagtttgatttgtattctcgatattcatttcttgaacgatttaatgattactaaaatggctacaaacaattggttatcgattatcgataaccgaagttacctatggaggagttgttgtaaaatagagcaaagtttcaatatttttcgttttcttactttcttttatcggtgcagcaggtgcttcaacgtctctcaaa

SEQ ID NO: 103198 - DNA, 709 bp, Mimulus guttatus
  Intron number 1 from transcript mgv1a005153m (locus mgv1a0 05153m.g) derived from phytozome v7.0 (chr-ID scaffold_7; pos 2537617 to 2538325)
ctgccggccataacaaacgcagaattatccaagaggtgcataccgatttttacttttttttttatttatcccgcaatggttgaaaaaatagagttatcggtttatttttgtacttgaaattatttataaattgagggtgtgattttcagtcctggatcctaattgagggttttggatattcgatgattttagatgtgggatttgatctgggaaggcgaaaattgaaaattaaggaaaatgttgtgctttgttgtgggatttagtaactcaatattcttccctcttttttttggctgcgaatatgaagatattctttagatagtttattatttattcatattttctctttgtacttcttctttggggcgtggttattaatttgggaaatggagttgcagcatgattttcgtgtcggtgttacagtgtttttctgttgcatgtacttgctcgttttcagatgcatgtatggttgatacaccatacatgcatgattatgtatgtatgtctgcttatctcctatatgttatgtaataagcaccatgctgtagtttttattttcgtcatgtgtgatcgtattcccaattactgaaccaactgcgaatggattcaaaataacaatgtcttggtttctcttttcatccttttctactcttgcaagtttctcatatttttttcttcccctctttttgcaggctatttataacgagct

SEQ ID NO: 103199 - DNA, 144 bp, Mimulus guttatus
  Intron number 2 from transcript mgv1a006267m (locus mgv1a0 06267m.g) derived from phytozome v7.0 (chr-ID scaffold_1; pos 4045094 to 4045237)
tcacaggtgatcacaacaccatttctcttttctttcttcatttgatttcgaaaggacgaatacaaataattagtttatgcttctttctcatcaaaatttgatttagcaggttagtggttttctgggaggagagagagattacag

SEQ ID NO: 103200 - DNA, 629 bp, Mimulus guttatus
  Intron number 1 from transcript mgv1a003706m (locus mgv1a0 03702m.g) derived from phytozome v7.0 (chr-ID scaffold_7; pos 301592 to 302220 reverse strand)
gctgaagaatctgtaagaaacaatctgttgataaggtgggtttttgttgatgagttgctatttacttgttaaaaatctattcttttcttattgattctggttcttgaaatcggccctttgtgatttcagctcaaaacaaaggtgcccatcacttgatttgcccaaaggttgcttctttttccttcaattttgattttttttctgtaattggtttgaatttactttgaatttctgttttcttatgcaatttctttaagaagtaaaaaaaaaaagttattttgggcaaaaaatctcttatgaagaattgttgaaggtgattatatgttggatgctagtgttttttgtatatgatgtggctgaagttgttaatttgtttgttttttctttttttaaatttattgattatttggggttttctttaatctttgatatgatgtagaataattgaacttagggaagtattcgtttgtgtagaattgatatgggagtatggattgcaggaatattggggaatcgactaggaagctcgaagattctggaagataggcgcacggaatggtgatcagtatcattttatttcgaaaaaaactgcagttactggagatttcgattagtgaccgcagacagaa

SEQ ID NO: 103201 - DNA, 824 bp, Mimulus guttatus
  Intron number 1 from transcript mgv1a016954m (locus mgv1a0 16954m.g) derived from phytozome v7.0 (chr-ID scaffold_5; pos 1724998 to 1725821)
gtactgtgcgtcttcctatcatcggtggtgcaagggtatgatggtctttttcctaatgagtgcagcattcatgaatctgaaatgttaaatgtcgtttcaattttactaataccgttttgacttctaatgtgattttgaccctcttgaagtcgaaacggtattctcgaaacttgaaacaaacatttatcacatcccttcatgaattgccactgcgatagtttatcgttatggaactaaaagcacctattttctcatgtcctctgttttttctttttctttttttttttttcattttcaggctgatgttcagaaggtgcaagaagcaatatcttcttctgttgacgtgatgcaagcaatggcctcttcaatttgctttttgctaacgaaggtattttgtttgaaatatcacattaaactcttcaaattttagtcactcgcccggaattattaaattactcttatttatgtgcctggtgttttgggtattttttcttacttttacttgctaataataagtaggtgaagaagtcttgcaagttcactatagtgacatgatctggtaattttacaacttcacaattgtttcacactcattaagattgatcccgtggtgcagcatgttaattatctgctgtagtgctgtaaaccccaatttaactagtgatcgtcaaattggtaacttttgtccctatacctagtaatagttgccggataaattggtgaacaatatagaaattctaatattgtttatggagaatctcgtcttttttggaattgcaattaatttctctattgggcttgtgttggataaacaggtggagcag

SEQ ID NO: 103202 - DNA, 873 bp, Mimulus guttatus
  Intron number 2 from transcript mgv1a016036m (locus mgv1a0 16036m.g) derived from phytozome v7.0 (chr-ID scaffold_205 ; pos 5102 to 5974 reverse strand)
ggaaagaagggactggccttggtgtttcccaacaggtttgttttatacatacgtactgttttgaaaagttactctttttttgtggatttgatataatctatttttttaattacactctctgctaatattagggtttgtttgcttcatatgggattattttatttttatttgctcgggttttcgtgttaaaatttacgaggaaatagaaaacggatgagtgggttgtaccttttcagacatagttgctagttcctcagtattgttttgcttttacagaaatctcgtcaccgtttgacgtcgtgatgatagtgtttgagattttctggttatcgttttggttttacgcagttcttagtgtaaagatgggatttttgctggaactggttgaagttcgatactatttagaaaagagtgatcaagatgattcaagaattacgatctctcaattagtatttgaactacactgagcatgcatcttgtattcgtctagtttgagtatattatgatgtcgaaatttgtggaaaatgtatcgaattattttacttgtattactgatatacatgatgacacgggtttgtctaaagtcaaaaaattcttccatgtgtagtcaacttagcgattttcttaacgattttctttggtttcgtcattttttggtgagaacagatgctattcaactcatgaaatttcgaatacgaaattggtttattatacttatttttcgtgcaagtatgtggatcttattcatttacgttttgcacacacgcttattatatgtttgtttacatagaacaagctcgtatgtactctcctgatcgattttcattgttcgatgcagggcaggctagagcccatagaagcgttcattaagaa

SEQ ID NO: 103203 - DNA, 827 bp, Mimulus guttatus; identical to SEQ ID NO: 101947
  Intron number 1 from transcript mgv1a016169m (locus mgv1a0 16153m.g) derived from phytozome v7.0 (chr-ID scaffold_6; pos 1544711 to 1545537 reverse strand)

SEQ ID NO: 103204 - DNA, 853 bp, Mimulus guttatus
  Intron number 1 from transcript mgv1a009806m (locus mgv1a0 09806m.g) derived from phytozome v7.0 (chr-ID scaffold_109 ; pos 229256 to 230108 reverse strand)
cctcaaatacgccgtcggattttcattttcccgtggtaatgcatcttccccgtgtacgcattttgagatgttaactgaaatttatcatgtattggctgtgaatctagttgcagacttgcagtaatcgattgaaattcatgatttcggagttaaggattgtgagatcttaatgcatttttgctcgattttaagttagtgtgtatattttttttttcttactgtttatctgttaaaatccgccctgttgcacttgatatgattttttaatttttttcccttcaattattagtgctagatcgctatcccgatttgcagaaatggagttgttaatgtgattaatatttgatttgtcacttggttagtttgagtttgtcttctctgatatttttgaagtttaaattcgagtgatccataaatatttagtgatctgttgagtagtgattgacgaagatttaacttactgatttgtttcgtaagttctgctgtgtgtttctatgttgagtttcttcactacattggctgtttctgtcaataagtttgctagatctagtctattagctactaatagaatgtcgatagtcattattcgttatcagatatgaacctaagtgacaattcagaggctgttttattttagtatgcagtgaaggaatgaattagtatcattagtttttcgtataatttgtcctcaagcaattctgtttctgaaatgtatctattggtgttgggatcgtaatctcgagtaaatggcaatatgtatctatttgtcctatgtatttgtaccttaattgactataatgctaatgtaaaagtgtttttgtacttcttgtttcaggtgcctataatttccata

SEQ ID NO: 103205 - DNA, 577 bp, Mimulus guttatus
  Intron number 1 from transcript mgv1a000522m (locus mgv1a0 00522m.g) derived from phytozome v7.0 (chr-ID scaffold_118 ; pos 314904 to 315480)
cagaggccatcactgaaatttacaggtatttctgttcgtttttttcaattttattcgtttaatttgtatgatgtgatttttgtggtttctatgtgtaactgctatttacggcaatttgctttttttttttttttcttttttctttttcttgatttttatagaggtttattagcatattttgtagaaaataatgatataaatatctgctatggttttacttgcgaatttgatatatgatttgatatatgagttgtttgaggttccgcttcgatttatgttcatctaggttttaactgtagttactaggttacttccggagtttttgatttccattttatcatttcggctgatttgtttatattgctaaaatttcatttacttcatttctgtagttaaagggtatgatatctgtaatttgttatatacgtcattgacggagaaagaacaataaaagaacataagaagaagaacttatatgaagtaaaactgcagttgaactgattgtgattctttaattgaagaaatatgttttgttttttcaagaatttggttttgggatgtaggaagattctttcaa

SEQ ID NO: 103206 - DNA, 893 bp, Mimulus guttatus
  Intron number 1 from transcript mgv1a008387m (locus mgv1a0 08387m.g) derived from phytozome v7.0 (chr-ID scaffold_3; pos 666611 to 667503)
cttctcgccctgctcgtcctcccaaaccccaattggtataattcaaattcatttttctctgttttttccccctttaggatacaattaatttagggctcgttcgggtacctatattggattagattggattagatgagattcgattaactctctactcgctaattaattatttagttagtagcatgttcggtttcttagattagatcttctattaaatttgttaaattcagttattatatatgaattgtctataaaaccacttagtttaaaataatacgatatgactttaaggatacaattgtctttttcatttttaatcacccctattaaattaatctctgggggaggggtgctactaatttaatgtaatagtagcatttaatagcggactttgattttagtagcggatttgaaaaagtgtgaatcttgtcaaccggacatgttattagcccatactatttagtcagtcagtagaaccttatagcggtaaccgaacgagccctaattttgtgcactacatctcgtttttctctaggacaaaatatcgaattttcatcaatttaatatttccgaattcatagaagctgtgaaatgtatcatttaatattaatatttacatttgaagccttgcacttgaaatatttgaaatcggtggcggtgggatttgaactcaggacctttcatttgggtgactttgataccatgttgaataccttaaccaaaagctcaagctgttagttaaatgcatcatataatattaatatttccaataaaggctttttgaattatgattactgattgcttttttagttgttattttggtttctgtcatcccctcatggcattaagtttgttcaggtttcgcctaaagaaattccaccaccaaagagctc

SEQ ID NO: 103207 - DNA, 891 bp, Mimulus guttatus
  Intron number 1 from transcript mgv1a015035m (locus mgv1a0 15035m.g) derived from phytozome v7.0 (chr-ID scaffold_181 ; pos 209242 to 210132)
ctcggaaaggtgacctcagagaggtatgaattcgaccactccatcataagtttgtctcaattttacgtatgtggtatttctttagattgcttcgattattttcgttaggtttggcgctctattacccttgataaattaataacctcgcgtaaataattgtttttttctgatcccaactcggtaaaaatctactaaattattagttcgataatttactatttctctaaattagtagagtttggttagtcccgactgtattaatttatagaggtttaactgtaattctaggtcttctagtgaatatattgatatgtatggttttagaattctgttgattattttcttatgtacgtgttgcatgactagcgaataacattaatttgacattgcatcaattgtctttagtttttcaaggatcaacgtattaagggaatcgattcatacttgaagaatcttttgtcggtgctgtgatgtctgtgatgtcgttatttgattgccacactatcatgaattctctatgtagcattaattctgactatatccaaactgtttgtcgtcatgcttgttggagtagaaaccaatctgcttgtttctgaatagcttctttggaaaatgtctcatctaattaagttgcaggcctcgatgtgttatatatcataaaagagtattgttgtctctaatgtcttaaatgttgatgaagagggattaaataacccgctttatgcaacggtattatatcatgttttctctgatacattatactacgtgtttgttattgatgtatagcttatgttatcctatttcttatttttatttttgttttttcgttgtcatctgttgtgcctacattgatttcttaccgcattattttgcaggtgaagcggcttctta

SEQ ID NO: 103208 - DNA, 689 bp, Mimulus guttatus
  Intron number 2 from transcript mgv1a014056m (locus mgv1a0 14056m.g) derived from phytozome v7.0 (chr-ID scaffold_12; pos 2826550 to 2827238)
cagagcggcggaagcgaatcgagcggcgcaaaaaggttgcaccgttgaaatatttatctgagtatttagggttttgagttttctgttatttttactattgattttgaatttgctgaacataattttcatataatcactacagtgttaacaccatgtgaaatgtgcttaactagtttttcacttttcatttacacacaatcacacacatatacatgtggatgtgtgtgtgtgtgtgtgtgtgtgtgtaaaatatgtattgacctatatacgtctatgttgaaaaaacccggtttgattgtagctgctattgaaaagaaaaaaatcggtttgattgtaactagtttttcatcattggtttacacacaatcacacacgtacacctgtggatgtgtgtgtgtaaatgtgtcggtttgattgtagctactattgagaaaaaaaccggtttgattgtaactagtttttcatctttgatttacgcacaatcacacacatatacatgtggatgtgtgtgtgtaaagtatgttgacctatatacgtctatatcgaaaaaacccggtttgattgtagctgctattatgttaagccagttgctattattgttccgttttttttttggtaatataaaattatttattattacaagttctatttcagataaaattggatagagattttgttatatacggtgg

SEQ ID NO: 103209 - DNA, 870 bp, Mimulus guttatus
  Intron number 1 from transcript mgv1a005461m (locus mgv1a0 05461m.g) derived from phytozome v7.0 (chr-ID scaffold_52; pos 214401 to 215270)
gagaagagttcttgattgtaacaaccaatttaggctctaatgtaactatctgatccatttaaaaaagaaatgtattctctatcccttcttcacacacacaaaaacaccacacaattgcgtgtgtgtgtgtgtgtgtgtgtgtgtgtgtttttgtctgatgtaagaagagtaaatgaaaggaacaagacaagcgagtgaatagtttatcagcgtgccttaaatgttgatctacctaattacatgatctcaaaattatttaattaactataaaatatataaataaataaaaaaaccttttcggaaaaatattgaaaaatcggaactcggaatttcagaattcggattgaaaaatattattctaaaatcagaaaatgttagatcaacatcggcaaaaacaaaaaaaaattggtatcaatttccacccctgagtagtatacatatttttttcatttcgcgaaaaataattgcaatttaaaaataaaatactaatttcgattcgatctttaattttatttattgggccaagtccgtattaggtcttagcccaatgttctttgctattggattcattgcagcccatgataagccctttctcgaattaatgtgagagagcccagaagaaggaaggaagaaaaaaaaaaaaaaaaaaaaggaaaaaaattcattcactcgttgagttcttgaaattacagttgaaactatgattctttgataccaaatgggaagaagacgatgagacatggaatattaagcaaaatcagagttgtagaccaacccaatacgaatttcccgcttacagaggttagctctgtaactgagttttctgtggcatcagctcttcagaattacataaactcagatcatccctca

SEQ ID NO: 103210 - DNA, 978 bp, Mimulus guttatus
  Intron number 1 from transcript mgv1a023646m (locus mgv1a0 23646m.g) derived from phytozome v7.0 (chr-ID scaffold_197 ; pos 387122 to 388099)
ggtacatcagtgtcccgctcaataactctcctactccggtgagatgcagtcatacgaatgcgctcggcttccgccgcggcttccccacgacttccccgctatatcgaaatttaattttcgggactttatccgaactcaaagaagcacccataatccctttccccttgtcctgacgtgccatctgtaaaaaataaacaaactaactaaaaaaaaatttaaacttgtagctccatttctgcagaacacgggaacttgaagattgttcgagttctcgtgttctgctaaacgggagcttccagaattttgagtctttcattcagcagaacacgggaacttgaataatcttcaagttcccgtgtactacgagacggggatacatatttaattttttttttttccgaaaaaaaaaattcaaaaaacagtttgaaggtcccgatcacgaaactttgaagctcctgttttctagagcacggaaactcgaagaaaattcaagttcccgtgctctgcaaaaatggaggattcaagccgtttgaatctcccgttttgcagagcacggaaacaacttgaattttcttcgagtttccgtgctccagaaaacgggagctgaaaaaaaaatcgaaattttgctaaatctaatcctaaatatgtgtttttacctaaattggaaataaaactggttaaaaatagtaggatattgaaaatttaccgaaatcgagcctcgtttgatacgatttcaaagtcgaaaaaatttacgaaattcaaatttctagagagagtttggaaatagaagagaaaaattcaaaaaaactttaaataaaaaaaggttccgctgtaaataagccgattttagtaaaagttccgatgcaaatagccagcaccagaaagaaaaagtcgcactagaagctccacacattcatttctctctctcacacacacacatttctctctctcacacacagtacacagtaaattccagaa

SEQ ID NO: 103211 - DNA, 792 bp, Mimulus guttatus
  Intron number 1 from transcript mgv1a018151m (locus mgv1a0 18151m.g) derived from phytozome v7.0 (chr-ID scaffold_3; pos 3383111 to 3383902 reverse strand)
acttcgggtagtaatctaatctaatctctctctctctctctctctctctctctctctctctctctctctctctctctctctctctctctctctctctctctctctccatgtgatttgatgggaaactctagtgtaacctgtcaatgattctttagtaaccctaatttcctgtttaatttttcgaactttgttctattaaattgttgaacataaaattgaattatcgaaaagcaactgatattttgaactgtaaaatcgatagaattcgctggcctgcaatttattcatacgaacttactgcatagataaacccactgttttgctgaaagttcatcaaattatgcaatcaaaagaaacatcgtctgctcatgaacatgccaaatgggcatctcggttatgtcacgttgcctttgatcgaacaatgtaatattgctaaagggttactttccttcggtaatcaaatctagttccgatttgacggcataccaaatgcaatttcttcatgaataaggcatgtgtacctctctcattttctttacgtcacgtcaaacgtaatactaaatatagcataaatatttatgattccgattttttctgtgcctatcatgaataatagcaaatggtgcattcattttagccactaggcacaacgttgatagtaattacgagaagtctgcggattgaaagaaacctgattctgtctgtaatctgtatatattcgtgatttttgtaagtctttgtttcgatgttaaggctagtggcactaattttatttcaaacaggctacattac

SEQ ID NO: 103212 - DNA, 670 bp, Mimulus guttatus
  Intron number 2 from transcript mgv1a013031m (locus mgv1a0 13031m.g) derived from phytozome v7.0 (chr-ID scaffold_1; pos 1709381 to 1710050 reverse strand)
cctactggtttgtctgaattctctatttaatttactggtgctgcttgtgagattaataatgaagttctatgagtaactgttttttccgtcgtccttcgtacttggggataagatagactgggtcattgctcacattgcatttgcgttttgagtcaaccgtctttcgagttctatttcggattgtttgattatttgaaaactggctctgtttatacttcttcaagctccatatattaagaataaagatggtgaaattcaatctgagcaagagtttgggtttcgagatattaacaaatgaaaggagaaaaggaatgtcggattcgtgtaatcagtggaaagccctttagttttgaatatctgctgtagtttttgccttttatgggaacgtaaggcttgcagtgagagtaatattcaagtaaaaacattggtacagttcagaattttcagatatacgaagatgatcaacttctcggtttgttttaagggtcaaatattttatatgaaatcaactattggactgaatttatagatgtcattagcagatttcttgcttttgcaagtgaacagctagttttgaagtttctttttggcaatagatttcatgccaatagtatttattactaactaataaattcacttatgttttgttcagtgtgacttgcatcttgcg

SEQ ID NO: 103213 - DNA, 619 bp, Mimulus guttatus
  Intron number 4 from transcript mgv1a002254m (locus mgv1a0 02254m.g) derived from phytozome v7.0 (chr-ID scaffold_51; pos 247661 to 248279)
aatatctaagtgtgagctgactgttccgagttctttggtttcataattccgtatctggtagttggctatgcttatggaaaccctgaattgcacctcttttttctagatttttttttctggaatttccaaaattttccgtgattttttatgtggatgaccaaaataggaagtaaacgtatcagaaagtagctgcaagtaggacatgtgattattttatattacctccgagaattcaaagagtgtttttatgtctgcattaagggatgaaaaactgttccaagctatatgtagataattgattttgttaaactccgtgaacagaagatcctgaaaacaatcttatcatgatacctgcgcaatgatgagattcaaaagcaatatctgtcaatggttagtagttagtacagcaagaaaataaagagagcatctaccgaaataatgtttgggaaaaatttataggctgttagaatttgttttaacaatttttttttctcagtttctgtggatattaaaatttgtgtgatgaaaattatgatctatcaacattttcgtatgagtataatagtgttaagtattatttccagtatcttaactcaaatcatagtttgtaccgcgcggt

SEQ ID NO: 103214 - DNA, 780 bp, Mimulus guttatus
  Intron number 1 from transcript mgv1a021439m (locus mgv1a0 21439m.g) derived from phytozome v7.0 (chr-ID scaffold_24; pos 1176185 to 1176964)
ctacgggcctttttgtcgccggttttaaccgtggggttagtttgcattcgaagaatttgaatattcaatttactttttttttataggattggctgatttatgtatgttcgttatgggttaatgtcgaaatattgcgaatgcaacttagattctgcataaatatagtcttgaaatggagggaggctttactaagtgaggtggtttttgttagttataaatattccagactgagttagataagtattaatgataagagcgcatgatatatgcagcaactgaactttagtagaaatttacgaatttgttgcagcttacgatattaagatggctatatacaagatggaatatagaatatagaacgaatattttagtacagaatagataattctagggcgcttatgtacgaatatggttaaaatattgaaagtttatggatgctgttatgagggccatggttggttttccatgatgtacagtttctttttccaaatcttcagacttgtgaggctggattcatttaccagctttttttcagttgaaattagtgaagtgtttgtggtgaaacatggttccgattttgacgatggcagcatgctgaaatgttctagcctgtttacgccatcatgcagaatgcagaattcaaacactttatttagtgtgaagcacccgtatatgtttgtcagcattacctacttgcatttatttgaattattggattagaacatagcttacactcttcgaaagaactggattatgcctgatttggtttacctcaggtac

SEQ ID NO: 103215 - DNA, 511 bp, Mimulus guttatus
  Intron number 2 from transcript mgv1a001619m (locus mgv1a0 01619m.g) derived from phytozome v7.0 (chr-ID scaffold_31; pos 141983 to 142493 reverse strand)
ccttcggacaacctgcacccgtcgctcaaattctcgtaagtatgtcatcaaacaataacaccacgatttccttttcttttctttttttgtttgttttctttaacgttgtaagaacttatcatgtttaattaattaacccaatttttcaatgatttttagtttgagagttttaaaaaaaggttagaagtcttttcctccattgcatgaaaacttgattctgaggtagattgacaagcttagtagagagagagagagagagagagagagagagagagagagagagagagagagagagagagagagagagagagagagagagagagagagagagagagagagagaccaaattgattgtagacactaatgctagagcattagtgacaattgtaattcgattattacaacaacttggtgttcttaattaaacatttgtcttaaaactcaaacatttccttatgtgaataataataatgcaggcaggtttcgtgttaggcccatcttgtctatcgca

SEQ ID NO: 103216 - DNA, 587 bp, Mimulus guttatus
  Intron number 2 from transcript mgv1a022302m (locus mgv1a0 22302m.g) derived from phytozome v7.0 (chr-ID scaffold_732 ; pos 43821 to 44407 reverse strand)
gcctgattttcacaagctttcttctatattgaggagtgagttgtcaatgatttatggtgtgctgctgtgtgatgttatttgattagtaactaaattttgtagattatttatctttagatatcatgattgttagtttacttgagaatgtttaaagaaatcaatgaacattccatttatcttttagcttaaactctaattattcaactctcagtgaagaggtcattccaacttcaggaaagtcacacaccattttggcaattgcacctgctaggattttgagaaaagataaaccaggctacgcgcaagaacattctgaagataaagaggaaaacaatattctttgcttaacatctcaaattctgtcttcgaagaagttcttaaaagaatggatgttgtgcacgtgtgtctttgcttgtttttcggagcttaacagttccttttattttgtttcagatacttccattgttcaaaaactactttaggatcagtttcattttttttttaatctgttctgtagatgattctaatatctgtatatcccgtatgctgcaggcacttcatttgactggatcatcataacttcccct

SEQ ID NO: 103217 - DNA, 962 bp, Mimulus guttatus
  Intron number 1 from transcript mgv1a014582m (locus mgv1a0 14582m.g) derived from phytozome v7.0 (chr-ID scaffold_213 ; pos 396248 to 397209)
acattccttgcaacttctgcagtattgttcttgcggtaaattaatatattaatcaaaaaaacattctctcttgtattttctgaggttcattatctgctttattacaacaacaacctcaaaagtaaaccataaattcctaaaaattatatatgcatggagatatagtcatgtctacatatacatatatacatgtgcatttctttttcttttttctttctttagtaaaagagcagcaattcagttatgattaaagctgaccctttgattcagagatcgataattaattaataaattaattaatgatcaaacaatagaaagagggtttcttgtttttctatgtttttggtgatacatacagtcatgtgtctacatcgtccctgccacccctttttctttattttgcactgtcataaaaaaaaaagaaaaaaaaaagtcataacttaggccctgaatttgtaagaatcaccacttctagagagagaaaccactgcataaaattaaatattttttttgtgtttggttatatttaattaagctggtgatgaagacaagtctttgagaggtggattttgctgtagctttttttttttttttgtttcttttgctaaaaagatttcaccaactactgtcaaaattaatctctcttctttttttttttttatttgaattttctggaccattttaatttttctcgaaaagtcgaaaataaaatccaattgtcatgaaactgatgaatttctttcgaatgactttagggttttctttttttgaccagctagctagctagcccttttcagatacatagattttctcaaaattaatgttcttgtttctgattcaaggtgggatcataattctggggtttatggttgttaatctgtattaattatttgtattaattcctctctctctctctctctctaaaactctctctctgatctgtgtgggcaggtgagtgttcc

SEQ ID NO: 103218 - DNA, 484 bp, Mimulus guttatus
  Intron number 2 from transcript mgv1a014412m (locus mgv1a0 14412m.g) derived from phytozome v7.0 (chr-ID scaffold_8; pos 1714809 to 1715292 reverse strand)
gtatctgattatatactccctcatattctcaatctgtgagtgcccttttcataattttcatttccttttatgattattgaattgactgataataattactcaatattcgaatatagatcgacaagtattcgaatattttctattttcatttttttttttcaaaattgggatgtcattatgaactcaaaataatatgttagggttgtcatttttcttttcaaagagacgccgggcgacgattgttcgtgtagcgtgctattggttatctagttaagtaaatttagcaatcatgttaaaaacgattattcttgtagcgtacggttctatgtttagaaaaacagatcatgtttagatgagttgtagtttagcttaaaatgaagaggtgtgcttctgttgttcgactcttccacaatagggtttttattctcctgccactcgtttgttatatgcgtaattatttttttcattgaaaataatttcagct

SEQ ID NO: 103219 - DNA, 638 bp, Mimulus guttatus
  Intron number 3 from transcript mgv1a008173m (locus mgv1a0 06657m.g) derived from phytozome v7.0 (chr-ID scaffold_13; pos 2633328 to 2633965 reverse strand)
tcaagccaaaaattccgagtttgttttcaacacaggttcaccaacgtagcaactttaatcaactactttacgaatggcaatcatgttaaatataagttatttgattggataaagatatactccacagtatttgcttggccattggcttcccattgaagttctttaatttgcttgatgaggcaatttatagttttaggaagcctctgaaatgctatgtagcgtgctcaatatcagtttttattaatctcggaattggaaaacatttactagcttgcattagattttctcaagtaaattcattatcctagtttttcttgagaccttaaattttacatcattggcttgggaacctctgtatatcacatgctgcagtttgttagcttgaaaatgaaaatttcagatctggcatgttgaagctgggcacttgctagtcaagtattggagttcatgaagtattacttacatttggcatattccaaaaatagcaagatttctggagagtattttcttgtaattcattatgtcttctatgttctgtatgtaatgaagaatcagggtaccctagttatttatatctattttctaagttggcatagatgggctgtcagtgaaagttgttttgtgtatatattgcagtt

SEQ ID NO: 103220 - DNA, 199 bp, Mimulus guttatus
  Intron number 1 from transcript mgv1a024766m (locus mgv1a0 24766m.g) derived from phytozome v7.0 (chr-ID scaffold_57; pos 1223066 to 1223264)
ggcgatcaggtttcgtgttcctacttttgatgtttttttttgttcattaatgttattttcaccctcttcataatattcttttagataaaaaggataacaaatttgcattaaatattttgtcgtccgaattttcaaaaacaaatttgcaatttagtataaatctttatgatgcagagtgtggagactcgtattgtgacaa

SEQ ID NO: 103221 - DNA, 837 bp, Mimulus guttatus
  Intron number 1 from transcript mgv1a006178m (locus mgv1a0 06178m.g) derived from phytozome v7.0 (chr-ID scaffold_45; pos 1630475 to 1631311 reverse strand)
gctccgttagttcagttttcgatccaattttatataatcttcgctttaattgttttttaattaattaatttcgacttatccatgagttatcgatggccttgtttgttctgcaaaattttcccccaatttagttttattttgggtgataggcatttgctcacagtggttgatgatatagtatatattttttgttgtaattatgattgtaatttctgaagcccattcaattattgtgtgtgtttttgcagtatgtagtgtaaatttgagtttttttttttaccagaaaaaggcctaatttcaaatggtttgcatgcataatcatgatcagtagaataatctccgaatagagggaccgagttttataaagcaaaatggcattacgatttacgaagaactaagtcgattagtggttcaaaattagggaggaatgtttaacaacttgctattaggaaattagcaagaaaatcccataaccgaaagcatgatagctcgattaatcagagaaaatcgtttagtgacaacacaacaatttcgatatatatactcatagcaaaatgccgagaagtaaaatgcagatcaaacgttattcttatacacttgtgggaaagaaattttgacagactgaaatttgtattcatctcgaaatgccggtgatattctctcccttgttattattttcggagtgccgattatgggatcgctttctttcttgcagtgggatcgtatactacttgcatataccttcgtcatttccaacattaaacatcgtcgaatctttacttagattgttatttcaacgcaggagttagtgactgtgaacagttactgctctaagtt

SEQ ID NO: 103222 - DNA, 721 bp, Mimulus guttatus
  Intron number 1 from transcript mgv1a006062m (locus mgv1a0 06062m.g) derived from phytozome v7.0 (chr-ID scaffold_1; pos 4363656 to 4364376)
aagaggctagtaagtacgttaatttttttattttaatttttttttctttcagttatggtttctcaattaaggtttattcagctctcctggatcaacaattttttttttttgaaattaatttctgagcatctgttgttcattcgcaaagtaaatcgttttcattcatctgtgttaattaagctccatttcgtctgaagagtgattcaattttgattttgtttgtttacattttaacttgagcttttattcagttcaattgattttttttttggggaattttttttagcttcttttctaagatgaggattcttcagatgttgaattcgattcgatcttcactgtttttcaagttgttgtgctgctgaatctatctacattgtctatgcagccaaactgtttggtgaaatccctctgtatttgctgttgtgatgccattttattatattttgtttataaaataaaataaaaatttgatttggtttctagatctgaagttctctttgtgagtgggagtatgctagtgttcttttttttttttctgttactcaataaggcaaatatttagatctatttacactatctttctcagctcttacctcttttagaagggtagtctttgctcttgcagattgtgagtgtgaaaaatgtgtacaaacttcattaaacttattctcgtattttccttccaaaaatcccaggtagttttgcttttgctcctggt

SEQ ID NO: 103223 - DNA, 690 bp, Mimulus guttatus
  Intron number 1 from transcript mgv1a007837m (locus mgv1a0 07837m.g) derived from phytozome v7.0 (chr-ID scaffold_15; pos 361776 to 362465 reverse strand)
aattggctgctgaaaaattgtctcggcatcagaaggtatgtattaatccatcggaaatctctgttctatgttaattttgttttgttattacgattctttggattattcagtttcttcgtaatttctggcttttctgttatgtggattttttttggtaagaataaatgaattaaatcaatttgggcgccgtagatttgttaatgaagaaatcccctgtttgtttgcttgttgttttttgctgtatatctttttgttggggttcaatatgcatcatggataaaatgtagcattagttattcagaactcgttctggatatacgtttttcgaacttcattgcctcaattcagcataaaaattcctccttttatgttaatttgattacaaaagggttacttgccattagtaatttgtcaactgtttggcttcgtttgggaatgttgatgggatttataaggttgattgggttgtatatgaactttgtattgggtaaaattggtatcttggaaatatttttagagcacgttagcttacgaattaacgatcgttacaagaacatctgttcctgcccttctgtttctactcatgtttggtgttaggattatatcttcttgattaaatgttattgactgcatcctgaatctttttttttatcaggtaattaacaccggatcaattttactactatcaac

SEQ ID NO: 103224 - DNA, 793 bp, Mimulus guttatus
  Intron number 1 from transcript mgv11b011132m (locus mgv11 b011132m.g) derived from phytozome v7.0 (chr-ID scaffold_6 3; pos 590601 to 591393)
ctttaaatcaggtaataattcatgggtatgtatttttacagtcaatttctgtgtgtatagcttcgccgatgcgctgtctcatgtttaatttgtataaagatcatctttttttttatatgatttttattaatgtttttgcatttattttttgtaatttgtttgagttcataataggctgtaggtgcttgattcagaatctgataaaatttcgaaagtgccattcaagtttagaacttggtaatttgttcataggaaattgtgtgccctacaccattgcttatcatctcattcagtaatcgatactccctccgtttcttttcaagtgtcgatttagccgtgtaatctttttccccgttttgatcgtttggaacaactcgatgaatttagtagatcgttttaggaggtcctaatcaaatgactatagatcgaacctaaccaatttttttacagtacaatggttggctattcacagtctagctgtacctgccgtcttatttttttttttatggtcaatatccgcaatgcagttcatccaacggtagtgttactttcgagtttcaaggcataattattttttttttccaattttaccccaacattaatgatcgattaacgacacgagaaataaaagatgaaaaaacacaaaggggtaatttgatcaaataaggacgccccccacaactcaagactatttaataattttcttacttagtgtgcatcgggagtacatgttcatcgaaaaccacataaatcttttgtttttctaggttgacaaatctgatatcgttcgagc

SEQ ID NO: 103225 - DNA, 458 bp, Mimulus guttatus
  Intron number 2 from transcript mgv1a025963m (locus mgv1a0 25963m.g) derived from phytozome v7.0 (chr-ID scaffold_183 3; pos 5166 to 5623 reverse strand)
gagaggagttgctttttgtgagtcaagaggtattctctgttcttgatttttatgtttttttatttttatacaagaaatgtgttgtgaagataaatgggggaagaagcaaggatgaaatagagaagtagaaactaggtgagaacacaatggaagtatttcactaatcaacgaaataagatgttcggtatttattgaatgcggttaaatttcgggcttggtaatcttttgagatatgaagaactgcttggtgtgcattggaaggcggttgattttctgtgattaatggtgaatcaagtatgataacttcggaaatcaagtaaagattatcttgattcaatttttactttccatatatgtttatttttttgaattaaatcatggtttgtcgtgttcgatttgatatttacaagtatatatttgcagtccactttcaaatacaaggatccaatccgtggagg

SEQ ID NO: 103226 - DNA, 1012 bp, Mimulus guttatus
  Intron number 1 from transcript mgv1a001983m (locus mgv1a0 01983m.g) derived from phytozome v7.0 (chr-ID scaffold_3; pos 4036229 to 4037240 reverse strand)
acctcttgttgaagaattctgttgaggtaaattttacctttcggggaattttctctgtcaaaagcttacttttatttacagtttttgataacatgatttttccttgcaattgctaaactataagtgctgatgttacacttgatgcaagggcatgtctttgaacaatttgtgatcttggaaatttttttttagagtaatttttttttccgggttaatgattttttgtttaaataatttttgctgtgtttttccaagtcactagaagagctctatataaagtgatttgtttttttatattatttcagagtaaagataaatgacaattaacaatagtaattattaagtatttggattcttcaaccaggaacattgaacaatgttgagatgtaaatacaagttaatgccattgcatttattgtcttatgctcaaagcttctacacctgctgctatccttgttgaagtggatttacacatactggatttttcatatgtttcgagtaaaatcaacaaacatagtacagagtgaaaatgtgtgtgtctatactcgtacatcttgtgatttgaattgataaacttatgcgagctagtaattcagtgtttttgatggaggggtataacttattaaacatgaacagaaggaagaaagagaagcagtggagagtgaaaatccgtgctgacatttcactatatacgttaagcaaacgacaagttcatgagtctctcatgggtgattaagtaaaagcattgtaatcacttagactcaaaggacctctctatttaatagaatctaattcttacactgcgacttctctatttagtagattttaattcttgcttcgggagctcaatgagttgcctggctaagtagtcggaatatgaaatcatcttgtaaaaaatgttgcctttaatttatgtttccgtcttctacattttgttctaagaacatactatgatatgtttcattctcttcttccaggctggtgcatcattggaatctcttgccaaaggtgc

SEQ ID NO: 103227 - DNA, 236 bp, Mimulus guttatus
  Intron number 1 from transcript mgv1a001629m (locus mgv1a0 01629m.g) derived from phytozome v7.0 (chr-ID scaffold_166 ; pos 25872 to 26107)
cattagattcggtaattattctatacctgttatctgaatatcaattttcttctcagtttgtggtatggtgttgattttttggtatcgtttggcgtggatatacatacttgatcatagttgttggaagcaaaattgacttattattcaataattatattattttgtataatcttggattccgggaatttgattagtgttattttctctttctgcttgttctgtgatgcagttgttgg

SEQ ID NO: 103228 - DNA, 893 bp, Mimulus guttatus
  Intron number 2 from transcript mgv1a019368m (locus mgv1a0 19368m.g) derived from phytozome v7.0 (chr-ID scaffold_191 ; pos 391362 to 392254 reverse strand)
attacttgggccgcaattgcaatcaacactataaggtacacctctcattgctcttccattaagtctcctaatatttaatttattttatccggacatattaacatgtccaggtttgctaactaagaaattgcccatgccatactattttgctatgaagatcttgttgtagttacctgtttaagtcttctattcttttacctctaaacatgaattttatgaattaaactaggggtggtaaacgagtcgagccggctcgaactcgagctccagcccaaatttagttgttcgacagctcgcgagctgcattattttttatttttttaactttttaaatatatatatatattattaactaaatagtctataataataaatatttctactatttaaatagaaacaaatctatatttcttagataactcataataatataaaatattataataataatataaaaattaaaaaaaaaatatataactagagttcattatttattttataatttttttagtttcctataaataatttttaataaaaaaatgattttaattaaaaaaattaatataaataaaaaaaaactaaatgagctcgagctcgagccaaaaaaaaattaactcgatgagctcgagctcggcaacatggactcgagctcgagccggccaaaacagccgagctcggctcgttcacatccctaaattaaaccatgcaacttgtcatttattttcccttgattttctaagaatattgtccataattcgtaattaattatttgtttatcattttgacataggaaactctgagaatgtgtgggaaccgacatgttctctttaataacaaaacaaaagatgaagtccataaatcttaacaaggaaagcaacttcttgacttagtaa

SEQ ID NO: 103229 - DNA, 463 bp, Mimulus guttatus
  Intron number 1 from transcript mgv1a007984m (locus mgv1a0 07984m.g) derived from phytozome v7.0 (chr-ID scaffold_261 ; pos 226497 to 226959 reverse strand)
gtcttcttcgatctactgcaagtctgcaaccttaggtaaaattccaccttcattttattcttccgtcgtattattgaaccaattaaaaaaatataaagaaactaatttgcggagagaaaaatgaaaagggagtaaaaatctaatctttggaaaaccctagtggattgggactgaagagtagtacttaattttggactttgcttgaataaaagatatttcattagtgtttgaactttgatttatggccttctgtatttgatgttattctgaattatttgaacttctgtttgtacatacatgctacgtcgttttgggtaagaactggattttgatttaaattttaaattttttttttttcattttcatcatttcaaaaatgaaagattagaatttttgtgctggattatgatttacgactctcgtttggttttttcgatatttaattgttgttgtaggcggttca

SEQ ID NO: 103230 - DNA, 554 bp, Mimulus guttatus
  Intron number 1 from transcript mgv1a023855m (locus mgv1a0 23855m.g) derived from phytozome v7.0 (chr-ID scaffold_22; pos 1062218 to 1062771)
gatagtaggtaaataaaagtttcaaatgatttatccaaaattaaatgtataatttcttatgggttcgatttagaatgatcgatttgtctgaatgctgcggccatggatggatgtattatatagaaacaaaatctaatcaagattcaatttttattgtgagaaattatttgtttctggtttgggtttttttgattgagctgcggtttcagtcagctacagttgattagggttcttcaatctattgtgggctcaatcgaataatttgattgatgggttgggtttcttttcggacaatgcaatttgagtacgatgtaaaggggttttgctactgaagtgtaacatgttcttctgagcttataaatttaaatgatgttgtagtgattagatgtttctttcatggataagtaatcctctgtttctgtagaatattcacgaattgcctttattctgtttcttggaaaatgcagttctgttttttttttttgggtttgggtttaccgactattttaagtgatgcagggcttggattatcgatagtcggggtcttgcgaaaa

SEQ ID NO: 103231 - DNA, 716 bp, Mimulus guttatus
  Intron number 2 from transcript mgv1a008762m (locus mgv1a0 08762m.g) derived from phytozome v7.0 (chr-ID scaffold_132 ; pos 80595 to 81310 reverse strand)
acttccctttgatagaattcaagaccaacaaccgggtacccataaatctttagtacttctgttttattttattagttggatatttagtagtgaaattaattttcgggatcgcccctttttttttaaacctttgtagaagtgaaagaaacatatgagggcaagatccgttcgtttcttggttgcccttatttacttcaatttgatttatgaagctcttgaagtactatacaattttgttgtactatgtttgtggcggatcttttaggcctcgtttgcttacttatatcggattacattggattaggtgagattgaattaatatcccactgactacttaattgttttgttagtaagatgtttgattcgtcatattaaatcttgtattaaatttgttaaattctggtattagatgtgaattgtctacaaagtcttttaattaacaaaaataagatattgttttttttctcttttaatcatccccacaaaattaatcgcggggagggtgctactaacttaaccaaataatagcatttaattacgggcttttagtgcagtatcgggcttgactaaatacgaatctcatcaaccaaacatcttactagcccctactatttagttaatagaggcatagagcttaataacactaagcaaacgaggcattatagtattgtatctatctttacaagaagatttctattacgattttccagagcgaa

SEQ ID NO: 103232 - DNA, 541 bp, Mimulus guttatus
  Intron number 1 from transcript mgv1a017116m (locus mgv1a0 17116m.g) derived from phytozome v7.0 (chr-ID scaffold_66; pos 261026 to 261566)
ttattcccgagatccgtaacaggcgctccgacaaggtatacatatataactatatgtataccaaatatttcaaatgttgatacaaattaaatttaaaattttcttttttcttgattatattaattattattattattattttagtgtggccttcatttggtaataattgtgtgcccacagcccacaatcttgatttaatttaacaatttgcatggtgtgggactccattgttccctccaaaaaacatttaatattctctatacacaataatgtagctttaatttcttcagatttttatagcatcaacgtaatatattacacatttaaaaaaaatatccatgttccacatgtgtatatctatatataaatataaatacataagtttttaaataagatgatagcccttatattaaattgatcatatgtagtataagaaaatgaatttttttttgtttgatttttattatatggggaattaattaaattaaaaatataaaatgtggcaggtttcgggttcgaaagtgttgcaagagacgtgtaa

SEQ ID NO: 103233 - DNA, 965 bp, Mimulus guttatus
  Intron number 1 from transcript mgv1a017812m (locus mgv1a0 17812m.g) derived from phytozome v7.0 (chr-ID scaffold_343 ; pos 37679 to 38643)
aggaagaagagaagaagagaagaggtggtgacggctaggttaacctagtgtctgataccatataggagaattaggttttggagaaaagagagaatgatatctcttacgtatattaatcatatatataggtacatgtggaaaaccctaacctattacacaaggtaactagaataaataataataataataataataataataataataataataataataataataataataataataataataataataataataataataataataataataataataataataataataataataataataataataataataataataataataataataataataataataaatatgtataatatatatatacgcacgctaatacacaatgttgattgtattttttttctgacattatcaatccatcattccatttgtataaatcaattacaatttttttgttatttttgcagttgattgttatagttcggattcttctgttgaatcatattgtgtttcattgacaacattacgcttgtttttgttatttttagtagtcaatttcattgctcaacaatgatttttgtagtcgtttccttaatcgaccatgctttatcgtagtcgattaatataaatgacagataaaagatataaaaaagatttttgtagtcgttctacttgccttaatatattggaagaaattcatgaatggaaataaaattatggatatatataatataattacatattaggaaaataaaatttcaagtttgaccctagaaatttatttccttctaaggccatccaatttaatttaaaaacattgccaatggagaactatataaactaatctccatttttcttcacaacaatcaaaatatttcttcaattttcattaatggggttcacttcatttctatgtatcatttgcattctcaatttttatcaatttgtgaaagcagaaaatcttg

SEQ ID NO: 103234 - DNA, 602 bp, Mimulus guttatus
  Intron number 2 from transcript mgv1a025108m (locus mgv1a0 25108m.g) derived from phytozome v7.0 (chr-ID scaffold_24; pos 1271467 to 1272068 reverse strand)
ggatcttccaagtaagtgtgtgtaatatttctttttttttttttaggttaaatattattttgcactaatttagtgatcctttaattaattttatgtgatttatggcactaattattaatatatctaggttactaaataacttaatttacaacttcaatatcatatgttccatgtcttgtttaccccttgatatatgaattgccggagggtttttttggtacattttgaagttcagaggggtaaaagtgtcagatgaataatgtaaaattatagtaacaatcttggttgttattagatgtagaaaaatgctacaactagagtccatacttaaggggtttggcatgagctcgattagatggttcgacttaagttcgagctcgagcttgccaaaacagccaaaacgctgctcgaactcggctcgttttgcaaccctataatctaggacattaattttggaatttttgaattcttgattattacttttatcaaaatcaagagttacacatcatggattcttgaaaatataatataaatgtttttttcttttttttcttcccgaaatttcagaatcgagtgacgtaggggacgacaaggagtggtac

SEQ ID NO: 103235 - DNA, 680 bp, Mimulus guttatus
  Intron number 1 from transcript mgv1a010990m (locus mgv1a0 10990m.g) derived from phytozome v7.0 (chr-ID scaffold_90; pos 100806 to 101485)
tgtacattaatcaatcccgtatcgttattttattttgttcctagaatggagacccataatttataattagggatagaaagaacacaattgtgatttctgatttttctttttctgctaatctttttggttaggaattgtaatataaatgaatttatgatttacgacaccatttaatttatagaaataaacctgcaaattttactttcttcttcgaaaattgcacttgtggaatattaatatcattatgcattttatgttgcctctaaatcaaattggatttttttttcattgttaaaataaaaaacttcaaacaatcattccaatttttgaatatctaattttccatttcctcccaaaaaaattagaacaaaatttctttatttaaatacttttttccccaaaattattaattctgattcgatctgtattgtttttttctcctcaaaagttaaatactacatgcaccttattatttatattggatggatttgaaccgtaaatttaattatataactatttagtgaatacacttaaacatgtgtgtgactcgatgtaaataactatgtgtaatatcaaaccgggtttttggtctctataaatatcttccatgtacaagttgacaaaaataaaataaaacatcaaaagggaaaaggaaaaaaagaaaagaaaaggagagaaaa

SEQ ID NO: 103236 - DNA, 796 bp, Mimulus guttatus
  Intron number 1 from transcript mgv1a002086m (locus mgv1a0 02086m.g) derived from phytozome v7.0 (chr-ID scaffold_21; pos 1236113 to 1236908 reverse strand)
ttaagcgcgtcataatcaaggtcgcgttcccagttttttttttttttttctttttttttgttccaacttttgattttgttttgcaatgtggttttatcagtttcgtttgattctattgtgtgtgtctgtgtctgtgtgtgttttattttattttagatgttatttgtgcatttatacttccatgttttggcagaatagtacttacaaaatcaggcaaagattgaatttttcggaggttttcggtaattgtggaaagagatattcgatatcaaatatttagtcatatatatatatatatatatatatatatatatatatatatatatatatatatatatatatatattacatttgacaacttgtcgtaattcgattatcttgatagttttgactgtcggtttaattaatgggatggccgacgttcttcgttccttccctatcacggctcgaacttattttttggaacttattttgtttatgagaattaaaacttctagataaaaaaaaatgttctcgaatgcatgcagagaccgctcgttagggaaatcaatcgtctgaaatcggaaacttaatttgctaaatctgtgattaataatccgaagtgtcttattatgacagcataatacaagatgctaccatttatattgatttttcattatggcacaaatgtagatctacaaagttcgtattttgcttacgtactcaaatttgagttttattaaaatccacgtgtttgcggttgtattgataatttcatatttattaatgcaggtcggaactgcggttgtctctagag

SEQ ID NO: 103237 - DNA, 735 bp, Mimulus guttatus
  Intron number 1 from transcript mgv1a009929m (locus mgv1a0 09929m.g) derived from phytozome v7.0 (chr-ID scaffold_66; pos 29442 to 30176 reverse strand)
gccgccgtaaatccgacgccgtcgtcggacacagcgtgagtactgtaaaatgcatgcgccggtgtttgaattcatccaggttttttttttactagaggggtaaaattgtgattaaaggagctcattaattaatttccagaaccgtaaaagtaaaacgcagaaaatgagaaaagtcgtccactgtgtgtccgtacagtttattggggaagataggtattttcgaaattaaagcacaattcagaggctattataggagagtagagccgctatttattatttataattcctatagtaaataattaatactttttttttcaataaatttagatatttaattttccacttaaaacacatgaatatcatgaataaaatgcacgttgaaccgatgaaacaaatttagatatttaattttcttcaattatatattatttctcaatttgcttatttccctattttttttttatgaattatgatgtcattaattgaaattgagcattcagtttcgtgttagctaatttattgatcttgggaaaaatctcctatatatcagaagcttttaacaacttatcgtaatatggcatgttaaaatcgtagagggttttgctcttacttatcgataatcagctatttgaaggtgttgaatgataacaatttgtagtcgataatccttttcctgtgtcgatgtatttattaattgcaggagcaaggctaaaaagaaaggagaaaagcgacttc

SEQ ID NO: 103238 - DNA, 262 bp, Mimulus guttatus
  Intron number 2 from transcript mgv1a007283m (locus mgv1a0 07283m.g) derived from phytozome v7.0 (chr-ID scaffold_16; pos 152117 to 152378 reverse strand)
tgccccaaggtgcactcgttgcagctgagaaaagagtatcctttctccgaagaaaatttgtaactcttgttcaagtttttggtgttgtaatttatctgcttacaaaagtatttgtttataaaataataacgcatacatgttttgcatgatgtaatgactgataccattgttgctgtatgcatcattggagtttgattgtctattgtgatactttaactcttcttcagatataaagaagcaaaagaaaagggtcttgataatt

SEQ ID NO: 103239 - DNA, 873 bp, Mimulus guttatus
  Intron number 2 from transcript mgv11b023451m (locus mgv11 b023451m.g) derived from phytozome v7.0 (chr-ID scaffold_5 5; pos 717424 to 718296)
ataagtacgtacatgtttttttttttgttctctcttcccaaaatgacaatttcactaaaatgcaggtgaattatttgatttgtatgggtagtgcctaggggtgtaaatcggactgatcggatttgggtgtttcggaaaagttccgatttttttttttttttcggaactttaaaatgccttccgattccgagtcagaaagtttcggaatctaaaaactcattccgtttccgaaaataattccgggcaatttttgggaggtttccagatttttcttttttgtggaaattccagaatttggggatacggaaaaaaaaaattgtaagccaaaattgcaaaacaaacaaagattcaaagaaaagattttcaaaacatcttcgtaaattttcaaaaatcaagaatccaatgagagtgaatttccgatttccgccggttccgatcggtagatttccgattttggaacgattttttgtagtccgaatactgagttagttcttttgctgcttaagtgcaaagctacatagcgaagtatatatgtattaacatatgcatacgtttataatatttcatgaaaattagttaattctgcagttttttagtgaacttcattgaactgctgtctacaagtcaagatttcgtgctctaaataacgttcgcctgtggtgatgtgctctattatatgctttattctcgcactagcacttaaatgaaataaatgtttttcgagtttgtttgatgtgctttacacttggtgtgcctaatgaattattcgatatctcttgatacattttccccttagtgaaaaatagatgcaatgttttgcttacttctccttttgtatttgcaggatattgcccgagtcgttacttcgggaag

SEQ ID NO: 103240 - DNA, 589 bp, Mimulus guttatus
  Intron number 1 from transcript mgv1a006340m (locus mgv1a0 06340m.g) derived from phytozome v7.0 (chr-ID scaffold_4; pos 1036377 to 1036965)
cagaggattttgttattatcctcatcaataggaaggtgagaatatataaatatataaaatgttgtggttccagaatttggttttacgcatttttcacgttcttctatcacgctgttcatttttgttttcatctccgaggagttctagggtttatgcgtttgcaggttattttgttttcaatatctgactgtttagttagggaaggaacttggtgaattgcggtagtgtatactgcaagaaattattagcctttttgctttttgttgattttttgaattatttgccgactgctattgtttgttctgttttaattgattgtcgttaatccagcatcatttctccccatgaactttatatttgatgattttggcttctctaaattaataatccattcctccatgtatatatacttgcatgtatatttatgtatcttatcctcatgttgtttaaatatatttttggttgattttgttgctttttttgcttcaattattgtacattaccgtaataagactgcgcccaataccgcgtctataaatcaataatccaacctgcattgtaacgcctctttctccgacctctgtagatc

SEQ ID NO: 103241 - DNA, 683 bp, Mimulus guttatus
  Intron number 1 from transcript mgv1a006286m (locus mgv1a0 06286m.g) derived from phytozome v7.0 (chr-ID scaffold_11; pos 65072 to 65754)
cttctccatctccctcgaaaaccctttttctccaggtccgttttttctctgttcatgtattcacgcacaaacacgtgtgtgtgtgtgtgtgtgtgtgaatagatgggtatctatgttgtgcaatgtatttgttcttaattgagattggggatggtgggtggtatttaaatttttaaaattttgttaattaatataattaattaattaatacgatgccgttgcatttccaagcactttcctgtgagcataatttttttttgaatgattattttaaattggttgttcttgaggagaatatgtcatatcagctggtaattttacagcccctttttttatttggaagatatttgatttattctgtttcttgtctgaaaatggagacgtgggtttttcggtttaattgtttattaaacttatcattctgctggtttccttttttaattttacgatttttcgattttccgataaaggttgtgtatagattatagatcatgtttattgttttatttgatcgataatttcaattgtttcaaacgggccttgttgtaataaatcgagatgccatatatgatcgattttcatggtatatccgattctgcagtatcgagttttagaaactagaagtaaaaatattttcacaatggtgtttgcagagatttagagacttgagtaaaattctcaca

SEQ ID NO: 103242 - DNA, 368 bp, Mimulus guttatus
  Intron number 2 from transcript mgv1a008615m (locus mgv1a0 08615m.g) derived from phytozome v7.0 (chr-ID scaffold_22; pos 277858 to 278225)
aagattacgctagtaatattctttccccaaattacaattttttttttgcaagcttttgatcagttttctaattttccaacaatcggaacagcttttttagggttccaaaattttggggattcagaaatcggaatcggattccgaaaattccccgttggattcgattcgtacgattaccgaccctagattcaacccctgaattgttatgtgtgtgggtgggtaataaagatttggatatatatatatatatatatatatatatatatatgacttgatcttcattcaaaacatgattagagatcataactggaaatgtatgtttgttttgtttagcagagcgaacccgaacccgaacccgaggctgaggc

SEQ ID NO: 103243 - DNA, 976 bp, Mimulus guttatus
  Intron number 1 from transcript mgv1a026345m (locus mgv1a0 26345m.g) derived from phytozome v7.0 (chr-ID scaffold_96; pos 727948 to 728923 reverse strand)
tgcggagaaggaggagcaaagaaggctggctccaggtaattccgacctggcaaaagagatcatgttactcatacaaaataaggtgaaaccaatgatcgaaaaggccgccgaggtggaatttgctcagatgcaaatcggagacgaagctggctcagacgatgaagaaccgccggcaatcctgagacaggtaaaatacatacactttcatcatcttcctcgttaatgtcaattataataatagattttttttttgactatatttatgggtgaaaattggaagcttaaaataaatttagcattttcataaaatttcaatcattttaaagtaaaattttattagtcaatagaaaggggaaaaatataagaaatttcattttgaatctggacttcaaatttattaattttgcttttgattcgattctatatatatatatatatatatatatatatatatatatatatatatatattttatctctttcattataatttctaaaatttgtaatgaaaattgatattcttttatttaaatgtataaatatgtttacaacgataatattagtttgaccctttgatataaaaaaaaaaactgtgtttcctattgttaatgttcacactaagggcaaaataaataaataaatacaaaatcacaaaagaacaaatattagaagttgatggattgggtggttgataattgataaattatcatagtataaggggtttatttgatgtagacggggtgaaatacaccgggtgattattaaccgttgatctgcacataatcacacacacccatgtgtatgtgtttttagtgagaagttatttcacttaatgtttgttgaatgactatctcaaccaaaagcttaagctgttagtgaaatatatcatttaatattttttatgtccaataagtatcacaatattaaagttatctaatttataaatacttgatgaggtcaaatgtttactaacagta

SEQ ID NO: 103244 - DNA, 694 bp, Mimulus guttatus
  Intron number 2 from transcript mgv1a021033m (locus mgv1a0 21033m.g) derived from phytozome v7.0 (chr-ID scaffold_104 ; pos 208032 to 208725 reverse strand)
ttaaatcccatttacaggtaaatcaccatttcctcactttgattatttttattaattaattaattatatatttttcaatttatccaattacctaaaataattataagccatgaagaattgttagtaattaattaattaattacactcgtttttattttaattgacattacgatccaatgctttttttcttggagagatgtgtctcatttatgtgtgtatgagagagagagagagagagagagagagagatacagacaaacaatatagccaaaaaaacgaagtaataatagacctatcttcctgaagaaatggctagaaaagaaagacaaaagtacaaaaaacactatcattacacaatcatatgcaaaccatgtttgtgttaattaagagagaaacccttttcttattctgccaaattaattcaaaacccatgtttaattaattaattaatttaacctccaaaaagcagacatgtatacatacatacatacatgcatgcatgtgtattatgcatgcatacatggcatcttcttcagtactcttcttctttttgtacgttttgacttttgactaatatatatcctacctttagcgcgagtctatatgtatatatgtatgtatatatatatatatatgtatgcatgtatgtatatgtgactaatattggcatgcatgattttgtgctttttggcag

SEQ ID NO: 103245 - DNA, 436 bp, Mimulus guttatus
  Intron number 1 from transcript mgv1a022446m (locus mgv1a0 22446m.g) derived from phytozome v7.0 (chr-ID scaffold_261 ; pos 57210 to 57645 reverse strand)
ggggtgctcgaacttctgtagttgttcgtagcccggtaagtgctttatccaaaatctatttttctttttgaatttttgaattttttttgaaaataattactccttttgtcctaaaataaatgtctttttgggttgttgacccacaaattaaaaaaaactaacaaatatgcgtcgattttaggaagaaaaaaaatcccatatagaatgactaaaatatccatgttgtttttattttatttccactaattctctcaattaactaatagtaataagggcgaaattgagaaaatggaaacaagaaaaatttcatgaatcggcagttaatttagaacgaattgagtacgtaatttagcaaatgcacactgattttttattattattatttttttaaattatttcaggttcatattcttagtgaggagctggtgaaacttgg

SEQ ID NO: 103246 - DNA, 620 bp, Mimulus guttatus
  Intron number 2 from transcript mgv1a006713m (locus mgv1a0 06713m.g) derived from phytozome v7.0 (chr-ID scaffold_1; pos 3934585 to 3935204 reverse strand)
ggttgaaacctactggggcaacgtcaacccaatcggtgcgttgcgtatacaattctctgttttcttcatttttcattcgattacagtacacgttagcgcagcttaacagtcgttgctaacgtgagccggtgtgctttttcctctgtaataaattttctttgacacgtctttcgtcccacagattttgtgtttttatagtgccacgtgtgcgtcggccagtcggtttccatcaccgcttttgaccagtctcccatttcaaattaattaacaaaatatcttataaaacctaatattaatcagatttttcttattccaatttcaaccaccacaatctaccgagtagtttggtggtggggtgggatggggggttttagcccctggtctttgattaatgaaaaaatacaacatgggctgccggagggtaaaatggtcatttcaaatatttggaagtctctgtgacgtgaatctgaacagtgacttgaacctgacaacattagtagctgttgtctttttcttttattattttatttttctgataaaataaatgttgtgtttaattaataacgagagagatgtgggatgtggggttttgatggggacaggtgtccgaagctgctacg

SEQ ID NO: 103247 - DNA, 360 bp, Mimulus guttatus
  Intron number 1 from transcript mgv1a005906m (locus mgv1a0 05906m.g) derived from phytozome v7.0 (chr-ID scaffold_7; pos 2628263 to 2628622 reverse strand)
ccaccattataactggttttttgggctctggaaaggtttttttcctctaattttatcctctcttttttttttctgtttaattgcaaattagaagatgggatttatggattgtgttaaattttgcagtatatgataaactgaatatatgataaataatggtgatattgaatttaagattttcccagatgttaattgttgggaaaataaaaataaaaatcgaatcttgtgttctttatgttgatttctgttaaatttctatattacagcagtgaattttgattcttgactaatttaccctctcacttgtgttttaattctttgacagacaactttgttaaaccacatattgaccgccgatca

SEQ ID NO: 103248 - DNA, 342 bp, Mimulus guttatus
  Intron number 1 from transcript mgv1a013825m (locus mgv1a0 13825m.g) derived from phytozome v7.0 (chr-ID scaffold_121 ; pos 596746 to 597087 reverse strand)
acttctcagcgctccttcacgctcactctcttcgggtaagaattttttatatttacgtaaatcgcgcatatttctttgcgtctcgctgataatttactgtaatttcttcattagcaatgttaaatgttgaattcgaataaatgaattgattggatacggaacttgttttcgatcaatttaaaatcagaattactgatgtaatgagaaaattgaagaaagtcttaatcttggagctaacagatttaaaaaaaattttaaaaaattgggcattttgtttttgattgttgctaataaatgtgatttgcaggtgctattgagccggtggtcgagtcgaaaggagga

SEQ ID NO: 103249 - DNA, 641 bp, Mimulus guttatus
  Intron number 1 from transcript mgv1a004580m (locus mgv1a0 04580m.g) derived from phytozome v7.0 (chr-ID scaffold_40; pos 1189465 to 1190105)
gcgtatttcattcagatacaggtactcctttttttttttctctttttttttttgaagtatatatggaaaaaatgtttggaagtgtgtaatatcgattcatttagaaaaaaaaaaaaattctggtggtgttttggatcggaataaaagtatttgttcactgatttgggtataacacactagtggcagttgtactgcttgaactgttacgttgtgttcaatttatgtgggattttttggtgttcttttgcgagaatgtagtttataattttgttttttcacttcctagttttgtaattccaagttgatggcaaacatattttgatgctgtttgttaattggatctgactagtatttgattttagattaacccatgaaaatcaagcaaatattgttaataatatatagatggatactcgtcgtttttgttcgagggaaatgagctattgcagttgcttgatttgagtttatattaagttacaagacataactaacagaaaaattctcggttgccattgttaagtttattactttagatctcttcagatctgcttctgcatgagaaattccggaataagttaaaaaacttcttttttttccatgttgcagggcttttgcatttgcttactcctcgcccttggctg

SEQ ID NO: 103250 - DNA, 471 bp, Mimulus guttatus
  Intron number 1 from transcript mgv1a023622m (locus mgv1a0 23622m.g) derived from phytozome v7.0 (chr-ID scaffold_82; pos 249849 to 250319)
tatcgaagggatacaacattgttggtctttcccaggtatataataatccataattaactctatttattatcacattttccctaattaatcctcatcttgttcttaattatagtgtcacgtttatttgatttataataatgtaaactatttattccatgcaactttatttattcttttatcctcattaatgaaattgataaaataatagaaatgatattaaagaggtgtgtcacattaaatttaattttgagatcatcttctatagttaattttattttcattaatcttatcttaaaatcaaatgagacctaattgtataacacatttactgattttatgttttttttttttatctcatttcgaacttttcttaaggtagtaataagttataatgttgtcttattcgtccttattacatcttttaatatactttcaggggactctgattggtcgaggaatcatagagttttg

SEQ ID NO: 103251 - DNA, 357 bp, Mimulus guttatus
  Intron number 1 from transcript mgv1a013013m (locus mgv1a0 13013m.g) derived from phytozome v7.0 (chr-ID scaffold_80; pos 929393 to 929749)
aaccaggtaccatcctcctcctttccgcatttaaattacagttcatttcaataaaaaattgcgtttctaattttatttttctttctgattttagaatccgtcgataccaacaaataattcattaaaaaaaatacgtttcagtatattgtgaattatttatcctcatttgattcgtgttttttttttggagtaaaatgaatcaaggatcgacgtatgtgcagaaaatactatcaatcgaaggatatatttatggaaactatatatatatatatatatagaagagatctaagtaatttaattacgtttatgaaaatgattagtttatttaagacaatagtttgtgatgaagcagtttct

SEQ ID NO: 103252 - DNA, 793 bp, Mimulus guttatus
  Intron number 3 from transcript mgv1a013013m (locus mgv1a0 13013m.g) derived from phytozome v7.0 (chr-ID scaffold_80; pos 930074 to 930866)
aagaagagagaatcgaacaagatagtgcaatcaaggtgagttctgtaacttaatatctcgtatctagagtttattattaggaccgacagttttattatctttctcactaacggatactcgtgatattgagaaacttagttcgtcgaaaagtattagaatctaaacattttatgtcgatttggtacgtatttgctgtgacttgtataattgtctgcatattgctaacgtcaaaatgtttgcaggacttgataattctgcatatactttatttggttattctttggtctgtatttgatttgatggcgttagttgagttaagttatggtttcacgttatgtggtttccgggtttaattttgcttcatcagtaaattattgggcttgtctgctctcattttgtatcttatttgggcttgctcttgtaaatatagtgtaacacaaattatttgtcagcgttaaacttttggaaacttcatgtaatgccgttagatttacttgtctgtatattgtcagtaacgtggttgtgttgggtaaatgacaatagttttgctttcctttttcatttaattttgaaagcgttcgtccaaagtttggtgaatataatgtaatatggtttgtaattgttattacgttggattgtatcttgctttattttgatgcagacttcaattcatttatttcttctactcggacttttaattaagtttatgttctgtttcagtttacttcttgaatttttgatagctgaattaatgagcgtctacctacaggacttaagcagtgaagtttacttt

SEQ ID NO: 103253 - DNA, 769 bp, Mimulus guttatus
  Intron number 1 from transcript mgv1a004241m (locus mgv1a0 04241m.g) derived from phytozome v7.0 (chr-ID scaffold_25; pos 878570 to 879338)
caaaacacctgccgccagtactcaccctataccaggtatatggtacattgttttgattctgctatttgcattagttgtgttctgcaatgttttttataattttggttgaatttttgtcattgtaaaaaaaaaacaggattgattgctcagataaattttgcgttagtcgtgttggctaactatcgaatggtactctgtcggaactatatcgtcatgctaatatgaatatttagaaaaaaaggcgaaagaaaatatccgtgttgcatgttatatattataaatgtaatatacattctatgattttaacacaactcaagttaaattttccgtttgctaggaattcactgttggagagtcgagtttcgttttcaaatcagaattcagtgttttagttacttcaaaatgtgtgaattcggtacaaaatgaggccctaaatttggggctttgagaaactgcgtggtaaactttaaatatgaagaatattaatattagactcatctcatagaagtgttggaaagaaaactatccgagaggtagtagaggttgactataaacttcatccctctctttgagagcagaatggcgtatgtactttttttttttttacttttgtattttatgtatgcataggaaggacaatctcagtgaatgaattaataatgcttgattatatttctatagaatctgtctctttcacgtttctttatgtattcattcttctattgtatgtatagttctgcccccactgcgcaatacaaacaatcagcca

SEQ ID NO: 103254 - DNA, 973 bp, Mimulus guttatus
  Intron number 2 from transcript mgv1a019170m (locus mgv1a0 19170m.g) derived from phytozome v7.0 (chr-ID scaffold_6; pos 3928774 to 3929746 reverse strand)
caggtttgtatgtatatatgttaaccacaaatttcttcgtctgcaaaatttaaacacgggaacaactaaatttattatcaaacgaaaaaatgagattgcaatctctgtaaatttctctgatttttctctcctaattcaattcaagggcttagaagccttctatagtcgaataaatataaacacattgaattcaaatatgttatcatgaattcgcagtggagactcaagacttgagcttccgtgctcgatatgtgtctatttgagttttttttttttttttttttaataatgcactggtggccttcttttataagcacaaactagggtttcttggcttgaagcataggccgccgggacatttataaagctcaaatatattatcgacttttaatatttgactctctctctctctctctaaaaacacatactaggcaagagatgtgctgaacgaagcacagattgttgagttccaggaagctttcactcagtttgacaaagatggagatggtatttatttttttgcattttctcaatacttatacattttcgggtttcctatatcattcgattctaaataagtatcggtgtgtacatacatatcaagaaaattaataaatttgattataatttttagaaatatacatagaaagtgactaaaatacccttaccactgattacaattaacgcatcccagggtgcattaccatagacgatctttctagaatgatgaggtgtttggatcaaattattccaactcagaaagagcttcgtgacataatgaatgaaatcgattcgaacagaaacgggaccatagaattcgacgaattcttgaaccatatggccaagaatttaaaggtttgtattagtgtgggtgatttttttttaactttttttttttttgtttcaatgtatgatgcatttactaaataagcatgtttatttaatttttttaatctgaaaattgatgcagaca

SEQ ID NO: 103255 - DNA, 678 bp, Mimulus guttatus
  Intron number 2 from transcript mgv1a010351m (locus mgv1a0 10351m.g) derived from phytozome v7.0 (chr-ID scaffold_161 ; pos 394481 to 395158)
gcccggatcttgatcttccgactctcactaaagaggtattcgtaattgtttgtttttcgttaatttttagcaagaattagggtggtattttgcagggattagtgtgattgatataatttatttggtaggtgataatgttgattagaattatcatgaatcgaatatgatccagtaatgcgagaatttatgactaaacgaattagcccttttgggaaaagaaaaattttggaagtgaaaaaatagttccaattccgttccggaaattttaggaaacattagaaatcggaattccggaaattggaatgaaattcaaaaatcggaaatttttggatcgaaattggcggatttcagaatttcaaaatttttagtcacttataatataaaatacataatcatattcatatttaaagtgtaatttttgaaaaaaaaaatcggaaatattttcgaaaatattcttgaaattgaaaattggaactttgggaaattcctttccaatttcgactaataatccttaaaatagaaaattctcatgcaaaaatagatttttcgtgttttcttgaaaggtggatagttggatgagttatcgagatttttttataatccgatcccgtttgattaggaccgtttgattcaactcttattatgttttaatagttcgagagaagattggattctcca

SEQ ID NO: 103256 - DNA, 881 bp, Mimulus guttatus
  Intron number 1 from transcript mgv1a004201m (locus mgv1a0 04201m.g) derived from phytozome v7.0 (chr-ID scaffold_24; pos 1862739 to 1863619 reverse strand)
caccgatttcggattgtctgttttcatcgaagaaggtgcgttttgtgtattctttgattagttatgattaattaaataattcgactttattggatgtttggtagtataatggctctaatcttggctaatcttggttaattgtgagattatttcttagagggtgtttggctaagcttataagttgtttttaacagcttacaagatgtttaagagtttataagctcttccaaagtgtttgtttttttcttgcaaaaaatcataaaacaagcggctagagagcttataagatcctttttttttttaaaatacctatactccatctttttgtttaagatcttaaaacaagtaaaaacaacttataagctcattatccaaacacttccaaaaaattaattttagaaataagatgtaacagcttatcaacttttaaaacaacttatcagatgttgaaagccaaatgggctcttactatatagtgattgatggagaatgtgtatgatctttattgaagtccttcgtgtttcttgttagtttgtgatgtattcttcgatacacaagaaattcaatttgttagatctccgggaaaaaagaagtatttagtaatgacatttgatgttacaatatgcatcatggttcttgatactattaatattctccttctcgttatgaacgagagttgtaagtaattatattaactatcggataaagttgtattatttaaaacggtaatatatcccatgaaagttatctcgacttatataaagttggggcaaaatttaaactttttcgatttacttatctttgcatcgatgttatgctgcattagtaatcaaatattttttccaggtaaggtataccgcgatatagttgggagtgcgtac

SEQ ID NO: 103257 - DNA, 717 bp, Mimulus guttatus
  Intron number 3 from transcript mgv1a013298m (locus mgv1a0 13298m.g) derived from phytozome v7.0 (chr-ID scaffold_85; pos 935 to 1651)
catcttggagaaagtgttggtataaaaaccttcttcgttttcacttatttgtttttgtactcttgcttcgttttcaagttataatgacctagttcagccatgcatattattcatacttatttcaatatttaagtgtgatttggaaaaccttgtaactagtttagtgatcaagtgctaacagttttggtggtaagatttcgtacgcttatatgagcagttatcgacttcgtggaaaggcatattcttaaaatcgccaaaataatttgacctgtatatcaatcgagaagaaattggtagcctaccgtcaaatagtccctctaatctgcttccctaattattttgacgattatagcataattgatgagaatttactctcacttcactttttctagctgtctcaaaaactcggaaacacgaaacttgatatgttaaggcttagtaagtggaaattaaagacaattgtaactgctgtgtgcatctaattttgttatacaccacttggtttacaaaaaactcgaaagatcggcaagaatgatatgatttttggggtggatgaacatgttaattctgtagagggtgttctttttctttcagtcttgtcgttttcgtagggttttttttttccctttttcttttttttctcctagtatttctcgttgattgtctattattgattcgtcagctattgctcgaactgtgggacatttgtcgaaaagt

SEQ ID NO: 103258 - DNA, 876 bp, Mimulus guttatus
  Intron number 1 from transcript mgv1a012161m (locus mgv1a0 12161m.g) derived from phytozome v7.0 (chr-ID scaffold_163 ; pos 490662 to 491537 reverse strand)
ggtgtttcaagcattcgattttctattggtttcaggtacacttaattgagttctattagtttcatacgaatattccagtttgaattcatgttcgtaaaatccctaattcacaaggtaggcgtaccttgttaattagggattttactttcttcattctccgattcgtttctctttccttttttttctcgaacgttttgttgataattgttctggtaatttaatttgagatcttaattaaggattttagggtttgcaatatcagttttagtggttatttcgttgtatttagtattcaattgaaaacaattaattagttgtgggcgacttaagaatgagatgatgacttcaatcaaatttgatagccgatatgatggcaatttatcatgtattagctctagctgatcattcttcatcattcctatttattcgttttttttttcgtttcttttatcccccgctacatacgattgctgatatgatgactagaataacttgatagccaatatgatggttatttatcatgtattagctctagctgatcaggcttgtttcctattaacttccgatttttatttttttttgattttttattgattttattcctcgaatatatgagctgatatgatgactagaatactttgattgcctatatgatggctatttatcatgtattagctctagctgatcactcttttcgttcccaattcactttctatttttagttttttttaattcactgcaatatttgacaatgtgaagtcgaatgactgcatattacttatcttttattctttccctttattgggtaatgttgtttcgttatctaactgcgctttgaatacttgcattggttgtgattttgtgcagtgtgtctaa

SEQ ID NO: 103259 - DNA, 549 bp, Mimulus guttatus
  Intron number 1 from transcript mgv1a000953m (locus mgv1a0 00953m.g) derived from phytozome v7.0 (chr-ID scaffold_1; pos 4131127 to 4131675 reverse strand)
tgctcaaacgattatccattacttctgggtcgctggtattgcttctctttttccactgttttttttttgtctttttaattattttgaggtattcagtgattttcgttcgattttgcttgattaaaggactgttgtttggtctgtctacctgggcaaatatcatattacgaattgctgaagacaaaattcagtaggaactttcatctttcgtctctagtttacctggttttgtttttgctaatttgtgttcagatatgtgagtatgtttttcgtattttgacttctgtgaagccaacggtgcgtggaaactgaatcctaattcatgtatttatgacagggtttagcaatttggcgatcgtttaacacaattagagcataatcacatatatatactgtttgataactctaaacgtaggactagttaatgtggttacttgatcagtattctttgttttgttcgtgtgttttgtagaagggattgccgatgaataagtgagtcaatgaccccccgagtttgctttcctttttatgtgtagatactcatcaaga

SEQ ID NO: 103260 - DNA, 543 bp, Mimulus guttatus
  Intron number 1 from transcript mgv1a023715m (locus mgv1a0 23715m.g) derived from phytozome v7.0 (chr-ID scaffold_54; pos 1401365 to 1401907)
ctgccggtagcgatattgaaggtattcgttgttattttcttgtgtgaatgtactgtcattatggtgaattggatccagtatgagattttttgatattcatgttgactgtaagaaattgatgtaggatcactcatagattttgttattatgtataaaatgctggagaattgatctgattgctggtggttttgttgcttgctttgcatttgagacgtaacttattagattgtttggaggttgtgcaaatttgctgaagaatgtaccgatccctaatggttggtgtttttaggatttgaggtcttgtaagggcttcatgcaactagctcactgatttttgaatctaacaaatttgtacataaagattttggaaaattttctactttgtcagatacccctagtatcagttaaagcttgcttaagtaattcgtacgacaaaaaaatggtttgttaatagtgggggctattattgtgaatcaataatattttactaatagtttctgcatgacagagtccggattgtggccttcaactacggacgggaag

SEQ ID NO: 103261 - DNA, 594 bp, Mimulus guttatus
  Intron number 1 from transcript mgv1a011245m (locus mgv1a0 11245m.g) derived from phytozome v7.0 (chr-ID scaffold_17; pos 2275502 to 2276095)
ccgatcaatcttctactcaagatcccctcgataaggtaggtccgtttttttctccgattgaaattctcggtttcacgccctaattgtctatgttgatttctttgatttttatgtgcctagtttgtggattcaatgtgtgattgtttattttcatttatcatttttttccggaggattgtcatgatcttttaagttttgattttgtttattcatatcacaatttatgatttttcctttttcatttgggttgtgttatctactaatttacatgtatatattcgtgaatttgtattggaatttagctttagctgagggtaagaacaaaacttgatttcagtgtcggctcttttgatgagatgcatttaattgattataatgtttttcttccttttttctgtataattcgaagttgtggtatcatcgacgctttcattttcatggaaatggagatatgtgaatgaagtttctccagtaaagataggactgacataataatacttcgtgttgacatctcccttgtgtttgtctgtacgctgatccaatcccttttgaaactgtgacaggttccagcgttcggtggcttaaagtcaccag

SEQ ID NO: 103262 - DNA, 778 bp, Mimulus guttatus
  Intron number 2 from transcript mgv11b023614m (locus mgv11 b023614m.g) derived from phytozome v7.0 (chr-ID scaffold_1 90; pos 312877 to 313654 reverse strand)
ttgcagttcagagccttctctttctttgcctttaggtcagttttattttccatttttttaaatttaattcattttgcaatttatttttcattttattttataaatggtgtttaaatagcaaaaataaataatttaattgtgtctcctctgtgtgataaatcatagtagagagtcttaggttaggctaccaactgcactatcgactgtcgtaaaatggtatatttcgtaactcggtttcttttgcgtcgtatatttcgaaattaaattgacgtgacaaacgatagccctctaattcgttttttcgatgtacagaatatagataagagtacactcgaagtgcatttatcgcatatagagttaacttcaagaaaatgttatttatcacattcgaagtgcatttgcgtgcaacggaactgtattatgcatcaattgaggttgttatattagcagttatatggtgacgttttaaatttaagattgctcgtgtgcgtacgttcgtttaaaatgtttagcactgtgttgttgtaaaacatgaatatttgtacttctgcaacaagaagtgtactagatatctatctctcgtttttttttttgtatgatgtcatgcttactttagtgtgccgtgtatggaatattcgctcggctacaaaattgatggtaccgtactgctgattaccgaacaaaatcagataattattattggcttatcgtaacttctcgttttcttttctttgattttgcagacttcatcaatagctcctttgcaggttagttatat

SEQ ID NO: 103263 - DNA, 460 bp, Mimulus guttatus
  Intron number 1 from transcript mgv11b023614m (locus mgv11 b023614m.g) derived from phytozome v7.0 (chr-ID scaffold_1 90; pos 313614 to 314073 reverse strand)
atcgcatcccacttttattacgtacagaaaaaaaagtaggtattaattcaatttaatccgacgccgttccgattgttcaaaccaaattgcacacttcgattttcatcactccgctgtacggcgttcgtcgtacatttctctcgcgatttaattggatcgattctgagatggattttgtttcttgctgttgaagatttcgattttcccgggcgaaaaaagcagagatttttttttaattttaaaaaaaaaaaaaaaaaaatggcgaattcacatccgccgtcggatttcagggtgaaccgcgtgaaattgatgagggtggtgttggttttagtttgcttgattttgatttgttatgtagagaggcattccagaaaatactcaactgcattggctgttatttgccctccttgttcttgtgattgcagttcagagccttctctttctttgcctttaggtcagt

SEQ ID NO: 103264 - DNA, 532 bp, Mimulus guttatus
  Intron number 1 from transcript mgv1a008540m (locus mgv1a0 08544m.g) derived from phytozome v7.0 (chr-ID scaffold_174 ; pos 193188 to 193719 reverse strand)
ctagctttctctctctttggaaacacacactcaaggtgttaatattctttctttgcactgattttgttctttggtttgtgggctctttctgaattgggaggaaaggtttttttttttttatttcttttttcttcctacaattgtgggatgatggggttatttgagttcagctagtgcaattagtgtagttactcgacttgtgtagatttgttcaaagattgtcttataggtgtgtctttgttgttggcaatcattggtagagtaaaacttgtctttcaagcacttatgaagctcgtgttagatttttcagatggtttgtatcttgactaaatttgtatgtttctactttcttgagattatttaccaacacaaactatgtaattcttgtttagttacaatactgatataccgaaaaaacttttttattatagtatcaaaacgaaataaaatcaagggagtgtcactgatctggtatgtgttcttcctatactattttgatcgtttgtagggacgtgaaaaatcaattacagtc

SEQ ID NO: 103265 - DNA, 815 bp, Mimulus guttatus
  Intron number 1 from transcript mgv1a005412m (locus mgv1a0 05412m.g) derived from phytozome v7.0 (chr-ID scaffold_79; pos 729117 to 729931)
cagggtcgtccggttactggaattacaggcaccaggtaaattcatctcgtcccccctaaaactatatataatttttttcgtttatttgaaacaattgaagctttacttctgtaatttttgttggatactgtaattttgacccttggctgtaggtttcagctagtaattattgtattattggaagccatttttttaaacagcatatagtgctctgttttagtctctgatgattagtaactagtaactactgatttagcagatcgtttactttttaattgctgataatttcaaaaatatcttcaaatttttgaaaagttttgtttctagaagcatcttcatttgttttgtcattattttttttttcttctgtttgggggtggaggaccttgttgttataagttgaccttcatggataaaattaattggtgctgaatattcagaatacggatctttagtactcgattttctgtataattgacttaacattaatattatgttagcatatcactattgcgaaatctcgtgtttgtacaacgaaggcaaataggcgggcattagtgtcgagctaagcattattccgctccttatggaattagctattctataacctgattgcaaccgttgtaattagtcatcaatgataaatccattgtttaatcccatacgatggtatgttgtctgcatactttatccgaagggcaaatcatggaggttaaatgttgctgtaatataatgataacatcttacgattattttcctctaatctggacactaatataattcgagcgctgttttgtaccaggctgatatctgcc

SEQ ID NO: 103266 - DNA, 365 bp, Mimulus guttatus
  Intron number 3 from transcript mgv1a000975m (locus mgv1a0 00975m.g) derived from phytozome v7.0 (chr-ID scaffold_17; pos 1783112 to 1783476 reverse strand)
aggtaatacttctgttctttgaggccaaccctttgctgatgaattatgtttcacccgatagagcattttgattagtaattgattgattgcttttgtcattgtgatttttataaaatagtaattttcttctacgcttatcaactctgtttattaaagctcctaaggacttagttatctgttggtgtggatttcctaaaacttttgtatctaagcagttgatgttggattcagtgattaggaaattgattcgattaggaaattgattctatttcagttaatattgggaggttttccatcacaatttctgaaattgtttttatatatacccaggcagctttattttttggggtggactcacttctctg

SEQ ID NO: 103267 - DNA, 560 bp, Mimulus guttatus
  Intron number 1 from transcript mgv1a012181m (locus mgv1a0 12169m.g) derived from phytozome v7.0 (chr-ID scaffold_102 ; pos 665663 to 666222 reverse strand)
ctgccgtcatcagtttttgatcttcagatattttggtatttgctcacttttctctcactagatgattttgtgcttctttgctatttgactttgttggtttgacttgatttggctgatgacggtcgtttattgcttcggattttatctagggtttcagtacttcgtttttcgatttgggtatacttttttctgttttattgcttcatttttctatttgattttgtgttgtgatttctgagtgttgattgaacttaataataatagaattccgaaaaaattgaacaaaaaaatcagactgtttcattgcacagtattgatgaacaatttattcacttgaatacttgttgtttggacacgatgttagtagctttacgaaacgaaatgagatcttcgtttacttttatttataaaaaagatattcattgaatttaattcgaagaatctggctactcctctgtttaaccgtgttacttttccgagccccctttttaagtttttatcgaaccttttatatgaacgatggaggaagcttgacgataaaattggtggtgccgactggt

SEQ ID NO: 103268 - DNA, 820 bp, Mimulus guttatus
  Intron number 1 from transcript mgv1a016226m (locus mgv1a0 16226m.g) derived from phytozome v7.0 (chr-ID scaffold_64; pos 1167074 to 1167893)
agctgccgccgactgatatccccaagctcttccaggtaatctctttccaccatccacttcaaacaagtctgaatttcttcgtgaattatctggaaatgtttttgtttgagggatttgttctggattattgaataattctatttatggattataatccgtataaatttgaatggattgttgatattctttagtgaattagtaccaaaattgattggattggtgatgaaaaaactgttaattgaagttattgggattgtaattttgaatgtttctctaatctaaggaaggccaagcattcggtttgaattagtgatcgttttcgaactcctggtttcgtttttccgaatcagtaccaaaaattgatcaaattggggaagaaacaactgttaattgaagtgattatgatggtaattgtgaatatttttgtaatataaggaagccgaacctgctggtttggatgaatgattatgatcgtctttcgaacgcctgatttcgtttttccgaatcagtaccaaaaattggtcaaattggggaagtaacattgaagtgattaggatggtaattttgaatatttttttaatagtaggaggccgaacctttcggtttggatgaatgatcgtctttcaaacgcctggtttcatttttttatttattttttttcgcgtaattaagaaatatccacccttaagaaaaaccatattctacattacataaagagattatcggagggtaatacacctcctagtattgatacttgctgcaacaaatgaagtttagcttctttatttgacctaattacgttttttccaggaaaacttca

SEQ ID NO: 103269 - DNA, 895 bp, Mimulus guttatus
  Intron number 1 from transcript mgv1a004712m (locus mgv1a0 04712m.g) derived from phytozome v7.0 (chr-ID scaffold_4; pos 2207450 to 2208344)
ctcgcagcttctcttgaagatcgtatagcattccggtgagaatttattgctataatttgcctgttaaatgaatttctggataaaatttataatttcgtgttatagatgtgagggtaaattgttttggtagtacaaacttttatgttaaaataacaaaatcaaaaagccgacgagaattttggaggttttatgttcagattttaattttgcatttattatttttttttttttgcttgagatttgatttgatttgattttattttcattgtgattatgtgtttcttataaaggattttatggaggtttatcgttgaatattatgattttggtgttgatttgctgaggtttgtagtttcaatttctccttgcgttgtcttagcttcctttattcttttcttactagagattgttttgcatgttgataagagaaacaaaaaaatgaaatcggaggaaaaaaaaattggttaaatatttggattgcatggttgtgtaagttggtcaaataggtaatgaaacagtgaatatccatctttcccaattgtatgattcactgctcatcctgtgagatttaagttggaatggcgaacaattgtcagttgtgggaagtaggaaatcactctggtcgggagtatagatttgcagttatgaaaatagggataatataatttctcgatctggggaatgtgcagtgtatttaggagatattgaaatgtttttcaaggtttctggacagttgatttccattaaaactgcaagccaaacaaaatttgtagctgagcgggtggagagatcttggtgtttgctttgatggtttggttgcattttttcttttcattaatgtggggggataataaactaacgtgttgaaatgatgatggaaatgatgcaggaaaaa

SEQ ID NO: 103270 - DNA, 780 bp, Mimulus guttatus
  Intron number 1 from transcript mgv1a005697m (locus mgv1a0 05697m.g) derived from phytozome v7.0 (chr-ID scaffold_51; pos 1391233 to 1392012)
ctctgttatcggctttcacttaattcctcattccggtatgcaattctaaatagaagggggggttgggggtgggggttgggggttgggggtgggggggtggtggttcttaattctttatactttaaacagcattactgctgtttcttgtttgtttaattctggcaagtttttggctcccattttggaatgtgaattgtgcttttttaattgttatgatcacaattttgttgtaggctatataataataaatgtgcttgatctctgttagattagagtgctctatgattttagtattctagggattcgtttgggtttcggggttaaattatgcaattttgtgaagacgggctcgtttttccgtagttgcgggccgacccaaatagtgatttgcacatggcttatcttacgaagcaaacgaggcctaggattattgcctttctggttgtactagattagagtataagttgacgagttttttaagtttatgttgatgcactgcagtttgagttgcaggcagccgaagaaaaatcccgtttagggaaatgcaagatctttctagaataccgtagttcgattctaattttcaaacgagaagaaaaagaaatggaatttcagattcttgtgaattggatatgactttatttctctacgaacattgaagtaatttacataaattattttcacgaaatagcgaggccgtttcaatttatgagggcgactttaatctaacttaagcaatttgtgatgaaaaagtcccagaaactcaaggaaacggagcta

SEQ ID NO: 103271 - DNA, 997 bp, Mimulus guttatus
  Intron number 3 from transcript mgv1a023533m (locus mgv1a0 23533m.g) derived from phytozome v7.0 (chr-ID scaffold_131 ; pos 273432 to 274428)
gttttaggaagcaggggtttaggtgccatcaaaaggtaaattctattttttattaattataattttactatcgatgtttattttatacaaatgtcttcttcttttgtttatttatttattttttctaattatatataattgattgatttagtatgatgattctctgactagtaattattaataaatcgatttagtatgatgattctctgactagtaaatattaatagtacattaatgctactgtcaactacaatgacattattgtactagaaatagtaggctggatataatactattgtgttgaaagtaacaaattattgttttcattgctggtcagtatatattatgaaaaagtaatcaataaaaactaaattaaaaaaaaaaaaaaaaaaaggaaagacaaaattggtgaaattggaattaaattagtgtttacaattagagtctaattgagtttaaagaatagtgggtaatcttgtcataaatatttagtttgcatttgcttataatgcttacagtggtgaatgtatttacgaaagagaaaaaaatatctgaacctagaataataaaagttagtgctcaatcctatttgtacacaatttggttagtgtttttgggattgaatatgaattatgactcgattttattttgaggtaattgcaatcagtaccctataaaatatcaaattcctaaaaaattccatctaaaatattaattagcaaagacaggagtatatcatgtttttagaaactcctaagaatataaagtaaaataaaaagaagttgaatagatcgagtaaacgaactttaaaaaaccgggttggggccaacttgactttctcaaaataaagttattgattttattttacaacaaacatttttattttattttattacataaacaattgattgatttagtattctgattatatgactaatataagtgcatataaattaatcaagggtgttacttggaagtgtgagcaactacgtcgtac

SEQ ID NO: 103272 - DNA, 701 bp, Mimulus guttatus
  Intron number 1 from transcript mgv1a004694m (locus mgv1a0 04694m.g) derived from phytozome v7.0 (chr-ID scaffold_102 ; pos 418148 to 418848 reverse strand)
tagagaaatattccaagaactgcagtcgtctataggtgtgtgtttattttctcctcagtattttctttttaatttctttcttattaatattattaaataatgaatatttgattagctgattattgtttatcctctctcttatctattttttatttttatttttaaatgattgctttagagatgaagaaaaagaaaagatgggttatgggttttttttaataagaaaaattgttgctagagtttttattttttatttatttattttttttaaataaagaacaagaactactgtatagtgtgtataggttctatgtgggatgatgttgatttttttttttttttataactgaaagatggatatgggattttttggtaggaaaaaactcattaaaggctgttgtaaagcatttaagtttctgtgggatgtaattgcaatttttaacagaatacttatgtacatacacttgcctgaaaatgctctgctgctgtattgtagtttgaaaaatatgaaatcccttttaatttggtgtacacttgttgtttgcttagtgcaattctgcaaaaaaacacacacacacacacagatggtaatatgtccatgtatcataattcttatcgccacgcggtatttgtactaaatgtattcatattcgacgattcgagtaggatttcgagcgaaatataactttacaaaccataaa

SEQ ID NO: 103273 - DNA, 905 bp, Mimulus guttatus
  Intron number 1 from transcript mgv1a007679m (locus mgv1a0 07679m.g) derived from phytozome v7.0 (chr-ID scaffold_18; pos 1407469 to 1408373 reverse strand)
aaatcacaaagaactcggaggccgagttcaatctggtaatcgattatttatttagactttacttaatatgttgaatttgatttgtatcggtgccgtttagctgacctatcatccaatcgctgaaagttcgagatctatgttgtgatttgtggtttttttgtttacttaattaattgtggttctagttagtgtattctgtataagtttgattgaagagatgatttattgaaattcaggaatctagttttgtgttgttagggagttattgcatgtacgaagagctttgatttaagataaatggcggatgatattgtgttctaggtttttctaacttgaagctgcatatttaccttatttgtttgatagaatatatgagattttagtggaattgaagctgcattaatttttttttggaacagtggttttagatatcaaattttggttgtagctcagtgtcactaatgttttgaatttaactgtcatcactcggtgagagttagcatttgcttcacgcagggagataaatatatttatgttacactcctaatcgtgtgttctgttgatgtaaatattttgtaataaagattcagcaatatgatacgttttctaattaccatgttttcatctctatatattggagttggttgttcctttattctggaaataacttgatttgttttagtgtcgtgatatgttgatttttattgttctgctatacttttagtgccattaatttggttcataaataatagatctgaactatgtagcttttaccatagcaacttagccttatcacatacaatttgcctttgtcttggagtatgatataccatgagctaagactaaatcggaaatatctgatttgtacagtaagggagaacttaagagctaagaagaaggaatat

SEQ ID NO: 103274 - DNA, 851 bp, Mimulus guttatus
  Intron number 1 from transcript mgv1a000003m (locus mgv1a0 00003m.g) derived from phytozome v7.0 (chr-ID scaffold_11; pos 471766 to 472616)
tttgtattatgtttttttttgcttcggttgtttgtggtaatgattgattagtttgcgggtttatgtggatcattgagtttgtggttggttatgtgggcagttgaccaagtcgaaccagttgctgtggccgtggtccagcagtcgattgagtttgctttgtgttatttggagaaatgcattcggaagagtgatgattcaactctacaggtttgtgattacttgcttgaatactgaagagtcatgtatttataatgatgcgcgagtctttttgttcaattagtagattactggttaatgttttcccagtacagattcactttctatttcgggcttaattttttaattgctcggttatggttgtagtcgtagaatcgcacgttgagtatgttttgctttaattacttgctatttgcaaaataacagcccaattgcctattgcttttgattactcacgtcatctcttaagctctccttatttatttcaaattatgtttgattgttgttgcctcaattttaagcaattggtgacaagttaagatggatatatgtacccaagaaaaagttggtatcgtccttaagaaattatatattcaattctagttgtagataaaataccttaggaatgaaaatgggttaattttttaggcaatttagggctgcattagagttcttagttcttattggctcatgtagaggttccattagggataatatgggttaatttcgtttgttgtttgcttactgctccatttgcaaagaaatccatatatcaaccttttatatcatgtttgctagtatgtctggagtgatactgcttatgtgtcttagctaacgcctctctctctttcaga

SEQ ID NO: 103275 - DNA, 1015 bp, Mimulus guttatus
  Intron number 1 from transcript mgv1a023079m (locus mgv1a0 23079m.g) derived from phytozome v7.0 (chr-ID scaffold_164 ; pos 386843 to 387857 reverse strand)
tggcttatcttcgtaacttgaccttttgtgaacaggtaaacttcgtaatcagttctataatatctgtcactttagattaattttttttctgcatattctacagcacttcagaattacaatactgtaattacataatttacaattctatccttattaaatatctccaatattagttacataaatttcaatgctatacttatgaaattaactattataattactcatgaaacaataactcctattggctatattgtactttaaagtttaaactaattttcaaatcctagttatagataaagcaataactcttaccgaacctataattcctaacaattgcaagcaattcctaactacagtagaacctcaataaattaatactcgataaattaataacctcacttaaataatagtttttttctagtcttgactcggcaaaaacttactaaattattagttcgataatttaatatttcgctaaattaatagaattttgctagttccgactatattaatttatagagatttaactgtatttcaatatatttcaatgatcgtatcaaccaggtacataaattaaccacacgtagcatttaaaataagttgttttgatctgaaatctgaaaagcaccactgggccaacttttcttaaaataagttacgcgctcaaagttgatttttcgagtagttttacaaaaatcttcaacttttggaaatacacagtacacttttatgatttatcactaacttaactcgtaatcaccaacttctattttttcaaaatcttctgcaaacaccacctataacttaccaaatagtaattgtgctactaactatcaatatttttgcacatttagtacaaattttataattctaaaagttaaagcatataagaaaaacaaaagttttactaatcggataacgaaaaaaaaaaaccgaaagaaaaacatataaagcggccggaaaaaaaaaaaccctaacccgcgaacaattttctttttccttacaggtgaagctg

SEQ ID NO: 103276 - DNA, 835 bp, Mimulus guttatus
  Intron number 1 from transcript mgv1a019317m (locus mgv1a0 19317m.g) derived from phytozome v7.0 (chr-ID scaffold_73; pos 903680 to 904514)
aacggacacaacttaaaggtaaattaataatgttaattgtagcagatctatcgaacaaaacaatgagaaacataaaataacatgttgccttcctagtattatgtatatcagttgagatttaaatttctataagatttgatataagtatataggttgcagaattcagttatccatgcaattgtcttgtatcaactactttttagaagtaaaaaatcaaattgcattttgtgtttgtcttttcaacgagaccccatgtgtaaataccaagttagaaaaaccccttttcagactattcatagtgaaattactttgactaaatacatttatttgtaagtgtggattcttggattttgtgatgttggtcttgaattatttagtcttcaatcatgaagtgatttaatgtaaataaatgtatctttgttattttaatcaatagatctaaacattagatatccactggacatgaatatatatatatatatatatatatatatatatatatatatatgtatgtatgtatatatatatatgtatatataatttaagagtaaaaggatacaaatgtttggatgatctgtcataatttcataatattcagaggtgtctaaatattgttcataaataacttgatggcggcagaaaacaatgatatgtcaccacaattaaagttaagatcctaaagaagattatatccagaactgtagatctcatctaattcattccattgccaacttttcataaagtactatattaaaaatcgaggatatactctatgttaatatgtttttctttggatgtggcagaggaaaagcatcgactcgaccaattgccatca

SEQ ID NO: 103277 - DNA, 544 bp, Mimulus guttatus
  Intron number 2 from transcript mgv1a019317m (locus mgv1a0 19317m.g) derived from phytozome v7.0 (chr-ID scaffold_73; pos 904567 to 905110)
cataggggttattgtattctctgtatcaataagtgagaaattttgttgcttgatatattatttgctgctcttatgttggtacttggtatatcttacatggtggtttgttttttgtgatatggataaatgtcatttaagtcatactgattaattttgagttttaccgccacaaagtaggatggtatatttattatcttctctttggaataaacctactactcatttagtcatttatgaatggatttttgcttaaacatgtttcaaagtaagggcttcccttggttctacactaacattattcctgcattttcttcatattatatatatatatatatatatatatatatatatatatatatatatatatatatatatatatatatatatatatatatatatatatatatatatatatatatatatatatatatatatattttttttttttttttttttttatcgtcgatgctcgtgcatatagatttactatatctctgttgtaatcacaggtacagagggctgcaagaggcagactttgctgaag

SEQ ID NO: 103278 - DNA, 618 bp, Mimulus guttatus
  Intron number 1 from transcript mgv1a012313m (locus mgv1a0 12313m.g) derived from phytozome v7.0 (chr-ID scaffold_79; pos 318795 to 319412)
gctgccaggtatatatatatatatttttcttcttctcccagatgtgttacaatatttgagacacgtgtgaatctaatgaacaattgtgattgcaaatggtaggatttttctgctcctagtttatctaagttccttgattactgttatagaccactcataacaatgaagaaagtcaagtttacctctagctctaaaagatgtgttttgagcttcgtttgataagcaatcgagtcgagatttaatcgagccgaacacgaatcgagctcatgtagcttgatttttgtacatagtatttagaactgaaatttgtggtcgacattggttcattacttcattatgttaatgaaggagcttttttaaagatcgatctcaaatcgtcgagtacggtgtttgttttaaattttcaagccctaattaaatgtgcaccatgggagcatagctttcagcttgcaccgaattttttgtattgtgcaaaactcggaacacatttgttgcagtcccgtgttcaattgttgatgattatttgttgttgatacgagaattaagataatgtggacgaacacgtgaacttgaaaactgtattcttgtttccagattccaatcaggcaccgccggaat

SEQ ID NO: 103279 - DNA, 329 bp, Mimulus guttatus
  Intron number 2 from transcript mgv1a008711m (locus mgv1a0 08123m.g) derived from phytozome v7.0 (chr-ID scaffold_63; pos 193362 to 193690)
ttcacaacgggtaaataatgattttgacttgttaattatgatttttagattgcttgcttcagttaatcttttgtgctttccttctgattttactttccaaatcacaattccaagctccgaaatttccttaaagttacaatttgctatcagtttcttccttgtttatacaaaggatatagtttcaagtatttgttagttcgattagtataccaggcagcaagctacaggttcagtttcatatattttctcagttcacatggtttctaagaaaagaatatgtttatctaatgccataagcagatttgctcatcatttgaggagatataaag

SEQ ID NO: 103280 - DNA, 681 bp, Mimulus guttatus
  Intron number 1 from transcript mgv1a008764m (locus mgv1a0 08764m.g) derived from phytozome v7.0 (chr-ID scaffold_167 ; pos 119720 to 120400 reverse strand)
ggttcattacaggtgagctttattttttttagctatggattctgtagttcgatttgggtttttttgttctgtttaatttgatggcaattttacctttttgcccctgtctctctgctgttttgctctagtagtatataacagatttaaaaaaaaaaccaagaaaagatgatggtttcttgtaattcttctgttagctataccaaataaaattgagattttgtcaagaaaaaaattaaaaataaattcttgttcatagggtaaaattatggcccgaagtaaggtcaaattacgaaaaagcccctcatgatgttcgggtaagtataacaacccggatctacttacgaaaaaccctttgcaaaatgtgtggaatttagtggaatctttttgattatgtgtaataattctccagtttgtaaccgtttttcgttttttctggtaaaaactcttgataggacataaatttgctggtaaaaatttcttaattaatcattccgaaagtgaatcagatgtgggtttgtgccatatgaggttgtttgataatcgaacaagatcggtatgcgaaaagaaacgaactcgttacaactcgaattaactcagtctcttaataaaaaataaaactttaattctcagtattaatgtttctaattgaattcttgatgtttctaatgcaggaagaagaaa

SEQ ID NO: 103281 - DNA, 549 bp, Mimulus guttatus
  Intron number 1 from transcript mgv1a012523m (locus mgv1a0 12523m.g) derived from phytozome v7.0 (chr-ID scaffold_63; pos 523809 to 524357)
ggttatttctatgctcacttttttttttcttttattctttcttgtgggtttattggaaagagtttattccaactagtacccttgtgttatatcgaattgttaaaaagtattccattttattttaatggtaaaaaaaaaaccctatgatttagtttcttttagcaattagtacccctggttaggggttgtgtgctaaaaaaaatgaaccatagggaatattttgctaataaactaacataggggttgtgggcaaaggggtgtttcgggaaaatgttaggaagaatcgaatttgtttgattgtttatccttggagattaaatttagatttgagtgatgtcttgttatgtaatcaccttatataatgccccaataggagtgacgacgtatagcgaggtttatcaaaatcgattgaactcgaaaatgaataaatttgccgattttgaaactcccattttgaatatgccgagagcgattgatttagatagcttgtgaaaattatgttgtttgattgcagaaaaatcagaccttgcccttcaataaaccccagct

SEQ ID NO: 103282 - DNA, 971 bp, Mimulus guttatus
  Intron number 5 from transcript mgv1a015600m (locus mgv1a0 15600m.g) derived from phytozome v7.0 (chr-ID scaffold_20; pos 1877035 to 1878005 reverse strand)
ttgctgctatacttacatctatccaggtacactattttcttttctttttttacttaagaatgcaacttcaccgttttttatgctgtgctatttaagaaaaaaaaaacaaaaaagggcagacgactatttaagcaaaatctaacgagtctgagttaaagttgaaaatacacgattactcattcactttagaaaaatcaaagtttcttcatttatatagtcttcttgaaaccgtagcgaatatatgcttgttgggtaaagggtatttaaggaatctgacagctttaaacataaaagcatacatctttcttgacgagcttttagaattcttctggcggtgtgaaatatacatctcatattagtggccgttctgtatcttaccctatcatttgttatttcgtattcataaaaatgattttgttcaatagaaaatgcatgcatatatatcttccaagaataatctcatttaattattcgacgagttctaactaagttattcacatataaattataataaatttacgagctaccagttagtaggtaccgtctttccatgaagatgttatctgtttcttcaaatcttctcaggctatataattatcagtgattttaatgtagtaaacacgtgttcggcgtactatgttgttaagagtagtggcatattttgataaggctacaactactgtgaaaatgcttttgtttctcgaattgcacaagctttcgggcttgcttaatctcaatggtcaattaattagtttatttttgtcacgagaaagtgaaaagtatgttctgaagaaaaaataatgtatcttgattcaaaggggatagaatacgagagccattcaacgtgattgttctctacgtgggttatctttattttcgactaataaattgttattaaaaaaagaaatgataagtacatttatgttattgctacagtcattgctttgcgacccaaatccgaactctccggc

SEQ ID NO: 103283 - DNA, 374 bp, Mimulus guttatus
  Intron number 1 from transcript mgv1a015600m (locus mgv1a0 15600m.g) derived from phytozome v7.0 (chr-ID scaffold_20; pos 1878901 to 1879274 reverse strand)
ggaggaggacttcacacacaaaagctccgttacaggtaaaattgattactaatcttactgtattgtttcaattaccgataaattatattagggtttttaattgaatgtataaatttgggtagatcttgacagggaaaagaaattgtttattctctttagattagggtttcaagtaattgaattttattgagcttttcttgtttgaattattggattgtagatcaagcgtcggactgtaggaagaaaatcaaaatcattttttctttattattattatttttccttgatgaatttcggtaaggttatttcttaattttgataattaattttgtaaaaaaaaattaattatgggcatatatgtataggcatctaca

SEQ ID NO: 103284 - DNA, 903 bp, Mimulus guttatus
  Intron number 2 from transcript mgv1a014648m (locus mgv1a0 14648m.g) derived from phytozome v7.0 (chr-ID scaffold_161 ; pos 29935 to 30837 reverse strand)
accgaggcccttctcgaaaaactgtgagttctaagattaaattttgagtgctgtgtttgatttttttgatagtgattatatggttggctgtatatatcgagtatcgaatgattacggaacaactccgtataaatgaagaatgcttgtatataagtgctgctattggattatgtttagcttcttgaatagtgaattcacaaaatcgattcatcttagtgtattggcagtatgtaaattatgtggagaaacaatcaaacatagaggtttagtaaagttttttacattaaaaaaacaactttaatccgagcttggtaatacgagctaccccacatagtttatgttagttcttctttgatgcttcacgtcattaaatatccactttccagagcctcaatcctccacatatattagcctcagtttattggattccacgattttgaccatgttgacgaatttaaacgaaacaaaaaaaagtaattagcattttattagggcttatctgaatgaagctcaagcgtgagttcatggatatcaactagcatcgaacttgttcttcttttagattgatgagaactgcaactcttgtggcaaggaggaatatttgaattcctaattgcagtcacgtaacctaggtatacgatagacagttgcaaaattgcttcataaaggtgcttgtagtgaaagaatacgtggtagccgacacgtatcttattctgtgttatacgtaacatgctttcctggtaattcttaagagttcatattggtacttctcaaatatgaaagacgtgtgattttctcgactgaatcaagtttccttattaagtatatctgtatgtgaagaagattcaaatttacaatttgaatttcttatgtttgatttttttttgattatttaggtacaac

SEQ ID NO: 103285 - DNA, 435 bp, Mimulus guttatus
  Intron number 1 from transcript mgv1a004414m (locus mgv1a0 04414m.g) derived from phytozome v7.0 (chr-ID scaffold_4; pos 245406 to 245840)
aactgatttcggattatcagttttcatcgaagaaggtaaatttaatttaattttttttattaattttaattataaaaattgcaaataaaatttcttgataaatctgataattaaaaaaaaaaaaagaaaaaaaaagagaattgtatgaagattaacttgatccttgggttgcagatgcataaatttatttctgaatggaaataaggtgaacagtaaagaatgatatatcatgcccttgtaagaagaaaaaaattatgaatagcccgtttaaaatttaaatagtatatgtgatgcaggatcttagagaacgtaaagctataatttccaagttgtataaatttcagttcaccatattcagacagagtttctgttagatgttaaactcgagtgttgaccgtaaaatttgattacaatatgcagggaaggtatacaagg

SEQ ID NO: 103286 - DNA, 569 bp, Mimulus guttatus
  Intron number 1 from transcript mgv1a012912m (locus mgv1a0 12912m.g) derived from phytozome v7.0 (chr-ID scaffold_64; pos 64235 to 64803)
aagctgtcgaggctgcttctgcaatcttcttctaggtaactcttctgccatttctactctctctcacacagacgcacacactctcctctctttgaaaagtgagaaccttaaaccctgatgtacatccccaaatttttttcttatatttgtctcgtatatttcttcaggtgtttgatttagttcatttctttcttacatctttctatgagttccaagtatcggggattttggtttttgaaattataaagggtttcgttgattcaatttttagagttctcaactcaagtgagcccatttatacagattccttaaacaacaacaattgcattcaaactggtgtttctcaaacagcactgagtgcgcctttaattgtgtaatgtctaacattacacctcgtttatgtgtgctctttccttagtctcttatgtcccctcaagaagcacatgtattttttagcctgtggttgacttattatgattgtttgacaacctcatgtagcagatgtttgttaatgccagttattattcttcgcagggattcgttgtccctaaagagtctggtcagtgaag

SEQ ID NO: 103287 - DNA, 674 bp, Mimulus guttatus
  Intron number 2 from transcript mgv1a012427m (locus mgv1a0 12427m.g) derived from phytozome v7.0 (chr-ID scaffold_24; pos 370969 to 371642)
gttctcagttagaagacttcgcccgcaagcacaaggtcttttttttttaacctagataattatttctgtcatttgatgggttttacgcaggattaaaatcaaattaaagaattaattagtttttagttataatcgagcttgagttctgaagattcataaaccgcaattttttcgaagaagaatcaacatttggtcatcaattttggaaagaactatgattgaaaaaataaataagattttgtctagtttgagatggatttggtttagctgcagttgaacgtatcgcacttgaatagctcgaacgaaaagatgggaaaatgcgtattttcttggttgctaatatggttgttggattttgtatataattttgggattcggaactagatgactatcgagcgtatagtgcttttcgttttggttagatcatattttcggaagtatatgagtacaatcaatgtacgagaagctaagtatattcataagagggcaaaaatcctcgttttttttttgcacaaacacaatagaataagtttaaatctttgagatacggaattcctcgtcgcctttcatataacggtagagatttgcagtttctaagtaccgtacactctctcggtatataccttcgtattagtttctcaaattgagattttcttttaatttctttgtgcaga

SEQ ID NO: 103288 - DNA, 885 bp, Mimulus guttatus
  Intron number 1 from transcript mgv1a021469m (locus mgv1a0 21469m.g) derived from phytozome v7.0 (chr-ID scaffold_1; pos 1240747 to 1241631)
gaggaacaatccacgctcgaagatttgctcacgaagttagtcttcatctcttgtgattatccttgttgattacgtttttgtgggtttataactaatcgtaattgttttccgtttagatgatgagtgtgtgttatgtgtttggttgcttgttttgatttaatcattgagattatgttgggcctgggtgtgtttgtttgattggtttgccactgaatgaaatggagtatgggctattgaaaaattattctttggggctattagtaagctaaaattggattagctgaacaggttaggtaaagtgtattgataatttttttttttaattttccaatgtagagaaatctgcgggtttcagctaaaatggtctgagtgaaaaaaatattactttacaccacttcagttggatacgtttgtgatgatactatagacagatttgtaatgattgttactaattcgatataattgtccatttttggataagtttggtttttgaggggatgtgtgtgcctgcacgtctgtagtagcaagactggggtttcagggttacatgcgtcattttacttttatcgcgtcatcgtcaatatggagcatgtgtaatattcaaatttgccctgatcattttggtttttgaggggtttgggtgggaatataccgacttaattgtccatttttttggatcttcatatttgctgcattgtgattttgttcggttttgaaaagcataatttctcatcacactagggctgtatgctaattgatattctttttacacgttatgttgatttgccgctgtgttagcatgaactagttctatgttgcatcttgtagataatggttcgaaattttgcagatattcctctgaagaccagatttataggtactcac

SEQ ID NO: 103289 - DNA, 658 bp, Mimulus guttatus
  Intron number 1 from transcript mgv11b014118m (locus mgv11 b014118m.g) derived from phytozome v7.0 (chr-ID scaffold_5 8; pos 738132 to 738789)
cgaaggtgtgtgtgtgtgaagggaaaagggtaagttccatgttttaatcttcatctcgttgaattggggctgggtttttaaaggggttttaaaaacatgggttaaaaatcattttggttcattaatccaaaaaagtttttcttttttttttctttttctttaaaaaaaaaggggagataaagcttttttttaaaagaatggaaaaggggtttttaggaaacccttttgaggagggggggaagccatttttgcttaaggttggaagttttcccttgaaaggaggttttcattttggttttttttttttttccatttgtcccccggaattggaaaaaggaaaaagcccttttgggggcataaaaaatttttaggggttttttacccatttttttttgggggttttttgcagcactttttgtacagacagaaagaacatttcagggagggattgggatacagttggatggagggtttaaaagttcttgttaaccaaagggtggacccccccccccccccccccccccctctctgtgtgtgtgtgtgtatatatatataattgtgaatcattcgattaacttttcattaattccggatatatcttttcgatgatgtaattatttcgatatattcgtttctaaggaaacaggtcagagaggca

SEQ ID NO: 103290 - DNA, 498 bp, Mimulus guttatus
  Intron number 1 from transcript mgv1a006558m (locus mgv1a0 06558m.g) derived from phytozome v7.0 (chr-ID scaffold_54; pos 1430762 to 1431259 reverse strand)
cgagtctgatttcggatctctcggcgtcccctggtgtaagttagcacgtgtttctgcattttatttttattgttattattattattattattatcatcactgtgatttggaaactgaatttgctattttacttgcaaaattatgatgtttgaagtaaataatcgcatgtttttagttcgtcttcgtaacaattagtggcagtgagtttgaattttggtggttttattttcgtttgctttgattttgggggaatgattgggagatctgtggctttttgttgcgttttatttgtgttcacttgagaattgagtatgactgcaatttgcaggggataaaaatggttgctggaaaatactaaattggaaatgtttcatattttcactttatctctctatgcaatgatcgtataaatatttacatttttctttcataagtcgtatacgcatataaattgttatccttgtcagaaggcagatcgaaacacggagcaactgtgga

SEQ ID NO: 103291 - DNA, 976 bp, Mimulus guttatus
  Intron number 1 from transcript mgv1a011868m (locus mgv1a0 11868m.g) derived from phytozome v7.0 (chr-ID scaffold_80; pos 214384 to 215359)
ttacctcctcactttcctctatccatcttcatccggttggtaacctcttctccttttttttatgcgtttcctttttctttttctgtttttcttttatgcacatttcgttggttccacgatccgaacaattactttcttcgtctttcttttatgcacatttacgcccatacaaacttgcccaaagtttagaaattttgaagcaaagcagcccaggcaaattaattatccatctattttcatttttttgttcaatccgaggtctgattttcctgatctttcacgatttatgatttgcctaattttaggttttttgattgtgtttaatcatcttatgtatgtcgtcgctgtcaatgggcccgttagatctgctaaagaaaattagaattaggttgcatttgatggaaggattagtagtttgtgtttattattaaatacaattaggttgcatttgatggaaggatttggggatctgatttagggatttcaaataactccaaatgattcacttaggttgcatttggattggagggtgtgatttcaaatccataacaacaaatccattgagtttgtttggattgattcatctgacaacgaatttcatagttctctcttttatttttttttttttttttttttttttttcccgggcaattaaggtagatttcaaatctttgccatttggactcatctcagatccttcaatccaactgttcacaattaattcatctatgttacgtgtcatatgccttgaacatctactgtgaacgccaattgatcattggcattcaagaaaattgaatctttacaatatttagacaacccgcacgcacacacattgcttgttcaattatttttctttgataagtttttaatttctaaaggatttccacgtaccttttcatgaaaaagttcgcctcatggaaacatagatactagaaacttccacatctgatatgaatattatattacaggaaaa

SEQ ID NO: 103292 - DNA, 556 bp, Mimulus guttatus
  Intron number 1 from transcript mgv1a010589m (locus mgv1a0 10589m.g) derived from phytozome v7.0 (chr-ID scaffold_51; pos 895057 to 895612)
tttaacctttgatttttccgccatttacaggtttgtaaatctatactgttatttacacttcccctttttgctatgatgatctgtgtttagtttgtttattggtctttgttttttgctatcatcatcatcatcatcgtcatcggagaaaatgaattcctttcaacttgtgatttggcgctaatttataagatctgtggttctggaagaagcacaaggccggcggaattcctctgttcttacctacttatgtttttctcttttggaaaccctaatttttagctctgtcaaagatgaaaaaatcaggcagctgcaaaaccttgagattttgaatataattaatctgtgattaatacacaaacctaatgcagcagataatagttgttaatttaatcctaatactttttcattccttcgaagttgcagattttctatacttatacgagctcgaatttcccccttcgtaattattcttttagggctgtaattgtcttgttgtattgaatacttgttgttgattgagctgtgaaggtttggctaacgattctgttgccaatag

SEQ ID NO: 103293 - DNA, 515 bp, Mimulus guttatus
  Intron number 1 from transcript mgv1a001167m (locus mgv1a0 01167m.g) derived from phytozome v7.0 (chr-ID scaffold_129 ; pos 135750 to 136264)
tgcgcgtactggcggaggaaataggcggtcgccaggtcagcacttagcaacgacgtcgtctctgttccgttctgtgattttgttgagtttcgagtgcatgtagcatttgttttgcttttgattcaatctgttccgctgtttagacggttgatttgattttaaaattggacattggttgtgaagatagaaacagtgccagtttagtgagtgaagcaactcgatgaatcttaagatatgtccgttgactttttttagggcagttcaattgaagagttaaagaacactagctaaataatgtttggcgagtgtaaatatagttcagttttcgacttttcgtccatgatttcctgtttgatggaatccgatgcagctgcggctttcaattttcattgtctcttagttcagttcttgctaattgttccagtttgatctgctaataaagaatccattaaaccgtctgattgtattgtggtattataggaagggagtccaggtttgaagcaggcagcggcata

SEQ ID NO: 103294 - DNA, 433 bp, Mimulus guttatus
  Intron number 3 from transcript mgv1a001167m (locus mgv1a0 01167m.g) derived from phytozome v7.0 (chr-ID scaffold_129 ; pos 136524 to 136956)
aggtaatttacataaatttctttctattttcttggtccagagtttaattgcagactcagaagtttgttaacaggagaatattgagtcagttctctctaattttgagctccgtatattgcgtttggagtatagttttatcaggttctcttttttttttttttttttgacatgtccatgtatctccttttaatttcttaccgatgaactgttatcttctcgcatggagaagaaccttgacagtttttcttgttgctggattgtttttcagttggactactctagatatgcatgtttgcattttaaatattgtgatcctttgctttgaagttggatcttttcaatagctactcactatagaagatcttagtgaatgattagttagttggatcaaactgcaggatttcatcagttgattctcaagacagtgacccct

SEQ ID NO: 103295 - DNA, 750 bp, Mimulus guttatus
  Intron number 1 from transcript mgv1a007352m (locus mgv1a0 07352m.g) derived from phytozome v7.0 (chr-ID scaffold_220 ; pos 139753 to 140502)
gagctcgccgaaacagtcaagcccggctcgggctcgtctacacccttaattggaacatccaattaaattccacaagatacgcaattaatgaagatatcaatttgcttttcctcaaaatcatccacaaagcaacggtaaagtgaaattttacctctctcttcactttatttaaagtaaataaatatcattaaagaaaaattaaaatattacccgaataaatatctggcacttttgaattttccattataattcttccatttattgctccaaaaaagtatttccttccaaattaaccgcattcattaaaaataaaaataaataaaaaaatcgtcggcaccaatctccctctggttaaaattcaattccaccaccaataaacagatcaaatatataagaaataaataataaaaccccacgttgtcgtctgtcggcgatcatctatcttctgtaagaaccattacttctccttcttcattcattcagaccaagcaaaaatttcttgaaaaaagttcagttatgtttacagcaaactcgccggagaagaaaccaacaaaaacaatcaactttttacagacccgaatttgtttcttcctcttcgtaattttcttccttattcaaattatcgtaattttcgtatcccgaagttcacgcctctgtttaccaaccgtccgtacatccgccgtcgccggagaagaagaatgcccctctggcaaagtgtacgtctacgacctcccttccactctcaacgaa

SEQ ID NO: 103296 - DNA, 472 bp, Mimulus guttatus
  Intron number 2 from transcript mgv1a011154m (locus mgv1a0 11154m.g) derived from phytozome v7.0 (chr-ID scaffold_30; pos 1677202 to 1677673 reverse strand)
aaacactcgtgcccacatcgttgtactatgtgagttgtttattagatgcaaattttcgtttatcagattttcgatatatctgccactcacattttcttctctaattctaatacgggcctctgccaactgccaagttgaatgagtttttcttgaaatggtttagccgcatggatttaaaggctggtttgaattttcttgtttatgcaattcttcttgtaattgttgggaacgttgaaaatctgactatgataattttgattcccatagtactcttctttaaattagataaaggaattggataattactctttctttaaattagaaaattcggtattttggacagttgagaccttcgatccagttaaaagatgatagtaattcattctgcaaatggattaaacgattaactttgtatctttagttgttttgtttcttctaagtagcttcaattgcattgtcattttccaggcac

SEQ ID NO: 103297 - DNA, 585 bp, Mimulus guttatus
  Intron number 1 from transcript mgv1a010099m (locus mgv1a0 10099m.g) derived from phytozome v7.0 (chr-ID scaffold_24; pos 1736718 to 1737302)
gatccttgcgtaagttcaactcacagaatgattattagttatttttcttcctgcagatttttttccttggtgtgttaaactaagaaatttgaatttgattattgcaattctaatttgtgcgaatttgtagaattttgttttataatcgtattatttcatagtttctgaatcatattaggggatatttttgcttgcttcgtattataatttatatctggagaactatgaatcgagccaaacgaattaggggtttataaatgaatcgagtcgaacgtgtggttgttcttgtttgaaaatttatcaagctttcaaagttttgtttcagcttagtttgatgagcaccatccactcgagctcgaacgagttttgatcgagctgaacatgaatcaagctcaagcggagttttgtagcttatgaaccaaaaatgtgctcaagcttgatttcttatgttaaacaaaccgagtgctgaaattgagtatcgagtaatttgatttttgattagattattgagtccgatttcttgttcttttgttttgatttggatttgcaggtacacaacctttgcgggtttatttcctttattat

SEQ ID NO: 103298 - DNA, 543 bp, Mimulus guttatus
  Intron number 1 from transcript mgv1a006019m (locus mgv1a0 06019m.g) derived from phytozome v7.0 (chr-ID scaffold_87; pos 700609 to 701151 reverse strand)
gtcaaaccctttgtagtaatcgacaagaaaaaaaggttggtgttatctttaattttggggggttttaatttatttttatgtgcttggttgatgaacaaactctggcggaatttccaatgttttcttgattttttatttattttttgtatggggagattgacagaatgtcagaatcatagaattgtagggtttaaaaattaaataaaaaattacaaattagttcagatttaggtgaattttttcacctgtaaagatattctgctttgcatattattattaggtatatagtatatgagattttttcgaatatttttcgaaatcccgtcttcttgatttgagatacattgttgcttttcttgatcattgaatcttgatttgagatacattgtagcttttcttgatcattgaatcttgatttcacttgttaaagattatgtttggttcgaatatttttcgaaatcctgtttttttccggatttgagtccgttgtatctttttcttgattattgaatcttgaatcttgatttcacttgttaagaaaag

SEQ ID NO: 103299 - DNA, 867 bp, Mimulus guttatus
  Intron number 1 from transcript mgv1a019270m (locus mgv1a0 19270m.g) derived from phytozome v7.0 (chr-ID scaffold_32; pos 428258 to 429124)
ctcggctacaagcaagagctcagccgcagcctctcgtacgtttctcgttttctcctacttaatttcaaattaattttttttttctctctctctctctctctctctctctctctatatatagtatttctctgtgattaaccaaggattcaccattttaaaatctgtgaaaatgtcgataccctttttgttttccgtttcgaattttgtggcgatattccgtttaaaggttcaccgtttgtccattcccgatcaacggttcgtcactgaagagattatctcccccaatcaatattattattatttttttttatttttattattattattatgagtatcaaagtagagattctgccgaagaagataatattattttatttttattttctgttttacaagaatataaaataaatttttccttattttaagtatgtgacaaaatcaaacaatgtacgtattcagatgggtagagtgtagactcatcaactcatctattcgtccacattacaacttgcaaatcaccataagaatatggatttttatatatttaacagcaaaaaatgtctcggcaagtgagcctgttgcaattgactcaggttcgagtcacttagcaaacaatcgctaggtggaccttgtcacaatagttagcctaatgtggttgacgtctctcgtatggttttcaagttaattacccagtgcagtgcgcacatatatagtcggttagattccttcatcacaaaaatatccaattttgatatataattttatttaaaatacgtatgaatctatacaatttgagttgggcttgattatgttttttattatgtgtggacagggctgtatcaaacttctcagtgactttctcaataa

SEQ ID NO: 103300 - DNA, 674 bp, Mimulus guttatus
  Intron number 2 from transcript mgv1a012259m (locus mgv1a0 12259m.g) derived from phytozome v7.0 (chr-ID scaffold_22; pos 1334122 to 1334795 reverse strand)
tcaccagttctctaaaacccttgacaaaaacttgggtttgttcttccccctttatctctctctctctatatatctctattttttttttcatttttttttcttggttttattgcttttgtaatgtagatatttgatcgtactgctgatatagttttattttgtgtgatttacttcgaaagcgcgttcggatttaaagtgtaaaatttgctttttttattgatgtatagttaatgtagatgagggatattctaacaaatctattttgtatgtttaagtgtccgaggatctgagatgcagtgatactttgttaatttagttgaggaagaaaaagtatctatcaatcaaacatttctatcgctgacattgtatggatatgtttgtttacttggaattattttcacttacagtccagccttttaatgtcgttagagcttttgccaatttgtttcaagaccccctcaaatttgttttacattagtttccctaacgtgttatggttactttagtttaattgctgactgcatgattaagcataatgccattttatttcaactaacgtttatccatgattttgtaatagttgagaatgaacatgtttattttttctttacgtgtagaaatttatcggaatgtattgtttttgttaatgaattgcagcaacgagcctgttcaag

SEQ ID NO: 103301 - DNA, 303 bp, Mimulus guttatus
  Intron number 4 from transcript mgv1a013678m (locus mgv1a0 13678m.g) derived from phytozome v7.0 (chr-ID scaffold_257 ; pos 236724 to 237026)
aactagaggtactttttgatgtgtatgtatcctgatagttgtacatgattagtggttacgcttttctgtttattttgcttattcggtgaagatgtgagttatggtatagttggatttcaccaaagttctggctgttttcgtgtttttttttttttttttttttttttttttcaatttcaagtgtgccttaacctgtagtcaacgtttatataccttgatgtacttttttattgcataataatttgatttttttcgttttaacttttttacctttctttatgaattaaaaacttgcagttagac

SEQ ID NO: 103302 - DNA, 719 bp, Mimulus guttatus
  Intron number 1 from transcript mgv1a017985m (locus mgv1a0 17985m.g) derived from phytozome v7.0 (chr-ID scaffold_16; pos 2560866 to 2561584)
accaagttttgaattcgccgctggggaattcacacgaaagggaacgtttttctaatgaacattccttctcaagaaaacttcaagtcttcccttctagagtcagaaccctaatcattcacatgcaatttgatgcttcctttcctgctgctgtctagcaaagagccaaagcgttcaggtcagcaactcaagcttcgcctacttcggaaggatccaatgataccaattgcttgaacatagaacaattgtatccgatagtatacctttcattcaagagtggatgattgacctatcgaagaaaaaaaaaaaagaattcaaagcatgattttctattcgatatctgactcgggggcggtggtaggcctgcgccgggggagcatagcatagggagctagggggtatttgcttaggagggtctatttaatcacttactgacagaaaagagtcattcaagggaagaagcttctcggaacgggtcggtagcagccgacactcgatcacactatataagagattccggaacaaacagggcatcagcccctaaaatcagaaaagaggacttcgtggccgatggacaatttgttgactattacttatcaaatcttgctctagaatctgatttgattttgtagtccaaacgatcccataccaggatgtatctggaatagtagtaattagtgaaataaaaagacttgtacaaaccgttgcagtaattcccctag

SEQ ID NO: 103303 - DNA, 751 bp, Mimulus guttatus
  Intron number 3 from transcript mgv1a012561m (locus mgv1a0 12561m.g) derived from phytozome v7.0 (chr-ID scaffold_308 ; pos 196000 to 196750 reverse strand)
gagtccaggtaaatttctttctagggcacaatttcccatctcgaatttattaatttgagacagtattttttgtttcttcgtttttaacttcagttatattttatttgcaagtacatgattttcttcaacgatttttacagttgcattccgtaaaattacagcatggttcaccaatcacgagtttattctcagtgttgactcgtttacttgatcttaaatatgtatggaatttcgtttttgagttaactcggttttttttttttggcttgcaatgtgtatgtatcatacttggatgagcatacggaccagtttattctgtgtatatagatatatatagtacttttaggcatcgtttggttggggaaactagccgtgattaactaaataattggaattttttcgatgtttggtatacccaagaacttctcgggtcgacccgcaaatattatgttatcagggcttatctaaccttgccttttagggagcttccatgatcaaataaaggttttcactagattatttaatctttatcttggctaatcctgtcttggcaaccaaacgaggccttagtatattataatccttttgctcacgagcaccatcaaacctatttgcggagttttttttttcttgaataagatcatattatacaatatccataactgtgaaattttttgaattttctctttctatttgctcgttttatccaattgcagatctagtaataggaaaccaacaaggggccgtgttt

SEQ ID NO: 103304 - DNA, 545 bp, Mimulus guttatus
  Intron number 3 from transcript mgv1a003594m (locus mgv1a0 03594m.g) derived from phytozome v7.0 (chr-ID scaffold_7; pos 875874 to 876418 reverse strand)
gggccaaaggtaactaggctttagatacagtacttcttctttgttctgcaattttaggagaaaatttgattaaaataagaatatgacaaactgcacacgacaaatttttttatgcagactaccgaatctgattgatggggctgaaaatttgaatagaaatgtttgcaaactctagttcatgatagctaacaatatgattgtgtgccctagcatttccatcttgatgtgctatgatcatgattgaatagataaaaacatgggtttattatgtactattttttttagtttcgggtttgagattgatggagtctgatgtggctgttatgagtttttgtgtttccgttggtctttattcgcttctgttatgggttcattgttcttgctacttttattactttgatatttttagctacttaaagtcattaaacgacaggatgttggtgaggattcaatattataattcaacgctaatcattctattgctgaatttgtaagacgcttagaatacaaaatagccaattcttgaaatcatatgcagggtcgtc

SEQ ID NO: 103305 - DNA, 528 bp, Mimulus guttatus
  Intron number 3 from transcript mgv1a022172m (locus mgv1a0 22172m.g) derived from phytozome v7.0 (chr-ID scaffold_564 ; pos 24809 to 25336 reverse strand)
tcccaattacattcgggtggatactcgttttatcttttttttcctggaaaaagctcttactttcttagatatatatatatatatatatatatatatatatatatatatatatatatatatatatatatatatggtaagctcaatgaggacaagctatgttatacaattcaagaacttctgcgttgtcaccgatagtgcaactttgtcaaatataattctagaatttagccttgaacaaggtttctagaaacttctcgcacatatattgtgtggagaacgagttatgtttcgttttaaacaactcaaaaaattaatccactttcattcatttctttgcttcttaaaaaaaataaaaaagtttagccgtatataacatgaccttacaacaccgcaaccaaaaggattcgaacaacaaccttgttcttttacattgttggccatgtggtcgtacctagaaattctttatttttttcttcttttctcatatgcctctatactaagctttaatgagtatatcttgtgtttcag

SEQ ID NO: 103306 - DNA, 820 bp, Mimulus guttatus
  Intron number 1 from transcript mgv1a006955m (locus mgv1a0 06955m.g) derived from phytozome v7.0 (chr-ID scaffold_1; pos 3135509 to 3136328 reverse strand)
cctccacacatgtactgcttcttcttcttccccaatttattttttgttatcgtggttttttacttgtgattctcggtcggctattgaattaatttttggggattgtgtgtatacttgcgatctgagttttcctgtgcagatttcgtgttaatgatgtgggtattttggatgtgtgtttgtggattgtttctaaattgatttgaatttgttttgcctgggcgttggtttccttagtcggtttaattgaatattaattgatttaaggagggcatttatctcaggttttcatttattcatcaaaataggggtaattttggtactgtctggtttatttagcccaacactcccccagtaattatgattgaatttgagatagaagcatgcctctgttagagttaggagaacatgttcattctagatcttcaacaaagactggagaaaatttgaataattggtggcgaatgtttcatcgattaattggtgctctaaacaaatattgcctaaaagattaggttgcttcaggggaaacaaattttgacttgtatcgtgtacatgtttgtcgccattacttggatgatctcatgtgcaaagagctttgctactgtttatgctaaggtgacttactgtaattctgtgcatttccggtgtaaatgttttgcatttcctgtgcaattatgtgcattttttgttgtcatatttgaaatctgaggtcaaattaacgacatgacctttctatcaatcagaaaaaatgtgtgattttgagaatttctcactgatggaccaaatttctttactttgcctatcttatagtttgtaggaa

SEQ ID NO: 103307 - DNA, 987 bp, Mimulus guttatus
  Intron number 1 from transcript mgv1a002706m (locus mgv1a0 02698m.g) derived from phytozome v7.0 (chr-ID scaffold_7; pos 14063 to 15049)
acaccaccaccattgaccggcgctactcgcagcaggtttttttcctctccgtttttactccaaaataaattgccttttaccctagagatgatagagaatatgcaataatttgtttttatcaccttttccttttaattttttgttgattatttcactatgtcatatgtaatgatcagccacgaaattgctcccttgataatattaggcgcactgcggttctccaaccgccaattacaaagaaaattaattatcattactgaataatatacagatagcccttatgaaaggatgaaatagcaaatatcatgattcatgtcactgcatctacttcgacaatttatatcttttaagatgatgtccgtctttcctcttatggaaggaggatgatgatatggaagcatttaagaggcttggtaatgtttatcagcttctagttcctttttggattgtgtttgattttcgacggactctgcatctttatttgtttcggtttcaagtctttcttaatttttttttttaccttttaataagccacacgcagcaaaggaaataagaacatcctccctaatcagcctaacgtgataaataagcaagttcaatctgaaagaatttatcaagctgatagaaaataaatagcctacttggaacacaaattcttctatcttgtctttccacggtaggctgcatatcgtatcccttaagttaccattatgatgtcaccaatggagatatttccaccctatgacttctatttgttagccctacttgatgtagattcttatttgtaatgtataaagtggatgttgcagtgatttaccgaatggctcgtccggccatcatgcaatatgcaatatattgacctgatatttatggtggttatcctttttttcttttttaagtgtagtagacaaatcaatttcttcaagtgttttttattagatgagggatttcaatctaaattttgctcttcgtattgtcagcaggcag

SEQ ID NO: 103308 - DNA, 389 bp, Mimulus guttatus
  Intron number 1 from transcript mgv1a023212m (locus mgv1a0 23212m.g) derived from phytozome v7.0 (chr-ID scaffold_102 ; pos 277254 to 277642 reverse strand)
aaggtaacatataaacacacacacacacacacacacacacgttggtgtgtgtgtgtaccattgataatctctttcattggattttttttactctaatttagtagtaagtagtgagtatatagttattgaagttcatcagattagattattgaagttattgaagaaaaaaactaaatggtttacttacagatcttatgaagaaatggtaatgtagtgatgcattgtgttacattgcatttgattctatacatatatgaactttgtatctattgctaatttcacatccactggtctggttagatgtactattttcaaattttcattgtttctttttaagtaagtaatcttgtgttttttccctttttttgggagtgatttttagttacgaa

SEQ ID NO: 103309 - DNA, 852 bp, Mimulus guttatus
  Intron number 1 from transcript mgv1a003306m (locus mgv1a0 03306m.g) derived from phytozome v7.0 (chr-ID scaffold_206 ; pos 324999 to 325850)
ctaccactttcagcccaccaaacactggattaacggtaactgctaaccccctttcctttgaatttttacaacatccatatatcatatatgtatctatgtatgtatctatgtatgtatgtatgtatgtatgtatagatccataatgtggtaatggatcttgggtttattcgggttcggattaagaaaaaaagttgaaacattgtttgaataattaatgttgtttttgtcggttttcttgatttcaaggcatgttttaaggttatggaggtaagaaattcaatttggtcaaagatcacatcccagaaaattgcaggaatattaatgacacattgactcacaaatcacaatatatgcatagagtcatgatttggattataaaatatttaccattaattatgcaccaaaaatggcgaaatccctctcgccgcatttacggggtccgacagaattttgatggaggaatgtaagttacggtgactcacgggacacaaagtacaatttaaagatctatgcaaataatagacaaaatattccattttggattaaatccactagtgtgtggactcaccaccactattccatatggtcccctaacaagttgaaccatttttctctctttaattttccacttgaaaaatggcacaatgaaatatcctacttgatgacgacagtgatacgtcactatctcatgcatctgttgcatctctatatatctctatttattattatgttaaattaagttacttttttgagaggattcttgcattgttcttatcgattatctaaccattttttttctttttcatgtgccacgtgtgtgattacaaaatgaatcaacaacatcagatccaa

SEQ ID NO: 103310 - DNA, 693 bp, Mimulus guttatus
  Intron number 1 from transcript mgv1a007890m (locus mgv1a0 07874m.g) derived from phytozome v7.0 (chr-ID scaffold_130 ; pos 283079 to 283771)
aggaattcttctgttgatttttgcggaaaaaaaaggtaattcaaatttatgcgtctttcttcctcatttttttctcttacatctttcatttgggggtttttaatcggattgattaattgatgggaattcttgattttttttaatttaattttttcttaatcttgtggggtcaaatgccttttgcctttgttgggttgaagagtatttgttcttagacgaagagattgggtcgttttcttgggtgggttttttattttttttattttatatttatatatatttatttagttatttagtttttgtttgtgatgaaattatttggtgtttgtaattttttgaaagtcaatacatatttttccttgaattattcatttcagatccttatactaattcctctgattataaaagatatatatgtgtgtgtgtgtgtgtgtgtgtgtgtgtgtatttcttgtgttatttgacttattttattatcttgtttgcctattgatgatgatgaaaagctatttttttttttttttgtaagaaaaaatattgaataaaaattataaattcttgcgataagccgattttaaatttagttcctgggatcgactgtattgttatttgcttatttccgacaacatatttcaagaaataaaacccgatttgtatttgtttcagcagaggaattcctgagttgcagaaaac

SEQ ID NO: 103311 - DNA, 524 bp, Mimulus guttatus
  Intron number 2 from transcript mgv1a006677m (locus mgv1a0 06677m.g) derived from phytozome v7.0 (chr-ID scaffold_207 ; pos 136204 to 136727)
tggtttatttgggtaagttttctgcaattaattttaaatgtatttatttccattaaaaaagaaattgtgtgaaatgcagtttgaaattaattgctatgtgaaatttgttgaactttatatttagctttatgtgacaatcagttgtcttctgttaactgttgcaatctagttatttcaccaccaacattaaataaagtgactaaaatggcacatatttataaataatatggaattaaattttgagattcgatagcttttataatatatattcggcatttctctagggttcttagccttttcgtagtttcttgaattcaagaactttttgtgcatttcgttttatcggtataacggatttactatctttttttgcttatggaaggggctaattatgtgggattttgagttttattaaaaaaaacagattgaattcaactaatacgaaaaaaataaaaaatcgatcgtaattaatttctcgatacgtcgcaggggagcactagggcaaaatctatacttgaaagccc

SEQ ID NO: 103312 - DNA, 722 bp, Mimulus guttatus
  Intron number 1 from transcript mgv1a006172m (locus mgv1a0 06172m.g) derived from phytozome v7.0 (chr-ID scaffold_161 ; pos 341827 to 342548 reverse strand)
gccactgattgctatagccgtgccctagaaatcaggtattcctttgttcttttttttttttttaataagcagatgaaacccttcttttgtgagctctaatttctgataagtagaagaaatgttgagcgttgattctgattagtggaagaatgtttatggctgtgtgcgttttcacttcgattatgcccttcaacttttacgtttctgttctcttcgtttcctctgcttgatatttaggattgaagacatatattcttatacattgctctgcatacattaataactattggtatgatgtagagaaattttatagaaaaagatatgctgatattcttgaggttattttgatatgattgatcatctctcgtttttccgcgggtttttactatgttgtttgccacttaatcctgatcttttatcttccaaattatgcactaaaagcaaagaaattgtcttataacaatatctggaaaagcaagatcatggccaaaaaattagattgccgacgttctctcattttttttgtgttctggacgaactaacttgaaaatgaccctgatttttcattttgagtttactgcataccttgcagaatgttagaattgttcatggcattgcacattgtcctttgattatttccatttccacatcctaaaatcgatgtatgtgttaaattggtgcttctagggttgcacactttggcgagcttgctcctgagtgtg

SEQ ID NO: 103313 - DNA, 649 bp, Mimulus guttatus
  Intron number 1 from transcript mgv1a024259m (locus mgv1a0 24259m.g) derived from phytozome v7.0 (chr-ID scaffold_62; pos 217659 to 218307 reverse strand)
acgcagaacggaagcacggtaaagaattaatttctacgaattaatcctatagaacaaaataacattcggaatccaccgaaaactctggaatccaccagaaaaatagagaaaactctaaatattttattaaaattcgaaaattcttcttaaaataaagacctaaggcagctatttatactaaaaactgaaaaccctaattaaactaagaaaatactaaaaattaccaaaaacggcaaaaacgagttagagtttgattctagtagatctcgtaattttgggaacaacccaatttacggaatcctaatccgatttttctatgatttgatattaattttctaaaacttacctaaaatagcaaaaacgaacttttaggagtccaaacgacgttggattgctgaaatttgacgtgattcatgagctttgctcatgagttttgttccttgcgccgttttacttgagatagagttcgtttcgtactcaaatacaatttgagttcgttgaaaacccttatttttccgtaatttctttcggtatctccaccgatgcccataaataactcttctacgaattaaatagttattttccaattcgaatccaatttggcgttccttatcattgaagaaggaagaagtgaaggttgaggttgaag

SEQ ID NO: 103314 - DNA, 641 bp, Mimulus guttatus
  Intron number 1 from transcript mgv1a021682m (locus mgv1a0 21682m.g) derived from phytozome v7.0 (chr-ID scaffold_22; pos 603308 to 603948)
ctgatcttatagctgcggtgactctgtaagttggtgtcaattgcttgttcttgtttgtttatcctaaatttattgaaattataatctgggcaactgataaaacatgcactcagttgccttcgtttacatttccaaattcttttccatcatctataatacgatttcccgtaaaacataaacaaaaattactatcatgctcaaaatcttttctcacaaaaccattctcccaaaatgaaatatgttcgtttgcatttcaaaaccccttttctcgtttaccaccatttcaaaattctcttgattttaccatttcccgaacatgtaaaaaaacattactcccattctcaaaatcttttcccaaaaagaaatatgtttcgtttacgtttcaaaatcccttttatcattcgagaactgcataaatcggtgttttgtttaccattcaagagcctctcaactttacttataccctcaacatataataaacaaacattacccccattcttcaattttttttcccaaaacactattctcccaaaatggaatcaaacataaagtctgtggtttacgtatgcccgataaaattctgaatctgccattttcttggtgtaggaacaacaagtttgatttggtgagtgcatcatact

SEQ ID NO: 103315 - DNA, 670 bp, Mimulus guttatus
  Intron number 5 from transcript mgv1a015591m (locus mgv1a0 15591m.g) derived from phytozome v7.0 (chr-ID scaffold_20; pos 1882414 to 1883083 reverse strand)
tatacgacgttgctgctatacttacatctgtccaggtaaaattgcaatttcaagaattgtagatcaaagttgagaagcatgttgctaattaaaagggaataactatgagaccctaaaaaattgttttatagcgtaaattacggccacacccctgaggtaaggtgaaattacgaaaaacccctcatgtttggggtaattacaaccacccctcaactatgagtcttcttacatgtccacccttatggtgtaaaattcaacataatcttctagattccgtgtaatgttcttttgtttgtactcgttttgtgtaaaaatgcagttctagatacaccacaatctgatatttacaagccaacagatacatcttatgatcatcttgtttcaaaaatatgggctcgaatgagatagaacgggtactaacatgagggtttttttcgtaatttgacattacctcaagggtgtggccgtaatttatccttgttttataattggtggggatatgtttttcttggttaataattatttaaaaaaaaaaaaagcaacagctgtatttatgaatgtggtcctctctctattgttaaattacgaagttgtcataaactattatttattgtattttcgtttacgttacgcagtcgttgttgtgcgatccaaatccgaattctccagc

SEQ ID NO: 103316 - DNA, 919 bp, Mimulus guttatus
  Intron number 1 from transcript mgv1a015591m (locus mgv1a0 15591m.g) derived from phytozome v7.0 (chr-ID scaffold_20; pos 1883829 to 1884747 reverse strand)
cttctcctcttcagctccatcccttcacgcaacaggtaatttgcgtattcagctttctataattagattttttattcgcatctggattatttatttctgaattaattttgctgattaattagtttcaattcaattgagttgagtttagtcttcatatggaaagaaatgattaatccgattcagagtaattatatattggttttgttttggagtaatttgttaattaatttagctgaatcttttcttttttcctcaataaaaagcgattctttcgaaactcgactgggtaacctagaaattgggtgtattagtttatacggacggattaagttcaagctgctttgtgcttgagctagatttgatttaatttgtatatttgttttattttatttttctaattgagctcaagctcgatccgaactttatgtactgccgaacggaaatttatatatgtttgtgtttggttcggtatactaacaaaacaatctcaaaacatggttttaactatcgatccttatattcagtggcgagtccaggaattttgtacagtgtgggcttaaaattttgggggtctgggggcagttcccccaaaaacaaaatcgaaccttttttttggataaattaagaagagaaaaaacttgaggttttttttttttttttttttttgcataatttgagttttgggtgggctatatatatatatatatatatatatatatatatatatatatatatatatatatatatatagggggtgcttgagtcctgcttatattaggtattctagtattgagtattggaaatgttaatttaccttcggggagttggtttcggggaccggaaattcttgttactattggtgcgaattaatcgttttttttttttttttttttttggtaatgatgattaggcagttgag

SEQ ID NO: 103317 - DNA, 596 bp, Mimulus guttatus
  Intron number 1 from transcript mgv1a001225m (locus mgv1a0 01225m.g) derived from phytozome v7.0 (chr-ID scaffold_59; pos 755522 to 756117)
aagtggaaactgagtctgcccaccaactgttcgaggtgggttccatctcaatttcttcgctttttttttttttgaattttgggtcttggcatttgggaatctacactttaaagtatgacaccaacaatgcaagtagagtttcatgttaccttagcaaaaatttgctttatcacttgaatcggtaaattgcgtaatcagaatttgttttaatttgctttactgaagaatattgaagtggagattgggtgatggattgttttcaatctctttatgcatgtgtttacatgcacttaacgtttgcctttttgtactttaaagtttaaacaaagttgtttcttctggtatttccgagttattttatcttgaagtcgtatagatatattgtttcctacgggtgttactaatgaagcacttagtgtcgattttttgggaattaatatggttttgaaaacagaggtcttttaatctgactggatagtttgtttacgtttttcgatcttttaacgtttatgagagagatgaccttgcctgatgatataaattgatgatggagattgccagagtttgaaagaagcagagagagaacgagtaaacca

SEQ ID NO: 103318 - DNA, 447 bp, Mimulus guttatus
  Intron number 2 from transcript mgv1a013250m (locus mgv1a0 13250m.g) derived from phytozome v7.0 (chr-ID scaffold_140 ; pos 263670 to 264116)
aggtgagtttcgtccccttttttgcacttttggagatgttccgatttgatttgttgatagatggtttgttcttcgttgatttccagctagatacgtacactgttgattttccgattgattgtatttactcattaattctgggtatctgattttttttcagcttatattttattcttcattttctgctatcttatgcgaccaaacagagagaaaaaattgcagtgggaaaaattaaaggaaaaataaattgtttgatttagttagtgttaataacgttaatgatgtttgttgtgggatgagtgaattttttgagaaaatattagtctgaaaattaatgccatgaattactgccagattgagtgattagctaaacctggtgcctggtgtaatcgttgcttatgtagattgtgtatttattgcagcacaataagcctttgaattcacaaa

SEQ ID NO: 103319 - DNA, 469 bp, Mimulus guttatus
  Intron number 2 from transcript mgv1a008508m (locus mgv1a0 08508m.g) derived from phytozome v7.0 (chr-ID scaffold_4; pos 4003987 to 4004455 reverse strand)
gagacccttacactcgttttctctctccgaccgaggtaatcagttcttcaaatttgatttctctctgtaatggatagtatgtttatcgagttgttcgtagcatttatgtatttgaagttagtacttgctggattggaattctattgatataaaagaatcaatacttaatttcaaacttaaagggcccacattcatgtgatcactgtatctgggttttcggagctaggttgcatttacatgccacattttctttattgtatcgttttagtttttttttttcatggttccaaattatattcttattaatttacttgaaccactcaaactacacttactttgcttttctctcaaaaaagaaaaaatatgaacccagtccttgtatactcatatcaatattgttttacttacaacactcttcagttttctcattccatggtgttggttccgtcatgaacaaaagttctccaag

SEQ ID NO: 103320 - DNA, 335 bp, Mimulus guttatus
  Intron number 2 from transcript mgv1a018633m (locus mgv1a0 18633m.g) derived from phytozome v7.0 (chr-ID scaffold_192 ; pos 229956 to 230290)
tgttgtaattcccgcagacccatcttgaaggtatgatcatgaattaaaacttgctgaaagaaaaggagttagatttaatctcatgcaagtggtattttatatatttagctatgaaatacatgtctcttcatagcaaggagaaatcattacatgtctgtgtttaaaatcttttatttgtttctttttgaatgttgatttatgatctaagccacaaggcatgtcattccttttctcctcttgattgttacaggttttgttcattcatatgaagtaagttgtttttgaatttgacatatataggaaactctgagactgtgcgagaacaggcgtgttat

SEQ ID NO: 103321 - DNA, 806 bp, Mimulus guttatus
  Intron number 1 from transcript mgv1a007551m (locus mgv1a0 07551m.g) derived from phytozome v7.0 (chr-ID scaffold_75; pos 768108 to 768913)
ttcttctctacaaggagcttggtaggaggctcaaggtctgtttttcttctaattcttgaaaaaaaaaattaatctttttttttttttttttttttttgatttcctgaaattattgaattagtacattctgggagtaagttttttttaattgggttagagtatagtgggagcaattattatctgctttaattttttgctgactgtgagaaaatttcaagaacttgttttgaggggtaagaacaggtatcaaatgaatctgatattgatgttcttttgttgtatttgagcttgaagtgaatattcgaaaattatttttttattttttagtttttttaatttcctgaaattagtgacttgttacattctgggagtatgttttttttttattggccgggttagaatataatgggagcacttattgtctgctttagttattttgaattttttgctgactgagaaatttcaagaacttgttttaaggggtaagaacagtgtcaaataaatccgttattgatgttcttttgttgttgtatttgagcttgaagtgagtatttgaaggccaaagatcgaaactttcttatcgattgtagcattcgcttaaacattttcgatatattaacgaatttgcatctccacttgtaaaatgtgcttaatgatcttcacaagttactacattcagttggctctttcattagtgaaacttgttacacaaatactaggttgttgtctcagccctcaacctaataatatatagatgatttgtctgtgcagaaaaccaaccctattgtagcagagattttctctct

SEQ ID NO: 103322 - DNA, 999 bp, Mimulus guttatus
  Intron number 1 from transcript mgv1a008373m (locus mgv1a0 08373m.g) derived from phytozome v7.0 (chr-ID scaffold_198 ; pos 40958 to 41956 reverse strand)
tcccaacctgccgaggtatcctacaggttaaatttctattcttgtaattacaattcttttaaaattaattttttatggttattttgattcagttattgattctttaaaccttttccgttgatgggaatttagggttttgcgacgttcaattttgtgttttatgttgtgaaaatcatctgtagttgctcaattcatgtgggttttgacttttgattcatgggttgtgagtataactgtagaattgctttaatttaatttaatttaatttgatttttttttgtttaatgtatctgtgcttctgatataagtaacgttgaaatttgattttagtatcatttaaggtaatgaggctgtgttcgatttttttttttcggttgatcgatcggttgacttttagtcgaaaatttcttctttggttctgttattatactgcttatgtaatttcttctttgaggcatcgattccggtacttgttttcgctttattttctcgtatggaaagaccctttagataaatctattcgatcaaaagtacaagattttctcgtacgtccatggtgtcgttcctctttctttactaatgaattacctttccgtttctttcttactgcatcttactatcttagcgtttgtgcttgccgatctttgcagctgtggttcttgcggatatgctctaaatttgacgtcatcgaatcgtgcaacttcaagcatcggatccaagtacagcaaatccatcaacaagggctctatctcctttctctctattgacccgagccgatttactcaagttgacgaagtcaactgcctccctataacttggggtcgatatcgttcgaaatccaaactcctctgccgcagctgtggggttctcattggttacggttatggagactcgaccgctctctgtggcctcgaatcgccaacctcgtccgcctcatcttacaagaaaatcaccgtgaaaattcgagctctccaaccttccggaagcatctaacgtata

SEQ ID NO: 103323 - DNA, 861 bp, Mimulus guttatus
  Intron number 3 from transcript mgv1a004913m (locus mgv1a0 04913m.g) derived from phytozome v7.0 (chr-ID scaffold_119 ; pos 612242 to 613102)
ttggagctacatcttctgctactcttttgattcaggtacaccttacactctaatttttcgtgccattttttattactgtagttcagtagtattattatatttttcgcttaatctttgtcaaatttatgatggtttcgagtaattcattattctgcggtttgctggggatatttttgagattattatactgatagacgtagatattgtccgagacacttcaatgaactgcaatgtagatgggtaagcataagatttctcaaagttgttcgagtaaattatgtgcggatggagagctcgtagcatgattggctgatctttgtaatacagattctcgttttattatatttttgtttcagtttcaatttctgtttttgacatgtagatttagtgtgtcgtatgtgcaaaacctttagtaccattggtttgctttatattgaaaaatgccatttttactcctcattttgagcttgtgtgttctaattttaattgcaacattaaaaaatattgagttaatccaaataacccgagttgtggttggtgcattaatcttatcatctttatggttgttggtttctttcaaattctataacatgtgggtgaggataatgtcttagaccggaatatgcttttatttgttcatgcaagttattgattgctatcaaatgtttgttaagctaatactcttactatattagctttatttttagacattgtaatggaggagtttaaatgcttttatataataatctgggatgctccaaaagttacggccgtacctatcgtatttgacagtaacttagttcaatgctaattgttctatattttcttcctcttgcagtccgctacactgagtggagtttc

SEQ ID NO: 103324 - DNA, 1008 bp, Mimulus guttatus
  Intron number 2 from transcript mgv1a010109m (locus mgv1a0 10109m.g) derived from phytozome v7.0 (chr-ID scaffold_188 ; pos 405139 to 406146)
tcgtcctccgcgacgtccgcggcagctccgctgaggtaaaaatttattatatccttcaaaattcactttattgttcgaggctgctttttctagttttttgcttttttttccggcgatgcttgtaaactgagagtggaaatggattgatctcgattcgatattgttcgatctgtacttttttttttaatcgaatgttatgtgatgaattgattgtttagatgtgtgtgataattccttatattcgtgtcgtactgtgtgcttcggagcttgtacaatgttgaatttgggtaacaatgtgatgtggcagggttttaggtggtgattctgaagttttagtgtgaacaaacttttcgaggttatgttgcgtgttttttgaaattttacctcggttgtgtccatggaaaagaatgtctaaaatgtttgatttattgtgtaactaattaaactgatgttggatgttccgtactgattcgttgtgcttcgttcccgcaaatgtgtgaatatattattagtattgagatcattgaaattttattcgtagattgtattgatttgtacccgtaagcgggactaagcatgttgcggccaaaaggctgtatttcttctagagatttcctgattgttccagtcagtgagtctagaaattcatttcggccaaacgaaccttctcgaactgtttcttgttgcaggtcttacagaaaaaaggattaagttaattcggaaaatatattcaaccaaccccaatccttttaccaattaacatattagaagatttcacaaaccccttatcacttagatttcgacttttcggggaaatctgagcgaatgaattagtggtgatctaaatgacagaatgtaatgtagaatatgttcatgtattgttctatctgagtgatgtgttatttatgatttgcgtatctcaaggagtgcatctaaataaatatttgtaatgttatatcttcattttgcaagcttttgtgactttatcttctttataggtctattttt

SEQ ID NO: 103325 - DNA, 748 bp, Mimulus guttatus
  Intron number 1 from transcript mgv1a005391m (locus mgv1a0 05391m.g) derived from phytozome v7.0 (chr-ID scaffold_64; pos 871300 to 872047)
ccctccgccgccgaattcgtcaaaggcatcaaaaggtgtgctgatacacacacacacacacacacacacacacacacacacacacacacacacacacacacacacactgttgtatgcagaaaccaattgcatgtttgatgattatatctaggaaattgaagctatttagtgttgtatttgccagccgaaattgttgttcccgttgctgggtatgaatcgacgaacaaaattagtggtggatatgttctatttcagtgaatttcggatttagttgaagttatttgagcctaagagactacatttggtgaataatttagttgctggatacaaaattaatgaataatttgaacataagaggctacatttggtgaagaaaataattaaattacctgacttttagtgaattttcgactgtctacatatttatgccacttcaatttgtagctcctgtgctaacttcgtttagttatttaatggtgatgccaaaagagttcggttcttgtctggttggttctctgatttcaatatgatttgtgtagtcggagattttttttttctttcttgaattgtttgcgaattgctatctgtatcgacttctggttaagcatgaaatggagatcttgcaactttgttaatctaggatttatgttcttttgttatttgtctgtcgactgaaaccacccccagtatgtgtatctgagctggaatatctgcagttttatagtgtcgtttttgaacaacgcgccgg

SEQ ID NO: 103326 - DNA, 789 bp, Mimulus guttatus
  Intron number 1 from transcript mgv1a013452m (locus mgv1a0 13452m.g) derived from phytozome v7.0 (chr-ID scaffold_92; pos 724999 to 725787 reverse strand)
gattcagtaagcggcgcctccttgttcttttttcctgatctgtttgctcttgtatttgattcgtttcttcaatcggattgttgcgttatctatgagattttgtttgattgaccgtcaataatcggagatttacagattttttcggttttgttatgtggttttgtgtgcaaatgaagtcagatcttagttgactgaatatctctcgttgactacattctcaattagttggttattgttctcgatcggatttatggtgctagagatgtgatttcattctaaatggttaaatgagctaaatcggaaaaactagcgtataagcaaaaacaggactattgcaagttctacatggccaatcatttgattttcaaaatatcatctcataaaatttgtctggggaaataagcgttgttgatatgatttagattgatctgagttttattaatgctaaatcattcttacagtacctagtttttggatttcaacactgcatttcgagtgtatagtttacggagatttctactcattaatttctataggattcatttggctgatattttcctaaacttaattgacgaaaggttgcttggatttgagggtctggttgttactttatcagaaatgctcgaggatatgttctgtttttttaagaagtatatagttatgagccgattcttgcataaacatttttttccctgtgttcccttttccaattttccctgtttgtgtcctaatgattcgtgtttttgaatggcagcattttgtgttgtcgcggttgaatctgttggaaga

SEQ ID NO: 103327 - DNA, 776 bp, Mimulus guttatus
  Intron number 1 from transcript mgv1a007100m (locus mgv1a0 07100m.g) derived from phytozome v7.0 (chr-ID scaffold_123 ; pos 745467 to 746242 reverse strand)
ttatcggccaatctggatccttcgtcatcaaacaggtaccaatttttaaaatttccctctgtttttttcactcttctgttatgaatttttaaatgttttttcatcgatttgtttttttggattatgataatttgatgatctaagtggggattaactatttgattaaggacttgaattcacaccagttgttcattaatcttcgagtgcttttgccctcttcatttttagatgtttatgacaattattgtgcgcataattttggcactttgcatccttggaaataatttatggcactttacactctcggaacatgtttaatcgttcaaaattgcaccctagtttatttttcatcctgaatttccattgttgacttattttctgattgtcaacggagtcatttacgctcgaaaatacattagtaactttgcaccctgaagaaaaaatcaattgaaatgatcatgctaacgatcaacaaataagttaacaacggaaaattatggctgaaaaatatattggggtgcattttgaaggattaaactatgttttgagggtgcaaagtgccatttattatttctgggtgcaaagtgccaaaatggtgcatttcaaggggtgcaaagtgaaattaagccattattgtgaaatgacttggtaataatttggggattactcgaacagttgcgtaattgtctccgaataacctatgtaatttgttctctatttgaactggttttaaaacatatgcaggcccttccatacattcgctgtatcggagaatc

SEQ ID NO: 103328 - DNA, 563 bp, Mimulus guttatus
  Intron number 1 from transcript mgv1a001684m (locus mgv1a0 01684m.g) derived from phytozome v7.0 (chr-ID scaffold_89; pos 93525 to 94087 reverse strand)
attaagtctagtcccgtaagtttttttttttttttttttacagagtcttgcattttatttggtcccacgttgaaatttctttgcactcatgtgtaactatgcttcacatgctgattatcgagtatttatattttatattttatttgattttttcttttatatatcggttaatgtttctaatgcatgaaatactgattatcgagtatttagattttatattttatttgattttttcttttatatattggttaacgtttctaatgcatgaaatgctgattatcgagtatttagattttatattttatttgaattttttttatatcggttaacgtttctaatgcatgaaatgctgattatcgagtatttagattttatactttatttgatttttttatatatcggttaacgtttctaatgcatgaaatactgattatcgagtatttagattttatatttatttgattttttttatatatcggttaacgtttctatatatacacgaggtgctaatacacgtagttgtttcagattctaggtttcttcttcgcaggggttgtgctcaa

SEQ ID NO: 103329 - DNA, 1017 bp, Mimulus guttatus
  Intron number 1 from transcript mgv1a018706m (locus mgv1a0 18706m.g) derived from phytozome v7.0 (chr-ID scaffold_204 ; pos 118884 to 119900 reverse strand)
ttatcgatactccaggtacgtacatgttatattctggaataattactgtttttgtccctattttatacatggaaatcgattttagttcctacttttttttttcttttccacgattttaatctcaaactagccatatttttacaatattttggcaagccggttgatttgggtgttagttgcatgttttacacgtgagaatgctgaaataacccccctcttaccttcattttctatttagccacaattttattttattcttcaatttcatcctaaaaatacttgtatagtgttgaaagcctatatcccaatcctcgatcacgtcgtcttcttcttcctctattttccttctcctccaccaaatccaagtacagtaaaataagggcaagaattagcgccgttaaatattcaaagaattaggaattatttatattattttttccctatcttgtggctgagttttagtttgtaattctttgctattcttcataaaacaatcaagccaaatgtattaatggcggaactgctgaaattgggttttattgggattaatatttgttgggatttatatttttaggataagattgtagaattaaagtgaaattggggctaaatacaaaatataggcaaaaagagggtcgatggggttatctcagcatgctcacgtgctagacatgtgacttattccgtccaaattaaggcatatatcaaacggcaaaccaaaattgtaaaaatatggttagtttgagaactaaaatcgtgataaagaaaatatatggactaaaatcgatttccgtgtataatagatgaacaaaaacatactactttaagttctccacatgaaattagggtgcagtgatataaaaaaaaaatgtatatggtttttatgggaagatcgagaagaatgccttcgaacagtgtttacatacaatttcagttttcattttttggtttaaaaatgcctgacttgcaattgatttgccagggttgtttgatttttccgttgaatctgaatttatt

SEQ ID NO: 103330 - DNA, 916 bp, Mimulus guttatus
  Intron number 1 from transcript mgv1a006863m (locus mgv1a0 06863m.g) derived from phytozome v7.0 (chr-ID scaffold_7; pos 479250 to 480165 reverse strand)
ctctctatcaccccggtcttttagcagctccccaggtttgttttttttttttttcgcgaattcatttttgcttatttgaagtacatcggtaattgattatttgctgttgtttcattcattttcgtgatagcgatcttcttctgtatttctcgctattgtcgtgttttttccgcttaaattcagagatttaatttaagtttgtggtggctgttagccagattttctgcttattcaggatttcatgttccgcctcgataggttttcggttggttgactgtagattgggtgttctaactacgtggctcgttaatttaagaatattcgtgcattttgtttgtttgataatacaatgggcaatttttgaaactgttgaattttgtgttttgctgttctttgttatatttggaagctttgttctaggtttattatattttggaaacttttttattgaattttcttacacatgaacacgagtcacccaagtacatgtgctgcaatcctaaataattgaacttgagaaggaagtagtagttaaattctactactctgtagttttccgtgtttggggaattaagtgataaaggaacttattggatttcttccttatggtatggtagtattctagaagtttttcatatgctagctgctttagtttgttagaaatagaataaaatccacatttcattcttctgtttcttttaatgttgccattatggcattccaacgcacccacattgtggcttcgttttcctttttcctttctcttcgagctttacccttaggtggatggttgatatcggcagataacttggaagttttttttttatttctttattttttatttttttatttttttttctgtccgccttctcattttgcagattgagcctattccaagtggaaatcttcctcctgg

SEQ ID NO: 103331 - DNA, 459 bp, Mimulus guttatus
  Intron number 1 from transcript mgv1a013195m (locus mgv1a0 13195m.g) derived from phytozome v7.0 (chr-ID scaffold_7; pos 1841706 to 1842164)
tcgaagtattttacttttttaacctccctctcaaggtaattaataataaaataattataaaaaatattcaccttaccatacgtcgtcgttttactctgagcatttttttcagtttgtgctagaatatggaacatagaaattgatttaaatatcttgtcattcaattagttatgagtgtgacatagtgcaaaattattgatattctgaagtgaagaataatttggaacaaaatatcttgtcattcaattagttatgagtgtgatatagtgcaaaattattgatattctgaagtgacgaataatttggaacaagaaaaattgtctaaatcgataaatatttcggcttaggtagagcgtagtcttttttcattgatcgaattgtggactataccgtaaatattgttcgtacacgatttgattcaaatgttgttaatatgattctcgtgcagacggaaatcga

SEQ ID NO: 103332 - DNA, 778 bp, Mimulus guttatus
  Intron number 1 from transcript mgv1a009258m (locus mgv1a0 09258m.g) derived from phytozome v7.0 (chr-ID scaffold_11; pos 685613 to 686390)
atcacttcaagcacaagttctaccagcgttacatcgtacgatttcgtcctttcttcattttattgcggctcaattttattttttgtttgagaaaaattgctgctcaaattgaatgtgaaatattatatctggtatcttagttactgatgtgaattcagccggttatgattttacggagtgggtatcgcgttttttgtttttaatttccagctgaatcgttgaaggtttcgtccacaaatctattttattgcgtttctttcagttttcttcttgaatataagaatttaatgtgtgaacagtagaactagtagtagtttcctgcttgagtgtgaacacaagtttatcttctcttttttgagatcttgatttttaccaatttacccatgcgtagatgtctgagtatatatggtacatgagttccagttctggcccttttcagggctaattagattccctataaattttgaggttttgaatctcatattttcttcaatgtttcgattggtgttgtagaaaagtggcatgtatatgttattaatgtatttctttaactgttggtagaatctggaatcatagttctgacatgtgttggtcttgtgtagagatacaaatagatttaaataattatcatcttatctgtgaatgttatatagctttatgtggttattagaatgtgggattagggtcagttttagaattttagtgcattggtttatctttatctctagctaatttattctgttctactactcaggatcctgaactaactgtggagcca

SEQ ID NO: 103333 - DNA, 724 bp, Mimulus guttatus
  Intron number 1 from transcript mgv1a004100m (locus mgv1a0 04100m.g) derived from phytozome v7.0 (chr-ID scaffold_25; pos 348708 to 349431 reverse strand)
gaggtattaatttatctctcattgccaacttgcttcattgcctgtttcattgttctaggaacaaatgtcccacaaacctctttttgccatgggttgatcacttatgttcctcaaatgaaattgatttgttggagtgatgtttgggacagagtgataagttttaaatagtggaggtattccaaaaagacatcttgttgattttcatacaggaaaccaagttaggaactattaatagggaattgattggaacttttggtattcgaggttcaacagggggagatgccattgtgtaaggcacatggcattcttgttgcgtagtttagaagctggcatgatgttctaagatagataataaaatggccagcatttaattaagtaactcaaagaatgtttagatcataactttttgaatcagctgcgaagtgcttaaatattgtcaagataacaaaatatgtacatacagaaatctccagagtgttgtttttgtttatggcttggtcttctgttaccactttacacaccttaatagtcaaggatcaatctgtccatcttttcatgtgatatatccagccgatgcttaacattttaacttgcataaatattagttgcgattaaactttggtatcttgaatttctttgaagttctcctttgcattttcttattgttccttggcattaacatgttagacctaacactacaggcagttgtgtggttccttgcaag

SEQ ID NO: 103334 - DNA, 953 bp, Mimulus guttatus
  Intron number 1 from transcript mgv1a014257m (locus mgv1a0 14257m.g) derived from phytozome v7.0 (chr-ID scaffold_80; pos 635476 to 636428)
tgacctcgtcgtaaccaacgtccagactggtgaaggtttgttttcattccttgccatatataatcatttaaacaaatgatggttcggtgatcttttatcccaatttcttttttatgtgcttaagactcgattattttactggcttttggttaatatgaattgctggtaattgtaattgaagagtttctatatgtatgttcatgttgacaatacttggtagttttgctaatctttattttaataaagaaaggttgatggtagcaagttaatcaaagtcaattcttcagactcttgacttttgatggttgcagttttgatatcaatgtttttggactgagttacgttttttgagaaagctgactattgtcaattgtaaattaattgcttagtatttttttttatataatttatttcatatgcattaatttgtgcctttggaagtgtaggttacacgaatgtctgcacatctgtagtctgtacaaatctcatgttattcgtttagtttttgcgagatgtaaatttccaataatatattgttacattcgagaaggaattgataaaaatgtattataaactgttacttaaaatgggttgtggaatggatgatttataacctttctttaatcgcttttcttaaatctgctgtgttctgatcggaattttcagggtgtagctatactaaatgtttcagcttgtaactacggtcctaagtctgagaattatcagttttgttaaggtttaatttttactgtagagaaatgctttccctcctggtttataggacaatttagttgatactgataataattttgggttgatgatgcaataacaacagggtattgggatatgtcgtaaagttgtgttaactgtagttgtgctctttcgttgccttcgtataatggttacgtggagtttatactcttctcattgttttgttatttcagagtaccttg

SEQ ID NO: 103335 - DNA, 980 bp, Mimulus guttatus
  Intron number 1 from transcript mgv1a015645m (locus mgv1a0 14455m.g) derived from phytozome v7.0 (chr-ID scaffold_2; pos 3797895 to 3798874)
gcgttcgtacccttccatattgctttatttttttattttatttttcgttttttttaatgctgagttactttatatgttttagttagtaggaatttggattgtaggttttcgtaatttataatttttagatgggaatgaatgattgctgtactggtaattgctgaatattggaatgaacgcagaaagaagaaccatggttggtctactcagcatcaatttgttgtgtgtggctgtgtgaattcagaggttttcttagtcatttgtttgggattgaactatctgtattcttttcgttatatgtgtggcgaagtaattttcgctttttgtgttaaacgccactgattacgtttaatttagttggttggttaaaatgtagattaactatgtgtggccgaaaaggattagattcaatctacgaagacaatggcacaccaactatgtgttcatgcatgtattcatccagatccacctagtttcctgtagataagtgtacgaggctttgttgaggtgagttgagttgaatatcaaactatttgctaagaggattgtgattatgttgcccactagtcaaattgtttaatctacttcagaacttaggacaagtccgtaagtgcgaaggctacaatttgaagtgtatggttatggtttaagtttagagtttagaacctcctttgttctcaatatacatttttttttaatttttttttatattgattacatattcttgtgaagatcatagattaactccaatgagccagaggctgattttgagcctttaattaacttgctttttaagctgcaaacctatattttgtgtattatacagttaattgaagaaattacgtttgactgatgtgatgttgataagcgcttttaatggagaaaatgtgttagttcgtttatcttctagaatagtgtttatttttccgccaatctgtgtcctggtctggctgttttttgatgatgatagtctcaggtgg

SEQ ID NO: 103336 - DNA, 519 bp, Mimulus guttatus
  Intron number 1 from transcript mgv1a024792m (locus mgv1a0 24792m.g) derived from phytozome v7.0 (chr-ID scaffold_305 5; pos 2196 to 2714 reverse strand)
caggtatataattaattaatttgtcatttattttcttcatccggcgcggccgagtataaatttatttagggtttataaatctgtcgtgattttctttaacaatggtgtccggaatttctgtctgagattataattaaaccatgttctattttggttcacctagaaataaaacaagtagaaaaacatgctttcactcctccttttggcaattccagctttcaatactcataaccaacattcattcattcccccataatactcaaaaatcaagaaatttaatttaatttatgcattctcattaattttcactgacacctaatcttatttaacttgcatgatcaatatatatatatagttaaatctgtataaattaatacagttggtactaacaaaattttattaatttagcgaaatattaaattatcgaacaaataattcattaggtttttaccgagtttgagaccagaagaaactattatttaaacgaggttattaatttactgtatatatgatctttag

SEQ ID NO: 103337 - DNA, 484 bp, Mimulus guttatus
  Intron number 3 from transcript mgv1a010375m (locus mgv1a0 10375m.g) derived from phytozome v7.0 (chr-ID scaffold_66; pos 592610 to 593093 reverse strand)
atcttccactttgctcaatactgaatcccaaaaaggtatttattttctaagaatctttaacatgtacattaattaagaagtgatggatttcccctgaatttcccgtgataagtaagaagtaatttgtatttcgacactaaaaaagctaaatgaaactgagataatgctgaattatctttttccgtcgatacacatcgatgcacaaatagaatttgcaaaatggtgtaacatgtggcagtttctctgtgtccgtgtgttaacgggaagcaaaataaactatagaaaatgggtgaatcaaatgcactgtattattcagtcttcatagcgagtttgaagttgcttgatcagggcacaaatatgagagagtagatctcaaaggcaaaatcattttgaatatcttattagttattatttactatttattgcctttgttcaagttttaaacgggagattttgtttcaggtgctggtaattggaggaggag

SEQ ID NO: 103338 - DNA, 838 bp, Mimulus guttatus
  Intron number 1 from transcript mgv1a004217m (locus mgv1a0 04217m.g) derived from phytozome v7.0 (chr-ID scaffold_44; pos 960773 to 961610)
ataagtagtcctactagtacttctccagctcataggtattttttttatcacttattctattttattaacatatacgcgtatctacgaacatccatattttgacacaaatatataatctatgttctgtttccttcctattgtattttaattttttgttccgggttagtactttgtgactcttcttttgaatgcttactcttgtatggctatgtttctttcaccttatgtttctgttgttgtttgtcatggttatttggtggtttgttattgtataaacatctagttttctacctagggtttggatgagattcttattcgactgatcataacttcatgtcggtatatcaaaaaacatgtaaattacatatacctgggactggttaggttgggtgttctgcatcgaatggaagtgttagcatatgagtcttgttaatcgtcccatggagtatttattacagagtagcaattggataacagaagttttaaaaagtttcttttagctagtatcattgttatgtgccttcagaaaatttcttgtcaagaaaatggaaaataatataagaggctatcataaattaggatggcacctattcgtttatatagatcattgagtagttctgaagaaagccctttcatgtgtttgtaggagagaattttcaggctaataaactatgtacttctataatgaagcgacgaactgggcgtatagttgaacaacctgtttggaatctttggaatttctagaaaaagattaaggctctaggttgattatctaattcagtgccacttttttggttttacagaagaactacgggcccgattagaagagcaaaaggag

SEQ ID NO: 103339 - DNA, 846 bp, Mimulus guttatus
  Intron number 1 from transcript mgv1a006567m (locus mgv1a0 06567m.g) derived from phytozome v7.0 (chr-ID scaffold_2; pos 2391047 to 2391892 reverse strand)
ccaaacccgcccgcccattgcagggcctttggaaggtattgagatttaacaaagttttaatcttgctaaaatctattgaaaatttgtgacatgtaattcttttgtcgattttattcgttcttgcaaaatttcgtgattttgtaaaattgagggtctgcatgattgaagaagtttgagatggttgcattttactctgctatttttcgaattgcttcgtgcttctcataattcgaagcaaaccagattctgcatttattgataaataaatggctttattggaaattatattcaaacgattgttgttgttattgttttggtgatactctgttttatgctctgcttccaaccgtctgcttctctctgccttaacaagtatcgatcttgaacgggtttcttttttttttcttctcaataacctcttggcaatcgatttttttcactcttgccagtctgattgtaactaaatttagactgcaatgatggagctttagattaaaattgaaatttgtctgctcaagtagaattgtcgacctgtacgactacgcaattatgtcccggacacaattttgtgatgtgtagaaattatcggccttacatgattgaagcagcttcaaaaggttgctattttcaaactgcttcatgcttctcttaattcaaagagaaccagattctgcatttattattgaatgacttttcatagaaatttaattcaaagaattcttgttattactgttttgttcacattctgttttacatctgcaatttaccatcttttcttatacattttaatctgcaattgctgctcattttttttttaaacttttattacagggtatttgtgagaac

SEQ ID NO: 103340 - DNA, 882 bp, Mimulus guttatus
  Intron number 1 from transcript mgv1a020441m (locus mgv1a0 20441m.g) derived from phytozome v7.0 (chr-ID scaffold_92; pos 204550 to 205431)
gctgcgtttcccatatttttgccttgcagcaacaggttacctctttttttttttttttttattttatttatttattattattatatttaatttaaagaattttcacattattttgtaacactggtttagaccgtggggaagtcagtgtagggttaggggcaattttgatttttttttactactatgtatgtttatgaaatttactgtattttattgtgctcctataatttttaacatttcaattttatataaaaaataaaattaggtatttttaattgaggaaagcaaagacaaataataaatctatctaccaagtatgataaaaaaaaattacgaattgtgacttggaaccaactgcaagtccacccttgaaaaataagtccaatttttttatttacctatctttaattttgattttgtcccaaaacaaaaaatctgattcttctttttttttttttttagttttttttttcttttttttttcagtcattgttgtcactaatttccttacgatatttttaatacatattcagcctctccaataataaaattttggcagatctttaaaaaattatttgagagctacatatatatatatataaaataacctaaaagattttttttcttagttttatattgtctttgactttaaagttatttcttgattcaactttctcgagcattaactctctcttattacagtcttttcattttcatttatttaaatgtgactatatatacttgattgaatgtcttaatatttctagaaaaaaaatcttaaacgacacatattttgaattcggcggataagtaatttaatttcatatagtgttgatgaaatataattgatgaatgcaggtggcatatttgcaagctcaagtg

SEQ ID NO: 103341 - DNA, 357 bp, Mimulus guttatus
  Intron number 1 from transcript mgv1a015989m (locus mgv1a0 15989m.g) derived from phytozome v7.0 (chr-ID scaffold_15; pos 159837 to 160193)
tgattcttctccgttgtttcgccggcgcaacggaggtattacctaaccccgctatttcgatcgccgcttgaagattccgttgtattcttgttcattgttattccaattaaattgtaactagggttgggaatttttatttgttagttaacttagacagtgagacaaattttgattttcattgttgttctggttattaaattatccaagttttgatttttcctcttttctcactgattaattgtcttttttctgtgcaaaatcaaattaattaattaattaattaaaaaatgtattatgtttaaatctgtttattaatacaaatggttttaagtcaatgtttaggtgtgttgacttgtt

SEQ ID NO: 103342 - DNA, 1016 bp, Mimulus guttatus
  Intron number 2 from transcript mgv1a007402m (locus mgv1a0 07402m.g) derived from phytozome v7.0 (chr-ID scaffold_121 ; pos 296038 to 297053 reverse strand)
atttctttggagcaaaaaggtaattttgtttttctctgttagttttttttccgtacattactgttcatcgtttgagtgaattgaattgaattgaattgaattgaatttcttcttcgatttgtgttaaattgggaattaggggaattatgaatttctacgatttttttttactggcgattttggggagtgggatttagggttaggttttcggcttgaaatcatggggcttgtgtttctggtagacttgtctgtatctaatttgtaagtataatccgaaactaatttgtgtatgagtagcagtaatcaaaacacttgtgaaattctcacggaaaagcatgtattttgtgagtttgatgaagtgtttgtgtctgggtgttggcaattaaataattacttttcgatttttgtggatggttgaagttgcacaacgggtatttgtttgctcgatttctctctggttcgtatgatatattgtctgaaaaggtgtgaattgagatagtcgaggacaatgctgatttatatatttacttgcagcagatcttttttcgtgttagaatcataagagatagaagtaaacggaaacaactttcatgtgtcttttaatggaacacaaaacttgaaattagaaaatatcagtaaaggcttgttgtttgtcctgagatgggaatattagatttcgattagtcctatgcttgccgcttgccaccattgttcgatgaaatatgtctgtcacacacgacaatatttttagttttttcagttaatgcaacatcatatgcctgctacttgaggccttttctttagtctatagggtagctgattcgtccatataatagataaattattgtctccagaacttgtcatcggtttttttttttttttaaattttgtatcaaataactcatcttgttattcttacattgctacatttgtgtaattcagtctaattggtgaatacttatatattgctataaaatacacgtctcaaaagttgaattctttgatatgcagttact

SEQ ID NO: 103343 - DNA, 901 bp, Mimulus guttatus
  Intron number 1 from transcript mgv1a024656m (locus mgv1a0 24656m.g) derived from phytozome v7.0 (chr-ID scaffold_62; pos 432376 to 433276 reverse strand)
aacgaatacggggtggaagattcgtggtcacgattgttgactatatcttatctatccgtttttgagaactcttcattcacgagaatgtttaatcgcgtaaccccgttgtttcttttgccaagtggcgagattatgtttacatccggatcggattttttgatttacaataagaaagacggtgtgttaggcaacgacacacaattgactttgaccgtgatcgtgttcgtgaagcggaggtctacacggaaagtttagtctcacttgtaccggataatattgctttcttttaaagttgtttctgcttagaatccataggttactgtttattaaaattagtcattcttttgaatcataattttttgctaagagaagatgtttccatggctccattaacttttccatttgtgtttgtgagatattgatttacagtaagggtattaacttcattacctatttattacttattttttattgcggtggtattgaagtgagaaagaattggtctttgttttagccgcccctttataaataagataatagtcagccctaggtattacttattacttattttttattaggatttatcgacatccttcctcgtataaaaaacaagcccatccttcttcgtacaaaacaaaaccgaaaagttgagagaaaagtagaagccgatgcaaagatgtaacaacctaaatatttggagggttcgctttgccctagactgggagttcttagagggatgtcttcgtgcgtgtttcgactatcctcaaaatgttactattgggttagatatcgggaattggaatgagtatggcgtgcaagtcttgggctaaatatgtcactgtttcttatctatccgacactcggaggtgtttatcaagaattttttattattactttaccc

SEQ ID NO: 103344 - DNA, 799 bp, Mimulus guttatus
  Intron number 2 from transcript mgv1a022234m (locus mgv1a0 22234m.g) derived from phytozome v7.0 (chr-ID scaffold_89; pos 947602 to 948400 reverse strand)
caacaaagttaaccgtgctgttataactgttccaggtacttaattgttattattttttattttttatttttattctcaaaaaaaaaaaaaagaacttatgaattttttggtgttgttttcttgtaattgagtaaaaattcccatattatatgtcgatttggagaagaaaaaaaattgtttatcacttagaatattctttgaagcatttattatatcttttttctcaattatcccattattatacttatttttttaaatttattgagagagaactagtggtgataagacgaacgataaggagagtattttaaaaatgtgattagggtttcgtagtattcatacacatttattagttttctgactaacatcatcgattttatcgaacgagaaagggtattttacaatcgtgataattagggtttcgtagtaatcatacacatttattagttttctgactagcgtcgtcgattttatcaacttaaacactcattcgttaatctttattcgattcttccaacgttttttttcaagataattaattaagagatattcgatattcattcattaagtacgatgacgccgattaagcaatttttagtgtcttcgactataataaatattatattcccctaaattaatattttttttcaataaaattaatgtaatttttatttgatatattgttgattcaattagaaacattttaatagattgttcttttatttaattttttatttaattgtttaattttaaattgcggacagcttatttcaacgacgcacagagacaagcaacaaag

SEQ ID NO: 103345 - DNA, 580 bp, Mimulus guttatus
  Intron number 1 from transcript mgv1a018036m (locus mgv1a0 18036m.g) derived from phytozome v7.0 (chr-ID scaffold_159 ; pos 374521 to 375100 reverse strand)
aggcctgtttctggtcgtttcataagatataattggtgagcttcttgaatttgaattttgatttttcttggtgttttctttgctttgaatgtgttttgtttcctttgaatgttgattggttttaagcaatggattgggggaatacatgatgcggttttttggatgggttcatgaaatacagcctttgaattgaattgaattgaattgaattgaattgaattgaattcagggtatgatgtaataagaaattgttcactaatttctgaaaatctcattttctcgttttttccctttcttcggtgctaatggctagaagatagttgttagctttgcatctgttaatagttagttggttttctttgcaggtttcgtatagaaagtgataaggatactgtttgtagttttcaccaagacgaacaagctacaatacaatgcgtccgttgcgtcgaacacagattacctgttgccaagagttaccattgctctgcaaagtgtttcgctaaagaatggcggcaccaccgtgctctgcacgactgtgccaagaaattcaatactagtggcggcagtacaaatattcccg

SEQ ID NO: 103346 - DNA, 424 bp, Mimulus guttatus
  Intron number 2 from transcript mgv1a019555m (locus mgv1a0 19555m.g) derived from phytozome v7.0 (chr-ID scaffold_5; pos 3775778 to 3776201 reverse strand)
ggaaaagtacagtttgcaccgtcatgtttgcacggattttgtattttggtccctcgtgcacaaaaatacacatttgattcctcatatttaaaaaaaataaacacttttagtcatttccgtcaattttccgttagtactaacagaatcaagtgtgtgccactaaaagtgttaagctattgaaacttgatggaccaaatgtggtttttatgaacatgatggaccaaatgtgaaatcggtgcaaacaagagggatgaaaattgtaatttccccttatctttatctttctttttgtttcttctttttttatttttcgtgttaattagtttgttttagtcctatagagtagtttctttaaattgtcaaggactacttttttttttatttataatattatttggcaggaataacaagacgtttccaaaca

SEQ ID NO: 103347 - DNA, 565 bp, Mimulus guttatus
  Intron number 1 from transcript mgv1a000271m (locus mgv1a0 00271m.g) derived from phytozome v7.0 (chr-ID scaffold_24; pos 1341201 to 1341765)
cgatctccgtcgcactccctccagccattctttgagtacgcctctccttttctcctccaccgccgtctcaattttcaattttgcaatttggggttttatttaatttaaattttagtggagggtttttgttataatttagtgtgattgctgttgtattaaattcggatattaagataattgaaagtgtgaaacggtgggtgtgaagttgaatcttgagaatcacaaacaggattatagatacattacatatgtgtgtgtgtgtgtgtgtgtgtgtgtgtgtgtgtgtgtgtgtgtgtgtgtgtgtgtcatgaactaggtattgtggtttgatctcagacaaatggtattcgaagaaaatccgaagggttgttaatctgttcccttcacttcatatttaaatacgaaatcgaaaactattacgtatcggttgtgggaaaaaaaattgatcgattcaaatcgtactattgtctcaagatttttttattttcgaaaaagtattaactttcacattgcttaatttttttgttcagctacactttgtttccgttactgcttctattcgacg

SEQ ID NO: 103348 - DNA, 931 bp, Mimulus guttatus
  Intron number 1 from transcript mgv1a013941m (locus mgv1a0 13941m.g) derived from phytozome v7.0 (chr-ID scaffold_114 ; pos 579456 to 580386 reverse strand)
ctttcaaattcgccgagctcgactacgttgccaaagtaatttttttatttttctttcattatttttgtagtcagttttattttagcgtatctgcgtttttgtttgatgtggaatttgttgattctttcatttgaatttttgtgttgattgtgtaaatgagtgaaatttaatcgaactagctgttttcggttctgaattcgttgattaattgttttttcaagtttgggtaaattactgcgccaccccggaggtaaggtcaaattacgaaaaacccctcctatttgggtaattacaacgacccctcaactatgaatctttttacacgctcaacgttgtggcgacaaatttaatggaatcttctagattatgtagaataatcaagtttgtacccgttttttatttgaagcaaaatgatcataagatgtgttctttgacttgtatatatcagattgcggtacattagaaactgcatttttgaacaaagcgagcacaaactatagaacattttacggaatctagaagattatgttgaatttgacaccataagggtggacgtgtaagaagatttatagctgacgggtagttgtaattatccaaacataagggtttttttcgtaatttgaccttaccttaggggtggttgtaatttatacttcttattattgaatttgtcgaatatgctactttttctttacaccctgtgttcgaatactcaacgtgtggaatttttcccaatttttaattgctcaagtgatattaattctagataaattactcgtgtttgtaccggaatcacgagtagctcgttaagtgtgcttattaagtttaatttgtacgaatcatgaaagtctagagcgtgcgttgtgcaatatatgctcttctgatcaatgtgattctctgggttttttttatcatttttaatttcaggtta

SEQ ID NO: 103349 - DNA, 870 bp, Mimulus guttatus
  Intron number 1 from transcript mgv1a013666m (locus mgv1a0 13666m.g) derived from phytozome v7.0 (chr-ID scaffold_89; pos 97279 to 98148 reverse strand)
gagcagttctatatcctaaggcagaagggtaccgagtaagttcaatttcttgccctaattttcgcttattcgatacgatttttatatcacattgggtttattgaaaattctaatagggtttgtctttcattttggtggattatatagaattgaaatttatttgcaatcctcattattaagtggtgtcctttatctttgagaaaaattgatattatctccgaagaatgctcaatttcgcttccgaaaattaattacgccgggcgatgatcttattcatatgagttgatagaaaagatttacggtgattggtcgatttcccgtttatcggaaaaaagggatcttaattaatgtcaaggaagtgactttgtcgagcttaatgcagtattttatctcggctttggcagccatgcgtttcggtcgagctcgaatatctactaaatattctgttagataagtcgaccgtcgtttgtgaatcaaaagcttccgattttctgtttcagttgagctcgaatatctactaaattctgttagataagtcaaccgtcgtctgtgaatcaaaagcctccgattttatgtttggcaaacgaataaatattggacgagttatggctttaagtaaatcttcttcgtctttatttccttcattaggatttctttttttagttaagtcgacgacgatttcaatattatattcaacaaaggagccaaacggagaattatttgttttcttgctacaatattatttattttccccctcgcgtgtcgagtgactaggattgtgtagatgaagtgcgaagaatcgaaaataaactatttaatgaaactatatgatcaggtatcccggcaccggagaatacaacaagttcaacg

SEQ ID NO: 103350 - DNA, 710 bp, Mimulus guttatus
  Intron number 2 from transcript mgv1a009355m (locus mgv1a0 09355m.g) derived from phytozome v7.0 (chr-ID scaffold_79; pos 510924 to 511633)
ccctcattctcccacctctctctttgaagctcaaggtatgtatatgcatgtgtatgtatatgtgtgtgtattactctaccgatatgtgtttttcgatgccatatgtgttaaatgatttctgggcttttggatttgggtaactcttttggttggatctttatttattctgtgttaatgaatgtagttatctctgtatttctataaacagatgcagattcatcttttcacctggttaattcaatttttgttcttgatggtttttctattagaatggtcaaggtttttttatccatttattttgtgattggggaatttttattcatggacttcttagagtagaatgcttatccttttgaattgtgaagctgattgtgaataacacatttttattgattatgaggaaaattctttgtgaatgatctagcctcatagataaatgatctttattgtgatatatcaagaaaaagtgtttcagccttcgcttttgatgcccgattggttgtaaattctctatagtttaagtttgtttcaattctctaacaacacgaaatacggagagactatcccttttttttttcttttatcctttggtctgtattttcttcaaattttcccattttttgtttgtaatattgaagggtgtgtcattcaaatcgacataagaagaatagatatgacaagttatttgtattgacaggtgataaaagcat

SEQ ID NO: 103351 - DNA, 918 bp, Mimulus guttatus
  Intron number 1 from transcript mgv1a000097m (locus mgv1a0 00097m.g) derived from phytozome v7.0 (chr-ID scaffold_121 ; pos 410526 to 411443)
ttgctgtaagttgagtgtctgaaatttctgtttcatactcgttccatttgacattgttaatgcttccttaaatgcggtagaaagagcaaaatgttctataatagttaatgttttgcctgtgtaaaatgacaagataatagaataatgttatgtgttaataattccaatggacttgtatttgtacatatgacaaaagctataaaaaaggaaataaatcacctaaacaaatcctgtaaatccgttttacaattcagtggctagttgattcctgtaatcatctacatctattggaagatcaactactcccctcaagtttgagcatagatgttaatcatgcccaacttgtaacaagttactcaactcgagatccattcaaggcctttgtgaaatgatcacctagttggtctctcatttttacatatcctacagatatcaacttttattgatacttgtcagacaaagtgacaatccaccttaatgtctttagttcttgtgactgggtctgtttggagatgaacaaggtgatgaagaggaaggtttgctggttaagaactttaaatcgacaaactgaatcgtggctgacttagctcagtttcttccactatttgggcagtatatttaattttcttatttctataaacaaacaatgtgatattctttcctcggtcgtttgtcccaatttttccttttatggctgctggctcctatgcctaaccctctgcatatcctttagtggattttggtcccatttaagttttaatgaaatactctttccttgccttctcttccttctctacagatctaagatcttcatcatagttttttattcatattttagatgccatttgtacaaattaacttggttcccactgtttcatgatatgaacaacaattttgtgcaggttacatctattaaat

SEQ ID NO: 103352 - DNA, 759 bp, Mimulus guttatus
  Intron number 2 from transcript mgv1a002031m (locus mgv1a0 02031m.g) derived from phytozome v7.0 (chr-ID scaffold_130 ; pos 162203 to 162961 reverse strand)
agaaactgatcctgtgcccagtaattttgtaaaaggttccagttctgcaatcaacttttattttattatctttaaattttacggtctatcatctcattcgtgcctattctgcattggggaactttgttacttttttcccctctataatcctattcatgtgtgctattctcatgaaaaaaaatgagtggactgtattaagaaataaaatttcacattctttttgggttgcatatgatgcatgcgcttgtgccaagactttttttgctgtttgaacttgccgaggtcaatcatacaccatatagagagatatgccacgaaacatattataatggcgtgtttgagcgtgcaatatttatgaggaagaatgatgatagtccaataaatgatgtagccgtgtgatatttctatcacattataatgaagaatgaagatgcactaagagattcttgactttatttttgtggagaaatggagtataattcaaaaaatactaaagaatgatccgtttccctcaaattgagtggaaaggcattttccagttacacgtaatttttttataaagcatgaattgttacactcaaggtcatattattttctttcaattctcaatcctatcatgatcagttccaactttccgctcattgttacactatgaccttaataatttacttattaaattttcctatttctagaccattttggagcagtttatttactttactttgttaatcatatctgtcatttacaaagcaggtcaaa

SEQ ID NO: 103353 - DNA, 562 bp, Mimulus guttatus
  Intron number 1 from transcript mgv1a002031m (locus mgv1a0 02031m.g) derived from phytozome v7.0 (chr-ID scaffold_130 ; pos 163165 to 163726 reverse strand)
tttggtcagtgcattgccgctcccgttctttcatttttttttgcatttaatgtccgttcgcttgaattttttctatttcgttcgtttgctttgattgttgtgtgagctcgcgtgagtgagtatgatttagttttgccaatttgatgttgcattgtaattcactctcacagtagatatttcttttttgtagattatccaatcatgccgttttgatctgtttttagggattttgaatttatttctttcagcgtaagttaggagatactcactgtaataattattccgcgtatggattgaacagaagctccagagtttcttcttatcgatttgttcggttataaattcataatcgtactaagtttgaattaaaatgtgttagcagctactcaggttattcgtcttagaatattatgaaaacattggctagagaagttaattcatgtaatatgtaaacaatgtttatgcggacggtaatttataaatctctgcgagatatttaagattcattttctactgtgttgatttttattttttattttttggttatattttgtttgcagca

SEQ ID NO: 103354 - DNA, 835 bp, Mimulus guttatus
  Intron number 1 from transcript mgv1a011696m (locus mgv1a0 09334m.g) derived from phytozome v7.0 (chr-ID scaffold_54; pos 1088797 to 1089631 reverse strand)
gaaattcaggtgattgttgcaagcactctctcgcttaattttttttgttttaattttttatgcagttctgatgatggcttagggtttatgttgggtctgatagatctgaattgttcatgagtttcatgagtatggtgtcttttttttttttctggaaatgattgcttgtgcttaatcatttcttaaaaaactgggattttggcctatgtgttcattaattatgtagttactgtgtgtgtgtgtgtttcattttgatgatatgaatttatgcatggattgacagataggttgagaattgtttgttggccgaatagttaatctgctgctggtgtatcactaatcgtggaagaactattttgttgtaaacctcatcaagaaattgattcgtatttgacattaatcatgaacgatttgtaactcgtgaggatttcagtaaggaatgatttgtgaagaagatttaatctcataaattctcgatttccttctatagttagtaactgctcatgtgtttctattatactacatttgataatttgcatggttctgatgaggattgcatcttggaaattacatcaattagggttttcgtaaaatgagatgatccatgaattgaccttaatatacatgttctttttgttactccttgatagcatgtaaatcccttgctatttatatttgacgactctattccgtgatggattttgtgcgaaatgtaattggcgaagctgttcaatttcactgtgttgactgtgtacacgtgtagaaattcggtagccactaatcatttgtcataactatttgcagctcctcgagaaagcattagaagattctggca

SEQ ID NO: 103355 - DNA, 552 bp, Mimulus guttatus
  Intron number 1 from transcript mgv1a022267m (locus mgv1a0 22267m.g) derived from phytozome v7.0 (chr-ID scaffold_71; pos 443080 to 443631 reverse strand)
gagggtgaagaaaggagtaaggactttctgggaactcttttggagctcaaggataagcaactcggagaaggctcaacatttggtttaactcaaatcaaggcgattttgatggtaattttctccactttccttcatttcattttcttgttggtttgccctccgtctcttaatttattcgaagctagattcgacactgtcgttcagtaaaagcttgtttgtactcgatttgttaacataacgaaacaaacttgaacacatatacttttgttattgataagatttgagactcgatcgctttgagtcgggaatcgattaggaaaaaaaattaaaatcaagctactcgagtttgattcctgctaacctctattgcttattaatccaagctcagacacaactctactcaatgcgcttatgcgtgcccctagttctgttgtttcttgaatatataggagaattagtttttgtgttcaaatttgaagataaaaaaccgctaaatggcataaaccctcttgtgatccaaagtcacgacaaatatactctttcaagctaaca

SEQ ID NO: 103356 - DNA, 381 bp, Mimulus guttatus
  Intron number 1 from transcript mgv1a003305m (locus mgv1a0 03305m.g) derived from phytozome v7.0 (chr-ID scaffold_27; pos 880587 to 880967)
tcaccttcttccgaacagtcaatctcttctccaaggtacaattactcttctaccccttggtacaaccctcttatgcgcgtgtaaagtttttacaattttcgagctcattgtttttacttgtatagtggaaaaaatgaattttgaatttgttagggttttccatttgcattttgtgagcgggagctgtattaatttccaaggaaacttatggaatggttttaatcagtctaatacccacgtgccaatttttgggtgtgactttttttttttttttttttttattgtgatgttaaattggtagtaattggtgtgaatttcataacattggggcaaaaaaaatttacagtttggagcatacccagttttcgtactcgacggcac

SEQ ID NO: 103357 - DNA, 519 bp, Mimulus guttatus
  Intron number 2 from transcript mgv1a007700m (locus mgv1a0 07700m.g) derived from phytozome v7.0 (chr-ID scaffold_27; pos 1313446 to 1313964 reverse strand)
gagcccgttttggccgttggatcgctttctatctggtaaaaaacacttttttttttctgtctgtgtttgtttatgttgagtgggggtcgaaatcggattgattgggtcggaattggatgctttgagtattgatattattagtgtattttttggagaaataactgggaattttcggaaacatattctggttccgacgaaaaaaaaaaatcgaaaaatgggatccgaactttcggaattcttaataaaaaatgttgtcccaaaattggaatcggcagaattctaaaattccattccaatttccactcataatattgagaaaagactatattttaaaacgagggttttttttatatacataaaactcgtctcgataaatgtaactatagggagtgaagatgtctggcgtataatgtaaatgatcttttagctcaaaacgatcattacgtatgtagaatcgataaatgtcccataattatctatatttcaatttcttgattttttttttcgttttcttacagc

SEQ ID NO: 103358 - DNA, 674 bp, Mimulus guttatus
  Intron number 2 from transcript mgv1a004240m (locus mgv1a0 04240m.g) derived from phytozome v7.0 (chr-ID scaffold_196 ; pos 168923 to 169596 reverse strand)
attccactgattttgtcgtcaaggtatacttacatttttttatatctatatatataatatatatatatatagaaagatagataaattgacagatagatagataacaggtaaaactcaaaaattctggtcattaaaattcaattttggtatttactcaattgtgttcaattcatgaataaatatatatatatatatatatatatatatatatatatatatatatatatatatatatatatatttgtttttcggtttgtatatatagaacaataataataaatatatatcgtatgcatttatacacgtcaaaaagtacgtacatcgacgttagtacgtgtagatgagccgagcggtagatcttcactttatcgattataacatataaccgaaataaacttttgttatctgacctaattactaacattactattattgttgaatgttaattagttgaaaatccttcaaattatggtaatactaaacaaaccatgaattaattatagttaattttgcattttatagcgtgcagttatggttcaatcctccaaattatagtaatgctaaaagaagtcataaattagttatggtttattttgcaatttaatatataatttttttttaatatttgaattccaattaatatttaattaattgttttaatttatttgtaggat

SEQ ID NO: 103359 - DNA, 668 bp, Mimulus guttatus
  Intron number 1 from transcript mgv1a008700m (locus mgv1a0 08700m.g) derived from phytozome v7.0 (chr-ID scaffold_11; pos 525797 to 526464)
gggtatttttcaaattacccaatacgtacattttgccttttcttttttacttttttgaataaattttggtagtccgtgactctgtggtttcttatgatggatgaagatttgatttttatgaacgaaaacacttcgattatttggtaggccaatttaattgttatgatttgaggaatctgatgtggagatcttacttcagacacagtaaatacagcttttgacagaggaataggggtttgttccctgtagttaaaagtactgattgtgatcactaatctggttaagaaaggacaaagtacatattgatgaaatgtgacactgttgcatttatgattagttgataaatttggttatcgttacagttatagtgtccttacatatatggaattgctgtttggagatgctactcgttttgcctcttccgagtagactcgggtagagagtcttaaaaccttttctttagttaccaagataaaacgtgaatctgtcgtttagaatgatcgagcattccctttatctatttattcactaaaaagatttcgactttttacctcgaattaaattaattgcatagttacaaaatgatgcaaatgaggattgaaatttctcgattttcacttcccttttctgcaggtacgactattctgggtacggaaagtcaactggca

SEQ ID NO: 103360 - DNA, 395 bp, Mimulus guttatus
  Intron number 1 from transcript mgv1a003534m (locus mgv1a0 03534m.g) derived from phytozome v7.0 (chr-ID scaffold_33; pos 1163524 to 1163918)
cactggtggttggctctctgccgcttcaatcctcagtaacaaccaaccaccttaattactcattattaatttttttttttaatgacacaaaattctgtatgtttccatgggattcatttttaattcttgtcccttttgctctcaattaattctgttgatgcatgtttattgtttaataattaattaatgtatgtatgaatgaatatatgttttcataagatgagagaataaatcttttgattgattcttgttctttcggtttaggatgaattgtaggggaatgtaggtgacacaataggatcaatattcttttttctttttgtatttattttgttgggggttgaaaatatatatatatatatataggtgttgagctttgcgagaggctgtcgaca

SEQ ID NO: 103361 - DNA, 668 bp, Mimulus guttatus
  Intron number 1 from transcript mgv1a018090m (locus mgv1a0 18090m.g) derived from phytozome v7.0 (chr-ID scaffold_356 ; pos 43193 to 43860 reverse strand)
gaggtaaaagttatatattcttggtatatatatatatatatatatatatatatattatttttttttcttttgccaatgttgttttccatttaacttctttgagtcgatgaaaaattgcgagaaagttttgggtttttcttatggaattgtcttatataaattatcaggatgttcctgaagggacttgatattgcccatactgtgtgtgcaaattttgtgcaaaaccaactgataaaaatgattacctactcaagtgccctcaatgtgagaaaatatgtaaatacatacttatttttgtctatcaacatatacaacatatatttctatttatatcaaatattttttcaagtaaaatgttataagttttttaataagagattgaaaactaaagcaaaagaataaactatctaagaaaaaactcaaaaagttttttcttttcttttttttttcttgctttccttttctagatcactgggaatgtcatcaaataaaagagcaaagaaatatcaatcttaatagtatcccaattgctccattgtttgaaaaaactgcaaagaggtatgtatatgttaaattttgtagttgcttcttgattaaaaaagaaaaaaaaaatgtagattaaatattttgatatggatttaaatattataatttttttatgaaggtat

SEQ ID NO: 103362 - DNA, 869 bp, Mimulus guttatus
  Intron number 1 from transcript mgv1a007125m (locus mgv1a0 07125m.g) derived from phytozome v7.0 (chr-ID scaffold_83; pos 295263 to 296131)
accgccagctgctctcgccctttttttccttgtatgtatgttctctctctgtaattttttttttttaattttgtgtttgttttctcctcccattctctgttagcgttttgggtttatgtgaaaatttgattttgttggtgtatttcaactttcaagggtttcatcattttttttttgtgattaaatgcggttggggggatgtatttggggtcatcgcctttgtccatttgttgtatgacagaagtttcttttcattgatcgaattgactttttagatcttctgacgattcaaatacatgcacatcatcgaatttcgaggggattagaaaaaaaaaaaagaaaaaaaaagagttctttctttgatcactgataagtgcaggcctaattggctcgtcaatttcgtcttagaatgtttgggaatttttaccactcaggttttgtttcttatcttttttttttgggttaaatttgttcattgatttgataaattcaacaataattcgcctgctttatctgctgcaaaacattgatttgagttgggatttcaattggggtttcatggatctcgagagttttgagtgtttttttaggtttgaaactaatgccttttttttttctttttcttttttgtgatccttcaaattcttctgtcctgttctctctgttttacgcttagtgattttataatgagttattatgtcaatctttttcaacagggcccagctttagttccgagataaaattttccccgtccctgaacgagttatttgattagtaatccatgttaatatttattactaatcatggtttaattctcgaattttatgtcagcagattcgaggattcccgacccacattgcaaaagtgtg

SEQ ID NO: 103363 - DNA, 1040 bp, Mimulus guttatus
  Intron number 3 from transcript mgv1a014100m (locus mgv1a0 14100m.g) derived from phytozome v7.0 (chr-ID scaffold_1; pos 4698340 to 4699379)
aatttagaccttggaggatcccgcaggtttcttcggtaaggataagaccactcttgcaatttttagaatacagattatgtgcagccgaacctttttattgttattattgttgtgagttcttttctatcttttgtagtctgtcttagccatgaaaatcatatgttgaactttagtgatataatagtacagctgcttcattcttcaactttctttggatgcaatccccattcctcatgaagcccaatttagatcgatatgttcatcgtcaactctagtgataaagtagtctttagactcataggacaacatatttctcttttgtaatcttcttacatcaatgataaaatgtcgttatcatatttattactatcattatccaggagataataattggtcacatgtcatgttacaaatgtttcttggagtactggacttctgaggattatctggcatttggcaaacggtctgtttgttttgaagtcacgtcatctatagaaattttacaaattgttctattcttgtttagattacttttaagcttttcatagcttacaaagaaattcacatagtggtaatactaataccacttattttggagaaatgtctggactactatcagcctatcactcatagctgaacaaatatcgacacaagtgacatcttgaatatattacatttatctagatatcatgcttcctgatatattccagtgcaataactttttggtcagaaataggtcttacttcagtcctaagcacacagagactaggctttctgaccattatttcctgataaagctagtgtattttagaactctggttttaatttggaacagcagaccaactaggtccctttaatgtagaacataataattgctagtaggaataggatccttgcatcttgaacatccattgcatgatcaaatttgaattgcagaacttcttttagaaggacgtgtactttgcagcactctttgcaaataattaaattgatctgtttctgaagattttttctggataatattgaaggcattgttgaaa

SEQ ID NO: 103364 - DNA, 837 bp, Mimulus guttatus
  Intron number 1 from transcript mgv1a007842m (locus mgv1a0 07849m.g) derived from phytozome v7.0 (chr-ID scaffold_81; pos 818073 to 818909 reverse strand)
aaggaagtatcccaacctcccacacccccaagaaggtcaaacccttttcttgtctgcactttgtgttcttcttgtttaaggtacgaacccttttttttttttttttgagcaaaatctttgatttttgttctgttttcttgggtttttcgaggttttaattcatgggttttgtccgatctgacatttgttttgcttgtagaatctgaatttttttttttttttttttttttttaagattttgaattgttgtctgattcttgaccatgtctgatttagtttttgggaagttctgcagttgttttaagagtatgagatgattatttcagtaggaaataatagggttttgacttagatctgaactgagttttggttctcaagttagccgtttgccttgtgaggggcatttatgtcatttcaacgttatttggtaactgttttctactcgtttcagtatgaaaatcaatggaaccttttacttcagatttatgctagatgtgctctgtaatgggtttctttagtgatgtttctttaagaaaatggttgatggttaatgatttgattctctattgagattctctcgatcctcgaaaataacacgaattcttcgatttgatgtagtattttgatataattgttgctgtatagactgaatctagtgtctttatccccttttaagaaatgatccagtttggtgtataatacttctgcagccacatattattttttatctcgtcaacgattgactcgaaattccgattattttgcttttatccagtggatccgaataattatttgtttctcaacactttttatttccttgcatgtagagagaggaaa

SEQ ID NO: 103365 - DNA, 346 bp, Mimulus guttatus
  Intron number 1 from transcript mgv1a017493m (locus mgv1a0 17493m.g) derived from phytozome v7.0 (chr-ID scaffold_44; pos 1418221 to 1418566)
ccttcgtcgtcgtcggcgccttcctcggcgaacgggtctgtatcttctctctaaacctgtatctatatccatatctatgattttgtgtgtttctacgtgtttgtatttactcgattgaattggatctgaaaaatgcggaattaacgattcgaggattttgggggaagttggttgtgggtgtttggattatttaaaaaaaaaatattgttttttgatgattgagttttttttcagcttcatatgtttcatttaattctatactttaatttcattaatttatctgatattttgttccattgctctgatttcaggctgtggatcgtggaattcgcggtctctgggacca

SEQ ID NO: 103366 - DNA, 831 bp, Mimulus guttatus
  Intron number 1 from transcript mgv1a018983m (locus mgv1a0 18983m.g) derived from phytozome v7.0 (chr-ID scaffold_48; pos 1400860 to 1401690 reverse strand)
ggcacatacttgcaacaaatccacgtttaactaaggtcagtggttctttacatattatgctactgctattggtttacatcttcaaatattacattttaaattttagcatctctttcaatatgtgggatttaattaataaaaattgctggagcataccataacaattagaaacacccataatcattatcatttattcatactgagtccactgcttgtttttaatgagagaatgtgcttattggaggatatgtatgctgtgtaaaaaaaaacttttttaaatcgtctagaaattgccttacaacacgcacgcatgtccgaccactctatgtttatgtgaggagtcctataactgaaaatgcgatttgaaaatccgaatgtcaactctgtttggtgcagttaatcaaatttttggcagggattatacatcgatgattatccttgtaaagtataacatttcaagactttagtgcaattgaataataatcctaatgtagcagctgtaatcagcaatcatcttttttccgttctttttttggtggtgcaccattctcgtttacttcggatttttttttttttttttttttttttttttttttaatgtttaatggttttaatgtgctacagcctttgacaatacaagtgattgaattggatatttttgccgttagtgattaaatttggtttcagactggtatttggagttgccaacaatcatgggcagtaaacacgttacacatgcttgtttctttaatcaatagctctagttttcttactctcatgcgtcacttgtatgcagctgtgtgttcccgggtgtacgaggatcagtattga

SEQ ID NO: 103367 - DNA, 688 bp, Mimulus guttatus
  Intron number 1 from transcript mgv1a001248m (locus mgv1a0 01248m.g) derived from phytozome v7.0 (chr-ID scaffold_37; pos 224246 to 224933)
aggggctgataattattccaaagagtatgacctatttcttgctcgtaattgtttgattatttgtgaacatgacaacttgaatagttatttagaaggctccttactgtgaaaaaatgataaggagttatccgcaccaaaatttgttagacctgtctctttattctttagatcatagttggattccagttctatggtgttacttagaacaatcaagttgtctatctgtgaatgcagggaagggagatatctataatttaccaagataattgtaccttctagaaatatttctttttctatatctttgtgtttcatacataaggataaaaaggacaaatttgctgattggattattttcctaatcatatatttgggtgattgaaacagatataatacattctttatccagggacctcaaaccaaagcatagtgctcgaaagcccttccgttgatctatgtctttgatacctgatagttagtagttacattcttgtttctcttccaagacaaagtagctaaatagttagtggatttgtcatggttgtgagttggaatcacggatgaagttagtttagagctctactgtagctgatctgttaaaatgtttgaaactttacattaacaattttaactcatgagattttttttttggtcagaagaagttccggacagttggacagaggcaccagat

SEQ ID NO: 103368 - DNA, 756 bp, Mimulus guttatus
  Intron number 2 from transcript mgv1a003264m (locus mgv1a0 03264m.g) derived from phytozome v7.0 (chr-ID scaffold_85; pos 60759 to 61514)
tcctctgctcgcatccccagtctagagatattcgggtacgattctcgatccgttactattaggcgtttataattacctttgtgcgagttttgacatatatgcgctgttccgtaatatctctggttagatggtgaagaaagatgcagtttttgttcatgtatatttgttttgttatcgagtatctgtacgaggacgattatggttgaatttgttatttgtttatttatgaatttattttgaaattgtgtgaatttaaagtttcttttttcgttagatctgatgacactgttttcaacgccaaatgttaattgtaaaagttcaatataaccatgtggagattgaggtgtaacatgctctcagttcgtatgtttttactttgaggcacctgagatatcattatctaccagccaatgaaattgattacacacttacctgcaggttgtgtcgaattttggtaattaggtgaaatatcatttgggaaaaagcctgaataatgtcgattatgtaattttttcttctcattttaggcatgttctagaccggttccttgtatttagttaattgttgctagctttatgtgcctagagaagttaattatgtatcgaataacgtcaacttgtttggaatcccttgtagtatgtaatatgtgaaaccattatggctagttccacttgtacttctattgctgtattgaaggtaacttgataaatttctgtccttttattttgcagatagaatctctttcactcactttcc

SEQ ID NO: 103369 - DNA, 586 bp, Mimulus guttatus
  Intron number 1 from transcript mgv1a015653m (locus mgv1a0 15653m.g) derived from phytozome v7.0 (chr-ID scaffold_206 ; pos 338531 to 339116 reverse strand)
catccgacagccattttccagcagccgaagccgtaattccctcaaatcacaccccttacattttcctttttacatttttcgttatgctgtttgcgaagtttaaatctgattgttcttcgtaagtgttaggattctgaaattttttgttttgtgtttttttgctccgtctgcaaattcttccactgatttatgtaaatcgtttgattctccttcttcaatttttttgctgtgtaaatcttagcatggtggatttacttctgcattaggtatggggattttctgagtgaatttaatttttatgaagtctattttatatgctggtgcttgtaatttattattcaattattagatttaagaaaaaaaggatatatggattattattaacactgttcattcactcttaatttgtacaaatcttgtgagtgggtaaatttctgacctttttgtcgaaaatgtagctataaatatatttgttcaatattgaattgacactatctttgtattccctttggattcttattcttatttacatgattcgttggttgttgtagtcgaggagaaaggttagggagcctaaagaagagaa

SEQ ID NO: 103370 - DNA, 373 bp, Mimulus guttatus
  Intron number 1 from transcript mgv1a004726m (locus mgv1a0 04726m.g) derived from phytozome v7.0 (chr-ID scaffold_27; pos 754219 to 754591)
ggccaccggagcaggaagcgtgttgctaaggttttttcgttttcatttctcacagtattcgatttcttcgtatttttaccaaaaatgtggagttcaattttgctttgtttttgttcgtcatcgtttttttacttgagttagaaattcgtggtacgcgattgatgaattttacttgatgatagtgttgcagatggacaatttttttgtctggaattgttgaatttgatttttctgtttaggttgctattaaggtgtcggtgaattttttttttggagtttggatttcgtagaaatacgtatcgtaattgaattatttttggttgtatttgtgtggacaggcggttgacattaaactactgagctcgctgagcaa

SEQ ID NO: 103371 - DNA, 812 bp, Mimulus guttatus
  Intron number 2 from transcript mgv1a004726m (locus mgv1a0 04726m.g) derived from phytozome v7.0 (chr-ID scaffold_27; pos 754624 to 755435)
gtccagagtggatatcgtttcctgtttttgagcaggtcaggttatttctctataattctgctaattagctcgaaggatttatcatatgaacacggatatttcagttttcatgtgcatctgcatagcgttctattagcgggtctagagattgcctttagtagaggagggtagaaaaataggattctgtgacgaacttgttattacgtgggttgagaattcggctatttagctaatttagcgaaacttgtagataatttaacatcaacttgtcgtttaagacattgcataatagctttgcaagtagtttcaatggcttctgacactgcttctccttttgtgtctccctaaagtcatctatatcactctcgattaaatatttacgttttaccgagcccttctttcaccatatttctttcaaggacttgaaaatctatccgttgccttttccatagaatccttgtacctcaacatgagtgctaatcaaatatccgagaatattttgtctcttgtaatgacctttgaaagaaaaatcggggttctctttatctgatattaaaattggaaagtgtatcgtgttattggctttctctttgtatcgtgagagttttggccttttgggatatattcttcttttttgaatgcgttcgtcaagttataaagaacgtctaaaaagatcttcagtgtcagcttttatttgtcatgttcgtgaagaaagtttactcctctaagatccgtttttccccttaatgaacaaaatgaaattgattattgtcattcatttttgtgttgctcttcttactctttcaggtgaa

SEQ ID NO: 103372 - DNA, 444 bp, Mimulus guttatus
  Intron number 2 from transcript mgv1a008930m (locus mgv1a0 08930m.g) derived from phytozome v7.0 (chr-ID scaffold_324 ; pos 52159 to 52602 reverse strand)
taaaaaagtcagacggtccgttagccatttcgaaggtactaataattttaatttttaattttaattttttttgggttaccttttgctagggttgtatcaattcggttcacaaattcaaaaattaaaattggattaaaataaagcaaattgatttggtttggtcgctacctaacaaggacttgccggagatctcaagtaacaaattttccgacggatccataattaatggcccaaagttgtttttttccgtcaactaaatttaccgttaccttttaatttcaagcacaattcaattgtgaaaagaaaacgtgaatttcaatttgggaattttttatttaaaataaaatttaaagcataaattagccgtgggggcctgaaaaaagttttgcgtgtggttcaatttgtgaaggtgttgagaaagtgaaagcagactgtgacgcaaac

SEQ ID NO: 103373 - DNA, 218 bp, Mimulus guttatus
  Intron number 5 from transcript mgv1a007009m (locus mgv1a0 07009m.g) derived from phytozome v7.0 (chr-ID scaffold_247 ; pos 63714 to 63931 reverse strand)
tcaaactctatacctatcaggcaagtagttttgtttgcgtgtgtttttcttgatcttaaaattaatttctgaatgttaattcttttgacttgttgattgtcacgtagccttcaatattttccttgcaccgtgtttgcatttgagaggtttcttttctctcatccaatagtttcttatgaagatctctttcataacaactcctttccctgtgtgcagat

SEQ ID NO: 103374 - DNA, 640 bp, Mimulus guttatus
  Intron number 2 from transcript mgv1a016920m (locus mgv1a0 16920m.g) derived from phytozome v7.0 (chr-ID scaffold_48; pos 330628 to 331267)
tcctggtgattcaatcagccaggcctcttgaggtaatagatttttatctggtgttgctgttttttcgattgtttaccttatctttgcgaatcgtattctgcaatgaaattctatgaatggggttttcgagaaaacgaggattcgactgcgggaatgttctgatcgtattggggttattattggctcagctaatttcattgtaagaacttgaacttgctggctgacgattgtttgttgttctgttgttgttgcaaacgaaatactttatatggaacggaaactacatattgactttaggagaagaaaaaaatcacattttcttgagtattagttcgaaaggttccgtctttatggcgaggttttaagatatcacgtcgcccaagattaactctttaaggtttcattctgagtttctattctaatctaatcaaactttatgctcgttttacctaatgaattagagaagtgaagctagataccctgcaaagatacgcgtccatttatttgactactaatattcgttgctttctgttttttttttctcatgagattgaaagacgggattttctaattatataatctagtagtatttgcttttattccaggtgtaatattccaaggtattcactattcagttcct

SEQ ID NO: 103375 - DNA, 399 bp, Mimulus guttatus
  Intron number 1 from transcript mgv1a006117m (locus mgv1a0 06117m.g) derived from phytozome v7.0 (chr-ID scaffold_38; pos 1260772 to 1261170 reverse strand)
tttttcgtggccttactgttgtggtaacttttcttattcatattttttattattattatttttattattattattatctcttattttgttgtgtttgaataaatttaaatctaaagaaacccatgtgccactcattttgtttctcgatgaatattgaggtttcgattttttatttttttatttttcttttgcattttgttaaaaaaaacaaaaagaaaaaaaaatatctaagggcagtgaagaatgaaggtatggaaaaaatagagatttgtggctactaagaaaattagactagaacaggattattatgtaaaggaaactgatatttgaattgtacatttgaatatgtatattaataataaattatgtgcattgaatatgattgtgttattgcagtta

SEQ ID NO: 103376 - DNA, 184 bp, Mimulus guttatus
  Intron number 1 from transcript mgv1a024996m (locus mgv1a0 24996m.g) derived from phytozome v7.0 (chr-ID scaffold_11; pos 2324141 to 2324324)
agaaggaaagtggcatcttgtccctctcagaactggtaataatcataatattatatattattattttcagattttgattttataattattatgtttttttcttcttctttttcatacgattttagatatatttatttgttatatatattatatacatgggcatatatatatcagggctgaacag

SEQ ID NO: 103377 - DNA, 583 bp, Mimulus guttatus
  Intron number 1 from transcript mgv1a011561m (locus mgv1a0 11561m.g) derived from phytozome v7.0 (chr-ID scaffold_113 1; pos 8212 to 8794)
tctttcacttcttggtggtgtcagcacctccattggtaagtaagctttatctatttgtatttatttatgtttttttttttttttttgtgatcaagaattgtaattggaatctaggttttgatatttggtttttgctgtatagtttggatatatctttgctgcttcatttgaaatttaaatacccaatacattttttgcactctatgtgtatggtaaattgcctgaatgacaattttttgtactttcgtactatattagaatgttagttctttatattttggagctgtatttaccaatttaatttattattagtattccttgagtctgtgattcgagtctttgaagaaacgacaagtcatgatcaactctgttttcttgttcgatcatccacttttctaacatcactttatctcaattttggaaatccttatctgacggtgaagaagtcgtatctcgtattttttgctatcccgatttgaaggaataggattttatttagttaccactgttttgatttaagattttaaaatttagccatcatgcttcatcgttgcattcttcaacaggtgcccttttcgttgtc

SEQ ID NO: 103378 - DNA, 835 bp, Mimulus guttatus
  Intron number 1 from transcript mgv1a023279m (locus mgv1a0 23279m.g) derived from phytozome v7.0 (chr-ID scaffold_159 ; pos 99913 to 100747)
agctaacaagacagaatatcaaggcttttatcctggtaataattaatcttctgtttattcattcttctgtatttttgaacaattatggttgcctccctgcactttgatctaattacaaaaaaccctcttgttttaaaaattacaattaccccctctgaggttagaagttgcataaaattgatgttagtagtaacgaaatctttgagttgccatgaatagtttcttatgaattccaaatttaaccataccataggggtgtaattgtaagattttatggaaatataagggaccaaatgtgttttttgtgaacacgaggggccaaatgtataatacgtgcaaacttgaaggattaaaattgtaattttcctcttattcttctcttttttttttgtaacaattacgtttacctcccctgcgctttgatctaattacaaaaattctcttgtttcaaaaattacaattacccccgaggttagtagttgcataatattgaccccatacggtgttagtagtaacgaaatctttgagttcccatggacagtctcttaagaattccaagtttaactataccatagaggtgtaattgtaagattttatatttaacagggggctaaatgcaacatttgtaatggttgttcaattaattttgtctacaaaataatgcagatatatcttttaaatttgtacacaaaataaacaaaaacatttcgtaatttataaaacatgagggtctttttgtaattagatcaaatctgaggggatttaaccgtaatttacgctaatttgtatgatcttgccaggacttatttactgctggaacagatacatcagcaat

SEQ ID NO: 103379 - DNA, 880 bp, Mimulus guttatus
  Intron number 1 from transcript mgv1a018762m (locus mgv1a0 18762m.g) derived from phytozome v7.0 (chr-ID scaffold_7; pos 2314077 to 2314956)
gtgtcttaggcgtaattaggggtgtgaacgagtcgagctcgcctcttttggcaggctcgagctcgagcccaagctcattttgttgttggtttttttttaatatttgtttaattactatactgtattattattaaaaattatttaaaaaaatacaaaataaacaataaattgtaattatatatatattttaatatttatatcttgtttttatttatttctataatattttatattattatacattatttaaataaaaaataatataaaaaaattaaaattataaataaggctcgtgagctcacaaacaactaaaaactgactcgaactcggctcgtcagaaagctcaagctcgcgagttcgagctttttttggagccgggcttatagagctcacgagtcggctcgactcgtttaccacccctaggcgtaattagtaaactgtaattgggctgaattggatccggtccatcgggcccatttaaattgttaccaggctgcactgctgctgttgtatttgatgacaagtcttagttaaaaaaaaaaatgcattttcctgcactttctaaaaatgattagtttcattttcttaagatattaaataactatatatatatatatatatgatattgcacctcatgaattataaaatgataataactagatattcacactaaaagatattaatatttctcaacatgatttatccatctatataaaaatgtcaaacgaagacttcattaaccttagttgacttgagctgaacttcaattttttttttatttttttttaaatgtcaaaagtcaaatgttgaccaatctcaagaaacctcaaactacaaagtcttccttcccccatctactgtgtaaatacttagccgcaaa

SEQ ID NO: 103380 - DNA, 952 bp, Mimulus guttatus
  Intron number 1 from transcript mgv1a009957m (locus mgv1a0 09957m.g) derived from phytozome v7.0 (chr-ID scaffold_17; pos 1244500 to 1245451)
aggcaaaatagtgtaaatcgtcccaacataatcaggtaattctttgttctatcacaagtatgtgcatgaatatctatagtgtggtttatggtcaatccgcgggtgttaacgagcatgagaagcatacgcaactcttgcattttcttgtttccacgttcatgtcattgtatgtaatatatatcgtatggattgtgctcatacactgaatggtcacatttttacctttttacgttaagtatgagaagtgcacatttatagtatatggatcggacgtgactctgtctttctcgtgttgatttctcacgtgggaatacaaaacattgtgacttacatgtttgaaataaacaaatataaatataaagttgtttggtgaaaaaaaggattacaaaacgttatgaggttaatcaataatgcaacacgtttcgttagaacatattttatgattaatagtattttttttaagcagaaatgaagtgtagttgtaattataatataaagttcaaggcatttagacatttcaggtcagaagtgaaacttaaaagggggcgcaatgtccaatgtatactactggaaaccaaaccgtatatgaaaatagccaaaaaagaattacgagttaaaacccataaaaaaaagttcaagatacgataaatttcgcaaaatcaaaaaatatttttttttgtttttttgtttaatttgaatgaacgaaaatcgaaaataaaatttttttgttccaatttactaattgtttttggagataaattattgcacaatattaatatttaatttttttttcttcaaagttcaaaccctaacttaatgcccgaataaaattggaatctcgaaaaagatccgaacaccatgacccgttttttttaatcgtgaagcctagaaaactacacatcctcctttctataaagtcgctgccgaaagcaagctgaaacttctctttctc

SEQ ID NO: 103381 - DNA, 928 bp, Mimulus guttatus
  Intron number 2 from transcript mgv1a004622m (locus mgv1a0 04622m.g) derived from phytozome v7.0 (chr-ID scaffold_459 ; pos 30992 to 31919)
cgaaagctgtttgtggtcaggttatatgtttatgcatgttctacttctatgtttttttccatatgtgtgattttgtgatttcgatttgaatttccgtattggttttaccttcgtcgtgttgaagggtaatggttaaattttccgattgtggcattacaacaattgaaacggtgaatcactccccaatttatttctgttggagatattaatattaaatgatacatttcactaacaggctaacaacttcttataacaggctaacagcttaagcgtttagttgagatggtcattcaacaatttcgtctgtctggttttgacttgtgacatatataacatgcaaaatgactgtgtcaaagagtcatttagacccttaggcaatgtttggaatggttttgggagttatttttcgtgttattttggggaaatatgttttgagagaataatttgagaatgaaaaataatgtttgttttatgatttgagattagacaaaatacgctgtagcagtcgaatcatgtttaaagttgtttgaaaaaaatgtattttagaagaatttgaaaataaagtggtgtttgtttgttttttagtaaagacatttttaactgtagcagtctctacaaatcatgtctggaggagaaagaaactttagaagttgtttttgtaatttttttttttggaaaatcaaaacaaacactaatttgtctgaagttagacggcagtactttttggccaagacatacatactctagtggccgatccttcacgagtatgatgcatctgtgtacacaaatgccacactagcacatgtcgaacttgcatttattttaatttgaggtgtatttcattaaatgcagtttagaccttggcaatcttttatcatttacagtcgaatgctcttattgaatttagccgttggtgtattgcaggttg

SEQ ID NO: 103382 - DNA, 739 bp, Mimulus guttatus
  Intron number 1 from transcript mgv1a008055m (locus mgv1a0 08055m.g) derived from phytozome v7.0 (chr-ID scaffold_148 ; pos 440148 to 440886 reverse strand)
ctgccggtggtgattctaaaaccaacaagaggaatgtgagtttctatcttttttttccccctctcttttttttctagttaatatttcttcttattatttgttagagtaattgatgaacttttaagaatattttttcattactatttttaatctcctattgaatttggttccgaaatcaacttcagaaagtaaaaaaatttgacgattccgatccgaaatgtttcaattttggaacaatatttttcagttcgaattccaaaattccgacttactatttttccgaaattatttggatcgaaattgggatttatatgagattccgatttccgatccgatttaagttcagaaaataattccaaaaattccgattttttatttctgaatattatacttaaagtaccaatattattatgtattttatatttaaggtgaccaaaatttgaactttccgaattccgccgatttcgatccaaaatttttcgattttgaaacaagttttttcattccattttcagattttcaaatttttcttttttttttggaacggaattagaactatccgacctgacggtccgatttacattcctagttaattaatcccaacaaattacaatggccttgtcgccaagctatcaattcggaaaaaatacaatcgattgatttaccagttcttgatattgaaataaatgtagtagctagtaatataatataaatttgataattatttgtgttcagattc

SEQ ID NO: 103383 - DNA, 902 bp, Mimulus guttatus
  Intron number 1 from transcript mgv1a006440m (locus mgv1a0 06429m.g) derived from phytozome v7.0 (chr-ID scaffold_36; pos 628354 to 629255 reverse strand)
tttagagcagctcaagtccaagatccacactctcggtgagtgggtttctaaattctgcagttttcgttgctcaattgtgtttctgcttcgattttgtcggttggtttagatttgactgtgattatcagattgttctattttgaaaactgaattaggtttgttgattgatgaatagatgttaatagagatggatatatttaatttagtagctggtaaaaaaaaattatagcaaatattattggagaagataaaggctctatatttgcagttggaatccatcgttgcgggtcccactttaataccctaggttgtttttccttttgactggtaagtgatatgattcttttagcacgaaaaagtatatgatctgtgtttgacgcgtgggtttgtatgcatagttgaaattttgtcatgtttcttatgatttctatgtctgctcatgatcgaattattcggaagatgttgaagttttatttgagttatcgaaggaatttgtggagaaatgatctacttatcttttagtgtaagtagttacacgacgaattgaaattactttccgactgtcaaaggagtttgataactgatttggttttgcttttttgcttgtgtaactggttcgtattaaatttatgtatgtgtgctaccttttctatttggaggtttctgctctttttttcgtttttctttatgtcactgtgagtgtgtgtgtgtgtgtgtgtgtgtgtgtgtgtgtgtttggagcttctactcttcatttttgttgttgtatatttaagtgatataaccatgaatatatatatatttttttatctttttaatgtggtagcagtttctcattttcccttaaaacgtttattatgtatgaagagaaccatatcgaggagaaaactcgagaaataaag

SEQ ID NO: 103384 - DNA, 607 bp, Mimulus guttatus
  Intron number 3 from transcript mgv1a008838m (locus mgv1a0 08838m.g) derived from phytozome v7.0 (chr-ID scaffold_334 ; pos 100696 to 101302 reverse strand)
cacaaagggaatttgcaggatcatttaaacggttggtttttatttaaatactattattcactccaatgcacctacctagaggggtagaaatcaaacggatcatatcggaattagcattttcgcaaaaaaaaatctgacttttttccgaaagtgggaaattaattccaattatcttccagaaaaaaaagaaatcagaaataggaatttcatggaaattagaacgaaaaaactagttccaaaatcggaaattttcagatcggaattggcggaattcggaaattcctattttttcggtgatcagtaatacaaaatgcataatattactaatattataagtctaattttttaaggaaaaaagagagtcagaaatttttggaattaaaatcggatcaaaaattgaaaactaatatgtattccaattcagtttcaaataaattggaactgtcgggaatttgaaaaaacaaagaatattgtttcaaattttgaattttttagatcggtatcggctgaaattggaatttccgttccaatttgtacccctaaatgcacctgattatctactaatggtttttttttttttttaaattaaggaataggagaagtaaag

SEQ ID NO: 103385 - DNA, 677 bp, Mimulus guttatus
  Intron number 2 from transcript mgv1a015825m (locus mgv1a0 15825m.g) derived from phytozome v7.0 (chr-ID scaffold_54; pos 1396701 to 1397377)
aacaattcagaaattggcggttccaactattaaaggtgagcccctttcttttcaattttgttgtttttgaagcttgaatcgcagtttcatgtaagtttgcttgcagtacttgtactatgaatatgataatgaggggaaattacttaggttttttttgttttgttttgttgattgggaattttgactgggtacttcatttgaaaatgattatgtttttaaactcaaattttcgattggagatctcgatgaaacgaggttatatagaagtgaatgtgttgggaagtacaatgctttgatgaagaatacattatgatattaaaggtgattttggtgcttgccatcaataatgtgggaaatttcggtatttatttaccagaaaatcatcatatataatgaattctaggtttgtaatcatatattcgtataatgagatcttaaattcttaattaatctgtaatgtagtgggtatagtcttcaagtaatttcgttagctaagtcactcaaagtaccgttggaactgtttatattttgaaacggagcgtaatattgagaattccgtatagcaaatgctcgacatcaatatgcaatattcgagatttcattttttcttaatacttaacatttgtttgtggaataacacagagagacaagatcgccttggagtaatagcaaaggcg

SEQ ID NO: 103386 - DNA, 409 bp, Mimulus guttatus
  Intron number 1 from transcript mgv1a010256m (locus mgv1a0 10256m.g) derived from phytozome v7.0 (chr-ID scaffold_13; pos 1289846 to 1290254)
gcctcgtaggccaagctgttgaagctgccatcaaggtgcgtatttaggtgttcgtatatatcatatatgtatgtataatttcccggcagcatctaattactctttagtttagtttcattttgatttaattgcaagttgcaagtgataataatctggtgttttgttttgttttgtttgaaatctcaattgtaggttatgtgcggtatatctttaattcgagttttcgttattgattgtaaatatcaaattaagatttgagattatacgaaaaagaaggataactccgcgcacgttgattattctgccggttatctcgtttttgttgatgtatattgattatatgttgaagaaacataattacatatctgataccgccaacaatcaattacttgtactttctcgttgcaga

SEQ ID NO: 103387 - DNA, 784 bp, Mimulus guttatus
  Intron number 1 from transcript mgv1a004320m (locus mgv1a0 04320m.g) derived from phytozome v7.0 (chr-ID scaffold_92; pos 153222 to 154005)
tttctctctctcacttcgaaacttccccaaaaaacgtaagtgtatctgcgcaccttagcatcaaatttacggcatggattttaatttcacatatttaggtttacgtacgtgtgtgtgttctgctgtatttacgcgccaagtatgattttttagggtttttaattgggctagaatttgtgatttgaaggcactgtgctcgagttattgggtgtttgatgagagttgaggatggaattttccttagtgtgttgcagaaaatgatgggtgagagtattattgggtggaagtttctagagaatcttcgtttctcatttggaataaaattttcatttagaaacaaaaaattggggttaggagtttttgatgtgtcatttaatttgattttttaagttttatcgagttaagattctcttcgacttctttaaattcaacaccattttattatttgattttggcagaacagattcgagtgagttgatatttttgttccagtatatgtaacgaactgatgttggatctggattgtgtaatttttagtccatgttgttttgcaccggggcagtttgatgttgtcagacttaagacatctcgtgaaattagaattttcttattgatacacggaattataagatggatatagtttcttttttcagtttgctatttatgtaatcacgagaatcttcgtatttatgagtttactgtttatgtaatcactcctaatctttaatcattggtgtaaattattgtaggttttggtgtcgaagctgacttgaacttttggtgt

SEQ ID NO: 103388 - DNA, 243 bp, Mimulus guttatus
  Intron number 1 from transcript mgv1a000285m (locus mgv1a0 00285m.g) derived from phytozome v7.0 (chr-ID scaffold_24; pos 1042860 to 1043102)
ctgctttgagatcgttgctcaagggtctaactcaggtatcagcactatttgtaaattgttgtgtagttcatcgcttttaatatccactaccatcattaatttacaacccaactgattgatatttgatttcatactagtgatttcatagctaaaatcttttgtttctgtatatttcaattagcattataatgtagccttgatatatcgattgaataatgtattttcttccagagagtcacagac

SEQ ID NO: 103389 - DNA, 840 bp, Mimulus guttatus
  Intron number 2 from transcript mgv1a003143m (locus mgv1a0 03143m.g) derived from phytozome v7.0 (chr-ID scaffold_16; pos 2213801 to 2214640 reverse strand)
aatttccgcgactgaattggtttctggagtttcaggtatattacatttttttcgaggttattgtaagcttggttaattgtgcgaaatgcgaattactgttgcgaatgcatggtttaattttttgaaagggactcgataagatttggtgataacagctttatcccgatgcaatgaagatgtgtagatttatacgaggattagctacagtatggcacatttccgaattttgtgttacctctacataatatgattacatttgacgtgatattttaataaatgcaaaaagagtaattgctgagatccaattgaatgaaacgttgttgaaattgagttcaccagagcatggctttgatctgttggtttattaaggtcctcgtaaattgatcgaccagatttatggtttatatgttggtcgtaatctgctatctgtgcgacctggattcaaatgccatgcttagttacattaggatcgtgatgttacactgatatacatgtatggtttttctttcttttgtgcaataattttcataaaatagcctgaaagtaccttcgtcttcggcaagttagtttgataaacaaactgcaacaattctacagttttctgaagtctacttgtcaaccaaacacaccatcactttctgttatcgcatatcaatattcaccactccgagatcatattgtgggaataaactttagagctcaactttctattttcttttaggtttacgtttttatagaacttaaagctcaccttgaggattcatcgtctctttctttttcctttgtcttttgtgaacctcttcaggtgcatcagaagaaaatattcgagacttgttctca

SEQ ID NO: 103390 - DNA, 481 bp, Mimulus guttatus
  Intron number 1 from transcript mgv1a015042m (locus mgv1a0 15042m.g) derived from phytozome v7.0 (chr-ID scaffold_130 ; pos 295471 to 295951 reverse strand)
gcgctctctctctctctctctctaaattcaacctggtaaataacgccctctctctctctctctctctctcctttctgtttttttttttttttttttttcagaatttctctgtaatttttcttcgatgatttggagtctgcggtacctgaattttatttctcggcattttttaattttttaatcaaatatatcgtcgtcttccttgatcccatttctcatttatgtcaatttgtgttattctaggttaccgctgcaattaatttcccccaaatcataaatcatgctgcaaatttatcagagctaattaaattttaatttatctgaatgcaattcaaattatataacccgaaaatggaatcgatgatgaaatcgcagttttagttcttcgtgtttagttttaatttttatgagattgctttaatttgcatttccattaaataaaaccccctttttttttaattggattgtgaataggtcaata

SEQ ID NO: 103391 - DNA, 626 bp, Mimulus guttatus
  Intron number 2 from transcript mgv1a005351m (locus mgv1a0 05351m.g) derived from phytozome v7.0 (chr-ID scaffold_1; pos 528258 to 528883)
tcgacgaggacgatattgctctcctcaaaacctatgtactgttttccctttttcaatttcttcaaacgaggattttatttttttctttctttctataattcctgctctgaacctaggaatatactgggcttcttccctttgttcgtcttcttgagtgataattaggatctatgatttggttactgagcaggaactttatttgttcattatttaatttttgaaatggaagattgagctagggttttgagttttatgttagtgtagcttagttttctctcccaaaatgtgggtatataattttcttgcttggtttttgctaatgtggatctggattgggtattcccaaatttattttggttttaattaaatataattagctgagagtgtccagtagcataaattgctttgttttgttaattttgcctgcttgtttttatttgaaattatatttttctcgaatcaatttcgttttagcggattactttttatgagcttatgtttttaggaatttgagttcatggcaaatacctgtacattcatgaattatggtggatttttgcttgtactgagttcatgaaatgatttgtacagggcttgggaccttattcgaccagcataaagaaagt

SEQ ID NO: 103392 - DNA, 848 bp, Mimulus guttatus
  Intron number 1 from transcript mgv1a003928m (locus mgv1a0 03928m.g) derived from phytozome v7.0 (chr-ID scaffold_114 ; pos 503810 to 504657)
ttttcggcgaaccaacggtcttggcggaagaagaggtgagtgggggtgggcggttcgggaagaagattagatgatgcatctgtggctttgtccgacattttatgtttttctttttgaatatatatatttaaatataatttatattttttttattttatttgtttaaattaaaatattataaaaaaattcatcagggagtttaattgtttcacgagtgttgattcataggggcaatcttgtcttttcacacaaaaaatgtacaacaattgcacaagtggttgtaattactaattacacaaacaagagggataaatttcgtaatttaaccatatctcaggggtggttgtaatttaccctataaaatttaacataaattgtattatgcaaatacaaattagattatatagttcacaaaatcatggaaatattcagaactaaatcggattggaaattcggaatttccgataatttttttataccatttcaatcctgttccagataaattcaaaaaaatcgcaactcggaatgaaaaacacgtttccaaattcggatattgtcgaatccgaatcgacccgacttaagaaattccattctaatttccacccctacataatttgtattctcatgcaattgcccacaaaacacactaaataattagcatttcgacccctaaaatacaacacaattcagaagcaaaaatcgatttgacaagtgaatgaaaaaaccatttaattttgtaattttccagtgagggattttaatttataactattttacaacacaacctatattttatcaatactcatcatcaagaaggagtagccgcctctcctttcacatcgatctct

SEQ ID NO: 103393 - DNA, 523 bp, Mimulus guttatus
  Intron number 1 from transcript mgv1a011103m (locus mgv1a0 11103m.g) derived from phytozome v7.0 (chr-ID scaffold_122 ; pos 683352 to 683874)
ttgtcctgatcggcgcggctgctgttggctcaaaggtttcacccctgctgatgctgcttatggagaatctggttttcttattactctttttctttatttaagttaataccataaaattagaactgaattttcgaactccgtcgattttgatctgatcttttttatattttttatttttgcaatatttaatttttttgactctgaaattttatgttttcccaccaaaaaaatattttttacatataatttttcattttaattatgatttctgatcaatttttttcccagaaacaattttgaacatctgatttttttcttcaaaagatatatatatttttaagggtcaattatggtcaccaccctaagataaagttaaattacgaaataacccctcatgtttggataattacaaccaccctttaactatgaattttcctacaagtccatccttatggtgtcaaattcaacataatcttttcgattccatggaatgttctctagcttaaactcgttttgtgcaaaa

SEQ ID NO: 103394 - DNA, 735 bp, Mimulus guttatus
  Intron number 1 from transcript mgv1a004541m (locus mgv1a0 04541m.g) derived from phytozome v7.0 (chr-ID scaffold_1; pos 918050 to 918784 reverse strand)
ttcagcggctaatcaaaagtcagattaattgtgaggtaattctgaagtcaattcatctatgacttttggtttacagaaaaagtcttctttatgtcggaatctgaaggtggccctgtttctatgagttgagctttttttataattttataattttttttttaaatcttgcttttaggccttttttgcaggtttaattattaattgattgttttcgatttgtgggaaaaggtggtgttattatattcattgagaataaaataggttctgatcttttgctgcaatgccgatgcatttgtatgtcgatccaaagattgttttggggtttgattattgttaattcatgtattgtgtcgaggtcgtatgtgcgggttttgttgatctgattcactgtgtaatggtagctgattgaaaactttttaactgatcactgaatacgtgtagctgatgtcattatattttatttccttttacatgtttataaaatcttcgattgtgtttttttcgcttgggatcatctccaaatagataattcatatatcgtgctatgtattgattgaatcttcttgtagctctaaaacgatgtttcttagttcattctcactctgcgatgaatgttgatcaagaaaaccgcatggtagatgtgcagtccagacgaaaaagatattctagtattcgttaaggtatttggttgtttaaagggttaatttggtgtttacgtctcgcaggttttcccgt

SEQ ID NO: 103395 - DNA, 508 bp, Mimulus guttatus
  Intron number 1 from transcript mgv1a027027m (locus mgv1a0 27027m.g) derived from phytozome v7.0 (chr-ID scaffold_104 ; pos 777408 to 777915 reverse strand)
atttctccagcttcgttcgtcagttgaatacttatgtgtgtttcctctttttcctctttttctttgcaatttcattgtagaactgcactatttggtaagaacagttctaaatttaattttgagattagaatttgagatactcagctaggttattttccctgatcaacatttaatttggtaattctgtacgtttcccctttaatttagtagtaatttagattctgagtgaggtttcatacatattctttggtttctgcaaagatatggagttcattcaataatggtccgatgaagtgtagtttttttctgaaactatatgtgtgtatatgatctaaaattttttggagaaaattgcagaaaacgccaaattgttctgcataacttaggatttagttcccgatcgttgtgttttttgtgtgtatgtcgatcctcagtaattcttttatagtttgcttttcccttttgtcaattagggcttcaggaaagttgatccagaccattgggagtt

SEQ ID NO: 103396 - DNA, 370 bp, Mimulus guttatus
  Intron number 1 from transcript mgv1a002117m (locus mgv1a0 02117m.g) derived from phytozome v7.0 (chr-ID scaffold_64; pos 19740 to 20109)
acaaatttgttattggccaagaacgcgccaaaaaggttccatttattcttcttttctcattttttttttgcttgtacataaccaatgagtatcctcagtcatacacatatttaactggttattctttttctttcccctatcccaatatcaaaaccgttttacatattatttgtttgatgatcatcctcttttgatgtaatcttgtttctagggtgaatgttgttacttgaatacgattttgtgtttcgttcgatcatctttatcttaagcatttcattactaattcagtcatacatcaacctgattttaaagtttgttgctcttgatgctggcaggtgctatcagtggctgtgtacaatcactacaaaag

SEQ ID NO: 103397 - DNA, 754 bp, Mimulus guttatus
  Intron number 1 from transcript mgv1a003287m (locus mgv1a0 03287m.g) derived from phytozome v7.0 (chr-ID scaffold_79; pos 864430 to 865183 reverse strand)
tcgaagaacaattgcccgaagatcctgaaattgtactactctcactatttgcgtgcggctggatattgctttacgtttttcaccaccactttcgttaccaatagctcttgcagttgtaattcacaaaggattttttcagcgtgcatttcaaattgtatagtaattgctgttattttggtaagcatctgagagttgccgtgtgcactgaagatgctattgatactactttgtacaattttactatgcgtgttaatcagtggttcccattttttggggtattctgttgatatgttgccagtatgtatgcatatttgtatgcatttctatgagaagtatttttcctaactgttctcaaatttagaaaactcgatattgttaaatttgatgaaggtcaaatgtggcaagagaatagagtgaaatcacatgctaactagtaactagagaaacttgtactgtgaaatgtgcttcccttgttttacttgcctaaaacgacgcttcatgtcatgcccagcaccattcttccaaaaatccctccattcctcaatatctattttaccattggattctgttgtgtgaggctgtgaatttgaagtttctattaaactgtctttttctgacatgattgataattctcaatcattgtccgttgagactctcttcaattattatctataagagctgatgatttcatttaagtaaattgtggttgttgtttcacttattgtattacttgctgcaggatattgcagaaata

SEQ ID NO: 103398 - DNA, 820 bp, Mimulus guttatus
  Intron number 1 from transcript mgv1a007351m (locus mgv1a0 07351m.g) derived from phytozome v7.0 (chr-ID scaffold_2; pos 3565744 to 3566563 reverse strand)
gccttaaggtggtttccctttccttttttttttcataaacattttaaatcagtgatttattttttttattacgctttgcatttttgagtttgagatgatacgtgttggcatttcttccgattcatctggtttttggtttagctgaaaacgtatcagtaatcagttggttgtttgtttagtcggagattggatttaattttgtaattgctgttttgatgttcaacgaattcggttttggttttcgtacgacgcagctaggccagaatctgaagccaaatttgtttccgtaatttttttttgtttcatgcaacctattttgttttctatgaaatgtttgtcgaattagtgttagccgttgcggcggtacgtagtattatcacatggaatagtagttcacactggctcaaacttgtagatcttgtgtcgcagatgcatttcgaatatatttggtactgtcatttccctcggatttagcgtggttagaattttgtgttttatggtgctggtcttcactgcgcatgtttagtcgtcacgcttgtggttgagaaatttaccatacttgacaagttaactgtcttaatcgtattttgagtcatttagatattctgatggttagttttccggtaatctccaaagaggtagctgaatttgtttcaaactcgttgatgttttctccacatgattctgccatctagtgtttgtattattacaaactaaaaatttctgtctagtactttgtaaatattgttttgagcttacggttgtatttcaatgttacttcgacttgaccttgtcatgtgtttaaaattaggttttgcat

SEQ ID NO: 103399 - DNA, 808 bp, Mimulus guttatus
  Intron number 2 from transcript mgv1a008545m (locus mgv1a0 08545m.g) derived from phytozome v7.0 (chr-ID scaffold_181 ; pos 71201 to 72008)
caccacttttgccactgccaccaccctcacggaaggtaaactcagtaatttgatttatttcattatatatatatatatatatatatatatatatatatatattatcctcttctcgtttgttagataaagtttttgatgaagaattgcttgttttgctctttttttttttaatggattggctgttcacctctgtactttgttctggaccaattctttatgtgatttgtgatttagacgtttgtcaagaatcccaagacatcaaatccaatcatcttttatttggggctaaataaaaaaaaattagaattatcagtgtaaggcaagaaacaggattgtgaaatagaaattccatctttactaaaagaccccatttaaactatgtaggtctaatttggagcaattttggtaaactactacgactccctgaatcatcaaccaattttgaaggaattaccaccaactttgtgtttcagtggcaccactcccatttttgtggtgtggaagtattgggttcgatcccaggtgtgtattgtaaggccattaaaaaaaacctattttgaaggaatttcaacagctttagctaaaatcaccaacaacttttaattaaaaccccattttctacttcacttactggaacgttcaaacttcaaatacatcctgccatccaaagcacatgtattatccttatgtcgtaattcttctatatttaaattgttttgaactttttagtttattagaaaaggttttgcttgttatatgcttgttacatcttgtaacatttttttcctttttgaaactttgcagctgc

SEQ ID NO: 103400 - DNA, 349 bp, Mimulus guttatus
  Intron number 2 from transcript mgv1a010771m (locus mgv1a0 10771m.g) derived from phytozome v7.0 (chr-ID scaffold_122 ; pos 227845 to 228193)
caataacccaactctatcaccctctcatcttcaaggtctgagaatataagaaaaaaaattcaatcttttttagttattgttatagtttaattcatgattgcattttatgcttatatgtaaatgaaatgaagaataaatctagattttttaggtttaagttttattgcttcatgcttcgatttgtaggccgttgtcgtatgtatgacattttgatctgatttcgtagtatttcgatgtcgatttatgttttatcgattcctttgttagtatttctgattaattttttttttttggtaattttgttgttttttcagacttgccgggatttacacgaagcgtatacaaacga

SEQ ID NO: 103401 - DNA, 533 bp, Mimulus guttatus
  Intron number 1 from transcript mgv1a003229m (locus mgv1a0 03222m.g) derived from phytozome v7.0 (chr-ID scaffold_181 ; pos 487846 to 488378 reverse strand)
ctttagttcttgccagatttcaaagtcagttcattattgcttgtattgactattagatctgaaatattttccatgtttctctttcaatgttgatggtgcttccagtttatacgaaacaactctctaatctactaacattcacaattcatgattctcgtagaacaaatcttcccttcacattggtaattgttacttacttactgtgattacactattgctgtgatgtttcacatgtccctttgctactttgtagtgtgatcgaagagcataacatttgtttgcttcttccctcttcgagtttcttgatctttatgtcatccgtttgatccatgaattatgagaatctgaagaatttatgatgattttttttttttcgtttttcttgttctgcgtttctaaactgtttcattttatctcaactctcaagtaattattgagagatgattattcttcaaacaatttcatttgttgaatggagtcgtttataacagtttcctgtatctacttgcagattgtagagaaatcttgacacc

SEQ ID NO: 103402 - DNA, 786 bp, Mimulus guttatus
  Intron number 1 from transcript mgv1a012740m (locus mgv1a0 12740m.g) derived from phytozome v7.0 (chr-ID scaffold_151 ; pos 539148 to 539933 reverse strand)
tagctccgtacgtccgccatcacctgaatcgggtatgtttccgatgcgttttttttttttttttttggtttctacttttcggaactctttgttgtacgaccagatgagaaagttgaaggaaaattgatgtgaacgtgttttgttgatcgtaaatgcatgttattttcacggaatgggtaaactgaaattgatcgtaatttgtaaatgagacggaaaatttaggtagattttgaatcggttcgatttggatttgaagtttcagaagaaaactgaaagagtttgtatactgatcaacacgaacttgaaattcttctgtttttctgtgcgattttgaatgtttcgattggatttgagtgtacctgaaattttgtgattttttcatattatttgaattaattgatggattgaagttgcagaagaaaactgaaagagtttgtactgaacgtacgaacctgaaattgtttctattttcttctgttttgagtgttccgattttgagtgtttcgattttgagcgtttcgattgcatttgaatttttgtgattttttcatattctttgaattgcggaagaactgattgtattgatggattgggaaaatttccgacagataattcggtaactgattgtattgttcttaggaggatttcttgctattggtattgaacaccgtatgatgtttcaataacgtcgtgacacgattctatatataatagaattgattcttttatataatgtgttcagtgtttgcttctctataattaatcattgactaattgtttatacag

SEQ ID NO: 103403 - DNA, 480 bp, Mimulus guttatus
  Intron number 1 from transcript mgv1a001659m (locus mgv1a0 01659m.g) derived from phytozome v7.0 (chr-ID scaffold_26; pos 923552 to 924031)
caggtagtttctaatccatgctaattgcaccaggaaattgtctttttttttttttgtttaaataatatttaatggtaaatgatctcacgctgagtattaaggtagccgaattaagaaattttttgaatgaaaataagttcacagccaccatacgaaatagatgtgggctcgttgtatttcttcggttatcgaaagtgatagagaaaccatcttattattgatggttgttgaagttttactttttactgtcatagaagatatgtttacaagtggaatgtaatttgttgaaagcaattttattgagttataatgaagttacattgaagattttgtttttcggttccgatttagcaacattgatgactgatggatgatgatgtgtttcttttatcggtccaaattttcattttttattttatttttctcttctttacccggttcctttttttctaatggttttgactttcattcagtttgcag

SEQ ID NO: 103404 - DNA, 604 bp, Mimulus guttatus
  Intron number 1 from transcript mgv1a024108m (locus mgv1a0 24108m.g) derived from phytozome v7.0 (chr-ID scaffold_129 ; pos 179893 to 180496)
ataacggaaacaccgccctaatcagagaattgctggtgatcaatcattcttcttaaatctcctatttcaatttttagagatttaaaaaaaaaatcgattgtttttacctctctaaatttgatttcgatgtcaaaattagatgcttaatcataaaccgagccgtttattgaaacgtgtacagtgcaacatatttaggcatgtattactgttatctttccagacgtgaaatgcctgagcaaatttggaagatcttttttttttttttaattaatataattaatttttttaatataattttggtgttttatatagtttagtaataaatttttcttatatttatatatgttgagatacaattgaatttgaatttgagggagctgttttgttctgaaaccgccactctgtaatttcaaatcgggtgagcaataattagcaagaaaattaattaatcattataatttgtcattctctatgcccagcctaaaggtttcagtgtattctaagttaatattaattaaatacatggctgcctaatttgatcatcttttaaatcattttttaattataattaactaattaaaatttgtttctttccgggggcaga

SEQ ID NO: 103405 - DNA, 855 bp, Mimulus guttatus
  Intron number 1 from transcript mgv1a022789m (locus mgv1a0 22789m.g) derived from phytozome v7.0 (chr-ID scaffold_71; pos 271137 to 271991)
ctctgctgcaccctttaaaaccttcaacttaagatgtactttttgataaaagctctaaggttcttcgctgggattataggaaatttgtatatatatatatatatatatatatatatatatatatatatatatatatatatatatatatatatatatatacaaatttgtgctccataagcctagcttcgtgaacctacataaattagttataaggaatacaatcatgcatgatttctataacttaattaaataaggataaatcattttgcaatcttttctattatgtaataaataataagaaaataaataatgtcttatacagtaaaatctacaggacatatgaattaaataattttcttatcaatgacatggaataagatcgatgacaatctgtataataaaaccacagattttgtccaaatatttattaactgaaatctggtgccaacactaaaaatcttcttcagaaaaccattttctacttattttgtttatttcttaaaaatgattcaacttttgctcagaatctaaatttcaactgttatgttcatagtatttacttggtcatgttttaatgaattttttaaatattgaatatctaaaagataatatgaataacagaacaagttaactttgtgtgaggttatttattcactaacttaatgtatatttatattaatttcacataatgacaccaaaaaatcattatgaaatattatgtgacggagtcacttcggacaatcttatttcaatttgttttgtcaacttttatacattattattttaattgaactgattgaactgctctgtcatctttaaggttggcttatagatatacttgaggcctacctagcg

SEQ ID NO: 103406 - DNA, 932 bp, Mimulus guttatus
  Intron number 1 from transcript mgv1a011971m (locus mgv1a0 11971m.g) derived from phytozome v7.0 (chr-ID scaffold_278 ; pos 117236 to 118167)
ttctcgctaacaagtcagaatatttttcgtttcgggtacggttctcgcctcatattcttcatcaatttcattcgtaaattggcatatgattcaattagggttttcatcggttattattctcttagatccgcgtttgttttactgttcgatttctcatttttttgttggaaacccttatttgaaaacctgcaatttcccacttttagggttttctttcacattgagtattgggcatttctgatatgattcaattgttaaaagaaagattgaatttttaattgggctgcttgattcttgaaaactttaccttttctcgagtgatttaattaattgtttacttgatgatttaattaattgtttacttgatgaaatgtgggtattgatgaaagagatgatgattattaactctttgattaagctgatatgatggctagttatcatgtattagctctagctgatcattctatctgtttcccacaaaggtgtttgttttttttcgtttttcggtttcgactaattttgttcgtttaattgcaagtgtgtcgattcgtttcgtctacagtcttagtgaggttgaattgtattgtgggttcaattgatatggacacaattatcacaaacataaatgcttccctaaatttcaatgtcgttgaaatgatgaggacaaaatacagtgattgccgaaatgatggctagttatcatgtattagctctagctgatcttctagaatgtaattatggttatctttgtttattcttttgcatattgaacttgattcgtttttaattggttgaagttttgtttgatttgtcatcccctcggaaaatataaaattgattgctcccattgttcctttctttcctttaatatatttcgtgcattagtaattatcaatatttgaatgcctgtaggatttaaaaacactgtctaa

SEQ ID NO: 103407 - DNA, 406 bp, Mimulus guttatus
  Intron number 2 from transcript mgv1a011971m (locus mgv1a0 11971m.g) derived from phytozome v7.0 (chr-ID scaffold_278 ; pos 118276 to 118681)
agtcttctagtccgcaacctccgtctcgattgcaggcaatttttttttcatccttcatatacggatatcttggtcattctgatttttagatgtttgaattgttatctttatgtatcactacagattttagagagcaagtaggtgataattagtgaagtcactttaatttttgtgaaaacttatgtttcaaaaataagttttttatatttcgactaatacagaagtttgtgggcattccaaaatttttaatacgacaactcaatatggtaaagcggatgcaaagaaaatgtgattatattttaccgaactgcatgtttgattcatgaatgaaaaagagttgtgcttctaacagttcgatttgccttaaacaggcctgaagatctgaagaggcctttcggccagtttg

SEQ ID NO: 103408 - DNA, 809 bp, Mimulus guttatus
  Intron number 3 from transcript mgv1a011971m (locus mgv1a0 11971m.g) derived from phytozome v7.0 (chr-ID scaffold_278 ; pos 118697 to 119505)
tctatctgccaagggattactacactgggtgagcttttatataacgttgtcctttgtctgtagttccatttatatctctgctcttttcaagttgcatcgatatttgtatcacttagcttacgtttgctgtctgttgttggctttgctacttgtatatttttttattttattttttttatcttcttgaaatgggtttttgttattaagatgtttgagatttagcagtgaagtaagagttgtgaagacttcaatcgagtaataagagttctatttgacacattctattagtaaagagtcctcgtgacacgacaaatcaagtaataaagagttgaaggtgatgtaaatgatagtggagatttgaaggaatctggtttgaaaaatgtgaagatatcgagatttcaagtcttgaagatattcaagtcatcttaattatcactcacaaggtcagctgccaagtgcttgtttatgcgcttatctcggccttctatttctctgaatttttttgagctataaatttgatttaggggttttggaaaattttagattccttaaaggtggtatagactcgctgcttctcgttttttctttcccgtatttaagctgactcttatattcttgagcttcctctaggactcagcattttcaggtgaaagaatcgattgcaaattttttgtaggttctggctgggaattttatatagatattttagttctttgggctaatttctaattggctggtatcatttcgtttgaaatccatgttaatgactatcctttttattgcatttcgaatttaattgttctgcagtg

SEQ ID NO: 103409 - DNA, 900 bp, Mimulus guttatus
  Intron number 3 from transcript mgv1a002729m (locus mgv1a0 02729m.g) derived from phytozome v7.0 (chr-ID scaffold_16; pos 1415629 to 1416528)
aagaaaggtacatgatttaacttccttccttcttgtaagttatagtcttgttttttttgtgaactcgagcataaaaattgaggcgatttatgttaccagtattatattcaaaaaaattgtccttagagtgggaatacctgcaacataattattttacttgttttcaacattaagacaaaataattttatcttagattcgaatataagataaacaggaaaggaaatttttgaattaaggcatccacatgaccacactgttttcaattcaatccaactcatgcgacagcaagtaaaaactgtactccgtgcacagactttcgtctttcttcgatgattggacttgaaactttacctatctgacaagctaaacttaatacataagcaatacatatatatttttttttggagaagcttgtccttaaccagcctcagttgcgtttgtgatctcatagaatttcggtcctctttgtttctttttaattcaatcatttccttaaagctattctttgtctcttggtgactcctcagattcaagagtatgtttgaggagtcaactgtagcacaccagataatgtgcctcctatatcaactattgcattagacacttgtttcttagttgggctggtcttactttcttatgtaagttctgttattattcagtcgttctgatgaactgtgtactaaattgtgaggcatagttattgaggcttagggtaattaggaaccctaaatggtacctttttaataattataaaattgatgctggacttgagagatacattgcttgattttgtgagggtgtctgtttgttgtgctcctaaatcatcttattaatgcactttttactcgtgtttctgcaacacagtcactgcagtagatctgaagcagactattcaggtt

SEQ ID NO: 103410 - DNA, 834 bp, Mimulus guttatus
  Intron number 1 from transcript mgv1a009701m (locus mgv1a0 09701m.g) derived from phytozome v7.0 (chr-ID scaffold_1; pos 4863080 to 4863913 reverse strand)
aatctctcgtacctgctccagtatgtaactgcatattcatttagattacgagttcttgcatgttatataattgtatgcatgcccgaacattctccgtctcatttcttataataaaagtatggccccaattatttttcgaagataattgttctggcagtttatggctatactttgctgcacatacatggtgcatcagttctctcaacttgccagatctccttcttgacttgatttgaattcatttaaatttttactagaatgatgttttacagtgtaaccaaataaatatagaagcttgttcgaacaagaagtcatgctgggatatagttctactttagaaaaaagaactagtgttgaatgatcagattttgtgaatcgtacttgtagaatagagttgcaagatgtttaaagttctagattagaaaaaaaggctttattcatgcgctggttgatttagttgtggcaactggcaacattttaatgatgatggtttatgtgcatggatcatttgacaaaatttcatatgttatgagatctttacgttgtggttttcttatgggcttgtgagagtgagatttttttttctgatgatgaaatttaattagattgccaaccatattaccattgtagaagagcaaatgataggcatgcagatgagggcaatgttttttgtttttagaagttctaacttccatgaccacattcaatcttcgaatttttttaaccaacatttccatatccttacaaactataattttatggtttctgattaaccgtaataactcatatgccatttcagatattagcagctttagacattgtccgtcagggtgc

SEQ ID NO: 103411 - DNA, 579 bp, Mimulus guttatus
  Intron number 1 from transcript mgv1a005979m (locus mgv1a0 04609m.g) derived from phytozome v7.0 (chr-ID scaffold_14; pos 1950382 to 1950960)
atctcatcccttcgtcgccgtgataaacattgaaggttagtttctttcgattcgtacggtggtggtttcgtcagattcgcctcaaaaaaaataccgaattcactactgtcttgagttcttcatttgtttacatcggaattcaaatttattctattttccggttgttatttgaattgcgaaacagtaaaaattctaagaacttaaacaatggcttccgttgaggttagatccaattggaggggagcagggtaaaaattccgaccgaaataagaagactttaattatttattttctaggttaattaagattgccgaattagggaatgtgttcatatccaatcggatcccattggatccggcataagtgacccgtatccgacaaaatcaaagtctgacaaatggaaatttatgttgttcataatgctgttgagatttgagaacatatatatatatatttcagtgttcatgatttaaattttcaaaaatattacatttgggtataataattgtaatttctgattgtttagctgaactggatgaaccagatcacgaaccaatttgaagtgaaaatcaacaaaga

SEQ ID NO: 103412 - DNA, 620 bp, Mimulus guttatus
  Intron number 1 from transcript mgv1a017186m (locus mgv1a0 17186m.g) derived from phytozome v7.0 (chr-ID scaffold_58; pos 463457 to 464076 reverse strand)
tcgtttatctgccctttgaacgattgaagtcagcggtaaaatttctcaacccaaatcataatatgttaggatttgcactctggatatttagatgttttaaccgtttaccccttctattgggtataccctcttctttatgtaaatcgacgttaaatctttctgtttgctgtcagaaattggaagaatggttacgaaatgtaatccactttttatttttattttttactttttgttagttgatttttagattaatattatcatgcattttaatattagattaggattgattatgctccgatgtgttgtaagtaattgatctgccatatgatgtctgggaaattgcgcaagggctttgagtttgtccatttgtatttcttcaaatgtgacagtgaaataattaccatacctattccttctgatggcagtattaataatgaatgattcttgtattcgcccgttttcacctatgtagttgcgttgcttttcttgaatattttgaatgacatgtgtctagtgttttgcctaatggaagttgttttctcttcttaagaactaaaattatgttttcctaattaattgtccaaggtactaaagtgaaattgaagtgaaaaatagtctta

SEQ ID NO: 103413 - DNA, 599 bp, Mimulus guttatus
  Intron number 3 from transcript mgv1a025171m (locus mgv1a0 25171m.g) derived from phytozome v7.0 (chr-ID scaffold_173 ; pos 210486 to 211084)
gacaggtatatttcctgttttgatctcgtaaaatttatgcggcacaggcactctcttttgtgatacgttgaatcagcatttcgaattgaggacttcctttttaagattcttcggtgaattattgcatggtattatcggtactctagcagaaacaagacatgaattacatctctctgttcggcagaaaagtatagttacggttttactgggtaaagttggaagatgttttaattgttgggacacatgttattagtttcagaatttacattccatgttctcttctggaatactctttttgctgagagctgccttataaaactttgtggttcctgcttttattctccatgaacaaactacttgcccatgttgtgtggttaagcctatatcagaatttggagattcaaatagtcataatatatttattgaaccgggataatttgtgtttgccttgtcagttaatatggttaagtttatatgcagtcccttttttgttcttcatttttactagacttgtcgatatcttgatgctatttgacccattttataaatttttctttgtgtatatcttttaccagacaggagcaggaaagacttacagt

SEQ ID NO: 103414 - DNA, 1029 bp, Mimulus guttatus
  Intron number 1 from transcript mgv1a001078m (locus mgv1a0 01078m.g) derived from phytozome v7.0 (chr-ID scaffold_102 ; pos 861688 to 862716)
ctccacctccgcccccacctccgcctccctggtaagtattcaactcaatgtcctttcgtatttttcttttcatttctcaaagatccggtgattttatttttattttttttatctataaatctctgtatatatttgctcagcaaagctatgtgtatctgtctgtacaaatgtattgcatatatatattgctcaagctatattcgaatgttttttgtttgcaaaatgcctgagttgtttgagcctatgctagaaaggtgaaatcgttgagagagacgctgtggagaagggatctgactgtggcggtgttgcggcggaatctgtcaactgtcctgtctgtgatgccctacttcccagcctggatagtacaatcatcaattctcatttaggtaattcctctgtatagatttatttttgcaccagatttatcattttgaatatttcatgctgccaaagaatcatttataacacttccggaataaaagttaactcacccgaccttcttagttgtgaacatcgttagaagtgattacaagtactgtcatttgtttggtgatattgtacttttacagtagttcatgacactccctaaaatagttaggcatggtcgatctattgaaatatgggatgttatccggaaagtattttgttgcggttttctttttatttaattttaatatgaggtgtttccccgatgcaattctaataagctgtagcaatagccaatatgcatatgaattgtttgtgatacgttctacgtgctgagcacattgatcatgaatcgagtaattagagagcacgtgtatttcagcaatatcaaggagatagatggatacataatttcttagctttaatcgctgttcacagtatagcaagtagagttggagaagctattataaatgttattgaatgccatgcactatctctccttctacgatctttctttatgtttgaacaatatttttaatgatgtatactatttatttgatggtttcagattactgtcttgctaaaggaaggaaacggaaactg

SEQ ID NO: 103415 - DNA, 857 bp, Mimulus guttatus
  Intron number 2 from transcript mgv1a017707m (locus mgv1a0 17707m.g) derived from phytozome v7.0 (chr-ID scaffold_45; pos 1290574 to 1291430)
agctttcttaccactacttatccactaactcacaggttatacaatagaggctcgataaatattaattaactcgcttaaataataaaatcttctgaccccgactcggtgaaaactaaaaaacgtattacattattaatttgacaatttaatatttcattaaatcaattgaattttgctaatccctacctcccaaccgtattactttatagagatatactgtacatatatatatatatatatatatatatatatatatatatatatatatatatatatatatatatatatatgcgtgttagtgtgtgcagattatattaatagtaattggtatttatacgtttgtatttgtgtgtgtgtgttttagtgggtgatgatatatgagtttacattgatttgattgcacacgattgttgtgaggtgattgaattattgatgttacatttaaataataagataaattacgaaaaatcctttgaacttagattaaataacgataaacatccctatctatatataataaccaaaattcatttctaattaattgttgattaagtttttttaacagaaaatgtgtacaatttgttattctaccttctgttgaatagttgagaaataaaaaaaaaaatctgaaatcatgtgaagtctatacccggaaatgaataaaaaaatatgtgaaatttaaagcgtaagagattagtgtaagactgaaacaaacctttagagtttttttgataattacgaaaaggtagagatggtttttataatttaatgtaagttcagggattttcgtaagttttcgaaatattaattagtaattaatattttattttttatggtttttaatttgctccgttagg

SEQ ID NO: 103416 - DNA, 918 bp, Mimulus guttatus
  Intron number 1 from transcript mgv1a026848m (locus mgv1a0 26848m.g) derived from phytozome v7.0 (chr-ID scaffold_16; pos 2296189 to 2297106)
taggctatatcagccagctattgaagaagacacgagttagtaacgttacatggttcgtggaaatagctaaaacgtgagcgaggcgattactttgtctattcccaaatgtaaacgtgcaagaactaaagtaacaattttttcgtttgtttatttatttaatttaaatttctttttaaaaaaattcagttctttttttcttctttttttccataaccaactaaaaaaatccgaaatcaactacaatttcattttttttcatcaaatcgaaatcaactataaaatatcaaaaaccactgcaaaattatcgaaatcaactataaaatcgtagttgactaatgaaatcaactaaaacagtaacaaaaacaattatattgctgaaagtaacacccaacacaattgcaacaaacaaacatcctttcattcattaccatatataaataatcacaatcaaataatcataattcaattatatgcacacacaaaatagaatgaacattaaatctttacctaatatgtatactccaccgaatatatgttgacttgaccatctatgaaatttttgacagctaactcaaggatgtctagattaatacattgactaaaatttaattttaatactctcttactaaattagtagcaaacaattaaaacaattgaacaataataatattatcataatcttccataaattttaaattcaataaaccatagtcacattgcacaattctattacaatatttgtcaacatatactaggagaataattaatctataaataggactcaaaaacacaattaaatctctaaaaatcaataaataacctaaggatagtatggccaaatttatcttatactatatttcatcctttttacatgtttgtttgaagaaggcaaaagttgctttttggtcccaagagttc

SEQ ID NO: 103417 - DNA, 603 bp, Mimulus guttatus
  Intron number 2 from transcript mgv1a010129m (locus mgv1a0 10129m.g) derived from phytozome v7.0 (chr-ID scaffold_132 ; pos 240784 to 241386 reverse strand)
gttcattaattcgcccggtggctccgtaactgccggtgagtcgactttcacccctgtttagctgagttgctttgcgattttatatatatatattgtgtggagaactcttgattgtatatcgtttgaaaaaccaaaaacgaatggtgtataagatagcgtttttacttcatatttggattttatgagcaaagcttatgataatatttccaatcactcaattcgggggcaacatctagtatctatctttcaaaaaatagtttggaatcttcagatgcttattttgagaaatcgaagcaggtgttaatcacttcctaataattactgttgtgctttttgtacggtatcggatatgcattttgagtttaatgttaagcgttatatttgatctctacaagagacttttcacaattgatcaagaataaaaacaattttacggtccagaaaacactagtgattttttgctggacgtaaatttctaggatctgcatgatgcccttttaaaatgcaaattttatcgtcgtcttcatttgcagaatataaactcgttgcttgtgcattaatctttctatacttaaatccgttcaactgctcatcaatgtagga

SEQ ID NO: 103418 - DNA, 674 bp, Mimulus guttatus
  Intron number 1 from transcript mgv1a000937m (locus mgv1a0 00937m.g) derived from phytozome v7.0 (chr-ID scaffold_137 ; pos 72164 to 72837 reverse strand)
ttcaaattgcagtggatttctcggtttggtcgaaggtacaaattttaactccctcaataattttttgttgacacttatttatctcaagaatcgattatgagaaatggaagagaaacgattcgggtttattgacaatgttcgatgatcttagcacaatttctatatacctaggagtgaaaattggaaaggacattccgaattcctccgattccgactttgaaaaacacatttttcattccgaattttgatttttttttttgttttggaacggaattaggaatgattccaatttcgatagatattgatatccgaaaatatttccaaaaattccgacttttttttccccgaaaattacacttacagcttcaatattgttatgtattttgtattataggtgactaaaaaattggaattttcgaattcatctattccgatccgaaaattccgattccggaacaatgttccgtcattccaatttccaaaattccgatttccaatttttccgaattttattttaacagaattgggaattactttcacttccgaaaaaaaaatattctttttcttcgaaaatgctaattattcgatttgtccgatttccttaacattcatagactgacaggataaagaagctgatctttacaaatttcaattttcttgcagctctccgattc

SEQ ID NO: 103419 - DNA, 683 bp, Mimulus guttatus
  Intron number 1 from transcript mgv1a000035m (locus mgv1a0 00035m.g) derived from phytozome v7.0 (chr-ID scaffold_11; pos 2788485 to 2789167 reverse strand)
ctgatctcatctccgccattcaagaggagcccaaggtattgaaatttgcgtgttttctctctctcctctgtctcactcactcatgttcagttattctataacgaatgtcgcggcggcagaggttttgttttggtttatatggtgatcttcgtgaatggtcgggcttaaccatgcctttcaacgaacttcattttactgtttggtatctatatagtttaagtttcatgcctgatattaattgcagagggaaatttggcaacattctgattctcaatttgaagttcattttgatgattcctgggaaattgttttagttttaattggttcaaaagaaagtaaaagatccacacagtccagttttcgtcattcggtcgttcggcattggtttctgtataacgacatctaggatgttagttggagcatttatttgggaatgcgagttgtgcaatttttttctggatgatgttggcgatgctgctgtaatttttattatcttcatttggattatggtcttttactggagtaactagtaataatttccattttcttctgtatgacgaattattgttcggtccatttactttgccgagttttcctttctttctggtatgtcggaaaaatgtaaaaaaattctgatcacaagtttacgaattttaggactccattctgctgtggcaaagaaa

SEQ ID NO: 103420 - DNA, 897 bp, Mimulus guttatus
  Intron number 2 from transcript mgv1a002092m (locus mgv1a0 02092m.g) derived from phytozome v7.0 (chr-ID scaffold_36; pos 135857 to 136753 reverse strand)
gacatgtgagctatattttgcatttgttatttactgctccagttactggattgtatcttatatgcttctgagattgatcgagctaatcaattgcaggttgtaattattgttttactcgtaatcccgtaaatttgtgataagttgaacttatccttgcttcaattagttgaacatctaaatgtaaatagtattgccatacctgccttatatttatcattttgacttactgaaagaagtgtattaatttgataaaaacaatattccatgtttttaatatgtttattttgttgaacttatataatttgagtcgaagacttgcataagaacatgaaacaatgtgatgttacaggattggtcaaaatagctatttatctgtagattagaatgactgcgagcaatatgtttctggtaataactgttaatgtctgcctactacagtaagttttgtttctattgccaaaaaagggaaattcttctggatgaaatacttttccatcgattcttgctatgttctcttaatggaagattatagagaatgtatgggtaaatacgaaaatgattaatgtgaacagaagttttgtttctaaatgttgatttatgcattgaaagtttatgttattatgttctgtggggcagattttccattaatttctgatgaagttcccgttgccacttttatagttttatcgcatctttctgttggcttgacgttaggtaaaatcagtgttatttttttgttttctggatatcttcggcttttctttagcacttcagagctctccccatttttagtatacgagatttttaacgcgtcagaacacgttttactgatccaaacactcagcacatgttttccgccactgcatttaaattttacaagctttgatttgtttgcag

SEQ ID NO: 103421 - DNA, 491 bp, Mimulus guttatus
  Intron number 1 from transcript mgv1a012537m (locus mgv1a0 12537m.g) derived from phytozome v7.0 (chr-ID scaffold_4; pos 983095 to 983585 reverse strand)
ataattccggcgacggatagtagaagagcagtcttccccgtcgtgaactgtcctttttccggcatgattattagttggccgataggattgatgattaattggcggactgttaataaagactttgatgaaacaacagggagataacacgtggcaccgtggagtccgacacgtggatttgactgatgatagccgataggatactactcccccttcattcttatctcgtccaaaacggcgccgtattggtagaattaatttaaacatgattttgaattttgtttttcaatttatttataggtcaaactattttgactttgaccaaatccatcgttgacacaaaaacgctacctaataaaaagtgcttttcgcggtttaacgcttttaataattgttaaataagaataaaattgaacacctcccgctcccccaaatttattcaactttcaatttttggagccctagctactcagtagctaacctcgacgagatcc

SEQ ID NO: 103422 - DNA, 424 bp, Mimulus guttatus
  Intron number 3 from transcript mgv1a011565m (locus mgv1a0 11565m.g) derived from phytozome v7.0 (chr-ID scaffold_75; pos 560588 to 561011 reverse strand)
tggttatattctctgtgaaacctcaagttggtatgttctctatctcgttgcttcgctttgctcctgtttgctattttgtcgcttcctcttcctatatattttaagctgtctgctttactgttaggataagaaacgctagtactttcagtttgtgtcgtttgatttatgaagtgtatgttagcctaagcaacactgtagaatcaacaaattaaaaattaaaagaaaatcgttttctttctttcgttttcttgcaagcaaaattttcaacaaggaaagactatttcctaatgtataatgtatagtttcatttgctaatgtgcgttgaaaagttaatgccgttcttatcgagcaagctacgattgtctaccatcttgcctgtatactcttgatttttttttttttcgtttcaaatatgtagttaaag

SEQ ID NO: 103423 - DNA, 696 bp, Mimulus guttatus
  Intron number 1 from transcript mgv1a006833m (locus mgv1a0 06833m.g) derived from phytozome v7.0 (chr-ID scaffold_130 ; pos 387969 to 388664 reverse strand)
gggatcatcgattttgtcgaaaccctaattctctggtaaaattttcctcccctttttctctttcagtttaattcaactgtagcatacatttttcataattcatatcagttaattacatgatctacaaattaattcaactttttttatactgcttttttctgtaagaattcactgtaatttttggtacttagagaaaacccagatgtaagaaaaattaaggaagaaagcccatgatcaagaaaccttgaaaaatgtctgtaaaaattgagcaagaaaatggggtcaaaattcagtctttgcatgcagataatcagatgagatcttgttatttaactggtaatagatcttgaaattagctacccttttaatttttgcaattgatttatgaaatttaaccatccgggtacgaataaatcggtacttatctatatgcatatgcttgttgtgtccgaaatcgtagtcgaatgaggtaatctattttaaagattcttgtttttttgccgatcatatatataatcttaacaatatttcagcaggcattaactttgaggtttgaatcgagttagtcttttactaattcgagtttacctaataaagctcgagtctttataaattgggcattttccaatttcagtttacaatgtatacaacttctgtgtagttgagcgaaccttctagaacgtggtggaagtattt

SEQ ID NO: 103424 - DNA, 764 bp, Mimulus guttatus
  Intron number 1 from transcript mgv1a000085m (locus mgv1a0 00085m.g) derived from phytozome v7.0 (chr-ID scaffold_7; pos 681758 to 682521 reverse strand)
caacgtatcattctcgaacgcctcgcggctgctcggtgagcttcagtttcactcgctttgtgaataataatatatagtgtgtgcctgctccattatatcgtcattgttatgcttacttcatgtttgcttgtttgtttgttggctaattgtgcatgtttaatgcaagtttcgtgtttgattgtaccggaatgaagatgattgagttttagtagttatgttgatagacttagaacatagaactaatttttatttttttttggaatcaagattgcgtgctgtcacattttagtgtgaagtagctgaagtttactatcagtgattgttgcacaagtttagacccgaccctgggtataagggatcttcaaaacgttggggttttgacacctacaggcctggtggtttctaattggctagtcatggacccgatagattcgggttcgacccacaagtgaacctatcgaatgtatttttttaggttaactatataaactgctgtatttaagtgtaatatagttgattttagttaatttaagtctaacatagttagtttttatttatttaagtatgatagagctactttcaatttatttgagtatggtgtagttggtttaattaactgggatatttggttaaggttaagagctgagaaatcctgaataatggaatcagtggttcatgaaacgtggtcagatctatacaagtttattgtcagttgctgttggcttgtattgctgttgatcgttttacttgtggcttcaggaaaa

SEQ ID NO: 103425 - DNA, 1012 bp, Mimulus guttatus
  Intron number 2 from transcript mgv1a016531m (locus mgv1a0 16531m.g) derived from phytozome v7.0 (chr-ID scaffold_115 ; pos 600337 to 601348)
acattgtctttgcagtcgttacagctataattcaggtattattgcttgaaaaataacacactattttagttttatttcttgattgactgactaattgggatttgagttgattgatttatatttcgagtgatagcgtcttcattttagaataatttagcggtttttgttttttgttttttctaaatcaatgatgataatcaactaactgaaggaatatttttgagttttatttgtggattgggaactgaaggaacccattcctcagttgttttcgaagatcagattatggcattgttgggacatgattcacatttatctgctagtgttcatttgagatcattttctcaatgaatgatttctcgaactttccgtttggttgcatgacctgggaattttatagatcatgtcgttacttttgtgatgtatttggttttagatcgattataaaatacaactcttcattgaagcactttaaccagatcagtcaccataaaatgtacttaaatattaagagcacacaagttgccttagcagggatctctttgtttgtttgcttggttaaatattaatgtatttttgaaatcaaatatcagtttctttgatataacttgaatattaaaaggtaaccaactggttatcagtaatgtgatgcttctgataaattattttatgtttgtttagctaatgtgtttatttgatatcatgtttctaacatgatattgatgttatcatctgagtggatattattttggcattttaacgtgtataagatgaaaacaaatagctctccattgactcaaaattaaatcttgtcaatatatttagtcaatgtgaactgttctgttatcgtataatcacgcaaattgtagatctatgctgcatcggattctttcacaaacatatattctcgttaaattagcttttgtaacatatgtctgtctggtttgtttgtggaatgaatagtgaaactgaaatgttgtttcatttctgtggtaataagtaggtaggttac

SEQ ID NO: 103426 - DNA, 331 bp, Mimulus guttatus
  Intron number 2 from transcript mgv1a012500m (locus mgv1a0 12500m.g) derived from phytozome v7.0 (chr-ID scaffold_104 ; pos 562032 to 562362)
acgtcagccctggtctgtttttttcttctctccgggcattgtttgattttgcattttacgtgttctgatgattaaatatctgctactgttcttccgtttgggattttgcatgtttggttagtgtttgattgattgcttgtttgccaaatttttaatcctgattattgaaatatttcatcttttatctaatatctggaaatcgatccaatgttatataattcaaatcgtttgaattttcatttgagtgtgatttgattattgggatcatatatttgttgattgaaaaaatcgaacaggtgcaaacgatagtaacaagcaaagcagaagcgag

SEQ ID NO: 103427 - DNA, 721 bp, Mimulus guttatus
  Intron number 1 from transcript mgv1a006741m (locus mgv1a0 06741m.g) derived from phytozome v7.0 (chr-ID scaffold_121 ; pos 763296 to 764016)
caccttattcgctgctccgccgtctgcaaatcgtaattcgctcctctcaacatttaatacttgctataaacttatctacaaaatacaaataattattttgtaatttcatttttaaaaaaacctttagatatgacgtcatccgaacaattgaattggggaaaaaattgaaacagtttaaaatttagttttatttttagggtaaattacaaccaccagtgaggtatagtcaaattacgaaaaccaaaccacccctcaactataaatcttcttatacgtcgtcgacccttgcggtttctaatttagaggaatattatagattatatagaatattctcaattttgtacccgttttatcccatttgagctccacattttgaagcaagatgatcgtaagatgtgttttttggcttgtatgtatcagattgtcgggcatcagaaactgtatttttgcacaaaacgagttcaaactaaagaacattccacggaatctagatgattatgttgaatttgataccataagggtgtaagtgtaagaaattcatagttgagggctagatgtaactatccaaacaagagggttttttttttgtaatttgatcatacctcaggggtggttgtaatttacccttattttttatggagttagatcaatcacttacctatttttactttcttcaatgggtgaaggagcacagtgattcgtaaactgaagttattgcaaa

SEQ ID NO: 103428 - DNA, 885 bp, Mimulus guttatus
  Intron number 2 from transcript mgv1a014588m (locus mgv1a0 14588m.g) derived from phytozome v7.0 (chr-ID scaffold_196 ; pos 159005 to 159889)
tatcaaagtgagtgtacatggtgtatccgattataatttttcgtttcttttccggaaggatttttgtgctactgttataatacttaattatttggcatgttagtctgtactttgtgtcactgtcctaaaatcttcgggttttttccatgctttaaaataacttggcttaaggaatatcctagagatcatggagactgggaagcttagataagaggtctttattgataaacggagtaactcgtggtgtaattgtttcgtgtttcgttgaaacttatgaaacttagataataggtctttatagataaagagagtgacttgtggtggaatgattttgtgtttcactctgaaactcagaaaaagaattgggatagttagctaaacactaagctgtgatggctacgtaactcacgtggaaccatgagaatatttgctaatttaaacgggtaaatggatcaaattaagtcattttgatttatatgttaaattttgtataaatccagtagatactcgaatctttttcgtcgggatgaaagagtacttctccacaaaggaagtttatatgcacctgaccgatgttagtctaatatacagatccttacagatgagctacaaagtagatacgcggaaattagtcgagtgtcaaagttctgatccactatttacactctcgaaatataatttcgtgctttgatagctgaacatgtattatcaaaatttagcactaaaaacaaaattagtatatgtttgtaggactctccttttgctgtaatatgccgtgttagagaatttcctccgattctttcactgaacatgggaaataattaactagcacattaaaaatgacttgcaggaggttcacgactatttgaaaaccctttgtccaga

SEQ ID NO: 103429 - DNA, 939 bp, Mimulus guttatus
  Intron number 3 from transcript mgv1a000170m (locus mgv1a0 00170m.g) derived from phytozome v7.0 (chr-ID scaffold_45; pos 1268362 to 1269300 reverse strand)
gagccctgaggtgtgtattatatccttaaatgtattatttataacacttcagtagtgtcgttatagatagacttcttggacgtatacagagttactctgaaggtaaaatgtgtttttattgttttagttttacgtcaaccatagatttctttcgttctttctcacacttggcaaacccgaaaattaagaaagttgatttgggctttaaaaacaattacttctttgtactaggatgggtagatggggagggaaaagtttggaagttccataaatggatgggattttttttcctttctttaattggcctgttattcttttgttagattttttgggtgttcagttatcatagtcaggattctcagtctcgtggaaaggattttgttaattttattttcgagtctgttaattgttgtgaatcacatattttctggtttgtggcgtttgattgagggctttttagtgaacctgtttttctagatgtcaattattttttcatcgcaaaacatgcttcatattggttggtatttcagatcttacttttcaagtttcaatgcacactgttatccctgtgaaggatattggtcgacttatatcgtttacagctgtaattctgttgttcatttgtatttgtgtgttatggttttgcgtgtaagctagtactagtatcacttggagttggttcatcttcagtattctttgtgatattgtttgtttaaaagattatcacatctcaattctcatcactgtactttctcaatcgtcggttaactatagaaatttttaatgcagcatatgcaacaatcacgactgcctattttctcgtatttttttcttttcagtttgaagtatccaattccagtattttactattcttgtttgctggtgctatattcttaactattctaataattgtttccaggtttattttgctggattggg

SEQ ID NO: 103430 - DNA, 957 bp, Mimulus guttatus
  Intron number 1 from transcript mgv1a001678m (locus mgv1a0 01678m.g) derived from phytozome v7.0 (chr-ID scaffold_246 ; pos 58837 to 59793)
cctttgattccaatctttggtaccgcattggtcaggtaaatttaaaaaaataataataataataataataaataattgagaaaatcaaattctatattatatgatgagaatttctttaatttattggattgataaaataaatacaaaactgcagattctggaatgtttggtagatttatcgaattttcatgtatgattgaaaatttacagtcaccgactaaatataatatagtgtaaattacaaaaatgccccaaacctaggtcaaattacggaaaacacctcatcctatctgtaaccacgaaaagcccctgatgtttgtttatgttttacatcgacccccttatggtatgaattttccacggaatcttttttattctagagaatatttcgcaaaacatgttaattctatacctgcaaacgtggcatgtctttaagttactttttgaagatcaaaattacctttaggggacctttacacgaaatctttagtcttcttaaataacacactcacatttttttagtattattgttacccctctgatggtgattttttactttaaaatttaacattataaagaaatgtcacgtctgcaggtgtagaattaacatttttcccgaaatactccatatgattaaaatgattccatgaaaaatcacaccctaagggctcggcgtaagacataaacaaatatttggggtattttggtaatcacagatagatcgaggctttttctataatttagtcttagtttagggcagttttgttatataccctataatataagtttgttaaaatgggagttttcaagattgatttgatataaacctaatactagtacaaaaaaggagtgatttatttatttttataatggttaaatccatatgtatatttatttatatattttaatttgaaaataaaaatgtaatattaggctattgggaaagaggcacgagcg

SEQ ID NO: 103431 - DNA, 392 bp, Mimulus guttatus
  Intron number 2 from transcript mgv1a007305m (locus mgv1a0 07305m.g) derived from phytozome v7.0 (chr-ID scaffold_402 ; pos 7675 to 8066 reverse strand)
cttcttggtttgtaccctttatcatttcttaattattatttatttcggtactatttatgccctgcaaattcaatgagcttactatttttgcatcgaaacataatgttcataaacaaccctagaagtcgaagatgttttcttcgttgaatttggtgataattgagcaattagtgaagtacagatttgattcgactttgcgtgatttgattcttcagtttattcgtcgattttttttttctggaactagaaatttggtaggaaaattgatgaccgggaatcggtggtgtagatatacattatacatgcgtccttctcttttttcacgtgacgtaatatttatcctttcttcggtttggattttttcagtactatccaagtctcaatcggtcgag

SEQ ID NO: 103432 - DNA, 606 bp, Mimulus guttatus
  Intron number 1 from transcript mgv1a003256m (locus mgv1a0 03256m.g) derived from phytozome v7.0 (chr-ID scaffold_266 ; pos 77663 to 78268 reverse strand)
tgatcgtccacattcttccttctccaggcgtcctggttagtgtgcatctcgttcttaattcttaatttttgaatgcaggttttcctctttggaattgtttttttttttcgttttgtgtcaattggttttggtaatttcgtgtgtttttgtgcttcgtgtgttgtatatgtcaaacttcaattttgatcgtgtctgagaatttatggatttttctgtttgtcctgaatgaattagcatgtataagaaaggcaagagatttatttagctgaattgaagaatgaccaaattcatgcagtaaaatagtttgttataagattatagtttcttagttaatgttatcaactatttctggggttttaagtttaagttatgtactttattaagtttgggatcagtaatacagttgtgcaattccaaattaggatgaaattcaaaaatctcgattctcgggttcagttacaagcatccaaatatgatattagtctatttattcagtcttttgtccggttagtttctgtaattaccctccttagatttttctttgaagtttcattctccattttatttccagggccggttacttattacaagagtctcgtaaatcaa

SEQ ID NO: 103433 - DNA, 948 bp, Mimulus guttatus
  Intron number 1 from transcript mgv1a025632m (locus mgv1a0 25632m.g) derived from phytozome v7.0 (chr-ID scaffold_48; pos 1497206 to 1498153)
atttgtaagctggggctttttttttttttttttttttttttttttgggtgtgtaattttttccacattttatcttaggggcatgcatgtaatatctggtttgtttgagcatattgtgggttcttcatttttgagtctaatgattcttgattttaattctattaactgggtatttttttctctctatctaaaaatcctttctttttgtgaatttggtgtttcttgtttttctgtcataagacatgcaagtgttgaattgttgaaaggtgtgtagacaacagaatttgcatttttcgagaaatcggttgctgtcgatttcggtgtttttttggtgaattgatccacttgctgcaaatttactattttgtttatcagagattttcttttaattcatacactagattgatgtgagatacagaacaccaccgctattttattgctaaaaaaatttccaatttcgctacatcggtggtgctatgtgctatattaagaagtcggagctggaaatgatgacatcaccattctctcctcgaattatcggatttttttttcttttcaattgtcggtttttaggtctctccctacacgattaagacatgcaagcattgaattgttaaaaggtgtatagaaaatagctgttgcatttttcgagtgcaatgtcactgttcaacttgttgcaatttccgatttttttcgtcggagatttatttatttcgacactagatttgatgtgcgataacgataactgatacggcatgtcacagccattttaatcgcaaaatttattgcgtatcacttctgatttcgtcgtgtcggtgccgtgttctatattaagaaataaaaaaacggaaacgataacataattaattatcttgccgaattagccgtttttatcgtttcgttttttttcttagggctggagcaattccaagagctaagggaggcgcac

SEQ ID NO: 103434 - DNA, 827 bp, Mimulus guttatus
  Intron number 1 from transcript mgv1a018499m (locus mgv1a0 18499m.g) derived from phytozome v7.0 (chr-ID scaffold_197 ; pos 418215 to 419041)
tcggatccttctactccaagaccaaagcaatattggtgagttcttcttatttgatctttgtcttatacgtttgttaatgtgttgtagaacttgtacttgactcttaagtcttaatgtgtgattgttttatcgggttggctttgagagtattattctatatgggaactggtgaattaattttgcggatttccgattcgaatatttccgattttggaacaatatttttcatttagaatcctgaaagttcccatttcccattttttcgatttttttagaatggaatacatattagattcaggttttctattcaattttagtttccaaaaatatttctaaaaagttccatttttcctttccgaaagtacatttatattatcaatacatttatattatcaatattattacctattgcgtattataggtaactgaaggaatggaattcggaattttgccaactccaatccaaaaaaatccggtttaggaacaatattattcattccaaattttccttcttcttttttcagaacgtgattagtaattagtgttttcgcttccgattttgtgtttttggaatttttcatgaattgctaatttcgataggatccgtccgatttccactttactagagtttgtgaaagtaccgcttgtttatcgaaaatactttacaaatcttgcaatattgcaagtataggtatagtttgtcccttcgaaatgtggagattgattatccatgctagaaattattgtgtaatttgtatcttagagcatacgtttttttattgattacactaatatgattgtcaaggttgaggatttattacacaact

SEQ ID NO: 103435 - DNA, 734 bp, Mimulus guttatus
  Intron number 2 from transcript mgv1a021375m (locus mgv1a0 21375m.g) derived from phytozome v7.0 (chr-ID scaffold_15; pos 1701314 to 1702047 reverse strand)
tgggacactcatatctttcttcatcacatcatttggtattaattatttcaattcgctgcccattctatgatacccacatataatgtaaatcttacgaaatcctatcgaacaatggataaatcatatattgtttagaaatcaaagttgtaaggaattttattttcatcgattgtaaaatttgatcacatgaaagtatattttcctagtcagtttacgataaaagttatcggtattttgagtttacgcatccgtaaagctttgatggttgagaagtggttgtgtttgcatgatttcctacttataacttatttttgtgcacctgtctatatattatatattttatggtttgtgatttcgcatagcactaagtatttaactttttcaggttcgaaactttttttcgagacattgggaatagtcaattttgaccttaaagattatcttggtcacttcatcctcttcactacatattcatcctgtatatgatatttcatcgtatatgcatgcaattatcttgtaattaattctttgttagtcgataatttcatattatatctcctagggttctctctctctctctctctctctctctctctctctctctctctctctctctgccctgttgtatatatatgtcgaactaatgaaacgtcttcttgagggatacgtttccaacttgagccttcgttttttatgcagcaattggaaccatcttttcagctacggattctata

SEQ ID NO: 103436 - DNA, 639 bp, Mimulus guttatus
  Intron number 1 from transcript mgv1a002530m (locus mgv1a0 02530m.g) derived from phytozome v7.0 (chr-ID scaffold_181 ; pos 228741 to 229379)
tttgtgttcccttccgaaagtacaccccagagtcagtatgtaattatttatgcatttgatttgttgttgtcgatcttcgtttcgattctgtgaatattttcagctcctttactttcacctgaaattgctatttgattccttcataatatcagctttatcaatttatcataatttttttttcttggttatgtttctagcactgagaagtttgtcttacggttactgagttcgtgctgtacctcggtatttcgttcgatttagattattgaaatcgaaacggttaatttgaataagtatttatgcagaaattgcgtggaatctaatgttattctcttgccataagtgctgccattgttttcaactgaaaccgatattctgtgccattagtgattctaattgtttcaattgattgatttgatcgaaattgggccattgttagattctaaatttgcatttgcgtggtctagtaattcgatcacaagaaatgttctaaacattttgcttcagaattttttcttggtcttagttgagctcttcctatatcaaattactttgttaatacgaattatattttgctaataaatcgttttggttacttatgtaggtgagcaataaagtactggagtcgagaggggcaat

SEQ ID NO: 103437 - DNA, 699 bp, Mimulus guttatus
  Intron number 3 from transcript mgv1a000570m (locus mgv1a0 00570m.g) derived from phytozome v7.0 (chr-ID scaffold_361 ; pos 83288 to 83986 reverse strand)
caaaaccagatacaagagacacaaaggtaagcacaagctaattccatatggagaaactatttggatgttcatggtctactactagcatgagacagtctaatttacactagtttgttctagacaataatgtcagttgcagatttgggtaaacgttttgagcttgtcagatcttgtaataagtttaatactccctaactcaattatgtgagatatcagcacacatccttgggtttagctagaagatccatcacaagaatctggtattggaatttgcgttgacgttgaaaacctggggagagagggggaaaggttttttaaagcgtcggaaatgtaatgcctaaacatagacaaagcaacagggagaaatcctaggccctgtttggattgattttgttttcctatcatttggaaatggtggctgtgatgcaatgataaagaaatttgcatctggtgtcaattatggagagaaaagtctatttttaaagtatattttgttattatattaatataatgactggaaaatatatcgttgttttgagaagttgatttttttagggggaataaaatttccacaagaccttcaatttatatacctattattgagtgatccactcagtattggatattttagtgacttgcatccaaatctggtttcctaagaaaagattcgacacttataaacaggaagtcctgcaattc

SEQ ID NO: 103438 - DNA, 582 bp, Mimulus guttatus
  Intron number 1 from transcript mgv1a021706m (locus mgv1a0 21706m.g) derived from phytozome v7.0 (chr-ID scaffold_163 ; pos 257843 to 258424)
aattccggtcgccggcggcctatctccggcaagaggttaacttccttgcgatttactgtatgttttgagtttttccttgttcttctagtttattgaaggaaaaaacgtcctattaccgcttccgttttaaacaatttaattctgtctcattagctttagattagggtgacattacattttttctgttttgaatagtgtagctttacagtttctgaatttagtgcttcagtatgaatgactggaaatttctgttttggtaatgttagttatcaacttaagaaaatatttcatggctgctttttttgtagttggtataaatttctatcgaaatgtatggttttagtactcatagtttacccgagtaatcaattagaagctgtagttggttcgtttgctagcatataaaaagagccgcagataaatatgaagtaatattaatgtgatatacctgtccaattcgaggatgaagcagggcaattttcgttatggaagatcatggcaaacttgccttttttctttcatggagaaaacagagcaccttattttagcaaattcggttttctttatgtagacagagagaat

SEQ ID NO: 103439 - DNA, 766 bp, Mimulus guttatus
  Intron number 1 from transcript mgv1a015545m (locus mgv1a0 14704m.g) derived from phytozome v7.0 (chr-ID scaffold_1; pos 4689359 to 4690124 reverse strand)
ctgcgtcgctcaaccctcaccgatcctcgtcaaatgtatgtattattctcttttcgtttttctccagcatttcaaaatttaggtcgtgcttttttatctctcgatctttcttatctgatgctacgttaattatctgatattaattaaggttccggaatttttatttatctgtctgttctttcatgatttaagtatcaatccgcccgaattttgtgaatcgatttatttatacacgatcgtcgtcaatctcgtgtgattgttgttctgtatgcatctgtgtttaatttttcagatggaactgtaatttctatttttcgttttcttttttcttttgctttctggtgcttgattcttcacctcgatcttagatccggtggtttctcactcaaatagttgaaattttcttactagatatgtatgattcatagttttctgcttcgatttggggaacatagatgtacaagtgttgtttgaggtgtagattgtattgttataatccttgaccaactagtactaattctgtgagcatgctctctccattctctggcacggttcatttttcttttaatttagcagattctctgttttgtggatcttgatcttacattgtatgttttagaacgattctagctgatttttctttcattataatatgaagtgattttccctgatatatacaatgtatagaattacattgttgtttatgtgtaagtaatgatttgaatctaaattgtagttttgcattatattggttagcagttaagcg

SEQ ID NO: 103440 - DNA, 810 bp, Mimulus guttatus
  Intron number 1 from transcript mgv1a007936m (locus mgv1a0 07936m.g) derived from phytozome v7.0 (chr-ID scaffold_17; pos 1483904 to 1484713)
tattgcattcccgagatctctctttccaccaaaaggtgagcgcgtttaactcagttacgtttgtcattttttagatctgttaattgccgcgttaattcgttcttagatctctatggcatttgtttcttctttgtttgctgtattaatcatcgttcctttttgtgcattttttgtattaaatttgttgtttcgaattcagtattgctggatttggtgagttgttgaactcggacccggtatttgtagaattgagttaacaaaacgtggttatagaatgctgcaaccaaattgaacggtggttctcagttgcggatgtgtggatcttcgttctcttgctcattgagattcagatcttgtgtagcattttgtgccatgaatgaatgttttgattttccattaaggatctgtgttttctcgaagatgtttgtcgtgctagtttgatatttagcattatagatctgtattaattatgtcttcctttagatgttactgctgtttcttgttgataattaatgttctacagaatcattagagcgatgtttttcctgtcggtatgtatcgtttttttcagattgtttatctgtaatcactcttgttctataaacagaagacattgaaaaaattggattgctgaataacttgtttcccagcatggtattaaactaataatctgttgttgtctgctaatattcgacatttatggctcccatgcatctgaccgattcaactatatgaagtcgctatcctttttcagtaattcaataaataattaaaactaatataacattttaattgtgtttcagatacatt

SEQ ID NO: 103441 - DNA, 471 bp, Mimulus guttatus
  Intron number 2 from transcript mgv1a015610m (locus mgv1a0 15610m.g) derived from phytozome v7.0 (chr-ID scaffold_361 ; pos 89885 to 90355)
aggcaagtcagagccaaggttatctttgtatgagttttgatgttaatgagtgaaagtaaaacaccttctttttaaaccctttttaattcgtatgaatgcaaattcagtctgatgagaattttaaaaggcataaggtgttggaatggttggtgttcgtgtgccttgggatggagcatcagttttgaataatttaatttaaaatatgcaaattgatatatatgcaatagagatatagtaggttctcgacaaaagtagaattgatatcgagaaagaatattggttaaaatatgaaatcccattgtcgacaattcaaatattctttttaaatggaattagttcttctgatgacccgaacatcttgtgtttcttcttcttatgacgaagtttgtttccttttcgttttttatttatctcgctaacagtttattacatttaggtaaacttttcctattttgaggctggagaaaacaa

SEQ ID NO: 103442 - DNA, 822 bp, Mimulus guttatus
  Intron number 2 from transcript mgv1a014060m (locus mgv1a0 13617m.g) derived from phytozome v7.0 (chr-ID scaffold_258 ; pos 112778 to 113599 reverse strand)
gataaacggaaaagtaagggagtctctccttttaattctaggtctactacccgtaatttgtttgacgtggttttttggattagtaaaatgtacgagcaacgaacaaaaaaaaaacaggaaactaaataatttaaatttgtgtactatataagaatgaggctgaggaaaatgtattcgtgaaatctcgttgatttaggtaaaagaatctcataagtaatgtagttttcctagttttcacaattttgacgtacaaatattatagcggagaaatgtagtagctgcatgtcaaactacctaattagacatgccgaatgtaaggatagctaattggattcctcgttgattttctcattttaagcacttaataggaattattctagaaagtaatatacgacgaaagacacacgattgatcgaatggttttgtattactgtactgcatacctaatgtttgatttcaccatttatcatctatgttggcttctaagccgtgtttttgcagtaaatatagtgaggatattcgataaatcagtcaagaataactaataagcatgttcttgattatcttacgcgaaaataacatacattaacattcaagctcgataatctgtattcttttgactctgcaattcttcggcttgaaatttcctccaagtaaaatcagcttttgaataataatcaactctatcatgttaataagcaactgtcgattttttctataatttgcttgtggaagttggaacaattatcgaacaacagtagtaactctggcactgacttgacatttaattttcagggatattcaattttgcattggacggaa

SEQ ID NO: 103443 - DNA, 560 bp, Mimulus guttatus
  Intron number 1 from transcript mgv1a016133m (locus mgv1a0 16133m.g) derived from phytozome v7.0 (chr-ID scaffold_1; pos 2625126 to 2625685)
ctgcaaacctctccagcccatgtcaatcttgattaccctagttttcatctggaactgaattatttgtcgtttctgttaattattgcttcaatcaattctgtaactatttcaaaacgattgattttaccgtgcgtagttgttccgattctccaattgaatactgaaggagtataagcatacgtcatttgttgtttgaatatagttcatctgaggatttattgccttttaccttccatcatcttctttgttggtttctgtagtggaaaacggcgccgttttaccttggtttgtcccagttttgggagaatttcaatcttagcaaaaaattgttatatgatggactcaattgttaattagaagtagtgtttggtgtttaggtaaaatggagcaatggtaaatcgatggggattcatataattcccctaattttgactacacagttgcatcaaataatctcgtagttgtgtatatatattgctcgttttcgttaagcagtctgtcgtttgatctatacattaatttattctttctgattatgtataaatctgcaggcgcagcta

SEQ ID NO: 103444 - DNA, 835 bp, Mimulus guttatus
  Intron number 1 from transcript mgv1a010245m (locus mgv1a0 10245m.g) derived from phytozome v7.0 (chr-ID scaffold_44; pos 878569 to 879403 reverse strand)
cttccaatttcactgccattattacaggttcatcatttctctctattctgttcaatttttttttatgatcattgtttattattaattgtactcgtatttgtgtataatgtatctatctatgcatgcagaagtatctggattttttttgttttttttgttggtgtgtgtgtgttgatttgcagtctgcaattttactgatcaatcagatttgattgattggtcctgcgcacctgtacaaaaaacacacacagagacacataaatatgtgcgtttgtgacctttttgcctctgtgctcttctatttaattactggtattttttattttttttacatttttaaactggaaatctactaaatagttctggtttaaagttggactggaaatctactcaggactggttcagtttaaccagccactaattgatgctttgcttatgttcacgggccgggccgggttcggatccatggacagttgacccgattaaccggtcaattgaacatgggtctatccatgaccagattcagaaaatacttagaaaaaaatattcaattaatgcagccatgttatcgactttaattgatacccccattaattttgaatagttgaacaatcaaccacaagcaatcaataatcaaccaccacctattatgggataaattattttattgttaattatatatttcaatcttttatttcattgaaaatatgtaagttgtacctgaatctgcataataaaaattaaataggaatataatatagtatatatatcccaattgtttgatttgatttgatttgtaggtggtgcaagtggaattggagtggagacagcaaga

SEQ ID NO: 103445 - DNA, 523 bp, Mimulus guttatus
  Intron number 1 from transcript mgv1a026046m (locus mgv1a0 26046m.g) derived from phytozome v7.0 (chr-ID scaffold_353 ; pos 143062 to 143584)
ggaatcttgattgagggtatgttgccccccttcacccccaccccatgcccccccacccccccatgattagttttcgatttttgattctacacttttctgtatgtacattcgttgggcaactttttgttcttttactcgtcaatatttaaggaaacatgctttcgtttttgctctctgcggaagtgggtagtgaattccatagagcagagttgtaaagtaagcattgaagtagtagccgaagatatccgaaattctactcttaactgttttattcaagctgccagctggaattggttccatagcattttttttaattgttaatttatttattcatcttaggcagtaaatacgaaaaataaattattcgatcgtgttggagagcagtaagccttgcacgaaagaattctagtattcggccacactatagttacttgcccgagagaattactctacgaaacaattctaatgtatatttaggcggcacgaaggagctaattttgcatcgaaattcttacgtgggaat

SEQ ID NO: 103446 - DNA, 780 bp, Mimulus guttatus
  Intron number 1 from transcript mgv1a000231m (locus mgv1a0 00231m.g) derived from phytozome v7.0 (chr-ID scaffold_291 ; pos 118457 to 119236 reverse strand)
aatcccaagagcatcttgagaagcaaggtgagattattgatatgttattttttggcacgggggaatttcttcgcaatcaactttttcaagcttttgaaaacttatttcatttctgcttgttggttggaacttgaaatttaacactatcatttgcataacgttttattgagtaaataaattgacaatagaatattatcagattaggatcttaaaatttcctatcttccaacatgtttgctattgaaggccgatggccaaagtaaagtaaaaaaatgcatttttctctgtgttaattgctgcttgtttttttaacttagtaggagataggcacacacctatttttccaaccttttcttttatttgatgctaattgagaacaattttatttaatatgttactcaccctgattgtggcgacttgacacacaagataggcacacacccgttactctaaaatattggcaatacactgtttataattagcatttagcataggtaaatgatgtgtaatgatttgctcactgacgaagaggaaaccattcttataatgctgaaaacttgatgattgttgattaattgctattcgtttgtgttaaatacttgttgcctcattacactgtctgccatcaatagtttataatttccattttgtccctaagatcaaacaatgtagtacaaaattttttctcattctccccttttgtttctgactgctgccaagaaatttaatatcaactcattaacatacttaactgattgatgtttccttcttttgcagctg

SEQ ID NO: 103447 - DNA, 1029 bp, Mimulus guttatus
  Intron number 1 from transcript mgv11b018071m (locus mgv11 b018071m.g) derived from phytozome v7.0 (chr-ID scaffold_8 9; pos 762660 to 763688 reverse strand)
gaaggtctccctctctctctctctctctctctctctctctctctctctctctcacacacacacacacacacacacacacatacacacacataaaccatgacacaatttgttgatggtacaagatatggatatatatgactagtacaagtgctcttatttcaaagattgccagcacacaaatttctcaaaattaaatatataataaaacactatatatatatattcaattaatgtttaatatatatgtactttcttgaataagtcatcatattttacattttacttatatatatatatatatatatatatatatatatatatgcattttcttcattaggtcaactctaaattggaccacatgggttggttgaaaaaaaaaacttgcatcatttttgcagaaaatgcaaaatatatgggtccatttgcaaattgtgaaatgattttgaacaagtaaaacaaaaataaaaacagttaggtaattttattattttgatttggtcaaagcatatgtggggctgagtatcaaagaagttaaaggaaatatacactcaaaagtcaacacaagtgatttttgagttttgacaaagttggcttgagtttaatgcctataaatcatataatttatattttttttttgaaaaaaaatatcatataatttataattgatattagtttttttttttgctaaataggcctatttaaaaaaatctttaaacttatcatttattgcatctcaattcaataaatacaaatcttgttaaccaaatattttactaactcttactatttatttattcactataacctaacagccaggttcaaatcataaagagtaaattataacttataatatatgtgttgacatatgatatgagcacttataaaatgcttggctttttattttttagttttttaataacttgataaattacaaaaaattgctcaaaagaattgcaattaattgggaattcaatttattcctaataataattagagttggttgtaaaaattgttgaaggtgtgacatca

SEQ ID NO: 103448 - DNA, 202 bp, Mimulus guttatus
  Intron number 1 from transcript mgv1a001481m (locus mgv1a0 01481m.g) derived from phytozome v7.0 (chr-ID scaffold_1; pos 4306677 to 4306878 reverse strand)
gctcaccggaacgaactcgtctctctcctttctcggtatttctttttcccctatttcttattctctgtagattcaattttctggatgtttctagatcacccttgggatttccgttttcattttcaattttttttttttttaattttaattatgagaagattaataagtttgatctgaactggatttgtaattgattgaagat

SEQ ID NO: 103449 - DNA, 451 bp, Mimulus guttatus
  Intron number 1 from transcript mgv1a007446m (locus mgv1a0 07446m.g) derived from phytozome v7.0 (chr-ID scaffold_8; pos 936302 to 936752 reverse strand)
ccgatcaggtatttctctgatatttcttctttgttcttcaattaaattttagtaattcgtcttttgtttatttcaattcgtatgatctatacctaagttgcttaatttgataagctttagatttatttatttgatttttgggaattttgttctgggttaaattttcagcagaattaatttcacttttcattacttaatgatgatttcattgctcgatcctttttaattgccatcgttatttttctataatttggtttttaagtaggtttagttcaactgtttcctatttgttcttaacaaaagtggaattcgtgtttagcagtgttttttgtgtgtgtgtgtgtgggttgtttgtccttacataaaaaaacgtggaaaattcaatctctaattcatggcttaatgttggctttcgtggcgcagtaatatctgaagtttgaactgtttgtca

SEQ ID NO: 103450 - DNA, 337 bp, Mimulus guttatus
  Intron number 1 from transcript mgv1a004303m (locus mgv1a0 04303m.g) derived from phytozome v7.0 (chr-ID scaffold_23; pos 973726 to 974062)
tcgctggcgctgcccttgctcacactcttggcaaggtaaagctttttcgtttcccctatttttttttttaatattttgattttaagattttcctcattgtttatttgatttgtttttgattgattttcaaatttcttagatgcagattcgtttatggtattttctgtaaacaaattcaacaacaacaagataaaaaagaagttgtgaatgattaggacaagaacaataaatatcaattaattgattctgttacattcttatgttgttggcttttgtacactcaaatcttgatataattccaggagggaagacgtgttcgagttatcgaaagagattt

SEQ ID NO: 103451 - DNA, 548 bp, Mimulus guttatus
  Intron number 1 from transcript mgv1a011804m (locus mgv1a0 11012m.g) derived from phytozome v7.0 (chr-ID scaffold_32; pos 1827668 to 1828215)
ggatcgtcgccgttgttgctcttgtaaatttctttctacaaattttttttttcatgttgctgcttatcgttcctcctttcggcgattgtgatttgtgaattttgtgatggttgtgtttgatattttcgaattttacacacccggtgtttttcctgttcatttttcccgctgcattagggattcgtaatgaagggtatggagataaattgcaaaatactattttaattaggtttgttacgattacccgtcttaaattttccgactttttttagagtgaataactagtttccaaacctgtaagattaattttgttttagaatatctgtaattgcatttgaattaggggtttatacgcattccgttgagcttcttgcaggttttgaatacccttgatttatgtgttgaattgtgaatgttaactgaagataatttgtgtttgtttttgcatgcatagattgtgaaaactctttcataaattaatggaaggaaggttccatcgtttactccttgtaggtacaattggttaggatacaattgagagtacccga

SEQ ID NO: 103452 - DNA, 454 bp, Mimulus guttatus
  Intron number 1 from transcript mgv1a022717m (locus mgv1a0 22717m.g) derived from phytozome v7.0 (chr-ID scaffold_356 ; pos 111834 to 112287)
gctgctttcagaggtttagcatacaagcggtacaagtaagttgatttagcaattagttgttagcgctttcaaattgttgtatcacattgtgtgtactattattgcatccaatttgatggtaccttattaagatgttaagactatgacgaaatagaacaggttattgaatgaaaatggagaacacgagtgaatcttgaaagatcacgatgccacgtatgtcgagtgatatcacaactaaattggttgttattttttatgggatgaagacttggattgtaaatatgggtgtgtttttgctttttcttaataccatttagtggatacttaaatattagaagagcattaaagattttttaatgatttaagcttagagattttgaattccatttttccaatttcaggtcggtttttgtttattgtgaagttgattatattatcctcttatactgcaggg

SEQ ID NO: 103453 - DNA, 572 bp, Mimulus guttatus
  Intron number 1 from transcript mgv1a012783m (locus mgv1a0 12783m.g) derived from phytozome v7.0 (chr-ID scaffold_45; pos 756062 to 756633 reverse strand)
tagctggaattgcgggtactttgaatttttctcaagttttatttattttgtttttatttaaggttaaattaattgttgtctttttcttgatatttctgttgcttttttatggtggttgatagcatttctaattgggttttggtttattattagtttgattgagttatgattatgctatcagattgcactacttctttattagtttggtattttcttgaagatttcgatggaaaacatttgccggtttttttgaaatcgaacccctctgatcagtcgggggaccgaatgtatacacattgaaagttatttacgtgccgataataccacactactcgaaaaatcacgaatccccatgtaagttttagaggaggagtgggggggccatgccccccctggccttatgctgcctttagtcttccctttcgagatgacaaagttataaagatgggttaatgcttcatttctatgattagtgcctatcttaattttgttgatgatgctatgtaaatgtacttccttacatgtaacaaaaacgcagtctcgtgatttttttcttcctgtcattgtaggaa

SEQ ID NO: 103454 - DNA, 144 bp, Mimulus guttatus
  Intron number 2 from transcript mgv1a000188m (locus mgv1a0 00188m.g) derived from phytozome v7.0 (chr-ID scaffold_102 ; pos 805471 to 805614 reverse strand)
tatcagtgtttctgttcctagaaaagcccgctctggtaaaatccattttcttgattgtgtggttcttcattaatatttgacttttctgattttcttaatttttttattttatttgggttttttcagcaagtacaaagaggtcgc

SEQ ID NO: 103455 - DNA, 603 bp, Mimulus guttatus
  Intron number 1 from transcript mgv1a003401m (locus mgv1a0 03401m.g) derived from phytozome v7.0 (chr-ID scaffold_101 ; pos 431742 to 432344)
tctccgccgaccttaatcccccaatccactataaggtacactatcaggaaactaattaattaatattttttttcgagatggtttaattagatatttctttcaatagaattttctggtttggtttcttctatttctaatttttgatggaaaaaaaagaaatggtcatatttttgctttattgaatccacacaagataaagtcggaaaaaaaaaaggtgactgaatcccgtaagggatggcttagcggttggagcaagtgaacatgtgatcgaatcctcctgccaacagttgctaggtggaacttgtaacatatggttagtccagtgtggtttatgtctctcgtatggtttacaagctattataagagagtgtaggtttaccctgtgcacctgtacagtttgctgcgagtgactgaacactgaattgtttggggatcgtgaaacaatttctctgtctttttgtgatgaagacactaattgtgtgtgtgtgtgtgtgtgtgtgtgtaaatcgtggtaatatgctatgccgtgaaacatttacgagaacaacatgttcaaatcagtaaagctaatcgagtgtagtgtggttacaggttcaccaagat

SEQ ID NO: 103456 - DNA, 990 bp, Mimulus guttatus
  Intron number 3 from transcript mgv1a003184m (locus mgv1a0 03184m.g) derived from phytozome v7.0 (chr-ID scaffold_2; pos 169791 to 170780)
gcagaaggtatcaatttagcattttttttgttgttgtgccgcgtgatgatttactttgtggtttcggtttttgcaacttgatttaattggctttgtttgattttagctcaattgttgattttgatttttttgggggattctggagtttttgggagggtttgtgtccttaatttaatttctgagatttttggtgggcaatgttgctacagctcggaatctgatttctgggttttttgttttacttttagaagttgcttttttatttagggttcatctaattgtatatgtatatgctcaatttatctaatggacagaaaaattggctgtttatgttatgaaattagttccttaggaggtcgatcgacagcaggagagtctttaatcgttatggtttggtgattgtacttctgtttgagtcgaagaaaaccgcttttgcatttcgattttcgaaacatatttgtcgtttgatgttctttggttcatggcttcatgattattccgatgttaatgtttgcctttgggtgtgtgctaatttgtcgtttgtttaaaaagttagctgcagatcgctttcgagcgtttttattggtctgtatcttttccttaacaagcttttcatcagtctcgaaggaatttattttttaggatcgtcgacaaagatgttacttttcggtttgcttgtcctttctgtaagagataaatgggaataaagataaaacgacgtgtgatttttggaattcgttgatttatagggtactgatgaaattcaaacagttattggataacattgattcgtacggaatcgattatctttctttgttcaccttcaatatatctgtgttttgtctttgagcgaagtagcataatgaaattgcttttcattgtattcggtagttatatttccgatgaaaaatataatttgtcgggtcactttttaatcaaccctctttgtacttacccgcgttccttttttgtcattaatgatttagattc

SEQ ID NO: 103457 - DNA, 410 bp, Mimulus guttatus
  Intron number 1 from transcript mgv1a004473m (locus mgv1a0 04473m.g) derived from phytozome v7.0 (chr-ID scaffold_124 ; pos 653261 to 653670)
gccaagttcggctgacgaaaacccccaaaattcaggtttttgttttgttgattcctttttctctttctaccttaatttctttgatttttactcgtgtgttttgattactattatggaagcatctttgtaaaattgaatgatcgaacttctgataatctgattcatagttgaattttccaattcgtggtatgaattcaatttcagctccaattgactagtttcttagcgtgttctgctgtacgcggtacatgtgtgtgtgtgtgtgtgtgtgcgcgcgcgcgcgtgtgcagttataatagattaacataagctgagccacaattttggattcatttgtaattttataaccggaaagccttccgatttctgatgtttgctatgttgaactgcagttctcactcagccgacca

SEQ ID NO: 103458 - DNA, 916 bp, Mimulus guttatus
  Intron number 2 from transcript mgv1a012524m (locus mgv1a0 12524m.g) derived from phytozome v7.0 (chr-ID scaffold_22; pos 304021 to 304936 reverse strand)
ttgtgtgctgaaagcgagctgcattttgtactgaggtagaattttgtgggtttttaatttcgaagtttgttttgatttattgtgttcatttcttcttgcttttaattggtaattgtatatatttattttttaattttagtttttgttagaatagttcttggatggtgaataaatcttgattctatgagattttaaatgggttttagttgggggagtaattaggccctaatgattgtggattagtgagttcgttgctactaatgcaggttaaattaactaatgcatgcgaatttaatctgataaaatttatttaaggattcttgtggatgaaaaaaagcctcgattgctgtcttcttttcgttatttttattgctaattatcttaactcgactttactaaaaaaaaaaagttaacgaattgtgatttgcacgagtcacttggaaatgtatgattgctaatgctgtgtcaagtatggctacacttagttgttagattgaagtactcctactcatttctgtcccgtttttcgtgtgattttcgttaatgtgtttgcaccttggtcaatgagttgctctacgtatgcagtgccaataaactctcttatttaatgctggttgtatattagtaaaaccgcacgagtgatgataattcgacttttttgctgctacatttcgtcaaagaaaatcttgattctccataagaagataccaaaagatatatgagggatgagtaaatttgcaacggtgtgtaatttacgtattaagaaaacgcatagagatgcttttattttgttgttctttgtgaaagttgtataagtcacataagacttcgacacttcgtacttgctagagttcgatttgtgatttttgcgcaaattcatatttttttattttctaatttttcaggcgagaaaaaa

SEQ ID NO: 103459 - DNA, 562 bp, Mimulus guttatus
  Intron number 1 from transcript mgv1a008562m (locus mgv1a0 08562m.g) derived from phytozome v7.0 (chr-ID scaffold_27; pos 1057151 to 1057712 reverse strand)
tatctgtacttcttcttcttcttccgttgttagtaaaaacacatctaccttctcgaaaaatacgcattgatttcttcctttttgatagaattatttttagtccttgatttcgttatatgtggatgataagcaaatatatgatgagctttatgcatgtacatttggaggttgctgtatgtatcatgaaacgaattcaccgatttatagttagtgacagaattttctctgaaaaaatcgatctcggacttggtagaggttgtcgatcttaaatccaaattgagcataacagtaatttttactagtgtagcataacagtaatttttacatgtttagggcttaattttagatgcggaagtaagcatctagatttttcatatcgttttttttcgttttgttttgtgtggatgtggattgtggcagtgatgtttgccgacgggcctcactttcatggtattgcattgttcacagttctaattgcacggaatatgcgataatatggttttctgaaacatatatacttataaccattcttgctacccaccgggaacattttgcagctgca

SEQ ID NO: 103460 - DNA, 484 bp, Mimulus guttatus
  Intron number 2 from transcript mgv1a022795m (locus mgv1a0 22795m.g) derived from phytozome v7.0 (chr-ID scaffold_12; pos 2216636 to 2217119)
ggtcagaaggctgttaaaaacagcccttatcccaggttttttatttttaattatttttttccttaattaatttcttcaaaattaattaatacaaaatataatcacgcaagcaacgtagctaacttgattagttatgtacttaattaatttaagtatgggcaagaaattagtttatttatttttattaatgtgcagtatgaatgcaaaaccctaaaattgttttaattaattttgatcatgagttaaatttatgttaagaatagtcttattgttgactgtatatatattaattgaagtaaactgcaaaaacaaaattgaagtcagatgcaaataggaatatattttagtcatttgcacatgtttaggtttttcttgctttcacactcaataattaatttcatggcttcaattaattatatatatattatacaacaattaaaattaaaaattgatcatataaatacacttgcagaagctactacag

SEQ ID NO: 103461 - DNA, 808 bp, Mimulus guttatus
  Intron number 1 from transcript mgv1a009508m (locus mgv1a0 09508m.g) derived from phytozome v7.0 (chr-ID scaffold_20; pos 2333762 to 2334569 reverse strand)
atttcgctacgtcgatcgaaggttacgacaatgtgagttttttttaatctcttttcgggaatttagatcttttcgaattgttgttccttcaataaatcacatggaattcgatttatgagtgtgtaaattttggattttaggatacctgacgagaaatttgagctctttattggattcaatgatgataactggatgaagtttagatgcgtgttctagtgatttgactattggttaatcctattattcgatagtacattcaagtttagaagaattattcagaagtaccttcgcagcatttcattcactaaaaatattgctcgagggtatattcttattccgatgtgtattatgcgaatgctgaaaacgagggatttaattggtacaatttagaattatttaagtttcgttgatttaagctgggaattttcggcatctgttatttctagtttactttcacgagctgcatttcctttgcaacacgcattttcccgactcatttggaacttcaaccactactagcctagattttagtttcgtccggaacttcccgattagacggtctaaatcttacttgttaaatgcgtgcaattattgcgagtccatctatctatgtagctttgtttatggtgaattacgtatctgtaaaatatgattctaaagttaatcggtgatagcaagttctaatcttgtctgtctggctaagtaagactgtaatggttttgtctgtctgactaagtgaatttctcgtaatagtgctttttttttttttaatttataatagacaccggctgaaagagtcaaagccaag

SEQ ID NO: 103462 - DNA, 740 bp, Mimulus guttatus
  Intron number 1 from transcript mgv1a003015m (locus mgv1a0 03015m.g) derived from phytozome v7.0 (chr-ID scaffold_3; pos 1995797 to 1996536)
acacctcacaaacctcacttatcttctgtgtactggtaagcagcttccatttttttttttttttccgattattactcgtctccaaatcttgattctttttctttcttctttttttttttttttttttttttttggttcgatcacattttatttcggtatgtattaatgctaatgattaatgattttgctggtttttttgagattttttttttggtggagtttcaccttctttgatgcaattcgaactcgaaatagagtgtgttatgatttatgaacttatgatcatggttcccggcaaaagtggcggtacactgtcgtgtcgtcgcggacactgctgttccagttccattgcagtgtcgcggctggaactgacaaatgttaattaaaatgtaaaaaaattagaattaatgtcgaataagtttttaatgttaatattacagtagaataataatatacaaactaccattaaaactccattttttaattttagaacaaaattcttcaaaaccttgagaagtgtataaataattggaatttgtttattatgatctgattatttcataacttatgatcagttaataattggaatctgttttcagaattcgaaaatcgaaaatactattggatgtttaaggtgtcgaaacttttggtattttgaatgcttgagcttaaccgaaaaaaagggtgtgtttgtgtaattctgattatgtatatctgttgttgtttatagttatacagat

SEQ ID NO: 103463 - DNA, 735 bp, Mimulus guttatus
  Intron number 1 from transcript mgv11b005497m (locus mgv11 b005497m.g) derived from phytozome v7.0 (chr-ID scaffold_5 1; pos 1292976 to 1293710 reverse strand)
atcgtgttagcattggccttggggatagggtaagtaacagtttattggcttctcttgctatttatgttgtaagattgagttcataaagtttcatgatgctatgatctgactgtgtttattgtgcttttgttgagatgtaatgcagaatgatgaaattgtatatgaagctacagtgaaggaagctagtaggtttgttttgatttacggcattcgtttcaggattttatcaacgaagtatcatgaagagaaatagaagttctaataatgctttctttctagtaatgcagtccactgttcaataagaaagttgtgcttcggcgactggttagcaatcaggcgcagcgtaggggaagaagggcaatagaggtaagctaagttgacacattagtaagttacattttgaaaatggtgatatcttgtctgactttgatgtcttgttggtgaaattacattcaggtattgaaaagactggctcaccgtagagtaatgtaccattcttactcggtgcaagttcatggctatatatgttcatccacaaatgatgacagtggttcatttactctagtacatggtgtaagtttctctttctcaaaaagtcaatctagattggtgctcccgttttcatttattctgttagttaatgtgctaatgatttcatgttctaactcattgaaggattaactgtgatatttccaagatgattgtggatctgaatttatttttatgttcagtatc

SEQ ID NO: 103464 - DNA, 1020 bp, Mimulus guttatus
  Intron number 3 from transcript mgv1a005982m (locus mgv1a0 05982m.g) derived from phytozome v7.0 (chr-ID scaffold_32; pos 1001507 to 1002526)
aggtatttttttttatttaattatttttttttattttccagcttttagatttgccccactgaaattagttcctttaatttgtgggggaaaaataatacaatgtagtccctcacttatggaaattgtgttatttcctcgatctctacataaatatttattaagggtgcaaatttagatcggatggtctgttttaataggaaaatcgaatgccatagaataattaacacggggatagtttaaataaaaatataattagaattctaatgattgaaaaaaaaaaggaaaaaaaaaaaaaaccagcagaacccataacccctctaaccctaattataatcaacgtgatttattaagagttaagacttaagaataccacatgttaacaattagtggaatccgatttatacaaaatatctgctgattcgctcagaatttaatctcattcattaatgataattggcgaaattggttaagaaaattaagaccaccgaactctaaaatctctattattttatataaatattataaaaagaaaatggtttgtaaaatcattatcgacctcctcccataatatttttttatattgaattcggctcttctagacttaaaatcatggctccgcttatgtgctaaacaacacatattaggggaaaataattattggtggagagattattcaaaataaacggatttattattattttttgttgggataaattttgaaatgttacgtttgaaatttgtcctatatgtaattacgacaacatccagtctctttctaagttacacctaccccaattgaaacaatttatattataaattaaattgctttcagatttattattatatttattctcttatgtcaagggtattatttaataatttatatgtaatttattctcttcattattatatgagtgttacggtaccagcacgtcgttgtaaaccaacaaaaattcaagaaagttaattaattactgatttaattttaatttgtgcaggcaaaaagatcccctttgttag

SEQ ID NO: 103465 - DNA, 832 bp, Mimulus guttatus
  Intron number 2 from transcript mgv1a008788m (locus mgv1a0 08788m.g) derived from phytozome v7.0 (chr-ID scaffold_8; pos 3375248 to 3376079 reverse strand)
tgtccggaagattccggataaagtttttgttcactgtaagttttgtgcattctgtacttagtgtctactgcttgttgtcgtcaatgtttatgtacctctcgattcaactgatatacttctagaagcttcgttttatcaaatataaagctttgcacattacaaagttatacccagtcatgccaattgccaggtggtttttgaccctcacgtttggtggcatttaattgaaattagttattccaactgatgattcaatgatgttgatgtttttaaggtgtttgttcttgatcatcactgaaattgtaatctgcatcaccttagtttttgctgattgagaaaaaaggatgccactggaggatttacctcagaatgtttcttattcttatctctacttacgggtccaaatgtttcgaaagtattggttttggtttctctcttgctcttgctttggcccgatcttgattattttatagtttttagttcatagttaatattgagctacttaagaaaatctttgtgcagggatttgcacaaactcgtaaagccctttgacttttcaactccagttctctgagattatgatacaaattgcctgtgtttgtcattgatgaacaagttacattttcactaatttagatgaacacactgttacaatagatctcaaagaaatatggtatttgctgaaggaaacaccttctctgtatttagctttccaggaaggctatatatattatcttgaatttctttatctgtttctattgctttgctacattataggtgctctttttttgcccgtttacaatagttttttaatctttaggtagtgagcgaa

SEQ ID NO: 103466 - DNA, 910 bp, Mimulus guttatus
  Intron number 1 from transcript mgv1a015618m (locus mgv1a0 15618m.g) derived from phytozome v7.0 (chr-ID scaffold_11; pos 860036 to 860945 reverse strand)
ttgaattctacagctacaccgccttctggtaattcttcactctttttttttttttttttttttcttttagcattttccccttgtggtaatcgctaattttcgcgccgttttcatgttttttttgttcatcttcttcttttttgtgtgttgattattggtactgattttctgatttttcgaagatttagactcttctatatttctatcgattaatttcattcagttaagtgtttgattttttttttttaattttttttttcaattttcaggattaattgtgtgataagaatatgcaataggcatcaaattttctagtttattggtttttgtcggtggagtttattggtaatacacttgaaatttttgtgttgtttctgaagttagctgattctggaatcagtttcagtattgttgatgatgaagtagcatatgcaagaacacacacacacacacacacacacacagtgtttatgcatgttcttgtctgcaaattacgtgtttttgctatacgaatcaaatacatcgtgtgctttctaatttttgccgaatagccagggaattatctgccattgatttctttaacgagtgttctagagaagactgcgtaggaataaactcgatatcatttgtatacgagcttgtgattcggagattttgctaagttcatcgatcttcataaactagtagtcatttaattagtaaaaaatctagtgcaattctcaatctgttgtagtctaattcatgctttcgatttttcggttatctttaaatacatattccagttactaaatttgattggtgttcgacttcatcgcaacattcttgaagaaactactacaatacaaaataaagacgcctaatattctgttaatcatttgtgttttctacttgcagcttcttggtaacggtt

SEQ ID NO: 103467 - DNA, 585 bp, Mimulus guttatus
  Intron number 2 from transcript mgv1a019153m (locus mgv1a0 19153m.g) derived from phytozome v7.0 (chr-ID scaffold_109 ; pos 552900 to 553484)
cgcccaaaaacctcggcattcgctgctttccttctgtaagttcttcttccttttttttttttttttttttttttttttaaataatttgaatttaactgagtttttggttgcaattgattgaggatctggaatagtcagtagaatgctagaataaaaataaaataaaatataaaatatccactttaatttggatgggtttctattgaattgaactatctgatgttttttccctgtaatgcaacatgctcagaactacgtgatatttgcactctgaaattacttgaactctggagtaacaaatattttcttctgtgaggcaagtatgaaagaaattatactagtactgaaaataggtttttgaataatcgcgtggctgggtgtaattttttatctagcatgaattcgcatatcatcttcgttagtaaagttgaactatagaaggcaaagcttataccgaacataaaatcgtattgtagccataattaaagttggaactatagacgactagactatatgtaacgaagtaaattgatcgactgtaaaatggcagaatttgcagtgcggtgagagtgtgacgatagaagg

SEQ ID NO: 103468 - DNA, 963 bp, Mimulus guttatus
  Intron number 1 from transcript mgv1a021694m (locus mgv1a0 21694m.g) derived from phytozome v7.0 (chr-ID scaffold_80; pos 315174 to 316136)
gcaacaagcataagggtcgaccactttctttgcaggttattctaactttcttcttcacaagctttttataccaactatacaatattaattagataatatatgtctgtaagtacaggtgggttttttcttttgtgtgttttttagttgagaaagaactgcatgcatgtatatatgcccaaagtcctagcctaatatatatatgagtgtgtgtgtgtgtgtgtgtgtgtgtgtgtatatatatattggtataataagatgcatggattataaggagttattagattcagatagttatacggttcgttacttagtatgtcattttggagcaccaaactttgcttcaggttttagtattcatcttttatttaattgtacgttttggtcgtctctaagcctttaatatttgtaaccttaacttgaaagaaagaagattccgagaaagccttaaataactgtaaacatcgaataagtaacacccgttgttaatcgataaactgatcacttgtatttttcttttaattctttaagctcactagcttgtactagatatatcaatgtgtatcatgttcccatatgaattgaatccgatttggttttatcgggtattgatcgaaaatcgatggtattgatcctggggaatatgtatatagtaaaaaaaaaaaaagaaaaaaacagcatctaataatgcaggccaagatccttgcaatagatcaagtttttctttggtggattagtggatatgcctcatttggtgaatcgatgtatcttagtatataattaattagtggagaattaagacatatactccacaaaaaagaagaattaagttggaataagaagaaaggtggagacagtgtgtatagaattgtttaatttattataagtggaaacagcatcattttttgaatagctttacgacattaactaacaatgactttacagacagtggagctgaaagtgagg

SEQ ID NO: 103469 - DNA, 929 bp, Mimulus guttatus
  Intron number 1 from transcript mgv1a001919m (locus mgv1a0 01919m.g) derived from phytozome v7.0 (chr-ID scaffold_181 ; pos 56043 to 56971 reverse strand)
ggtcggtttcccatctcctttccaatttccgtaaggtgcacattccccctctcttgtagataatatgggtgcatctatcttagagggttagagttcacattaatgagtttcttatatttatttttcccattttagaagaatttgatgctagtggcggatatgacagtacttcccggtttattaattcaaatatgaaaacgttgggacgagaaagttgagtagtgtgctggattttgtatatgataccatgctgctgctcacttatatatatgtgcatgtgtttttaaattaatggtgaaggattggagtattctgttttgtgtttttacttagtcttcggcatcagaaaccatatgaggttcgacttgttgtttgcaataaataaattaacgtactacagtgctgataaagattaaatattcatgtatgctccacttcattagatgtaacaaagatgagtagttagaatagaggagaagcagagagaagaggaaatgttcagaacgactaaattttttaaggaatgaagttctctgacgacttattgcatttagaagcatgcagtaaccttaccatttagactatattaaaaaaaaaaaagaagttgccatttatacaaagaaatgtaactcgcacagaggatgtagtaggaacatatgaaaatattcttatttatgttctacactatgtattgtttagccactagaagtgtcaagttttatttctaatacccatcctaatgatttatgaaaaaaaaaatcaagcagtatttctgggtctcagtcaatcatatgaggtgtttagagatggcttagatgataaaattctatgaactatatgtgcataagccataaggtacgaaatttgttggtttctggaagtactcatttttcccgaacaattaattttgatgcagaggctttgcgaca

SEQ ID NO: 103470 - DNA, 217 bp, Mimulus guttatus
  Intron number 1 from transcript mgv1a006777m (locus mgv1a0 06777m.g) derived from phytozome v7.0 (chr-ID scaffold_98; pos 616522 to 616738)
cccttcgcttctccacagtatgtttcccctgtttccttttttctttcctaatttatttaatgctaatgctggtgatttgtttaatactaaatgctaataaaattttgctgatagtgtgtttcatactatatgataattggactaaaatatctgctgaaaagaaatttgaatttggtatatagcagatcaagatttgcttcaaagcaagagaaatttt

SEQ ID NO: 103471 - DNA, 430 bp, Mimulus guttatus
  Intron number 1 from transcript mgv1a001894m (locus mgv1a0 01894m.g) derived from phytozome v7.0 (chr-ID scaffold_16; pos 181334 to 181763)
gccttcgttagtcctcatcactggcgatctcactggtcagtttttgctccactgtttttttttttttatggtgttcttcaattgattggggaaaatcattgattttgtgattttgaaagatgtttgggtaataaatctgtctcaattgctactatgataataaagtttgtttttattttgatgtatgaactaaatgattgattagaagagcccttcctttgatttgggtttctctattttgccgatttcacgattaatttaggaaattaagtgaatttgccatacattggagcctcattgatgcttaaacacatgaataacgtcttcaaacgaacttcaagtgttttcaatctatacaacgccatttacgttacatagagtttttactgttacatttcttccagacggcaaaagcagggatttattaaca

SEQ ID NO: 103472 - DNA, 682 bp, Mimulus guttatus
  Intron number 1 from transcript mgv1a008249m (locus mgv1a0 08249m.g) derived from phytozome v7.0 (chr-ID scaffold_13; pos 1823258 to 1823939 reverse strand)
ccgcgccgctcgaccgaattaagcttctgttgcaggtttgttttttctaaaaaccagaatttttgtggttgtttgtgaatcgactgatttttttgcccccgattttgttgcttctaagtaataatttaattaatttatttttttaattttttttctcggttatgttcagtatttgggggaatgcataatctgttaggaaaagttttgcattatttatgaaagttaggcaggtttagaagctttaactctgcatttgctggtgtactttaatatatctctagtgaatataatttaatttaatttatggttttattaggtatattattcctaattttttttgtgctaatgctgtattaaaaaaatgataatgctgatgctttctactctttaccttattcctgtgtcatgcgattttgtcgtttgttttaaaagcatttgtaaaataatgaattcatctagttttgttgcatgtgtcaactaccatacttgtctaaaataattgtagctgctgctaaaagaagaattttgatataattatgggggttgattctactaatttataagatgattaaattaagttaatgaatctgacgcacttgttgcattactcgttctcgttactaaagcttagtgatgttaattgcatttactgattatttattcggtcgtattatgcagactc

SEQ ID NO: 103473 - DNA, 739 bp, Mimulus guttatus
  Intron number 1 from transcript mgv1a001558m (locus mgv1a0 01492m.g) derived from phytozome v7.0 (chr-ID scaffold_21; pos 572487 to 573225)
tttggttggaattttgtcttcttggtttttgtcaggtaaaaaacgtttcttttaataataataataataataatactaatactagtctatatctatatgtgtatgtataggtgtggtttgtagagagtgaaggagggtgggtaatggcatggtcccttataattcttctgcctttattctcgtgggggctcaatttcgtgtgactgattttgttatactgtcgttaaatcatgtgattttggccccctttctattcacacactttctacattctcttgtttgtaataaaatcttgtgtttttttttttttgaattttctttttttaccattcttttatctgaattaggctagagtttgtgggggggtaatttggttatattatttgtttggttcttgcttattttaggggcaaacagtgagtgtgtaaggaggcttctgggcttttcataagatagaattcttgtaggttctttctttctctctctatccttttcttctctctcctcttttttttttagttttttttttcttgaatatagaaacaaatggcagaaaagtgaaatgctgtaagggcttggtgttgccacatgggtttatgtttggtgcttgttatttgtttttgggtttgaaaaagattggatttttatgagtaatttggcttacatcattttttcctctgagctaataaagctgtaatttatggtatattgcttcagtgagaaagaatctgcacctact

SEQ ID NO: 103474 - DNA, 626 bp, Mimulus guttatus
  Intron number 5 from transcript mgv1a001558m (locus mgv1a0 01492m.g) derived from phytozome v7.0 (chr-ID scaffold_21; pos 574145 to 574770)
tcgaaggagcaccaccaatgtaagcttctttctttacataataatacatatattactttcttattatcgaaataaattttcgaggatttctaattggggacttctttctttaattttcctcttcttagactatagattatgttacctatggtaataaaattaaatataaccaatagaaaaattattccgaaccttcaagttgacatgatgatatgaagatggatagtacaatgtgtattaaatgcattaattgtgacatcaatcacattttaccttattaaccatgattaatccatatttgaacttagtaataggggtataataggcattacaataaaattaagaaaaataaaaattcgtacttttataggtaggagggtatataggagattagactaagctttaatatttccgaacatgcttctagaaggtgtagaatgttctttgattattttgtgttaagaattattttgattattttgtgtttatatttccgaacgagcaaactagactatttcgcgtttaagaatttcgacctaattattcctttgattattgaaaaaaaaacctttacttacggataagttgtatctatttacattaggactcgttttatgaatgtgcag

SEQ ID NO: 103475 - DNA, 1020 bp, Mimulus guttatus
  Intron number 4 from transcript mgv1a015781m (locus mgv1a0 15233m.g) derived from phytozome v7.0 (chr-ID scaffold_55; pos 888618 to 889637 reverse strand)
gagtggaggtgagtcattcttgtaactcgaacatacactcaatttagcgattgtttccttctttgcattattcttgaatatgtttttgctcacattttatatattggaaaaattgtagttttggtcctctatgttggcctatttaggaatttagtcctctaacttgtcatgtttcagttttgcatgcaataactttgcaaatataggctatgtttgttaccgttttcaaattatttccacactttccccaaaatgaaaattatctttctacactattttcaaaaacttttcccaaaacaaattcaaatatttctctctctaacaaaaatgatttgaccgctacagtgaaaattgtcttcactaaaatacaaaatcaaatcactttatcttttaaattcttcttccaaaatacctttttccaacaccttttcagacatgatttgacttgctacagtacaaattgtctcctcccaaaacacaaacaaactttatttaattttcaaattcttctcccaaaacatctttccccaaaataaaatggaaatggaagcccaaaagcttaccaaacacagccatagtatctttagtcctcttttgcatgatttttaattttatgacccgaaataaacttgacgcattttacttatatggacgcttggaaacttataaattcgacatctaactttatttgtagaactttaattacgtaagactcatctataaatcagattagaggagcatttataatttttacgtgtccatataaataaatttctacgagtttgttagaaatatcattaaatgacggctaaaattcaaagttcgagtgaaataggactaaaaatactaattttgcataactattgcatgtaaaattgaaatatgacaacttataggaccaaaattacaattttccctttatatattcatcgttgattatagactaggcaacttacattcaaggagatatttttgagtgtgacaggtacgttcaaattgacccttcggttcgcagaagat

SEQ ID NO: 103476 - DNA, 993 bp, Mimulus guttatus
  Intron number 1 from transcript mgv1a024686m (locus mgv1a0 24686m.g) derived from phytozome v7.0 (chr-ID scaffold_97; pos 581064 to 582056)
gtagcatatacggacgtgacaaaagctttgctacggtaaatggccgtaccaaatacttttttgctacggtaaatcctagtatttactatgacttcaaaattgttccatagtaaaaagtaccttttattacggtttttcaccgtagcaaaaaaattcgtagtaataagcaaattttctactagtgtcatatatatattattttccatttgaggggtatttcaacggaagtaaataatgggtaaaaattgatttaaaatggattcatatttggaggagttggagaaaatattacaaattataaaattctaaagtactatttgtcgaaaaagtacatgctttagtaactaaaattgcgaataacattccactgcactctaaacaactttgaaatttatgtgccttcaaattgaagacaagttaattttgtaccatgttctttctccactaaggggccaacctgtcttcctaatttccatgtcggaaagggagataagtctttttcttaccaattaaccaaaaaatattctcattaattaaatcctcaacatactcattgacaacttttaatattctctaatgtaatatggtaaaaaaaaacataatgatattggctaccattagttatggtaaaatgtcactgtaattggtagttgaaattaaatttccaagtagaaaaatataatgcttataacatcaaaaagaaggtaataaaatgaaaggagaaaaaagaagaagaatataatgtttcaaataaattaaagaaccattaattttttgatcaatttgctactccaatggcttcatactctctctccatagtcctccgtctcatagtcctcgtctctatattcttctccgaccatacattcgccataaacaaccgcacaaccaccacgcaccaccaccaccaccaccgtcgccatgacaacaccaccaccacaatccataacaacaataggctcattcaacaagactacattgcactccaagcat

SEQ ID NO: 103477 - DNA, 980 bp, Mimulus guttatus
  Intron number 1 from transcript mgv1a009773m (locus mgv1a0 09773m.g) derived from phytozome v7.0 (chr-ID scaffold_384 ; pos 6161 to 7140 reverse strand)
tcgagcttcctgctccagtcggctggactaagaaggttcttctgtgctgttactattttttttttgtttatggcaattaggtttacgagttgaatgaagtaaaaatgttcttggtgtaattgatgctctaagattgtgaaattcagtgcgaattcaattgtttgaagatggattaggttttcaattgtttgtgtttcccctcaatgatgaaattgaattatctgcttttaagtatccggagctagggtttagcagcataattagtttcagtttgatgaaaatcaatcgttcccattttagaaatagattagtgctttcattatgataatgagttttgaggtgcatttctctgaaatttttgcgaaattatatctttttaggctgcatctcgttttttcgtgcttttcccctgttgctgttaatcgccgagttttgaaattagaattgttagatggtaaattagttttgaaatttgattgttttacagttactcccagcaaagcagttctaggaagagtttgagattgttcgtttttagtatttctgttatttttcagtcttatttataagttttatctggggttaaggaatgtaacgtgtgagttatattctgagatagcgtcgaacctgtacaataaccataaaattgcttattcgtagaattgtgtaatgatctacaataagttctgtactggtttaagtagattgttaggtttatacgaggttaaggtacatgcagaaagagcagtgaggatggtcttcggatatggtactccttcgcaaaaaaaaaaaaaaaaagaaagaaaaattggaaaaaaaaatcgtaattgttatccttttgagcttgttgttactcgtgcattctacatgttgttttcgaaccaacgcctttcatttttctataaacattgattacttatttaccattgcgtgtgaaaacatcagtttactccaaagaaagggggtacccctcagaggaa

SEQ ID NO: 103478 - DNA, 604 bp, Mimulus guttatus
  Intron number 3 from transcript mgv1a009384m (locus mgv1a0 09384m.g) derived from phytozome v7.0 (chr-ID scaffold_98; pos 609780 to 610383)
cgatcaacggattttctctactgtattttcttccggtaattttcgatattccagtttcagattctcgaatagtagtttgtttctcaatgcattcaattgtttcatgctgaattttgctgggatgaatggctaacttaatatgtaataccaatgttgaacaacatttgttactcgtcgattttttaagcttgtgtaagctcggctttataagttgggatatgataaacatgttggagcattatttagctattagagctgtttggatcaattgatattatttagaatgatttgctaaagaattgaactgagcttagaacaagatttgaagtttgataagaaatccaaactgagctagaaaaaactagatttgtttatgctcctatacttagctattgttttctgaacaattggtctatagttaggcgaagagtcccaatgcgtaacttctaatattttgaaaaatgttaatatgttcaataatagtttgcctcccgaatttaaatcttagactttttcttgaagttgttatctggacggaagatttaatttatggtaatgaagactatctttaattttgttttatatttctttaaaggggaaacat

SEQ ID NO: 103479 - DNA, 683 bp, Mimulus guttatus
  Intron number 1 from transcript mgv1a002478m (locus mgv1a0 02478m.g) derived from phytozome v7.0 (chr-ID scaffold_17; pos 224763 to 225445)
tgaggaatttcttgcttcatactctgcagttgcaggtaattcgatctcgatcttgttcgtgcgtattttgtaatgcgtgtttttcgtgttgtaagtaaatgtttaacgtatgtatttgagtttcggtttattgtcttgttcggtgaatatcgattttaggatatgatgtttcggaatcgaaatacggattgaagaatagttcctattgaaatatgctgatgtgtattaaaattaggatgaatgaaatgttgatgtgtattttggtgaacgttgattttaggatatgatgttttcaaatcaaaatatgaattgaagaatagttccggttgaaatatgcatttggttgcggccgtgaaaatgagaacctatctttcttttaatgagattattgtttgcaagtgttaacgatccgatgcaaattaggatgttccgttgctgcttgaaggaaatggattcattgtgttactgcacattgcatgattaacggatgctaaaattttaagctgctatgtattaaagttaggataaatgaaatgtagacgagcccttggcttttttcagggttttcttgatttgtcatttgatcgttaatcgagttttgtccgtttttctttattcataatgttcccactcgtttgtcgtctgtagagctgggagaagactgtagactgttacagtccagg

SEQ ID NO: 103480 - DNA, 663 bp, Mimulus guttatus
  Intron number 3 from transcript mgv1a016054m (locus mgv1a0 16056m.g) derived from phytozome v7.0 (chr-ID scaffold_29; pos 1214268 to 1214930)
ttgttggtaagattaatcaaacaatatgtgtatatatttatatgtggggaaaattgaacatcaccccctaaaaatttctaagtttcgcactttaccccctcaaaattttaaaaagttaatttcccccttcgaaatgttattctttgttgcacattgcctcgatagaaaaatttggattggttattcatcggcatttgagaatttttgttgcacattgctcctttatatgttatttttgttgctcgttgccccttaaaaacaatattttttttgcacgttgccccttttatatgttaatttttgttgcacaatgcccaccaaaaattggcttatggggcaaagtgcagccaaaataatattttgaagggggttatccagtttttgaaattttagggggaaaagtgcaaaaatggaaaatttgtaggggtgaagtgcattttgtcctagtttgattcaattatttaaaatcctagtttgttatgtttatatgtgaattatgtatcttccgaagtttcatatgcatgtgatttatagtgttataggttccgagaaacttatttaccttcatttactgctttgttatactcaaatattgataaacttgttttattttttattttttgcacagcgagagttattactgacagagactcgggtaggtct

SEQ ID NO: 103481 - DNA, 368 bp, Mimulus guttatus
  Intron number 1 from transcript mgv1a026195m (locus mgv1a0 26195m.g) derived from phytozome v7.0 (chr-ID scaffold_352 ; pos 43513 to 43880)
cagataccaagtccgagagctttgaactaatcagagtactatcttttaactttttattactttctggtatcttaaatgttataaactatttatattgtttcaacatgttccctttcaattgtgcaaaaggcatttggtcacatttggaaatggtcttcttcttgtttgactttctaatgggcaaatcaagaatgtttctcatcggttcatgatttttgtcacattattaagatgcttatagtgatacttttgtcctcgagatttcttttgaaagtattgaaaaaaatcaaatcttgatgctcgtaaacggaattttgatgttactgggctcaaagacactaaagtacaaccctttttaattgcagaaa

SEQ ID NO: 103482 - DNA, 416 bp, Mimulus guttatus
  Intron number 3 from transcript mgv1a015754m (locus mgv1a0 15754m.g) derived from phytozome v7.0 (chr-ID scaffold_90; pos 632178 to 632593 reverse strand)
aagaaaggataactgaccccgagctgctcgctgaggtaatgatttataccaccaaaaaactatttcctacaaatcgtccctcttttgctttttgtttatatttttttctaatttggtaaagtgagttatgtgacatgtactagtctaaccatatatctacatgcatcaatgatgtacctctttgatcatcgttactgaggtgttaggacgggcccaccagaacacaagcccgtctgcttcttggttcatacgtataatatttaccggaagttaaaaatctttgaagagtgtagaccttttcttggaggtcttgtaaaatcagcatgtatacttttatcaatatacctgaacatgaaatatgtgcagctttcaataaatttattctgcgaatattaatgtggaccaaaatgcaggtt

SEQ ID NO: 103483 - DNA, 641 bp, Mimulus guttatus
  Intron number 3 from transcript mgv1a009585m (locus mgv1a0 09585m.g) derived from phytozome v7.0 (chr-ID scaffold_66; pos 942759 to 943399)
ttcggtgagaaatctgtcagagtttttgggttcaggtagttttctctcttcttcttctgtctaattttcctattttattttcatttatttttgtttttatttagtgtttttttttgtcttaaatcctagtcccaaaatcaaaggctaattaaatagtttgtttctgtccacattttgtttctcaaaatcgggccgttgttttctccgaaaggatttttgtcgtaaattttcgtgttcgtctttttttatgttcttaattaactagtgatttaaaaaaaaatgagagtttgggttaactttcttgatttttgtctaatttggtctcgttactttggcctcgtttggttgcaacaaatgattagattagccaagataaaattaaataatctaacaaccgaaccccgattatattattgaccatagaaggtgtgacgtaatatttttgtatcgaaccgggaagttattggatacaccaaacatcaaacaaatcccaattttgcaattaatcatggttgatcttcccaaccgaacgaggcctttatgttcttaattagttcttaattagtgagtaaaaaaatgagaatcttggttaactttcttgaatttcggtaattatattataggaatcccgaggagattcc

SEQ ID NO: 103484 - DNA, 438 bp, Mimulus guttatus
  Intron number 1 from transcript mgv1a004347m (locus mgv1a0 04331m.g) derived from phytozome v7.0 (chr-ID scaffold_4; pos 1495332 to 1495769)
cgcgctccatttctgctgccacattttctcgtcaggtactctacttttgctctcactcgcatccgctccgctttgttctatatatcagccgctgtaagtatctatctagtttgagtcgatcttctttttattgcatcaaattgttgaaattgagaatgatcgctatcgattgtttggtaactgagagctagagtaattaattttgagaggagatagtgtatcttcacttatttttgtatttgtttccttttttatttggggaagtttattattatttgattttgcagcagtgaatttgattattcagtgtagattttttttcaaattttagtcgatttgtcgagtcgaattctacatttgattgcttgtatttcaccatcacttgtttgtggtatgagtatatgataattaatcagatgttgattttgatcatggcag

SEQ ID NO: 103485 - DNA, 805 bp, Mimulus guttatus
  Intron number 1 from transcript mgv1a002709m (locus mgv1a0 02709m.g) derived from phytozome v7.0 (chr-ID scaffold_21; pos 230448 to 231252)
agaaaatcagcttgtttttctctctctcttaatttgtgagtaattttttattaattttttttttctctgatgtaattaatttaatttctgggattttgctgtgaaaagccaaaaaaattggaggtgtgtttggtgcttgagaacgtggattagggcaccctttttttctggcatagaataccaaagttgcagttcaacttttgctttttgctttatttattttgaggtccctcttctttttcttttttatctttctggtctggattctttattaaagaacatcatctctcacctttgattagatttctaaatgtttacattagtgatatatataatataaaaagccatggatttggagtataataaagtgacctctgcttttccactatgtaaaaagtgaatcaagaatattttactttttttaacttttttattttattactttttttttttaattaaagatttttaatttagtatgtatagttgaattactttccacctttaacaatttcttgcacaacttcttcattcacaagtgatctactgtcttaactgtacttgtttttcctgtaataatctctttccaatcactaaaatcatcaaaagttgagcttcatttgattttcatttctttctcactaagtcaattatattacctttaaaaaaccgcaaattcgaggtaattattatcgaagcatacggtatatatgtcgatgtataaatgatttttcgagtttttttcttgctaaatactaacaacattcttgttcattttttcgttcgcaggcttccccgtaaaaagaca

SEQ ID NO: 103486 - DNA, 568 bp, Mimulus guttatus
  Intron number 2 from transcript mgv1a024332m (locus mgv1a0 24332m.g) derived from phytozome v7.0 (chr-ID scaffold_138 ; pos 115281 to 115848)
accagaggcagctagctgcattgcttgtttcaaaggtggaaatctgttactggttattatattattctgataaaaaaaaatttcgaatgggattcgcctatttttagttttccgtatgagcttccttaagttgattgtctacttctctagtccattaagaagtaagaactaaccttaatacggaaaaaaatgcctgcggaaatgtccccgtcaattttggtgtatgtaggggacctattttaggaagttaatacggtatttggttggaggaaataatatatccaattgcatggtttaacattttagaaaatcgggtttagtttgacaattgtacaattgtatatttccttcagacctaaaaattcactcattcacacacaggattcattgggcatgttttttttttcttttgattatttggataagaaaatgtcatcactgataagtaataaatgatcgtgtaatactaatgtttagtttttgaaggtcctatgtcataaaacgtgatttttgttttaaaattaacgtgggttctttcttcaggttttctattacctgtgtgaactta

SEQ ID NO: 103487 - DNA, 271 bp, Mimulus guttatus
  Intron number 3 from transcript mgv1a014760m (locus mgv1a0 14760m.g) derived from phytozome v7.0 (chr-ID scaffold_27; pos 1044195 to 1044465 reverse strand)
tgggaagaaagcgaaaaaaccaaagtcgagaacaagtaaggcttataattaatctctttctcttcgtgttttgattttgagccccgttttttgactaagcttgttttaaacagcttcttctgataagttgttttaagaacggataaaccgttacgtcttacttttagaattaatttgtcaaatgttcggataataagcttataagttattttacgatttttttctgttaatgacataacagagctcaaaagaagctctcggaagtttccgc

SEQ ID NO: 103488 - DNA, 802 bp, Mimulus guttatus
  Intron number 1 from transcript mgv1a025400m (locus mgv1a0 25400m.g) derived from phytozome v7.0 (chr-ID scaffold_71; pos 829040 to 829841)
ggatttttgggtgaaatataattgggtggtgatgaagaaataaatgaatttgaggaggaggcttcggctgaggatatacatgtatgtatgtatatttggctgatgaagaaatatatgaatatttggtgattaatttgaagagctatctatagcttataagtttggggatatgattaattagatggaagagatgagagatagaagactatagtaatgtgtgaatggaggagtttgttttttcgttaagaataattgagcaaatagtgaattcaacacaactaggaaatgcagtcaactcaacttgtatggaggaaaattcaagtccaccaactagttgcagaggaaaattaatatcacattttgtaaaagaattaatattgatgggtgaagattgatgtgtgtgtgtggtaggactgagtcttgttcacaataattaaacaagtagtctaccgtgaaatttacgcttgtgtgtgtggtgttgcttcttcaaaagggcaacaccacaccaatcaccatccgagctaggacaactatcacataacaggtcatgattaaggaaatagtcagagtaatttccgtcaaattatattgtagtcaatttttattttttggagaaaaaacatataaatcactatctcatcaggtccaccactatacataacaggttctgtattgctgttattaaactctagtctgccaatttgaattacatgcacataaataaaattaataatgtcttcctttattttcttgcttttgttatttccacttgttgcagtagtagtagtgcaaggaaacggtg

SEQ ID NO: 103489 - DNA, 868 bp, Mimulus guttatus
  Intron number 1 from transcript mgv1a000006m (locus mgv1a0 00006m.g) derived from phytozome v7.0 (chr-ID scaffold_18; pos 943225 to 944092)
ctcgctcaaggcttgtctcaactgctaaccgataagtaacaattctatccttaatattttccctgtcatgtgtatggcagttcatccgcgcgttattgttatatttgtaggaattcactcgtttttcatactcatcatgttaatatctctgtaaaaatattctgcgctggttaacttctagaagaaccggtgctgtttgaattgcatatttacagataattcagttaggacctcagcattttgtccggttattactatataaatcgtttcacacaacggcgggtgtgtgtgggggttgggggtggggtgtagcatgtgtgcatcgcttgtgaaattaattctctactttggttggccggattctcttctgtcgtcacttttttacgttattcagttattaaggacgaacgtgtatgctgaacggttacgcaatttgattgaagttagtacggcgcctgaatgaaataatacataatcagaaggtcaagttacccccgatatttatcctgcaagagagagaatagaaacatgtttttttttatatcagattttactcgatttgagggagtgatattcaatggaattatcgcatgtatgtatacttcttgaatcgtacgagacattgctgaaccgcgtacatctggtgcctggttacagcattttgattgttgaaaatctatatgtgatttccttttgtataagtaaagaaacttcacaacagcatggattgtatgctatccatatttcctttgacatgcagtaattgatgtatgatttttgttaaattgcttacgtttctgcataatttgtagtttgtatgactggtttattgctttaatctcgtgctgtagattgtactcagtgcgtc

SEQ ID NO: 103490 - DNA, 912 bp, Mimulus guttatus
  Intron number 1 from transcript mgv11b023752m (locus mgv11 b023752m.g) derived from phytozome v7.0 (chr-ID scaffold_2 87; pos 50486 to 51397 reverse strand)
ttgctgccggaatcacgcctttccaggtatgtgcgtacctgtagatggttgttaaattgtaaattgaatctcaaatcgattaataaaaaactcaaaatagtaaatcgaaatgaatagtatattatatagtgaaataacaaaaatctatatatttctttcagaatttatgaagtcaaactataaaaattgtatctttatgcgttaaattaaatttaaattcaataggtacggtgttctaacaaaattttcaaaacggtaaaatcaaaaagttataacatctgtatcaattctcatattcaacaatagatgatgagtagaatcaaaatactatattgtgattttcttttaaggggagaaagtgtttgatgacaagaacgaatttatcaaattaactattaattatagttaaaatctaatatctttctaattgaatttcatcatatacaaaatagagtaaaccgcatgggtgtagctcaactggttccggaggtggtaagttggtgcaaggtcctaggattgaatcctggcagccgcagtgtgagaatttaaactccaatgatggttggttccttgtgggcaccaggtccgggtccgctaccttaacgggccgttgagttaccatgattttgcgccttttggtgcaagtaaacttaaatttcattaaatcctaagaatcgaacggatactagattttttgacatttgagattccatcatggatttgaatcgaatcaccaagtacattaatccctattatttgtgtgtagaaatttataaaaatctcatgtataattaatagcattatggccccctcataattgtttttaagcattcagcccccgaagttaaaatcctagcttcgtgaatgttttttacaggtggaattggcgattaaagaatcgaaaaacgaaag

SEQ ID NO: 103491 - DNA, 720 bp, Mimulus guttatus
  Intron number 1 from transcript mgv1a004321m (locus mgv1a0 04321m.g) derived from phytozome v7.0 (chr-ID scaffold_16; pos 2032850 to 2033569)
tgctccgcaagctactctactccaaaatcccaacggtaacatttttttcccccaaatttatttaaatccgaaatcgctattattatgcagttaatgttcattttgaatgcgtcaaattggttgtttcgaatgtaaaatttgtttgactatgtaaatgagaattttgaattttgaaaccccaatcacatgcctctaggagctgatccttcgttcagaaaatttgatctgttagttatttttttcttttctttttaatagatatcttgaattaatcatgctatgtactgtttatcattcatcatacctttgtttctttttgtctggaaataaataaattattaggtaaaagtgaggtgtaatccccaaatttgtaagatctccgaatagttagtgatgtccctgaatgaatctgagttgacgaagtttacggcactgtagggcaattttagtttttagttattagttctttgcataacaaggtgaagaatcagtttggacatatagattatggttgaatttatgggatgtgcagtaaaaaaaatcacaattgtgctcttatgttttattaggagggctaatatcctttgtaagcactttttatttatcttttaatagacatagttttttttttgaaatttataatatacgtagttttgatggcccaagttatctacaaattttgcagggtatatctcacgaacaggatctttcaagtccaaa

SEQ ID NO: 103492 - DNA, 639 bp, Mimulus guttatus
  Intron number 1 from transcript mgv1a011825m (locus mgv1a0 11825m.g) derived from phytozome v7.0 (chr-ID scaffold_36; pos 1235006 to 1235644)
aaaaccggcgaatctctccggtcaaaaacccgcaggtacggttctattttttttttttaaatttctgctattaagtagtagttttgagcttagtattcaaatataaattgtttttattttctgtaaatttaagctcgttatttgcttttatttttaggggattgaattttggaagagcataatttatgtgttcaatggttgcattaagctattgaaaacatgttcttttagattcagaaaattattgtaacattgcttataaatcgcattctactcgagctttgtccgatttctgatattcccttatgaatgcttatattcagataggatgtgtttgagtactggtttttgatgatgttgctggatttgaagtaaatatatcttgtaattaaattatttgcctgatttgtaagcactaattgcaatttgaaggcaatatagatcttcgtctatatacgacaagggtttgatttgatcatacaaatttgcaattgttagctaatgcatcccaattgtttctgcatcggaaattaaaaataggaactgtttgttttgattagtacttttccttgatgttgcttgttcttactgatgatatttgcagattctgctgtacacaaagatttagtctccgattca

SEQ ID NO: 103493 - DNA, 291 bp, Mimulus guttatus
  Intron number 1 from transcript mgv1a006388m (locus mgv1a0 06372m.g) derived from phytozome v7.0 (chr-ID scaffold_85; pos 992339 to 992629)
gaagttgtattgaaggtaacggctgattttcgcgattttgggtttttgacgagctttacttttaattagttatacaagtgaaacattgaacaatataatcatttatcatgatgtatggtgatcgaaagacgatgttttggagctggttcgttataaaattcaataaccaagaatttgaagaacactgttcaattcattggcattgaaaacccttcaattcaaacactttttgtcaaggcattaacagaattcacgaacacgaaaaactttacttgcatcaggtactcaagg

SEQ ID NO: 103494 - DNA, 894 bp, Mimulus guttatus
  Intron number 1 from transcript mgv1a002214m (locus mgv1a0 02214m.g) derived from phytozome v7.0 (chr-ID scaffold_108 ; pos 159727 to 160620 reverse strand)
tccagctttggcttcaaccaaggaaacccattgaggtaattagctaaaaccagttgctttcttgatttagtttatgggtttgctttaccctttatgcagccctgatctgtaattttttagttcttcttgttggaaaaaaatgctgtctttttcacttatctttgatgggaaaaaaaattgaatctttacatttgggagagggttttagagacagaattattggtgttgtgtgtgcccttttgacgaattttcataaatttagggcgcaagtagctgtcttcgaaaagttgtatttaagtgtgtgaatcttgccaaattttggaattacagtgaaaaatgtggtatttccgattttcggattacttcttatgacttcaattgtgaacttatacaagttattagggaccggtgaagctaaagatcgaatctttttagattataaacatttcaagaattactcgttttacttatatttaggaattactctgttcttacatttgggagtttcaaggcttttttgttttgaaccctctgtttttattgttgacaagttttagagacgtaattcttggtgttgtgtgtgcccttttgatgatttcacaaattttaggtgcaagtagttgtttttgataagttgtatttaagtgtgtgaatcttgccaaaatttggagttacattgaaaaatgtggtctttaccattttcggcttacttcgtatgacttcaattgttaacttgtagaagttattagggaccggtgaagctaaagatcgaatctttttagattagaaacatttcaaaaattactctttttacttatatatgtaggaataactctgttcttcgatttccctttcatttagttgcctttcgtatgtgatgctacagattaagct

SEQ ID NO: 103495 - DNA, 768 bp, Mimulus guttatus
  Intron number 1 from transcript mgv1a003682m (locus mgv1a0 03682m.g) derived from phytozome v7.0 (chr-ID scaffold_30; pos 1474068 to 1474835)
aactctccgacggttagtgcagatctctgattgttgtactatgcgcattgctgtgttgtacattgtatgtttattgacctaatttttatgctgtttttattttcttcttcaattcggcaatttttgttttgtttctagtattctgcaaagaacagtgatgaattttttactgacatcacttatttgttatgccttccaagtatatttttaattgtcaacgtttcagttatgctgttcctttttccagtttcagcaaattgcgtttatttcctggaataattttagtgtttaaacaatcctcctcaagaattgaatgaggctttgtcgtttatgatgtgatcgatactaaatttttacattcttcagaaaaggaaaatgatttcttaatctagtcttcttgtggagaactgtataatagtgtcaactttcaattatcgaggcaagttaaatgatatattcgtataagggtgtgaaattaacacaaggaatcatgcggcaattgtgttggtttgtggagaacattatgagatatgttggaacactggtaaaattcattgcatttaatgttgtaatttttcgagcatgtgtgtaattcaaaatctcaagttaacatttacggaatgagaccactgacaaagtggtggattagaagtgtttaaattagtgaagctgattaaacatagtaatgtaggattgggcatttttagttggaaacaaacttagtaacttgagttccgctctttcttcttcattttgcagtcactgatc

SEQ ID NO: 103496 - DNA, 533 bp, Mimulus guttatus
  Intron number 2 from transcript mgv1a003682m (locus mgv1a0 03682m.g) derived from phytozome v7.0 (chr-ID scaffold_30; pos 1474839 to 1475371)
ggagcttcaacaacagtgtggcagaacaacaggtctgttgccttaataatcgttcatctttcagttattatcaatattatacctagttcaaaaaaattatgagttaagagatcacagggcatggagttttagtagaaaaggtagtgattcaattaacttgatgagaggattagcaatggttatgaggttttaagacaaaagatttccatttacaatatcagctttagttttgcttgtgttttcttgtgaagtaaaaccaacatcacgagaaactgtcatcttggttatgttcatgtttttatttctttacacataagaagattgatttaaaaagcacgttaccagaaatttcgctttttgctctgtcatttgcgagtatgttatgattgcactacatttaagttggtctaaaatctatagatttattcccaaactctctccatctctctcactctcttttggtttctgctatctccgttgaaactattaaattcacaggcagttttggaaactgttgctagagttaagcccaa

SEQ ID NO: 103497 - DNA, 659 bp, Mimulus guttatus
  Intron number 1 from transcript mgv1a008900m (locus mgv1a0 08896m.g) derived from phytozome v7.0 (chr-ID scaffold_8; pos 1962350 to 1963008)
attttggcagaaatcgaggtcagaaaataaacagagtgagttgacggaaatcaaatttgttaacccccccactgaattccccccatgcatgtcatttatctgctgaatttcgaacaaaatttgcgattacgaaaggtgtttggtacttaggtagagctttttttttcctggcccattgaattacacagctaaagattcctcctttttaatttcggtggtggtggtgggtggggtaagattcatttctgttacatcatatgtttggatttttctctggatgataagcgctacttttactgtgtgcgctttaattgtgtgttagaattgctttttccatcttcataaaagtggaaaagttcattgaatgggggaaataatgcgaaatgttttaattgagattcatcccataattacacgtttaaaagttggtagattctttccctaattggggttttttttcttttttcggggagaccacatgtttaaatacaggtttcttcagaacagaataaacctcatctgctgttcatgtgtttgtaatatttcttatgctttttttttcattttaatttgagtttattttggtgaataattaatgatttttgcatttttttttcttcgtaggaagtgattcgataatcggtggagtcaaggctgaa

SEQ ID NO: 103498 - DNA, 281 bp, Mimulus guttatus
  Intron number 2 from transcript mgv1a008900m (locus mgv1a0 08896m.g) derived from phytozome v7.0 (chr-ID scaffold_8; pos 1963008 to 1963288)
agaagaatctcctaattttcatcctgtatcagtctgtaagtttcttgttttgtttaaaaccgaagatctgtaaaattaaatcgaaaattgtcgtcttaatgtttcgatagagtctgcaagattatgaatttgcactggctttttcttcaatcatgactcatcatctgatatattatgatttcttctcttgtatatgatatcttgttattatgatacaaatatacgaaacttttgctaattttttatttattcttttaactcttttgattgatcagcgaaaa

SEQ ID NO: 103499 - DNA, 628 bp, Mimulus guttatus
  Intron number 1 from transcript mgv1a004195m (locus mgv1a0 04195m.g) derived from phytozome v7.0 (chr-ID scaffold_94; pos 930553 to 931180 reverse strand)
gaccttgctatcactgtggtgtgacaagtgagttttttctttcttttttgggtttcaataatttgattatatattcgtcaaatcctttcttattgattaatttgatttaattgaattaattaattttctgtgatttatatgaacatttacccagttgattttgtaagatattgaagacaatgaacaatactgagtcattggttcttgtcttcctgttagataggctctgctgttgcaaatgagtgtttgactgtcgattcttgattctagtaatcgatcatatgagacacgaactaacaatactaggacatgacatgaatatgcattgaataaatgaaacactctggttgatcatagttgctttcgtcgtttaaatgtttcgactcttttaactttaaaaccgattttgttgaagttttttaacatgtgttttgacacaatggtactattgtgaggatcttgatcatgaattagtatatcatgcttcgttaactacattgtccaaacacttgctaatcttattcttacaaatgtggatgaatggatacttgtcattgtgtttccttcttacgaaacatgagtgtaataaaaaggtaccccactttggcgtaacgggccgcctgagaag

SEQ ID NO: 103500 - DNA, 924 bp, Mimulus guttatus
  Intron number 1 from transcript mgv1a018847m (locus mgv1a0 18847m.g) derived from phytozome v7.0 (chr-ID scaffold_6; pos 622178 to 623101)
gctcttcttttattttgtgagttattaaaagtagggtaaattccactttcccccctttactttggctcgatatcactttaaccccttcttttttcggttgcatcgatttgccccctgcacttgaaaaattgtcttaatgtggccctgggtgttagttgtcagacaattgactttaacaccgtttgatctaagctctgaaattacaaaaactcacctagaaaaaaaacaaaagataaaataataaaaaaaatcaagacaacgagaaaacatagtccacgacgtcaaccacaatttatttttttaataattatttaaactgtgagggatggcgtttttgtaattttcggacttagatcaatggtgttaaggtgtcaaatgtctgaaaattaacgacgatggccacattgagacaatttttcaagtacatggaggcaaatcgacgcaatcgagagtagaatgaggtaaagtgatatcgagtcaaaagtaaagcggggaaaatggaatttacccataaaagtaagttcaattgtataatgtaataataagggtgaaatagctaggtagcacataaaagttgaggaaacttaaaacaattggatggattatggattgatagtacataaattagcacttccgtaaaaacaaaaatggaagcgtacaaataactgatttcacatgcaattgcttcttctgtttttttttttttaaattcgattcgtattcgatcactgttgtactaaatatatttcattcttcatttgcaggtagtagagtggtcaaaagtgaaggaatcctttttctccaaggctggggagttgctggcagattacgcacacaacaccttagggaacgtgaacgagttctcatccgttttagattcgctcgaaaggaacttggacttgttgattgataaatcgtcggata

SEQ ID NO: 103501 - DNA, 447 bp, Mimulus guttatus
  Intron number 1 from transcript mgv1a008032m (locus mgv1a0 08032m.g) derived from phytozome v7.0 (chr-ID scaffold_1; pos 3470345 to 3470791)
tcaattggatcggaactccgggttttcaatctccagtaagaaaaaggaaacatttttatccgttatttaattgggatgaagcttgaattagtacagttaaaccattttctgcgtggtaattatgtgattttttcttaagagacggttctggagctaaattactggatgacaatggagggcataaggactcaattcgggctattcgatttagtaaaagcgggcagctttttgtatctgctggagatgataagcttgtgaaaatttgggatactaattcttggcgttgcatttattctgtgtaagcaaattctactgaaaaaaatctttgtttgcgatgaattcaaaaagtattaatcaaattactggagggtttagtgaattttctgaaagttgtttgttgttatggtaatagggtttcagagaagagagtgacttctcttgcaataa

SEQ ID NO: 103502 - DNA, 659 bp, Mimulus guttatus
  Intron number 1 from transcript mgv1a006667m (locus mgv1a0 06667m.g) derived from phytozome v7.0 (chr-ID scaffold_262 ; pos 158170 to 158828 reverse strand)
cagaattcaagaatcagttgttccgtgacatccaagtaagagtagttccccccttcaatttgccctgttcttcgacaaagtttgaatctttaaaatggaattaatttatttgtgtttattgtttcaaaactgtacttggggttgatgaagagctgatgttatatatatatatatatatatatatatatactgttcaaatcatgtgaaaaggtattggtaccttttcaatctatcaatttccaaagacttgttatttttcaagaaatctataaatagaactcattaatccatcatttcatatcaccacattccaaaattataatttagacttgttctttctttttaagcccgatcgaaataatcggtattgttttttcgagagtcgaaaacagttgttgttcttgaaatttgaattgcgaaaaatcgtagtctgtatcgtcttatggacaaagagtgcacttgcctaaaccgttttgttaacatcgctatacgttatcatgcaacggcgacagcgcttgtacctgtacgaattttcgattttcgtgacatgttattttataatttatttttaatgctcgaaacatgtttgatgaaattcccgataaatgccgttctttttaacagtgaagtgcaagcgccggtggctctgaatatagagg

SEQ ID NO: 103503 - DNA, 933 bp, Mimulus guttatus
  Intron number 1 from transcript mgv1a019062m (locus mgv1a0 19062m.g) derived from phytozome v7.0 (chr-ID scaffold_26; pos 866382 to 867314)
actaatattcaggtaacaaaaaaaatttcatatcgaaactcgtttgttggattccagtttcagtaccctaggcgatgtggttttgggcatacataatttgctagtttctaatccatgcaattgtaccgagggatttattcatgatgatcaaattaattgtcagttgattttaattacaaaagctcctagcatatttgaataatgaattatgggctggcatatatgttgaattatcgaagctgagattgtggcgatgtgtctaatctggttttatgatgtggaaaatttgggtcagagaacatcagcaaattaaatgatgacaactttttacgtaaggaatcaacgcctgcaacgtgttctccctcttgtctgaaagagcatgtttatggtagatgagttaactggttacagaaaatatggttaaggatatttaatgtggaaaaagtgctgtacgtggctgattgtacatctaacttgctcataagaacctttgctccatctgcaatttggtgatattttaggatatcagtgcagctgcatctgatggtttcataatgtggaagaatttggagtttttggtattagtgcatatgtcaaatgatacatcacatagttttacgtcaattagcctaaataactttgacagtcttcggaatcgatgatcccgatgcactcatcgatgtgacacaagattacagatctttttattagagacttctcaccatccctggactgagtatgcgttcaataagacaagtttatcttagatgtacaattacggtcagtgagttaactgcacagttaggtgtttgttttagtggctattctgtgctaaactgtcatttgttttgtttatttcatcagaatttgctatatataataacccttatggtgctagtcgttaacaactatttctttcgattcagtttgcaa

SEQ ID NO: 103504 - DNA, 1042 bp, Mimulus guttatus
  Intron number 3 from transcript mgv1a022905m (locus mgv1a0 22905m.g) derived from phytozome v7.0 (chr-ID scaffold_291 ; pos 162305 to 163346)
aagaatttcttcaagtggttctagtttcaccgcaggtttttatttctctgttcttcaatttcgcaacggtgtcgttttaatccgtatatatctgagttcatatggttaaattattttggatgaaaattaaaaaaaaagtcactgttttagattgtgttttaggaagttcaacgttgtcttgtcctggccaaataatgttcatcattgatttggatgtggttataagtaaggtggaaattggaattccgacccaaaaaatttacgatttcggaacaatgtttttcattccgaattcttggattgaaattggaaaatatacatgagattctgattttcgatctgggttaactacagaaaataattctgaaaattttgtttttttggggggaaattacatttataatatcaatattttaatgtattttatattttaggtgactatatagaaattttccgaattccgcagttcccgatccgaacatttcgaattttcgaacaattttttttcattccaatccaatttccgaaattatgatttccgatttttttttttattttctttggaacggaattataattagtttttcgcttaaaaaaaacgattttttttccgaaagttctaattttgaatcgacccatccaatttcaactcataggtgtggctggaaggtgaaacattagataatgagatttccctaaatcgattctcggttatcgcaaagaacagaaacatctttttacattcagagaaactaaatgattatgagcttctacttatgtttgttaatatcagaaaaaaaaatgtctccacgagttgaccttttattagatgatatacaaatgaactcgctgaagtgtatacgactttccacttttacctccacgtaaaatttttcattgcagttcctctttgaccttttggttaaaatgttcagattataaaattcaaatttgatgctttatttatttttatttggagacgacttaaaaatctaaaggccttctcttcgatttgtctcgtacagattccgggaaacacagg

SEQ ID NO: 103505 - DNA, 905 bp, Mimulus guttatus
  Intron number 1 from transcript mgv1a007817m (locus mgv1a0 07817m.g) derived from phytozome v7.0 (chr-ID scaffold_32; pos 129149 to 130053 reverse strand)
atttctccagctttgtgcggcaactcaatacttatgtgagtttctgaaacctgcaatttttaattcgattgtgcttttttttttttttttggttgaattgctgattgtgtggaggagatttgattgcgaattgccgaattattcttctctgtttctgaattttagtcggttttggtatagagagagagtgatgaaagtggtaaattctctgtttctcttcaatttttttttaaccaaaaagagaatggcaaaagtgtcagtagactcagtactcagtactcagtactcattcaattgcaggaagataaaacggtgacgtagtataaaacttggcacgagttaactagttcggtttttttttttctaataaaagttattttggagatggattttatttttattttttatgattatatcattttcggtttggcttaggagtgcaaattaaacaaatcgggtcgtaattaacactttttaaagtatacgtggtaataatatttataaatgtaattttgtaaattaaaatcggatcagaatgattgagccggaattgtatgaaaaattgtattccaaaattagaaagtctcgaatcgagaccgaaaatcgaaaatttcgttccaattttcactttctagcttggctaatttaggaaaattttagtgcagtgcatcactggcagagagtggcagttgcctttacttagtactattaatgttcatggaaactaaagattatttatttagaaaataaataagtttatatataaatataattaattgatgtggagggaatattatgcttcatgtattatattaaattagtgattttgacgagaagagaagccatatatattatattaatctgcatcagggtttcagaaaagttgatccagacaggtgggagtt

SEQ ID NO: 103506 - DNA, 642 bp, Mimulus guttatus
  Intron number 3 from transcript mgv1a016654m (locus mgv1a0 16654m.g) derived from phytozome v7.0 (chr-ID scaffold_251 ; pos 24449 to 25090 reverse strand)
ggattgtatttgacggcattttaggcggacttgtatgcaattcttcttcttcttttttttttatttttttctattattatttttatggatgttcccagcaatgatttattagctgtttatacatgaacacgttacattcttgtattatgctaatttctcatattgatatttttgttttgattttgggctactatagttgactctattggttctttacgggctttaatttttttgctcaagtcggagattttatcttagattgtggttagcttataaatagtggctagtcttgcctaggatataattccttggactatgacattattaatatgatacacttatcgtgctcgcattagtgtttgctgtagttctagtttgatagagttagcttttatcggaaacttgtgtcgatttaagcgtatacgataagtgtaggttgcaaaaaataaacatccccagtaaagaatgtatcttatctattttcttgatctgtatttgatacccattgtcaaatgacatcataatgcatctattcctgtctattttcattcccgcatttttttatattttctttatctaattctagcttcttttttgtctcgtgcagtcgttcgtgctattctggacgtatccttattctct

SEQ ID NO: 103507 - DNA, 493 bp, Mimulus guttatus
  Intron number 2 from transcript mgv1a012244m (locus mgv1a0 12244m.g) derived from phytozome v7.0 (chr-ID scaffold_48; pos 600858 to 601350 reverse strand)
ttattgtcaaggcctccaccactgttgcccctaaggtacatagtttcttctgttttcatttcagtattgcaacttctgtatattgattttatttttttatttttttattttaatcttatgttgaatattgatgctactggttttatgtgttctgctgatataataagctgaatttatgtgttcaaatttcatttgcatcataagatgctgtttgcattgtcggcttatcgattaacgtgtcgttcaattgaagataaaggggtgtatctttgatatttagatttcagtgctgcttctattcaatcaagaaacattattaatttgtcgttcaatgggcgcgataaaatggattgcctttgatttctagattcgattctgtttgcgtttcttagtgttgatttttttttcgtgtgtgttaagtacaattaactcatcccatacactatgaacctttccagtacactactctcaagccattaggcgatagattgtt

SEQ ID NO: 103508 - DNA, 721 bp, Mimulus guttatus
  Intron number 1 from transcript mgv1a016012m (locus mgv1a0 16029m.g) derived from phytozome v7.0 (chr-ID scaffold_1; pos 3345466 to 3346186 reverse strand)
tacgcagctacgcacacctctcctccaactctacggttcgtcttctctctagatccgttcgctctgtgttgtctaattttcgaggtgcttctgtttttttcatctacgatttggtttatttttgtttcaatttttttattttttttttcttcagtagggattttgttgatgcttggtgcgtttgatgtttgggatttgtttattggtttgtcggttactgattttaccaccttataagccagatctgttgttcaatttgacggctacctagggttttgtttcctaatttggttttttagggctcgtccttgcgagtggtgaaaggaaaccggaggattatgaaacatataaattgaacgaacggagatttgttttaaggttaacagatttaatttctgaggttaaaaggtggaaaaaattagcgagtaaaagaaagatgaataatttagagagtaatagcgttttccctttgttaagatgagaaacacatgatgggttaacactgacgaggacatttaatacagcaactaaacacaaaagcaatttttttcgtgtatatgtgtgcgtgtattttgtaaaataaaaattacttcttttgaaatgattgggtaaattgtgtctctgtggcacttgggtcttgggtttcttgggttagtttgttttttgttttaatgattttttttttttttttttttgaaatattagctaaaagaagggaaga

SEQ ID NO: 103509 - DNA, 607 bp, Mimulus guttatus
  Intron number 1 from transcript mgv1a002029m (locus mgv1a0 02029m.g) derived from phytozome v7.0 (chr-ID scaffold_129 ; pos 563808 to 564414 reverse strand)
cccgcccccacgccccttctcgtgcgtcagctttctatttccccccttttttttcttctaattaggttttacaatttgactgcaattcgattgaaatatagttgagttttgcgttggtttgtgaaatctttgaattaatctttatttgacgtgtgaatttgagaagttctgatctcttgattagggtttcattttttttctttaatatttttgtttatcaggcaaattgagaacatttctggttcagtttattcttttgaatttgttgtcgagaaccatctggccttttaggttattgaaattattgtcgagattcgtctagaaatgaagtacgacttgggaacgaagttgttaacaattttttgtttccaaatgtggtgtacaagattttgagtggaaatttgtctcggtgacacgtcatgcgaatgccccaatttcccggattcccttatacattagttacttgaattcagtttcatttatgtgcattgggtaattaagatctcggtgtgcttgtattgcccttcgtttagtacattattatcacattgcgtctcgtttgaagtgaggatttaacgtttttagccgcttctgttgtgcagcattt

SEQ ID NO: 103510 - DNA, 469 bp, Mimulus guttatus
  Intron number 1 from transcript mgv1a006547m (locus mgv1a0 06031m.g) derived from phytozome v7.0 (chr-ID scaffold_39; pos 471306 to 471774 reverse strand)
ttgagaggtatattgaggttttgttgtttgtatttttagggtttctaattttaattgtgaaaaagcaatttcattttttttcgaattcaagattggttttttattgctccattttgtgtgtgcgtgtgtgtgttttcttggtttttgttaccgaaaaccacatgaaatctagtgaggtgattacatgtcccattgtccctattaggtgatgcttgagaattttcgatagaggtttagataagcaagaatataataatcgagatcaagaagaagatatgcttagtgatgatgtatgggtattttcttcggttctaattagatatcgattccgatcccctttttcgtggaggttttcggattcatattctcttatgtcattttgattctttagcattatacttgtacgcgcaattaatcctcttttttctgattttattcgaaacctgtatgtttattaggccgaaaccca

SEQ ID NO: 103511 - DNA, 483 bp, Mimulus guttatus
  Intron number 2 from transcript mgv1a011674m (locus mgv1a0 11674m.g) derived from phytozome v7.0 (chr-ID scaffold_55; pos 911709 to 912191 reverse strand)
attttgttgctcctcaagatcgtttcgccaaagaggtacttcttttcgggtttttttttttttttttttttttttttaatatcgatagcatcaaagtcttcgattttccgtatccaaattttcaattttacttacaaaaacacactcatatacatgtcgcagatacatcgctatttggatttcttttagaaaaatacacttataaggtgtttatatggagattgtttaaaattaattatagattgtagaatttgaatattggcaccgtggcacatataattagttacctttatatttttgaaaaaaaaaattatattcaatgatactaaaatggttaattacccgtataaaaaaaatattggggtccgatccatagcaattgttttaaccgacttacgaaagagacgaccggagattattctttttttatttttcacggaaaatgtaggtgacgaagagagactacgcaccggagagcgtgtg

SEQ ID NO: 103512 - DNA, 742 bp, Mimulus guttatus
  Intron number 1 from transcript mgv1a003030m (locus mgv1a0 03030m.g) derived from phytozome v7.0 (chr-ID scaffold_121 ; pos 642352 to 643093)
ccaattacaaatcttaaggacttgtcccagatcaagtgagtgaaaatgttttcgaaattttgctcttcaattattttatttccattttagggattcattgatttcttttgttactactggtggattgattctgggatgtgggaattgcaggagttatttatttatttatttattaaagattgtaaattaccctaaaaaactcttgcatgctgttaaatagttcagtgtgttctatttgctgcatgagttgaaatgttgaatgtgagtttatcttaaagattggctttgtttctatcactgaaatcattgaggaatgccgaaactatgtaggattttgttaaataatttgggttttgatttttctttttattgatactagttcatttctctgcgtggcttgatttataaatgttccttataatcgaagttctgttgttgttagtatttcttttcctcgagaacgtaggtcatgtattcttctcgtatgtgtggactttttgtagatatgtgagtagacctaagagcttgtttttcatttatttccttctggggtattgtgtttgtactattttgtcatcaataagttactcggccaggattttcattttcggagtattgtgaattttgttgttcatacagttctttcagtgcaggataagaaaagtgaaaaaagggaatttagttttattggaatttcttgtgttacacttacaggggcgttggtaagtggattttgaagcag

SEQ ID NO: 103513 - DNA, 967 bp, Mimulus guttatus
  Intron number 3 from transcript mgv1a013286m (locus mgv1a0 13286m.g) derived from phytozome v7.0 (chr-ID scaffold_67; pos 538032 to 538998 reverse strand)
ttacttcgacatcgaaattgacgggaaacacactggtatgtatgtatgtatgttttcttgtacattagcaatgtgagatgctggctggcagggttgttttacatatcagtcgtattatgtcgtttttcgattgaatgagtacatctatctgtttcacttattcgcattttatatttcaattattgtcttatatggtgtatgcttaactgcaaattgttgattggatatgtgaatcttgaagtgtatttgtgcaactgatggagatgttgggacttggacaataatggaattaagtcgacgaaaaaagttgagaatttattatgtagtttgatcatatgccacttttagcatgtcggtacagccagtgtttttagcacttgccgttggttgatctggaggaacatatttatgcatatttgtaactaactgagtttagatctatcatcatcaaaatgacagacggcagaactaggggacattgatccttagatttgacgagaaggctgtttaatttgacgagcatataaacctactgaattaatttgaaaataagatttgatgacaaggctgtgtcttcaggcctatctttgattttcccatgtttttatagtgcttaaaccgggatataagatgtggtattttaactctttccagcttgatattccacttagtataagttccgtttgttgatatattaagttagttgaagtcccaaactattgcatgaagtgtaggatatgggttatctgaatacctgagtgcactcttctattggatatgttgcctagaacgtgttggaagttgtgaacactgttgccgatgatgtaccggaatgcattaatagacccaaaaaaagaggaccgtaaaaaaacaacaatagtgccattttaatctcaaacagataataaccaggttgcttgtggcattttcaggtcgtattgtgattggcctctttggaaaaaccgta

SEQ ID NO: 103514 - DNA, 383 bp, Mimulus guttatus
  Intron number 1 from transcript mgv1a015784m (locus mgv1a0 15784m.g) derived from phytozome v7.0 (chr-ID scaffold_130 ; pos 392384 to 392766)
ctgatatcaaacgcctcgccaatttctacattgaggttcttcccctatttttttctgatgtttaattgctttcattttcttcttttttccgtgttaaatttatgagattgaaattgaaatcgaaaaaaaataaattaagatagggtttttgtgggtctccgtgaatttccgatgtcgattactctgggtttcagtttctagggttgaaattaaattcgtaagaaaaattgcaggatgcatgtttgaattttatgattataaaattaaaaaaataaaataaaaggggcaattgattttgtgggttttttttttttttttttttttttttttaatttgtttatttataagatatttggatttgagcaagtggagagtccaagatt

SEQ ID NO: 103515 - DNA, 693 bp, Mimulus guttatus
  Intron number 1 from transcript mgv1a018463m (locus mgv1a0 18463m.g) derived from phytozome v7.0 (chr-ID scaffold_79; pos 286004 to 286696 reverse strand)
acgacaagttgaagaggttctatcttcaggttaaattgctgaaaaactcatacattttttaggcaaaactattaccttgtttttgtatagataaaacattagttgcttcatagcattagcaacttgaaataggttaatctcaggatgctttcgcttgataacatcttcttagctcacttgcatcctgcttcgacctaagctaaagccatctcagctaatattataatatttaatagtgaaactataaattaggtagagctgaataattgactgtccaacgcacctagtttattgttcaaagaaggtgactaattcagcattcataattagttttaggatacttgaggttaaaaaactttttttatacagattatattagaatatgcaaaagggtcaaacacatataataatctatgcagtttgcatcttgctttttaagaattgtctcgtactaccaagacttcgagcaatgatattgagctggatggtcccaaagtgtcctccttttcaaagttataaatctaataaatcaaatactctaatctttaagttaacttactgctattcttgatccggttcttttgtttattaggccatatgtaagctgacatgaaaaatcaaatgttggaattttgaagttttgttgaaactgcgtcttttggtggattttgggcagtactgttttcctccctc

SEQ ID NO: 103516 - DNA, 827 bp, Mimulus guttatus
  Intron number 2 from transcript mgv1a007030m (locus mgv1a0 07030m.g) derived from phytozome v7.0 (chr-ID scaffold_3; pos 732647 to 733473)
gcctcactcgccataacattgccagccatcttcaagtatgttatatattttttattccttacattgcatttaacactttccaaaatctactactattaatttcgatatattaatcaaagatatattaattaatttcgaataaacaatctacctttatgcaatcaaaccaaagataatgttagtttattgtaatatttgcaattatttctcccactttcttcttgtggggtaaaaagtttatgtgagaggagaactactgtctgtactcgaccaactaataattcacactctttctctaaataattattacatcacagccactgaaacgagccagaataatatatatatatatatatactttcatttgtcttcatgtggaaaaagctcttggctgtatcagaatatatatatatataaagatactttttcaaaattatgctaataatttaacagacaattgaataaccctttgggattgcaaaagtagatttcatgtcagttttgtgctttccatacactggaaattattgcagccccataataatgcagccaaccaatgtaaacattaaatgaaaatacatatttactaatagttttaaatattttactgacataaaatcttcaaatctcaatttttactacatattaatttattaaacataaagtttgttttttgttcgacctcattttattaaacataaataaagttattagaaggaattagaatgtgattattatcacgtcatctccaaattaaaatattcgatctgattaattaatataaatatgcagaaatatagatcacatcggaaacatttgctagcacg

SEQ ID NO: 103517 - DNA, 693 bp, Mimulus guttatus
  Intron number 2 from transcript mgv1a011811m (locus mgv1a0 11811m.g) derived from phytozome v7.0 (chr-ID scaffold_123 ; pos 840910 to 841602)
ctgctttacaaggtatgtttagaaaacacgagatgcgatctcataaacttcgttcgtagcttattgaacgaaaatatatgttcaaacttggctactaagtatgttgaagaaactgcttttaacaaatccaatttagtagcttgatttgattttcagccgtattctgagtaaatagtatatatatatatatatatatgtatgtatgtgtgtgtgtgtgtgtgtgtgcgcgcgcgcgagcgcgtttcttgggttgttttcatgaatcatgagtttattgcacatttagtactcgtgtgttatatggaattgctaaaaaaaatccacgtgttataaatatcaggagtttttaggggtatttttgtccaaaaaatgcatcataggaggtttttactaatatttataataggaggtttttttagaaattaagctaaacacaggggtattgaatgcaataataaacccttgttttcatgttcaatttaaggaatgggaatataattgcaatatttgctgtttagctgaacattactaatgtttgaacattgccttttcattttgaggaactgagtttaatcagttatttatttattttttcattttttttttttgcaattttcttattttcatccgagatataacttgagcttataattctcaggtgaaagtggttccgaaattattggtcgattgaaa

SEQ ID NO: 103518 - DNA, 876 bp, Mimulus guttatus
  Intron number 2 from transcript mgv1a014857m (locus mgv1a0 14857m.g) derived from phytozome v7.0 (chr-ID scaffold_7; pos 2324785 to 2325660 reverse strand)
tgattaatcctaaagataatcacatttccttccaggtaattaatttgttttttttttctccttaatattaaaaattcgaatctttattatgcctattttttttttattataatttaatttcgtgttatgaaatattattgggagctaatgatgattagaggttgatgtgactgataattaatggatccacaaagagaagacaaaaaagatgagtagtttaatttattaattaattgcctcaactaatctcaatcataattaaatcacacgacattaattaataatgtttactaagaattttgaagtattatatcaggttaagtacgcgatcaacatcgtcgttagattattagtttcgcctttggattcgacgaaaactccatttgcctattttgatcgatacatcgtcatcagttacttttaagaaattttttggtttcatattatctgtcaatttaaatttaccacccgcacttaattaatcacttaatttccagtttatacatttatttactctttgtagcactcttttcaactcaattgatccctcccttattagctataaaacaatgtcattttagtctaaaactatacaatttttgacacatttaatgaaatatttaaataattacttttgtggtttaattttttattttatttacataggataaaatatgtagtgaaataggtggttggttgtatgtcataatcaaacagtcgtgcatgaagttctaactttagatacatgacctatacacacaaaagtatattgttgaatgttggagcatatttatgaaaaaagtttttattattatttaatatttaaattatttaattaatattattggtggtaattaattacactagtgcgagagc

SEQ ID NO: 103519 - DNA, 589 bp, Mimulus guttatus
  Intron number 1 from transcript mgv1a019573m (locus mgv1a0 19573m.g) derived from phytozome v7.0 (chr-ID scaffold_20; pos 113786 to 114374)
ggagctgttgttactggtaaaggccatgttcctaatggttgtgcctattgttttttcgctgtttcattcgtacctttgttttgtcttcttttggccatgaaaaaagcaggaagagggggagttatacggatatcatcatgtttcacgattttcttctccttttttagtatatgcaaaattaatcgaatactaccactctgccttttggtcagaaaaaaggatataatcctttgacctatttgcagcttcttattgcatgttgtttggttatgtcgtaattatatttactactcattcttatctcactatacatccttacattttgattgttagtctacatatttttcaggaaagatgacacttattcattgttatgcttcttctctatgttttacactgttgtatagactgcacgcactgcgtggtttttttttactagctacctaacatgattatattttttttccaaaaacatatttagccgcttgttcatggatataaatgagccctttagtttgtattacacaactttattataacatatgcaattttctctgtctagattttcatcctgcaggcattggcggtg

SEQ ID NO: 103520 - DNA, 736 bp, Mimulus guttatus
  Intron number 1 from transcript mgv1a014952m (locus mgv1a0 14952m.g) derived from phytozome v7.0 (chr-ID scaffold_449 ; pos 39517 to 40252 reverse strand)
gaaagtgggaactctggctctcttccttcactaacgtacgtattttgtatctaaaggattattattatttttcctcttctataatttattatatccgaaaatcaacaaatattatttgtgttttttcgttctttgcgcgcctctgtatattaagaaaatcaataaatatgaattgatcggaatttctaaagtgacagatagtttcgaacgaaaaaaatttctccaaagcaacaaaatattttgctctgcgaaattgggttttgatgtacgtgtcaataatctattacagttaaatctctataagttaatacagtcaggaaaattttattaatttagcgaaatattaaattatcgagttaataatttagaatgttctcaccaagttggtatcgaaataatttattatttaagagaggttattaatttatcgaggttctactgtagtataacttaacatgaagatcggaggttaaacacattagaatatcggtctcgggtctcgtatacatttgttgacatttttgatagtctttttagctgctatatatattgatcaaatggttaaaaacttgccaaataattttgagccttctcttacgactgatctactaaccaaagaaagcattaacgccaaaatttgatgggtttttcgagattatagcaagtttttcatacacgcattgaaaataaacgaaatgcttttgtgtgcgatttccgcatgcaggggttgtaaagc

SEQ ID NO: 103521 - DNA, 787 bp, Mimulus guttatus
  Intron number 1 from transcript mgv1a018740m (locus mgv1a0 18740m.g) derived from phytozome v7.0 (chr-ID scaffold_270 ; pos 138696 to 139482)
tgccaccccctcctcctcctcctcctcccgccgccgccgcacgtgtaaattccctctttcaatttctacatactagctaattattctttttcgtctctttccggtcattgtttttcttttctttttttctcttcttcttcttctctttttttttttatataataatatatatactgcattcgtgtgtgtgtgtgtgttacttggtattttattgagactattttttgttttttatttttttgattttgtgaatgggatgaaagagttgaatttagattcacttcaattttcacttgaattaaaaagtcttgtatgtttttgggtacgaaagacactaattttaaaaattgagttaaaacactgctcaccgttggatctagagggccgtcccccctttagttccctcgatccagcggtctgtggatgcctgatgctactacgtccaagattttttttattttctcctttttggaagcatcatttaacttttatttccaatttcctatttttctgatttttttgtaatggatttgaaactagtttttcatttcccaaaaacaattttttttttttttttattatagaataaaaaaggttttatattggtgttggaagttgaaaatatattagatttgaaagaattagatatgatgagttaaatgagaagagtgaagagcaagttgaatgtggtaagcggttgtggaaattgaagatgattaattaattattgacaaattttttgacgtgtctaggaaattgatctttcaaaactaaactatcttttcaa

SEQ ID NO: 103522 - DNA, 906 bp, Mimulus guttatus
  Intron number 1 from transcript mgv1a011295m (locus mgv1a0 11295m.g) derived from phytozome v7.0 (chr-ID scaffold_159 ; pos 577965 to 578870)
ggattcagaggtttggttctcgacatatcctacaggtctctgcctctactctattcttctttaccttaaccatccaaaaaagaaaaaaaaaaacggaaaaatctttgctttgcttttagcaaataaattaaatagctgtcctgtcagactacttgttttgctttgctcatttcaaataacaactgataaatgataactataactcaactaattaattagctatatgcctctactcattcttgactagtgactactgctgttgaatgttgatacattactactctcttaactactatacatatcgcttaaccaatcaaactttgaacctggacacacatattgacttcaaagtcggctagtttatattaagttgcctgcagttatatattggggatgaacacatccatataattagcttttaatttgaaaatttaagctaagataaaaacttacaaacataagggggataaatcgaacatgaggaatgggggtaaacatccttccaccaccatatctttcgtgattgtaaacagtgattactgtactatgctatatgcttgcttgtatgaatttttacttatattaattgttatgatgtgcaataattgcaaatggttatatattgtattttcctgtgcttaattgtgttcctacctactgcatctcagtgatacaaagagatttcaataagccttatctatgaattttaacttgtattcattttgctatttatttttctctcgtcttttttttttccttttcttctcattttttggcctccactatcatgcgttacttttactttgcaaatactgggtggattcatgttgtgttaatgaaaataatgtgagtaaaatgtctgccatgttaggcctgttaacgttgtgtgttggaaacgcgccatat

SEQ ID NO: 103523 - DNA, 898 bp, Mimulus guttatus
  Intron number 1 from transcript mgv1a002342m (locus mgv1a0 02342m.g) derived from phytozome v7.0 (chr-ID scaffold_363 ; pos 128631 to 129528)
tcaccggctttgctgttgtcctcttcaattacacggtaacttcttcaattttacattggttctacatacatatgtagtccacctgcttctagcatgcactgttttcagtctattgaaatgcggccaatgaaatgggattatgattatcaaatgcatatgagttatggaacataatttggtaagtgaatgatgagcatactttagcatgggacaaagtaatgataatcttgatttttgttgattcgattctttgaagttagttatgttaatactgagcaagctacaaaactaccacaatcttagattgtaataggaaataatagtgtacacaaccggcagcaaactaagtcataaattcagaatctgccctctttgaaattgttggttttgttcctgtacattttaggctcaagaatgtaggtttttgataacatatctcctcctatccgccactggtatcctgctattccctattaagagttatccatgttaatttatgttcacaagaagtgacatgatatgtatgctgacttatccatctttttgaatagttgttaatctaaattccataatgggtgtccgacatgacaatcatggttacattctatgagttggtctcacgagattgaatatggcattttcctatcgctcttgaatctgatttgctgatgcccacttcacaatcgtctattctaaaccatgtatgttcactcgttttaaacttttcttttagcagtctcggtttactagtgtgagtatttcatgaagacactgaaaatttccctcgtacattttttaaattttggcaggggagtgcaatcctttgttagattgctctatttcattggtgtaatcaagtttgttaatatcattcagaccctgttaacttagtaggtac

SEQ ID NO: 103524 - DNA, 815 bp, Mimulus guttatus
  Intron number 1 from transcript mgv1a014982m (locus mgv1a0 14982m.g) derived from phytozome v7.0 (chr-ID scaffold_3; pos 3065302 to 3066116 reverse strand)
cgcaaaaaggtaaaccctctcttctttttttttcgaaaattgaaaattgaaattctctgtttcatgaagttcagatttttctgtactttttaattaggtttatggttttggatttgtttttttatttgttttgatttggaagtagtgaaaaatgctcaccaactgtttgtcgaaattactagctcgggtgggattattcgatgattaaactccttgttttcgatttttattttttttcgtgaaatcggagaaggttgaactatgaaggggagaggaaatgagttgcatttgaaacacaaggattcaattctgaaatgggattcaatttcggtttttcgtgtatatttcgagttgataatggtggttgaatttattagtgaacgctctctggtttattcacacaatcgatggtgtcatttgattgttttattcacgcaatcggatttatttgtgaataattaggaaaggcatgaatcgaagtatcgaactggagttacttcgcattctctgttttatttacacaatcgatggtgtcatttgttgaggtattcgagttcggtaaaaattgctcgtacttaagttcttgatgtcgtattttaccaaatagtaataatcgatctttcacaatacttggttgccaaaactaagtgttggatatcaaacacaaccttaaactgaaacgaaagatgtagcttcttgtgggacgtgattattttttggttatcgatcgtatatatatatagttctttgcaggctatttgtgtatactacttagtaacgttgttgtgaaatgatatgacgaataggtggctcgt

SEQ ID NO: 103525 - DNA, 509 bp, Mimulus guttatus
  Intron number 2 from transcript mgv1a007604m (locus mgv1a0 07604m.g) derived from phytozome v7.0 (chr-ID scaffold_123 ; pos 576753 to 577261)
gatcttaccaatcagaagaagaagaatgtaagaattttttcacttattatttcatttttggggtttatgtgattatattatacttgtattgcgttgtatttgtatgtaatttgagatttaaaaaaaaatatttaaaaccctaaatgtttgataaattttgattataccatctatctaacctaatctcagctcccaaacaaggcctacatcaatacatgctctctatttgattttttgttgattggcaattttgggggtgtttgcactgattgctatccgaaattggaatatgagatgaaatgtagtttaaaatagaaattagtttgtggattttaagacgaaattggaattcggtgatttttagatttcgtaatgagatgaaaaacgaagaagaggattattcgattgggcagcttcgtaatttcgtgtaatttatgatcatattatgagaaacttgtattgatgcttgaacagggagactctgtgagtacggataggccttataaacg

SEQ ID NO: 103526 - DNA, 538 bp, Mimulus guttatus
  Intron number 1 from transcript mgv1a013364m (locus mgv1a0 13364m.g) derived from phytozome v7.0 (chr-ID scaffold_79; pos 39892 to 40429 reverse strand)
atcctcctagctcttgggattccttgcgtaaacaggtatgtaattatgttttcaattatccgatttttcttctcttttattgagaattccatttgtacgctttcgattttagggtttcctacattttcatggttatgttgtttgatcggatgatgatgatgatgatgatgatgatgatgatgatgatgatgatgatgatgcaaaaacaatgcattatgctagatttgttccttaactcatcatagagtcatttgtgatgttatgctcagaagatctttaatcacttctgccaaataatgagcattgttggtaattgtatcaggaatttgtcttcaaatgttctctcaagtgtaaatcctgacaatgttttttagacaactcttttatttttaaatctccacaaccactttgagtttgttgtaaaacttatatacattaatatgttgactattattttctctctttgtctgaaatctgactgtcactgtccctattttgtttacgtccaactaggcccggaaacttgaagcccagctgg

SEQ ID NO: 103527 - DNA, 661 bp, Mimulus guttatus
  Intron number 1 from transcript mgv1a007567m (locus mgv1a0 07562m.g) derived from phytozome v7.0 (chr-ID scaffold_24; pos 560867 to 561527)
acctatttctgctacgccactctacatatccagaggtatttgtggctttttcgtctccactctcaattcaaatttattttattttatttttattttatcaaaatttcagtgatttctgtatcgaataattaatatcgatacgcattaactcacaaatcatcgaacaaaactctcagatttttcggtaagcttcttcctctgtggtttatttcttactcaatttaacatttgtgtatatatatgtatgtatctgtgtatgtattttgatttttctgcaattcatttttcgcttggcttctcttatcttatccattatttaggtctcttgaatttagattattatgcgtaaattctggaaaaataaataaaaaatcgcatgatttttggtaaattgaggaacaataattatttttattcaataattagaacaaaagattggatctttatggctatgatttttgtgtgaagatatatctatatgtgtatgtatactgtaaattggaagatttgatttcaaaagggtttgttcatagggattttaactttttatcgtgtatagtttttgtattatttttccctattttattcaatcgaaacgcgtttttcttcgacattctgaatcgagtttttaatatttgattaggttgttttgttgttcgta

SEQ ID NO: 103528 - DNA, 868 bp, Mimulus guttatus
  Intron number 2 from transcript mgv1a005658m (locus mgv1a0 05658m.g) derived from phytozome v7.0 (chr-ID scaffold_12; pos 504973 to 505840)
ctcttactaggtaagttttttctttccttttatgtttgtggaagttcttaattaattctcatcgagtgctactgcgtgtttgtttcagtattgagttcgtagtgcatgaacgtgacacgtctgttcttaaaatgaaaaaaaaaagtggatatggtgtgtgaaaatctacgttctaagttgcaacttgttaagaatgaagacgaaataattcatttcatttattgatagtacgtgtttggtgcactgttgagttcattgaagtctgaaatgaacattgtaatacttgtccactatatatgcaagctctcttgtcaaaataagaagagaaatggggagcttgaggaatcatctatatgtaactgtagtattttctctggtgcattattgagttcgtcgaagtcttaccaaaaattattatacttactcttaacctgcgagttgcactataaatgttaattttcattctgaagtgctacaaattcaataaattatagggaagacttaattcctgccctgatttccaaattaagttatgtgatttttcttctgcaagttaccttcgagtaatatgtgttttgcttcctattttaaacatttatatggttttcatgtttttaattattgttgtagttcgatattaactggtgatttttattcatgtaatctttatatggctttcatgttttaaattattgttgaagatagtaggttttgagttttattcatgccaattttgataaattgtagattagacttatcatttagttgattaaattaaagtggttgggctgatattcagagtattatcactttatatttgatttttgttttagacgtcagtgggttagggaagaagatttggctaagg

SEQ ID NO: 103529 - DNA, 313 bp, Mimulus guttatus
  Intron number 1 from transcript mgv1a000594m (locus mgv1a0 00594m.g) derived from phytozome v7.0 (chr-ID scaffold_42; pos 1287641 to 1287953)
gcatagtctctccttgcagctacgccttgatatccgtaaatattattttacttagcagatctgttttattattgggtgtttatttgatttgacttggaaaattagtaatatcgtaaacataattgcaacgtatccaatttaaataacttcatcacgtaggcatttggagcaagttccaactacaaccttatcatcatggaacttattagtgtttgtttctttgatttttattttctgtaaggcgatctgaattttcttggcttttactgtgtgtgaaggaaattaccttataaactatctggcaagcagaggt

SEQ ID NO: 103530 - DNA, 563 bp, Mimulus guttatus
  Intron number 1 from transcript mgv1a003764m (locus mgv1a0 03764m.g) derived from phytozome v7.0 (chr-ID scaffold_18; pos 1426970 to 1427532 reverse strand)
attacaaggcgagaacagcttatactgaatttcaggtttgtctgaattttttatttttatttttattatttttctggggtgctaattgaggaagaaaattgctgtcttgtggtatttggattagatgattatgtccacacaatcatatgattacagattgctgtctctgtttcattactgtaatactttaattttctacgttgtccctcacacacacacacacacacacacacctatgtgtatatacatgtgtgtagttctctggaagaaagtaagcaactttgtttgaaattctgtattgaggaatttgatacctttttgcctcctattgatcatttttttttgggtttaaaaaactggatttctgtatatcttgtgtgtgtgtgtgtgtgtgagagagagagagagagagagagagagagagagagagagagagagagtgtgtgtgtgtgtgtgtgtgtgtgatttgaagccaaattgcattagcaaactacaatgtgcatgaaaaaaaattcaaatcaataaacacagttgttgatgatttttcagcacaaaggaaagcc

SEQ ID NO: 103531 - DNA, 967 bp, Mimulus guttatus
  Intron number 1 from transcript mgv1a000807m (locus mgv1a0 00807m.g) derived from phytozome v7.0 (chr-ID scaffold_75; pos 8946 to 9912)
gcaagccagagcctccgcggggtgggaagttgttagcattgtcacgttctcttcgagtagatgactcagggacatcatgcgcgctacgtgatcttgtatcacttcccgcagacggcgtcattatgatgatgctagaaatatatcactttaaataattgaggtaaaaggagctgtgagagcaaaatggatcactgctcacgtgttagatggttctgagatatccgcgaacagagaacacgtgaactaggcgggtggttaattcggccgaaacccctccaacgctcaaatcagacgtgcggatagtagaaatagttgagagaatatgaattgtattattttttcagacaatgtggcgtccctttaataaatgaattaaatcgttatttatatcttgtcgattgggctaatgttaatttgttgggcataaaccttatttgaaggtgattggactttcgtaatagtgttcttctaaaccgtttgtagccattttggggtgggtgggttttacagtgattttttcgtccgaaaaagaggagaccagaggaaagaaagagagaagaaagagagcggattgaaaggaagaaagagaagatgaagagagagaaaatgatgagagtgaaaaaaaaaagagaaaatataaaaaatatattaaattcacattgaggactgatctgcatgttagacgtgtgagtatagactgatttgcttggggaaactacatagggactgatatgtgttttgtattttggattagggatttatatgtagttcccatattataattagttgtttattgtttttgactttaagccatgtcattttcaaaagcttaagttaatcaagtggacttctgccattcaggcaaagttgcaacttgcacgttaaaactgcagaggaatggtcctcatttgaaacaagtgaaaatcagaatcttggttgaatttatactttctgtttgtacaggtct

SEQ ID NO: 103532 - DNA, 644 bp, Mimulus guttatus
  Intron number 1 from transcript mgv1a004990m (locus mgv1a0 04990m.g) derived from phytozome v7.0 (chr-ID scaffold_262 ; pos 40870 to 41513 reverse strand)
ccctatccagaagctgtggttcaacaggtacaaaggtatatacatacatacacacacatatatatatatatatatgcattgctgtcatgcattcttgaaaaacagagctcaaaaatttcatctggtttttgcacaaagattgaaactttccatctgggttttgttcaacaagatcattccccaattgggtttttttcttttggtagaatttacagcattttgtatatttttaaaattttcacctaccatatggtgtttctgtgtttttttttcttgctcaatcatcattcttcttttatgtgtttttgaagaatttaatgttgtattgcaatttggtcctaattttgtagtaattcaagaactctgcctcactcaatttggattttctcacattaccctgtttcatgagttcttcccccttctactattctgcaattaatatcccatccctccatgtgggtctatcttctagttttattacatttttgccactcctaattttcattttttagctatcacaaaaaaatccccttaagtaggggggaccctctgttttttcaccccccagaaaagaaaagaacatttcttcatcactagttcctgatttcacttttttttttttttttttctctataggagtataa

SEQ ID NO: 103533 - DNA, 687 bp, Mimulus guttatus
  Intron number 2 from transcript mgv1a017611m (locus mgv1a0 17625m.g) derived from phytozome v7.0 (chr-ID scaffold_30; pos 1600633 to 1601319)
caatacaaccgccgtttcgtcaccgccggtaactttaatatttcccctcatctgtttttacattttcttcaaagtttggttttttttaattaaatttagcgttttgatgattcactttgcttcagtggttaattgagaaaaagtagatttatttatcagtagtaatttaaagtggtggtgatggagtctcgaattgatatgaaattctgttaagtacagattacaatttgttatttgggttgctcgcctttaatcaattgccttttaaccctaattttttcttctattaagctgtttatgataggatggatctgtttagggtttgggatggatttaatagaaaatataattaagatggtgtcacatgtttggggtttaggatataagcttgatgattagacgtcgacccaaaatttatccaattatgtgaatattatggagtccaacttcggccgtgttattacacaatcgtatgaagatatcacacgatacaagttttgtattacattattgtagacaatataattctatacatttcaatcaatcttatcaatcccatcaatattcccaaatgagtgtttagagaatgattaatagttccgaataattgaagtattgttttgatatctgatatgcggttgtgttcttgcagttgttggctttggaaagaagagaggacccaactca

SEQ ID NO: 103534 - DNA, 554 bp, Mimulus guttatus
  Intron number 1 from transcript mgv1a001772m (locus mgv1a0 01772m.g) derived from phytozome v7.0 (chr-ID scaffold_24; pos 649334 to 649887)
gcaaacgcttagcggtaattgatctctgtttgtgtgtgtgtgtgtgtgtgtgtgtgttttgtgcttgttttgatttcgataaggtgggtaaatatggagctgaagtagtgttgaggttctattggttaattgttttgtcgaatttgcaattttaagtagcagagtttttgattttgcgtgtgtttctgatgtagtgttgaggttctacttcgttgattgatttgggggaatttgatttccggaaaattagggtaattttttcttaatgttggtggttcatttgattcttcatcatgcttaaggtggaattgatggttacatatttgtcgagaactttcgcctgtatacttagtttcggatggtttacgaaaatatatatggtttttgtattcgtcaattatgatctctctggtccgaagtcgattcgtagtttttcacggttgccagaattagtggtatatatatacatattacacacgggcacacatgtatgtgtttgtgtatacacatctatttatagttacttaccttttaaccatcgttttttgcaggta

SEQ ID NO: 103535 - DNA, 925 bp, Mimulus guttatus
  Intron number 2 from transcript mgv1a018006m (locus mgv1a0 18006m.g) derived from phytozome v7.0 (chr-ID scaffold_120 ; pos 590726 to 591650 reverse strand)
atttatagagaaaggctataaaaaagggactattagtgagaaccccctccacctttattttgataaggatggatccagctcctttttctttattaatgggagacccatcctttttttattctcaaatttacccttcctctattcactacctattataaactactttgatacacttttatttttttttattattttgtattttaattttaattttaatttttttatttatttcttatttaaaaaaaaatatttaaaaaaatatttttttaacttttttattatattttttaaaaatatttttttactattttttttgtcttcacttaaaacaactatatttcaataaaacaactattattaaaacaactgttattaaaacaatatgactaaaacaactatatatctccaacaactctcatttatcaaaatcaactattacattcaactaaaaagtaataaaaacaactatattgcagacgaaaacaactatattgttgtacgaaaacaactatattgctgtacgaaaacaactattttgttgtacgaaaacaactatattgctgtacgaaacaactatattgctgtacgaaaatatctataaatctgtaaataacaccacacaatttcaacaaaaacaaaacctacattatactattgattgaacacaaaattagccttatatataagaattcaaccaaaaactccaattaagaaaattaagattcgagaattggattccaaaaaaaaaaatcagagaagaagaagaacaacaacaatgaaacaatggggcggtggtctgtattgaaatctcagacacaatatcaaccctagtgccgctgcataatctcgtctttctccctagcgaaaaccctaacgccgtccttgacgagagaatcccaggggtgaagaccatcttcttttcgcg

SEQ ID NO: 103536 - DNA, 994 bp, Mimulus guttatus
  Intron number 1 from transcript mgv1a015525m (locus mgv1a0 15525m.g) derived from phytozome v7.0 (chr-ID scaffold_7; pos 3333853 to 3334846 reverse strand)
cgtacagattgcagcttcagcaacgcctccaacaggtttcttcaaatttgtttaatttaattttaattatttttttgtgtgttcatgaattgttaatatgtgacgagattgggtttaatcttctctttcgatagtgaatttccttcgtattgaatttaaatgaaataaattaataaacctttgatttcatttcgggatatgaacagaggatttgacccaaaaaacaaaaaaatgcttaatttgttgcagccaacactaaatttgaggtaacaggtttcgttttggttcttctgatatatgggtttttgacctcggtatgtattcggtttaatcgataagcaagaagatgtgtgcagaaggggggaaaaaaagcaactgtgtttagtgtttcggtaaatggggctgaacgatactgaatacgaacgtgtccggttttcgaaaacacggctctttctagattcttgagaaccagttagttttgattttgggaagatttattatgcatgcagatttcatcgaaaattttgaagaaaataggtgtacttgcacctgagtcgtggttctcgttaattttgaaatccttagtttcttctagatgttttcacaggttcctttagaattgtcgatcgccagacaaatagaatcgaaaatttagtggtcctcttttagtgttgctttatatttgttgcaactttttgagctcaaacccgcccttcttggtggtcccaagctcgtagtttcaaaatcgaagcagtatacatataaaaattcatccacgaaacaaagtgttcgacttagtgtgactgaagaaagtaagaaatgtgtaatttgaaagctaaacattcgttcatagctccagttagactactgtacattgtttgtggtattgatgcattattatatactctcggaaattctgtatgcatgcttacattgtcatttccttgtctgtttacaaggcacaagagaaaaaagctgctctgaagcaggttcc

SEQ ID NO: 103537 - DNA, 854 bp, Mimulus guttatus
  Intron number 1 from transcript mgv1a020690m (locus mgv1a0 20690m.g) derived from phytozome v7.0 (chr-ID scaffold_405 ; pos 17192 to 18045 reverse strand)
ccctaaaagctcgtaaagacgacattaaactcaaggtccgtactaaaaaaaaaatattaatagcagaattgaatatattattttagttgtttatattctcactgtctttaaatgttgtggaaagtagtcggtacgagcgcaccatacaccatgcatatttgttttcctatcaactacacattgaggaagaagtgaaacttgtgtttatcaacccctgtattactatatttatgcataacagatagtcaacaagaaaacctaggttactcgatctgcatcgatttatcatttatacataattcgtaaaaacatgatataaagtcaatacatacttagtgaaagcacaatttatatatatatatatatatatatatatatatatatatatatatatatatatatatatatatatatatatatatatatatgggttaagtgcactttacccccaaaaaacaaaattgtacgattatacctgaatttactaatttgttacactgataactaaaaaagtccatttttgaccaaaagctaccggaattgcccatgtgcgactcataggtgagaatggatgggcaaattcgccaatccacaaggtttttggtaaaaagaaaaaaaaaaaaaaaaagaaaaaaaatatagttttggggggcaacgtaaaaaacggctaaagtttagggggctaagtgcacttaacccaaaaatatatagttttgcatctcgcgcgtgtgcttgcattttgtctttctggtatttaattttttggtgtatttaatttcttggaaatatatcagaaaacataaatatacattttaaatttgatgatttgggaatttgtagactcgtttgaccat

SEQ ID NO: 103538 - DNA, 969 bp, Mimulus guttatus
  Intron number 1 from transcript mgv1a012844m (locus mgv1a0 12844m.g) derived from phytozome v7.0 (chr-ID scaffold_123 ; pos 686832 to 687800 reverse strand)
gattcctctactggaatcgataacggagagagcaagtaatttttttaattttatttttaattactttttttttttaatttttttaccattcaatgttttgtgtgctaatgcctaatgcatgtaaatttttttttttgcaatttttcgcccaatatcgtgtttgtcagggtcagttgtgtaaactggttgctgtagatgggatctgagagatgtatattaattttcatgctgtatcaaaattatatgttggtcgttgatttaattaggtgtggagggatttttggtagtatgaatattccgaggagaatgtttgaagatttattaaaattttcgttatggactgggattgggaaccaaataatttagtaactgaaattcggcttgaaaacaatgtctatatgtttgcataactacactgtttgttgctacttgcgaaaaaaatagttaagctggagtgaagatacttcttagaaagggtttgaaggttagaagagacaatcaaatagcttggcttacggtatagtaaaagatctgtgttatacagacagagagattgaagtggaaatacaacagatctttcacgagagtagaaaaatttcatggtctttacatgagagtagaaaaagtattgagtcgataatagtatatgattagcttcgaccaccatacctacagagaaaactgaaatgccaattataacgaagacttgaaatataattaaacaacatagggtttgttcattgctttttctcgtagcaaacttagtctattcttttggtagcctaataaacagttatctcaggccttcttgcatgatttgtcttgcagaaaatagtattactgttaagcaaaatttgcgtgtattatataaacagcaacattatgatgtatattatatgcagtggttcatataattaactttatcgtgatataggggaatcattattgtgaagctgcgtcgtggccagg

SEQ ID NO: 103539 - DNA, 556 bp, Mimulus guttatus
  Intron number 1 from transcript mgv1a007473m (locus mgv1a0 07473m.g) derived from phytozome v7.0 (chr-ID scaffold_1; pos 2259961 to 2260516)
agagtgagtggtatagagatttcaacttggtggaggtaaggttcgtttctacttctccttcccctctgttttcaaaagtatgaagctgctgttcatttcagaagagtacaacttattaaagatggtgtacaactatttgatacggattgagtgctactcaaatgtaatcgttccttttgttttctcatcagaatgaaactgaaaggaagaaacaaatcatttaggctcaaatgtaatttgaaaagatgatctaattgcagaagaaactaacattcaatctaacgttaaactttgaacatatatatttttttcttctattttctgagaaaacgatggggcgagcgcggttcaatggtacaaagtcggaagttgttgtaaaagaacaaagatcaagaaagcattacaagtgattcggaggatccaatccgattcgttttggttttaatttttcgtattgtttatgcaaaactcagaaaagagtgatgatttctctatggtttatcttgaattcgaacatgcaggtagttaagttattacctgtgaggtcgctttcgtg

SEQ ID NO: 103540 - DNA, 608 bp, Mimulus guttatus
  Intron number 2 from transcript mgv1a011872m (locus mgv1a0 11872m.g) derived from phytozome v7.0 (chr-ID scaffold_27; pos 1287771 to 1288378)
cacattgtaatgtttcttcctatttttctttatattcggtttaatcttattgcatcaaatcggtacctaggttgagcttgtcatgcatggttagcctagtgtggtttgcgtctctcgttttgcgggttccttcgttaccaaagaaaaaaaaagaattattgcatcgatttttatttttactttcagaaatgattatttcttagttctgaatagctcaaaatgttacaggatttacgtttgttgtttttgtttgattatgggaagcattgctgctgcggcacaagatatagaaattgtgacattgtttagattattaaataataaatatatggaaaaaactaagaataatattacttagctgtttgttacaacaatgtatttattataggaattgatgaaaaagaatagcgagctagaactattgagtattgcatttgctgcatatcgagattcacttgtttggattcgatttcgtaactgttaattgcttaatttcaatgatttctcgtcttcccctttaaatttagaacaatgccaattacgagagatactctgattaatgaatctgtttaactcgtttcaggttcgaccagtagtagaaactggat

SEQ ID NO: 103541 - DNA, 779 bp, Mimulus guttatus
  Intron number 1 from transcript mgv1a007083m (locus mgv1a0 07083m.g) derived from phytozome v7.0 (chr-ID scaffold_11; pos 2548276 to 2549054)
ctgcagaagggacagtccgccgattgtggtctgttgatggaaatcgggtcggatttggatactccggtggagagtggggataacagtgccggatccgagggtaaattgggggctgagtcgttaattttggaaacgagttcctcattcggttcgattagttcgtcgttttcgatgtctaattcgtcgcccatgcccattggcattgtcaatttcgacgagaagggattgaatttgaattcgaattcgaatttgcttgacgtaaagatcaaggtgccatcatcagcctctgttgaaaggtgtgcaattgttttaaaaaaaaaatacctattcccccaattccaattgcaatttgtagttaataacaagcacaatttgatagccaaggtgatttttattatgcatactttctttcaagaagatttcttactgtggacttttttgatgttgagatcagagaaatctggatatttcgttgtggttgattttttctacacttatggcataacacaattgatataggatcacttaagttacgaggtagaagtaaattcaacatgatcatattttacaaaattttagtcatctgaaaaattatttttatctttgaatttgctggagagttgggagtatccaatgtaattcacttcactaggatagtgtagtggactaattaatcttctctgacaccacatcattgcaaaaaacgagaagctgatcattgagctggttgtttattgttcgcagtgaaattagtgtcggaactgtagccgctgcaccta

SEQ ID NO: 103542 - DNA, 477 bp, Mimulus guttatus
  Intron number 1 from transcript mgv1a008795m (locus mgv1a0 08795m.g) derived from phytozome v7.0 (chr-ID scaffold_178 ; pos 6230 to 6706 reverse strand)
gatcggggtgctctcgtcgagttctacgctccgtaccattttttttttaatttttaatttttaatttttaatttttttgaagatcgaagtttgttttttgaatgggtttttaagtttgttggttttctcattttctgcttgttgtttacctttggaatttttgatgggttggagatttttgtgcttgattttgcttttgatttagtgtgtagtagatctgtgaattttgagcacgaatttattgatctatagatctgattcagcgattatttatttattcgtaagagttcattttattcgaatcaaaatcgattagaaaattgtaatctaataattagtgaatattcatttgaagttgaatctggagtctgtgagttagtcatttctttacgattgagttgttttaaaaaaattaatgatgtaaataatgttccttcttgtacaggtgtgggcactgtaaaaagcttgctcccgaat

SEQ ID NO: 103543 - DNA, 702 bp, Mimulus guttatus
  Intron number 1 from transcript mgv1a004390m (locus mgv1a0 04390m.g) derived from phytozome v7.0 (chr-ID scaffold_251 ; pos 241283 to 241984)
acgtaagtataaagttcttcaataacttcttctgtgggttatatttaggttgatttgatgaattttgatggtctggatacatcttcatgctgtaacagttatattggtctgtccatctattatgatctacataacagttctaaattgtaattacgcaatccttagagattggcagtttgaggactccttatagccagtttcggaacttatggccaaagttcttccttcatctttgaacttgatttgtcagaccagatctccggtattcgtttacacgtgataaacaaagaaaaccttacttgataatgtcctttcttgactaacaagatggatggttgtacataaataggtacaaggttcaatttgaaatacataagcctgtttgatttgtctgggcaaatgataggagcaagctttttagacaagtcagtacctattatagggtgaacacatatcggggaggctacagtcatcacggcctgaataagcttttagttctcatttttattcctatgcaagtatcttattggatggggattttttaaagagactgtttagaggtgcactttttggttaacctggaaaaacttgaaaactaagtaaagatggatgaatcttttacattattctattcgcttgttatgttttataatgttttcccttcatgcctaaattcaactgctaattttcagaactgcaaca

SEQ ID NO: 103544 - DNA, 580 bp, Mimulus guttatus
  Intron number 2 from transcript mgv1a011121m (locus mgv1a0 11121m.g) derived from phytozome v7.0 (chr-ID scaffold_125 ; pos 42637 to 43216)
tgggctgttgtggattttcctttctctgtcataaggtaaggaaacccgattcaattttcgttgaatttatattgaaaatctattgtttgattatgtgtaatttcttctgctgttatacttccacctgtagaatattcatcttcattcacaaaattgcaaattgtatgccgtaacccgaaaatctgcacgagtttgatgtagtgttttgaccagcctttttaacgaaccaattgagatcacgcttctaccgaaaaatattggatgggcttaagctgtacatggataatcactaccgaatttagtttttagccgtctgaataaattggtggacaacgatgtatataaaatacatctcttataattatgcgttgttctatgagaattttcttcgtcgtttcattattgttcctcggtcattgttagttttacttcaataagtttatgcctgtaatgtttcatttacagagatttatcagattttttttgttatatgtattgtatctatataattttgttatgtttcgaaagtttggttttttaagtgggggaagagctaacactgtttccttctctctttgag

SEQ ID NO: 103545 - DNA, 921 bp, Mimulus guttatus
  Intron number 1 from transcript mgv1a012314m (locus mgv1a0 12314m.g) derived from phytozome v7.0 (chr-ID scaffold_8; pos 2687194 to 2688114 reverse strand)
gagaaggtatagtttgtatcgcttttggattttcctgattaataatttattagttgatgtttcactttattttttcgctgcgtctgttcttcgttgtgttttgtttcttttatttggagtagtttgtgttgaatttgaagtttttctgattggttcgttgtaattcagtatctattaaatacaattaggtttctaaatgagttcaaattaggtcattttgttcaatcggagtagaatttaggggttattagatgagtgtgtcagggtgaacgttcataattgggaagtgatataaaatggacttcgtaattgggaagtgatataaaatggacgaaaagggattggatttttgcacccgattctttcgtgcagaaagtagggatgtcgaaaagaaaaaacgtaacgaataaaatttctagggttcgagagaagaaatggaaggataccctctcaaccttgaaccttctagaaacagatgttatgagaaaccactttgaattctgataaaatttaatgacatcactaattcattaggctaacattgggcgcatcttggaatcgaaaacctcatgctattgtagtaaagataagaacataattttaatatataacactggattgggttgtaacaaagggggtccgtctacaacgttaatgcatattgtttgtgagaatctttccaatgaaatctttggtgggtctgattgctgctgatcctttcgttttaatatcttagtatctaaataaattacctgtttacattcataaaatacctattgtgcttttcttggtgtctttgtttcctttcaatttaactcaaaagtatttcatatgaatgtatgacgaattgtaaagtacattttatcgacacccgaagactaagtttgacatttgaacttttttttttggttgacagacgga

SEQ ID NO: 103546 - DNA, 699 bp, Mimulus guttatus
  Intron number 1 from transcript mgv1a004496m (locus mgv1a0 04496m.g) derived from phytozome v7.0 (chr-ID scaffold_379 ; pos 80840 to 81538 reverse strand)
tcttgttactcagtcagttgtacccacattcaaaggtgagtcttttcttctttctatttctttctgttgtttctttttttttttttttctttttaattgtccgaaatctttagaggttttgttcaagttgtgggatcaaagcaaggttcttgttttattttattttttaatgtttaaaccctaaatttaaccccatttgctacacacgcaactataagtttgttaatatcacatcttttgaacacattcttgattctttgtctaaggaatttgagtttgtctgagataaggatgcttaaatttgtcgtctttttttctagaaaagtaattgaatgtgttatccctgttcaaaccctaaatcgaaccgcaatttgttaacgtcaactcattcttgatccttgttttaggaattggagttgtctggaaattttcagattaaggatgattatatttgtttcatcttttccggtgaaattgacgacgaaatgtgcgatcccttcccgacccgtaaattttaatcgcatttggttacacatgcacaactataatcttgttaaacgtcacatgcttcgaacgcattcttgattcttgttttaaggatttttttttttttctgtgttggtcgaactacaaatctcatttttcgttcatttgacctgtgtcctttaggcgactaatttaaccaaaggcgaaaataag

SEQ ID NO: 103547 - DNA, 872 bp, Mimulus guttatus
  Intron number 1 from transcript mgv1a024515m (locus mgv1a0 24515m.g) derived from phytozome v7.0 (chr-ID scaffold_106 ; pos 758568 to 759439 reverse strand)
agcaaaggtatttatatttatatttatatatacatatataattattttttgttgtcacgattttatttttttcgggcactatattgaattagcgacaaataagtattgtcgataatcgaaatattatttcctatggtgtttgctcatttgtttctaccaattgatatctttccacaaagaattgaaattttcgatttcataatatgtatcttcaatttttggaaacttttataaaattttcaaattgtagcggattaaatccagggatcgtagacattgcctcgtttgcatcaccgatagttttgaatttcccatttatcaaaaaattaaattcattatcattattaaaattaattaaaagttcttgcatttgcctaactggcactaattaaggtttccatttgtggtgcccaagtagaaggaaatttataaacaagttatcttaattaaataattattagaagaaaaatatattttaccacatgaaatctaatcttactaattttagatcatagcacatggccttgcacccggctacctcattatagaaattccaccatttgtatttatttatttatttgtttatttatttatttattattatgacgacaaattcgtcacgtgatcgagttcgtcgataacgggttatatactagattcattgaacttgatctttctcatgcatcttaaattaggcttttttctttaaactatatatatatatatatatatatatatatatatatatatatatatatataatataatataatataatgatcaaaacaagttgatgttcattaatgatgtaataataaataattatatattttcctggtatttacttcaattttcttgatgttaacaggcta

SEQ ID NO: 103548 - DNA, 879 bp, Mimulus guttatus
  Intron number 1 from transcript mgv1a017979m (locus mgv1a0 17979m.g) derived from phytozome v7.0 (chr-ID scaffold_4; pos 1109446 to 1110324 reverse strand)
cgtagttagtgttacataacaaatgagaatataaggttggttactcattcaattcaaacacaattaagatcagatagcaagtgcgcagtagagaaaaatgcttggaattaattaattgcatgattgatatataagttgtgaagagagtatatatatatgtatgtatatatgtatgtatacttaggttaatagaattaatgtggcaaatattctccatttaatctgtttggtaccagacaatcggtaatgtatgtcggcggcgactcttgtttgatcccaatctatacatatatatattatatatatcctccacagtttaactctctgtgtatgtatctgagtgtgtgtgtgtgtgtgtgtgtaaaaaccaacaaattaatccttttatcaaccccatcacaccttataagtttcacacacaaccctaaagttaaatttatttttctacttattattattaatattaatattaatatgtggtgtgtagcgctctctctctctctctctctctgtatatatatacatttacagatttactacacattgaggagggttgaggggttactgttagaagctaagggattctactgtgaactctctttaatttcttctctcttgtttttgccattgctctatcaatccatcatcacatcatcatcatcatcatatacatatatatacacaaattatatactctctctctctctctctctctctctctctctctctaggagtatgtatattatgcattaatgtaaatagcttttggagggtccattttgctgcttcttcattggtgttttgcatttcatttatttaattaaataattaaataattaataaataatatgttaggctcatttgggggttcttcctctc

SEQ ID NO: 103549 - DNA, 715 bp, Mimulus guttatus
  Intron number 1 from transcript mgv1a007169m (locus mgv1a0 07169m.g) derived from phytozome v7.0 (chr-ID scaffold_13; pos 2137128 to 2137842)
tggaggtggcagcctcatcactgtgacctacctaggtctgtctaattctctctctctctctctctctctctctctctctctctctctctctctctctctcaattcaaattttatattatatgagtttattgcatttgtacccctatgttatatcaaaatgctaaaagaaccccatattatttgtaggggtaatttaatttgttaaagaaaaataacttgaggagtttttgaaaaattaaaccctcattaactatatggtaaattacggccacccctgagataaagtcaaattacgaaaaaacacttcttgcttgggtaattacaatcaccaatcaactatgaatcttcttacacgtcaacccctgaggtaaggtcaaattacgaaaagaccctcatgtttgggtaattacaactatccctcaactatgaatgttctacacgcccaccatcctgaggtaaggtcaaattacaaaaagacccctcctgtttgagtatttataaccacccatcaactatgaatatatcttcttacacatccaccattgtggtgtcaaatttagtggaatgttctagattatgtagaatattcactagtttgtacccgtttttgtgaaaaaatgcagtttgtaatgcagcacaatctgatatatacaagccaaacaacatatttgataatatttttttttttttttttatttatgttaataaaggttca

SEQ ID NO: 103550 - DNA, 601 bp, Mimulus guttatus
  Intron number 1 from transcript mgv1a009486m (locus mgv1a0 09471m.g) derived from phytozome v7.0 (chr-ID scaffold_64; pos 330911 to 331511 reverse strand)
agtagctcctctctttcattcaatccctacagaaggttagactcacaatttgctttttctattttgtcgatcgattcttcagtttgtgaaacgaacttgttttgattctgtatttacctttaatttctgtgtatttacttctcgaattttttccagtatgtgcacttctctctgtttatttaccttttctctgtatctgcttttctattttctcgatttcccagtttgtgcgcttttttgtttgtatttgcttttctattttctcgattttccgattcgatcgtttgtggttttaatttgtctactcttttccagtatgttcatagttatgttattctgatcatacttttgcgcagtttatgtagaaaactatgattttcctttttatttggataaaagggggttagggtttgttcataagtacatataaagttaggtttacagtttacgtgtttgatcggtgcctgtgcgactgagaagtgacaataattctctggtattgaggattttgtttatggatagagatttatttatcccatattagaaataaattaatattttctttttttggttgttgtcagatatttaagttttttgcaaa

SEQ ID NO: 103551 - DNA, 1018 bp, Mimulus guttatus
  Intron number 2 from transcript mgv1a004116m (locus mgv1a0 04116m.g) derived from phytozome v7.0 (chr-ID scaffold_3; pos 2650150 to 2651167 reverse strand)
ctgcatccatttggccttgtgaactgcggaaacaggtgagtcagatgttttattccaattaatctatgttacatcactctgttttggtatgctgtcctcattgagctattaggtgaactttttatatcacatgtgttggtgtgtatgtgggcacacgcaggggcggcccaggacactttgaagggggtaggggctgcggcggatatatatatgtatataagaaatttaaaaataagtaaatatttatagattttatttaaaacagtagtagttttaactatgatattttatattgtgaagataatatgaaaaaatatataaatttacgtaaggatatggagaaaaataaaaaaaattgaaagggccaaaactcatgtttacaaaacatctgggggtcaacacaaatttatcataaatatatataaaaattacctaattgttttttttaatcttgggggtggggtggtggagtgggggcgcccatactgccttagtgtaggtccgtccacgggcacacgaatctctgctcacggaaattggttgtttgatctagttattttcgtgttctatagtttttgcttctttttcatagttatggggtttcaaaacatcaaactatagcttttctgctttctatttctggagtatgacaccttacattcatgtagcagtttagcgtgtactatgggttctacctgtaatggatgttggtttcttttactgtaaagagtttgctagaagtcagacgaccctttatgtattaatttcccctttcatttattatatttaatgaagatttttctagagctagagaaaacaggtaactatattagggcagaaatggacgaaaatggtcatttccttttgtattcagaaatattgtttcatgctacaagagattgcagcttctatttaagtctacatctttccaactgtatacgtgccagcagatgttattctttattttcttcatgcatatagtgcaacttattttattcttcttgcagctgttacgcaa

SEQ ID NO: 103552 - DNA, 902 bp, Mimulus guttatus
  Intron number 2 from transcript mgv1a017934m (locus mgv1a0 17934m.g) derived from phytozome v7.0 (chr-ID scaffold_3; pos 1405459 to 1406360)
atttggtgtggttgggacactcaagctgctggcaggcatgtttttttttttttaaacttcgttgttgtgtatttgcctctcttttcatatatatatatggtgattatatatgtatggatcattattcttttattcgagttttttggccaatggtgaaatttcggttgtatacgaggtgaatcgatcatccccgtcccgtatccgtatgtttctttgaaactcgtctttgatcttttcgttgattacattgattagaccaaattcgttagttagtgattgatattggacttaagccagtggcgcaaccagcatcggacaaatgggggccatggcccctcctcatttctcaagttatgtgtataataggtttaacccccggaaatttttaatgtgttcggcccctccgctagtgtaacttaattttatattctatgaagttgaaaagagtatcattcctcctatttgtgattatctcataatgcgattttcatctctgaccattccatcctccaggaaatggatactgaatagtacaacattgtatacgagagggcagtaattttacatttttattacaattgagtaatcacctcgtcgtcggttgttcttttccatgtttacagggagtctaaaatgtgtaacaagataattctttaaaccccaatggtattgctatattgaaattagagagggagataaatcgaacctcattctagaggttgtaacgtagcgattattggtaaatgttcgattttgttattatatggagtgtgtcactagatattaatttagaagaattcaagaggtttctaatatttgaaatctttagaattcatgtttcccatgatcttgatgttcatgtcttttttagggtcgtatttgttggcgattaccggacgtga

SEQ ID NO: 103553 - DNA, 762 bp, Mimulus guttatus
  Intron number 2 from transcript mgv1a002738m (locus mgv1a0 02738m.g) derived from phytozome v7.0 (chr-ID scaffold_1; pos 3597049 to 3597810 reverse strand)
gttctttctggcttcacgagcttcggcgattagaggttagccagttgtttaggttttgttgttgattatgtgatgtgttaatcattattactttaatgttgttcgctgaagtattgatttacaggtgtttaattggatctctattattattgtctgtttacttcttctttttctagtttgatttactagcaattaaatgatccccatgtacttgcttccagctgaggttattctcattcgagaagtcaaaggaatcaaaatgaaaccaaactacacattgttcaaaactagtttgaatttcttactgagcttgctattttgtttgatctgctatggagaatgatgcattagtcgcaagcaatatttaattaatgggaattgggaatgtgagttagcgcaactgtctctagatatatcatctagttgttaactttactgagctgcaattcagaagcaactgatgagaaaatgtttgtgtggtttcactaattttcgacctcgatcaagattttagatgctgcctcatattgagtagcttaattcactttttcagtccttttctatatgtttcgtgcttttcgaatcgagatgactgtacctgaccagctatgggtttataccatgcatttgcaactgatacatgctgagaaaaattgattatcattgtactggtgtttgttattattgtatgtgcactcgattatgccttgtcaattgcggtttttagattagggcaccggtgattgtggctggttgcaagct

SEQ ID NO: 103554 - DNA, 902 bp, Mimulus guttatus
  Intron number 1 from transcript mgv1a017036m (locus mgv1a0 17036m.g) derived from phytozome v7.0 (chr-ID scaffold_105 ; pos 793071 to 793972)
tcggaccgacttggaaacctctattccaaagccatgtgagttgttaatgaatatgatcgatcctcttttctaggtatatatatatatatatatatatatatatatatatatatatatatatatatatatatatatatatatatatctgtgtgtgtgtgtgtgtgtgtgtgtgtgtgtgtgtgtgtgttttgggattagggtttcagaactggtgttttttttcttctgaattatggatcttttcactgttgaatttgttcttcgggttttggagagatttgttggatttttagcttaattaattaaagctatggttcttgattagggaaattagggagattggggtagaatttccactcaacagtaggggtgcaaattggaacaatttttttgattatgctgattttgatccgaaagttgtttcggattctggaacaatatttttaaattcgtttccgaaactccagacttaatgatttttctgaaattatttgtatcggaagtggaatatatatgagatttcattgtagtttcgaaaataattccaaaaattccatgttgttttcagaatattacaattaaaatacaaattattatgtattttatgtttaaggtgagcgaaaattggaaaattccgaattatgcagatcaagtttttgcctccgaatttttgaaatcctgattttcgattttttccaaatcggaacggaattgaaactaataggtttttttttttttggcatagttacagttgggtagatataataaccattggatcatacatcatcttagatatggcaaggggaatagtcacgggaattaatcggaattaacgggagctttgcatggcatacacgaattcgtacttaactttttttttttttgtttgttggattttagat

SEQ ID NO: 103555 - DNA, 186 bp, Mimulus guttatus
  Intron number 1 from transcript mgv1a014176m (locus mgv1a0 14176m.g) derived from phytozome v7.0 (chr-ID scaffold_2; pos 980611 to 980796)
attcgacctccactactctcagtttagcttagaaagtaaggatcttcaattcttgatctaattaagcttctttgtgtttatagaattcaaaagaaattagttcaatgaacccataaaatagaaaagctaattaagttagtaatttggttgtatatatccacaggtttggacagagaggagaagata

SEQ ID NO: 103556 - DNA, 819 bp, Mimulus guttatus
  Intron number 1 from transcript mgv1a003128m (locus mgv1a0 03128m.g) derived from phytozome v7.0 (chr-ID scaffold_7; pos 1427552 to 1428370)
cttgtgctcctctcagcctcgccttttctcttctggtaatctctttttttttgggcatttatttgattgcgttattgagctgtaaaatcataatcctgaattgggaattattggactcatgatcacttactgttcgacgaaatgtcttgatgatcaagaaaatattttgttttgtgggatttattgctttggtagtaggagttcaaattgcatttgtggttgataagagtaattgaattgattttccatttcgggtcgacaattggaaattgagctggctttttggttctacggctttaatggttgaaaattcttgatctcgtagtaattaaggacttgagagacgaaagagttgtgtgtgggcgaagtgatttgttcttgagctcgattatggactcgtgacaaaacaatctcaaacttgtttatcttagctcagctagcttttgttgaattccgtcgaaaataaaatccgtacttcgtattattatgctcaaccattttaattcagtgtgtagttaaagtcggcttgatagtgattaagttcagcttgatcttattccatttagctcttctttgattgtgcttgagcacggatttagggtattccgttaagtttgtcaatgaccacttttggagccgtaactcttttgacaagattccttgattttgaaatctcattattttgctatcatatatgaatctcgtgcatttgtttggttcggtcgtttaggagttctgttatgtttgagacatttcttgtggtgtttgactgtcttttcttctctccggtttacagatacacgtaataatagtatactt

SEQ ID NO: 103557 - DNA, 683 bp, Mimulus guttatus
  Intron number 1 from transcript mgv1a011025m (locus mgv1a0 11025m.g) derived from phytozome v7.0 (chr-ID scaffold_4; pos 2257532 to 2258214)
agtttacctcgtcagaattccgatcactcgctctggtacgttcttcatctccccctttgatcagattgcttgagttttgtgacttatatttcatggtattattgatttgctgtttccgatcttagttttgctgtctgaattgttttgtattttttttaagaataagctatgaatctgcacaattttgggccagaaatccgcaattatttaattaattaaacaactttattatgattttggttttataattagctgttttatcaggtaatgatgtgttaatcttttattttgcttatagtcagcacggatgtttggatcactttttttatttcctttcttctaaaccctcaatttatttatttattcatcttataattcttatagaatattgaaaagtggaagggaaattgatgatttcgataacgttcctcgagattttgagaaattgaaatagttctgaacccgattctggtattttgatggaggaaggtctttaggaaatgtaataccaatttttcggtgtagcagcatttcccgctatcgatgttgaactggtgccgtttattttctttaccggattaatagcttatgctgcttttggatttatgtttaggagaactaatcttctttcataaattgtctcgtaataataataaactcgtttggtttctgaatgcagagca

SEQ ID NO: 103558 - DNA, 937 bp, Mimulus guttatus
  Intron number 1 from transcript mgv1a021342m (locus mgv1a0 21342m.g) derived from phytozome v7.0 (chr-ID scaffold_212 ; pos 140101 to 141037)
aaagacggcggcgatattcgtatctgtgataaccagtgcgttttctattttctctctcaattttttttttccttcttatttatgtgttaattctccaattgctataattctgtaatccaattttagttttcattttttgattttatttatttatttataattatttcagtctcaagttggatagaaggtttatagtttggggatatcacttagttaaaaggaatatatacagagtaacagaggcttaattatcccaatactctgcctaaaatcataagccacatgcagtgatggaacatatgctattatcatgctttagagtgattcattgacacgagaaattattttgtcgtttcgtctatttcttgtacatatatcaagcgttatcgtacttagctggaaccaattatgtattcgagtttctttagtgctgtggaaaacaaaacggaagtgctagtggaggcaaatcggagaacaacattatgtgatcctagttagaatcttcgggcaagggcattttcttcttttttctttgattatctatgtaatttttctttaccgaagacccaatttatcttattttttcgttgatcggtgaagtaaaaataaacagattaccaagcttgtgtacttcacgctgtaaagaaatgtttaaaataaaacattgcgatagcttttcttgagattcattaagttggatcggaagtatctctttatgattttgcttgtacattgatgtttatgttttctgtggatatgtattaagtgattctttgcagtgtctgtaagaaatccgtttctccattgacatatatgaaagtgatataagtgctcactgaattgtcgttttggcaattttccccccatgctactaataatcgtgataaattgaaaatgattagcatctctaaataatgcacaattctgtttacaggca

SEQ ID NO: 103559 - DNA, 816 bp, Mimulus guttatus
  Intron number 1 from transcript mgv1a009543m (locus mgv1a0 09543m.g) derived from phytozome v7.0 (chr-ID scaffold_2; pos 3811064 to 3811879)
ccctaggctagggttttacaacctctgaatcgaaggtaacattgtaactaatttcaccatcgtatactccagtagagtatcttctgctttgtgatttccatgatgccgattttggatttgtcttaagttcgatttagattggtcttattttcacgttttgctatgctttttcaatagctggaagctgattttatgatacggttgttctggagttttgtctgggttggggttttatccggatttagttttttatattttgatttcggtgtttatttttctttctaagttgttgaagtggattttgggatatttgacttgaatcagttgcttatgacgttttgttggaatgttaccttttcagatcttcgattaagagtcgaaacagtaaaagtcgatgaaaaaccaattattgaatgttatatagtaaaccaggactttttccatgggaagttatgttgggctagttgaagtaggctcttgaagaaaagttcttcggttgacatgtattctgaaggttgtagtgtaaagtagctatacacatgcaaatcgctatatgcctatacgtattgatacatatagaatttactttgctgtcaattggattatgaaaatctatatgcatcaatttcgtttgctgcttaccgttgagtgtattataaactctgtgactagacattaccttcgaaattgaaaaaaaaatgttactgaatgagtatggtttttacagagtttatatatcatgtttgagcttgatggaatcctttgttctatatgcatgcagggttcaagttggcgaagatcttctaatccaatatc

SEQ ID NO: 103560 - DNA, 866 bp, Mimulus guttatus
  Intron number 1 from transcript mgv1a019837m (locus mgv1a0 19837m.g) derived from phytozome v7.0 (chr-ID scaffold_45; pos 858236 to 859101)
ttcaaacgtatgtagcacggaaatttcaacttcttagcgtttccgcatttctgcggaaacgttttgtgtcggaacctcgaagacacctgccggacactatatggggggcactttgcaatttctaaaaagttagaaacatgtttaaatatcaaattttcgaatatttttgttgtttctcaaattatttacatgatttaatgatcaattgcaagttaatagttgatagtaaaatttatttgaatatgtttgtataaaattataccaaaataatttattgataaataaaaacttatatatgtttatatagaatatttataaaaacaaccatatatacttttaatagttacatgattctcacaagtttatgtatcctcattttcagaacattaaattttcccgtctcctcgtgttgccgtttccgtgtccgtgctacataggttctaactgaaatataaaaagcaaaaaatggtatgtcacaatccaccgaaaatctctcaaaaatctttaatttcacattttctatggggaaacagtgaattaaagatgcaaaatctttacagtcagtaaactacttcttgtcacaaaatcaggaaatatttaccaatagttgcaataaaattagtttcacaagcaaacacaaaattgtcttagaaagaaccaccaattaaattaagtgaactttaggatgaattattgaattgatcaaaatgaaaaagtgaaattaaagtgaattaagattttgagtcatttttagtttgattgtctttgatttggtatgtaattttatagtggcatggggaatagggaatgggcattttaccctctaaaacacgtcttgcctttaaatgttcatttacacaattaga

SEQ ID NO: 103561 - DNA, 151 bp, Mimulus guttatus
  Intron number 3 from transcript mgv1a009105m (locus mgv1a0 09105m.g) derived from phytozome v7.0 (chr-ID scaffold_51; pos 182320 to 182470)
gttcacagcttaagaaggaggaagagtgttcacaggtaagaatttgatttagcatatatcaccatagacgagtgttctgtttttttcttcttaatttcgttttccattcattaacattttctttcattattgtctatcagaattccaattg

SEQ ID NO: 103562 - DNA, 972 bp, Mimulus guttatus
  Intron number 4 from transcript mgv1a021122m (locus mgv1a0 21122m.g) derived from phytozome v7.0 (chr-ID scaffold_232 ; pos 315017 to 315988 reverse strand)
gagacgtagacctcatcaagaaacgaaagctagacactaataataatcatacaccacttgcggaggaggcggaggaggagaaggaggaagactgctcatcaacattgcctccatcttgctccaagtccattatttcagaacacatcaaaaaatatctcaaatctaaaactcgggggaataataaacctacgtgacaatgtcaatgaataatattacttgttcaattcatcaactatatgccaaattacctccatttggaattcacttaagaacattatgtattttgaaatataactccaactttgaacttcttgtttatctaatgttaaaattatctgagtctcacaatctcctttttttttcttgtttattcattgcatgcagagtgattggtatatacatttgttatacttttagagtttctaaatttgtgttgataagatgttgggtacttgtgtgtatataataacaaatcacagtagaaaaacatggtgacattaatcaaataaaatttaaagtaagaaaaatatcaccataacgactccaacacatggaatcgtttttccagtagctttcactacaagaaagttcgcatttggctacaacaaatttcgttgtgcaaagtatataatttcgttgataattccattcgcaacgaaaataagtcgttgctagcttcgttgtcttttatttgttacggaaagttcggggcaacgaattaaaagttgttgccaatacatttagtttgcgcaacgaattcatgtcgttggcaaatatttttcgttgcctatacatttagaatgcacaatgaatatattttgttggcaattatatatcgttgccaatgtattatctatacacaacgaatttgttttcgtcaccaatagtatacacaacgaatttattttcgttgccaacgaatttatttcattgcaaaactatagtccggatttttatcgaagtcggacccac

SEQ ID NO: 103563 - DNA, 774 bp, Mimulus guttatus
  Intron number 3 from transcript mgv1a016271m (locus mgv1a0 16271m.g) derived from phytozome v7.0 (chr-ID scaffold_27; pos 1944362 to 1945135)
aggaagtacaaccaagataagaccatctgccgcaagtatgtcaataatttcttcttgtacatattcattactctcactagataagttttgatcttaaactagcaattagagttcaaatccataattacttaatctgtatgatctgtgctatgaaatgttattgacttgtgagaattagttaaaactgtgtttgtactattatttcattttgtttgctttttctttttagatcatcttttattttgcttctttgacctcaagttcgagagtagcaaaattctcatatgttaatttagatagtgtaaaaaacaagtttagacagattctatgatggagtcttgtgtagaataataccttgtggtctttatctgaatggattggttttaggaaccaaagatgagcaatcccaatcttcagtacataatttagagattttcttatgtgcattcaaaatctttaaattcaattaatagtaagatagattggttagatttggattcagaaagctgacttcacttccctttcagtagtaatgtttaattcttacacgtattacacgaaacataaaaacatgtaacattttaacttagaattgacaatgtggggtcaatggtatattttctagatgactgataagagtttatcttagatgttttgaattcaaatctgttgatatgagttatgaaatcaaatctattggtacgtgctgtgaatgatattgaggtccgtacacttggatatgctgcttaaaagctttattacaaattatttcag

SEQ ID NO: 103564 - DNA, 642 bp, Mimulus guttatus
  Intron number 1 from transcript mgv1a022803m (locus mgv1a0 22803m.g) derived from phytozome v7.0 (chr-ID scaffold_188 ; pos 351581 to 352222 reverse strand)
actgtgatcttcctaggtttgaagatcattacctaaatctgttaattcttgttttttttttttatggggattaagaattaattgtgattatctatgtgatatatataaattcttgatcatatctttgcttgcatttaatatggtgactttgcttaattaagtagtggttttgggtgttgtcttaattatatggccatgttgactttctttaattgcctatcctagataatgaaactagacatttgtgtcgaatgttatcttcttagatagagtcccgatgaagtaaacctgtccgaaaaattaaatgcaatggatcacctttcactttgcagttttagttaagttggaatagccgatgtaagatgtatacatttagattgaatggagtactagaatctttgatcattttgcttcatgttaattttagtgtatcgtgaaatttctaagtcaaatgtaatttataaagagacaatttcccggatgaattcgtgagtacggaattcggacaacaacgcatgatctaacttgtggttgaagtctctctaatttcaagaaatcgcagtgaataacattcttgatcatgttagtcttgctggatttaatttatttatttttgagcctgtgtgtgtttgtgtaggttta

SEQ ID NO: 103565 - DNA, 128 bp, Mimulus guttatus
  Intron number 1 from transcript mgv1a008885m (locus mgv1a0 08896m.g) derived from phytozome v7.0 (chr-ID scaffold_8; pos 1962881 to 1963008)
tgtttgtaatatttcttatgctttttttttcattttaatttgagtttattttggtgaataattaatgatttttgcatttttttttcttcgtaggaagtgattcgataatcggtggagtcaaggctgaa

SEQ ID NO: 103566 - DNA, 886 bp, Mimulus guttatus
  Intron number 1 from transcript mgv1a004576m (locus mgv1a0 04576m.g) derived from phytozome v7.0 (chr-ID scaffold_68; pos 557025 to 557910)
acattgacgacgacgctgtcaaagctataatccttgtaagtctactagtacgagtttatcgcgttattacatctttgatatatcgattgaattccgaaaaaactcttcttattattcatattagcaaaaaaaatctataatattcttggagtactattgaagatgagagaaagtaatatggtaaaagaaacacgtgatgtactttagttatgtggtctttctaatttgatcttaattattttatcgttaaggaaaatatcctatatgctcgaagaacgacacgtaatgtactttagttatgtggtcctaatttgatcttatctattttattgttagaggaaaaattatcctctattgcctgtgtatatttaataagtagcccctcacatttttttccgatttcggataaacaacataaaatttccatgcattaagtaggtgtttgtctcactctcaaaaaaaaaaaaaaaaaaaaaagtaggtgtttgtcttgaaaaattcaaaaagggataacgccctttgaaatattgttttggtcgcactttgcccctaaaactaatttttagcgggcatcgtgcaaaaaaaataacattttaaaggggtaatgtgcaaaaaaataatatttttaagggccaattttcaacaaaaatgatatttaaaggggcaccgttcagcaaaaatactcaatttcagtaaataatccatcaaaattttgctatcgaggcaatatgcaataagaacaacattttgaagggggacacttaattttttttaaatttagaggggagtaaagtgcgaaaatcagaaatttataaggggtgacatgcaatttgcccttattgttattacaggacatatttgttgctggaaccgacacaacatatac

SEQ ID NO: 103567 - DNA, 532 bp, Mimulus guttatus
  Intron number 1 from transcript mgv1a010171m (locus mgv1a0 10171m.g) derived from phytozome v7.0 (chr-ID scaffold_27; pos 49786 to 50317)
aaccgccaattccattccgtttgtcgtatttcgtaatttcttgtcgattaaccccttttttcaaatacgtcgtcgtttgttgattgtttttactctgctatatatgttggcttccattgattttgtttttaggttatgtttattcttggagcaaataaataattaaaatattcatcttaaattgataattattaggcagaactctgttcttttcgacaatttaataatgctcgttcgtcgtatgtttacgcaaccgatttcatcgtttaactgtaactagttcagctagcaccagagtgttgccctttcgttttcggaaactcgcattttacgttacgttacgacaatcgataatgtaagtgtatgtgatagtggatttattcgttcgtatatctttcgatcgttcgtattttgtaataagcccctttgttggtattagttgccattttttttgtaatttttattttgttttcgttttcgaaacaattgttttgcaggaatatcggacagttgtcgcaacagaggagtgacg

SEQ ID NO: 103568 - DNA, 539 bp, Mimulus guttatus
  Intron number 1 from transcript mgv1a017750m (locus mgv1a0 17750m.g) derived from phytozome v7.0 (chr-ID scaffold_13; pos 1053735 to 1054273 reverse strand)
ccggtaagattttgttgttctgatacgcgcaaaaataggcgtagtttattcgtgatttgaaaattgccatgaatttagcaatgcaattcaattatgattgcgacgttgattttaatgttgatttgatgatctgatgcgtgcaaaaatatggtaatatactattagttggtggaacttttccaataaaaagtgatttatgtatagaaaattgcatgattttaggaatgcagttcaattatgattgtggtgttgatttgatggtctggtgtgtgcaaaaatatgttaatatactattagttaagtggaacttttcaataaaagtggttatttatggatatgttgcatgaattcaggaatgcggttttcaattatgattgtggagtcttctatatccttagtgggtagagttattctttatacttcttctctctcaaaactgctttattaaatcatattacttttgattgtctgtatattaattttatatattttttctttatacagtatacttaaaggccttaaacaagtcagtgtcgact

SEQ ID NO: 103569 - DNA, 244 bp, Mimulus guttatus
  Intron number 1 from transcript mgv1a000692m (locus mgv1a0 00692m.g) derived from phytozome v7.0 (chr-ID scaffold_11; pos 1795119 to 1795362 reverse strand)
cgtaaaactaatcaggtttaattaattaatcaattaccttatcttttttttttcttgattttttccattttttactacttttttcttcatcattcaaatattatgaataaaaaaaaaacacaacagtggatctaggaaaaaaacaaaaattgggtgttaagagtatgtgtttgatgattaatatttatatcttgattaatgattgacaggagaaactgagaattgcagtcctcgtttctaaagc

SEQ ID NO: 103570 - DNA, 859 bp, Mimulus guttatus
  Intron number 1 from transcript mgv11b021267m (locus mgv11 b021267m.g) derived from phytozome v7.0 (chr-ID scaffold_1 699; pos 4055 to 4913 reverse strand)
agaaaagtatatgaacaattctttagacaaccgggtcgaagaactaattgagtcgacaggttcaacccggccgtgtttttactatttcctacttggtactccgttcgttccatattatatgttgtttcgggtggttgcgcgtatattaaattattcaataaatatacataaattataccaaaaataacatagtaaatactaaaatatatttgtcattgtttattttttaattaactaatttagaatgctaaggggcaaattgacaattaatgttttataaaattctaaaatgacaaataatttgtggggcgaaaaaaacaaaaaaaaaacacataacattgaacatatggagtaattagttacatataattttaaaaacattatttgataaaaataaataaagcatgtacattcatcataaaaacattaacattaaacatgtacctaaagattctaatgtatttcacttaatcataaaggaagtaaaattaaaaaaattcaacaaaataacatatattatattttagaaaatgaagagaactattgagagataatttgaatatatgtatgtatataaaagttcccaacaacaaatacttacttgaattgaaactattacttacgtaccataaattattaaatttgcaagtaataataaaaataatataaatcagcaatttgaactattcgaccattctctacgtacgcccaattaattttgttcttctttcaatgtttttgcttccctcactttaccaccaccaatgccgatctacgttcttcaccaaaccaaacgcagaagataattttttaattttgcccaatttaatacagaaccgggtcatttgtccggttttgg

SEQ ID NO: 103571 - DNA, 511 bp, Mimulus guttatus
  Intron number 1 from transcript mgv1a003843m (locus mgv1a0 03843m.g) derived from phytozome v7.0 (chr-ID scaffold_89; pos 102748 to 103258)
ggctctggagctcctcaagacctccgctgctgatcgtgagtttccaattttttttttctgtaatttgattcagtcaagtattcaagtttctttttgtctggctgattttctgcgaatttttgttaatcgaaaggtgttgctgtatgctctgatgaagtttaacatgataattatgcaaatttaatttcttattttgtttttctggtttgcaataatttttagttttcaattctggggattaggcaataaggattttggtgctagttgcaagaatttggaaccgattacgtagactagattttcgtttcctaatcttcgtaggtagcagatattattcgctgttggctaatcttttgaatgtatgcgatggtgggaaatttttagatatgtattccttaccaattacttgctcttaattgcacaaaatatcatgaagttgtatgaattgaattaataaatgtatttttttgattcaggttatacaaaggaaactagcagtattgtggttatt

SEQ ID NO: 103572 - DNA, 742 bp, Mimulus guttatus
  Intron number 1 from transcript mgv1a023182m (locus mgv1a0 23182m.g) derived from phytozome v7.0 (chr-ID scaffold_83; pos 724188 to 724929 reverse strand)
acaaactgctcgaggaattgcccgagacaatcaaggtttatgttctacagaattttgctactcaatcatttcgtatttgttattgagtggccagtttgttggaagttcagtggatgtatagtgtgtcctgtttgcttggtacttatctcgatatgtggatatcttgctcgaattttgattaattaattcatattgtagattgtgtgttatggtatttagatatactataaaactgactagttaaaatcattttgaattactgtacgcgacatatgatgcagacaattttatcttgtttggttgtgacttgttcttgcgtttaaggcaatgcccaattcatatgttttgctattagctaatgaatgctgccgatataaacagattgtggtagtcgtattatgaatcaaaagctgccgtttgattgagataactcacagggatgtaggaattggagttctaacttcatatgctcaaagaaggaaattcaatatgttcaaaaggaaaaaaacactaaagttgtagttatgtattaccggataatagattttttgttgtacattcatcttacggagtctttactcttgttatatatcattagtaccgcgttagtatgtttagttttgttttgggagaattgcacttcattgatatagatctggtatcttctttcagttaatatatgctgcaatgaggtatcatatcttgtattttgattttgtttttcaggtagcttttcaagaac

SEQ ID NO: 103573 - DNA, 1039 bp, Mimulus guttatus
  Intron number 1 from transcript mgv1a019888m (locus mgv1a0 19888m.g) derived from phytozome v7.0 (chr-ID scaffold_138 ; pos 560180 to 561218)
atatattatcgccctgcttttagtgttaagtgttggttttttttccaaattatgcattgttgttgtaacatctaacaacaccatttcattcatgtcgaaatgattattaattgaaaacgaaacacaatgttgagattacctgataaaaaacgggagattgtgtattctctgtggtgatggttatgggtggaaggtggaatgaaatttcataattctgttgattccaattcaaatatgagtttggaacaaaaattttcattttgaattctgaatttttttcggatcgtagttggaatatttatgagattttgattttcaatccaattttaattttttaaaatttcaaaaattaaataaaaaaaattgcgtctgatactcgattaatacacatgacaaaacaaaagaaataagttaaaaaaacgaggaaaaaaaattaatttaaaaaaaaataataataataaaaaaacaaaaaataattttcttttaaaaaaagaagaaaaacgaaaatagggatgggagtaattgagcaattttggggattatagagaagaagaaaggagcacgagtttttctcaaataatgaaatatgggttgaaaaacctattaaagaaagatttaaggggtttttatgtctcatatttaaattttttttatgtgtcctttttagttgaaaaaaaatagaccaattcaaaagaagatctaaaaacgcgatgcttgaaaactgaaaagtcaacagcgttttattccatgaaaaaggaaagtcttcattcctcaaaccccactaattaattcatacggcaaaacacaactttgaattgacaaattcacctcatatttatgtgggtataaatagaagctctcattcctctcattctcattctcattctcatatcaatcaacacatacacatacaatatttcatattattaatattttacaatgaaaactccaaattccattctttctattcttatgatcgtatcgattatcctttcgtgtaattcttgcgacgctcaatcgtcccacagtccgcctcaaa

SEQ ID NO: 103574 - DNA, 604 bp, Mimulus guttatus
  Intron number 1 from transcript mgv1a001765m (locus mgv1a0 01765m.g) derived from phytozome v7.0 (chr-ID scaffold_44; pos 607490 to 608093 reverse strand)
gattcccgataccggtagaacgacctttcccgatttcttttctttcctttatcccccgaattttcatacatacatcatatagttcatatatatatatatagttatggaggtttttattgctttgcatgtgagcaatgttcaatttcaattacatgaacactagtattaaatatgatgactttttaagtagttatatctaattctaagacatatatatatatatatatatatatatatatatatatatatatatatatatatatatatatatatatgtatgtttatataaagtaaattcggtgatcgttcgatacatattttacacacagccacatgatatatagctaagaaactaacaaatgagttaagaccacacaacctagctcgttaggcgagtcactacccgactttgattattgaaaataatgtcacagttcaaatcattttttctccaatttgtaacagaatttgattttttttctttttcttttcgagaaaaaaaatatttatacatatttatataacattaatgtgggtgacaagaaaatggaagaattattgaatggttaataaataaataacgtgcaggtgttgggagacattg

SEQ ID NO: 103575 - DNA, 796 bp, Mimulus guttatus
  Intron number 1 from transcript mgv1a003326m (locus mgv1a0 03326m.g) derived from phytozome v7.0 (chr-ID scaffold_3; pos 2063169 to 2063964 reverse strand)
caaacaaggtcggcccatttcataaccctaggtaaataaatattcctttatttcctttcgtttttcttcgaattttcttacggtgtatgattattatgtttcatcgttgcaactcagctcgattactaggcttaattacaaattcggatggttttttgtgtgttgtggatttggttgctttgattattttgttgacggattgagggttcaatttgcatgattcagctaatcggttgtgaaatttgaaaatgatgtagatcaattattgaattttgttttttggacgctgttaagatcattagagagaggggaggtgacttttgaacattgatttatttacatggtggaaagtggtagctgtggtatgatgggtgttttgcctgtttcccttcattcgcatgccgggttttccggaatcctgttccctaagtaaagggaaaattcactcaatccccagctatctacaattggtaaatcccgactttttggagttagagaaggcaaatttgtagtccattagttcttttaggcgtaagtgtagtttatggcatgccacatcattggcagacaatacagatgaatttgagtactatcgaacggttatcttaaacaagtaagatttaagaggttgtttgtcgaagaaccaaaagcattatgaataatgaagtgattattcgttgaatgatattcccattatttttcatcatgtagtcgtttcaatttttgtgatgctcatatctgttatttgttctcatctccagcgaaacataccgttactttgatctcccgttctgtt

SEQ ID NO: 103576 - DNA, 332 bp, Mimulus guttatus
  Intron number 3 from transcript mgv1a010725m (locus mgv1a0 10725m.g) derived from phytozome v7.0 (chr-ID scaffold_15; pos 366444 to 366775)
gtgttgctgttggcaatactcctgtgagtttcttttttcttttttctttttttattttatttatttatttatttatttattaatttttgatgtttttgtaagtactagtttgaatttatttctattgtctgagattcaatttaatttaaatagaattgacattatacataacatgggatttgtgttgttcgaatgatatacactacgcataaacgaagattgggaagtgtatgtgtgtgtgtttttttccttgaattttaagaatttatatatatatatatatatttttatgatcagggagtactaacggaaactacagctgagctggcagc

SEQ ID NO: 103577 - DNA, 782 bp, Mimulus guttatus
  Intron number 1 from transcript mgv1a008745m (locus mgv1a0 08745m.g) derived from phytozome v7.0 (chr-ID scaffold_293 ; pos 69723 to 70504)
cctctggaaatttggctcattttatcaaatgtaagtttcttttgctaatgtgcgccttttttttttggtaaattacggccatcccttgaggtaaggttaactgtatttcggttattttaccgacccaaatcgtatattttggttttatgaaatttttgcatacaaaaatgtcggtacgatttcatcgaatgaacacccctaaatttatattatggaggtgtttttcgtaagaaaatacacagttgaggggtagttgtacttatccaaacatgagggttttttcgtaatttaaccttacctcagggggtttgccgtaatttgccctctttttttcttaaatataatttttgaagaaatattatgtgaatcttgattttgatgggattgcttctatttttcaagattgtagctttaacaaaaagagatggcactgaattttcctaaatttagtgaatataattggacgtgaagatggaccgttaccgttatctttcgctgtcttgatatctgaataaagaaacgatatttgtcatgttgggtatgaaataaatattacatattcttttaactttgtctgaaaaattattgtgagctgtttggacaaagactaaatgtgtgttgctatctggctttatttatatggcaattgtctttgtctggtctgaaatctgaatacacacactctttcacatgtgttgatactgtgacatatcttgttgcataattggatattattttactttaatgcataatacagtattatctttaatgcacaggtggca

SEQ ID NO: 103578 - DNA, 504 bp, Mimulus guttatus
  Intron number 1 from transcript mgv1a010295m (locus mgv1a0 10295m.g) derived from phytozome v7.0 (chr-ID scaffold_37; pos 200063 to 200566)
acgcctctagtgctcactctcctctctattcttgggtcagtctcacatttctctattcttctgtctgtgtgtgtgtgactgtgtgtgtgtgtgtgacagtgagtgtgtctgtggatgtgtgtctgtgtgtgtgtgtttgtgtgtgtgtgtgtgtgtgttgtgtgtctgtgtgtgtttatttaaatattagcctagtatatgatgtgaacaaaaggttgctacaatagctaatcaaaaccttattttcataaccgatcacgaagtttgattcgaattcgactcgatcgtagaaaacgtaacaaaatacggttttcaaagtttcggtgaattgaaaattctatcaatcttgaaagtaattatcgcattatgggtctgatttcgcaagtccccgatcactagatttaacacacgcgcgctccccgtttctttaacaatgtacgtacttttcgattttgtttctaatttttgtcgcctggtaacgttttgttttgcaatgacaggaac

SEQ ID NO: 103579 - DNA, 1052 bp, Mimulus guttatus
  Intron number 1 from transcript mgv1a018570m (locus mgv1a0 18570m.g) derived from phytozome v7.0 (chr-ID scaffold_206 ; pos 345753 to 346804 reverse strand)
cgaccgatcgaacttatcttgtatctgctatccaagtatgtttctcttttgaatttatgtccaaaagactcttaatatattgttacgtcttatttttaaaatttatttttgaagtgtttggatactgagcttataagctatttttactcgttataagatcttaaataaaaatgtgggtagatgtacttttttttttttaaatcttcaaagctctccaacagcttatttttggaatttttaaaatctttttggaaaaaattaccaaacacttttaaagagcttataagctcttaacatcttataagcgactttaaacagcttataagctcagtcaaacaccgagtctaattcagattgtttccacagtttagataagttaaactgaagtagattttttttctgttttctgtttgtaggcaggatgtacaattaaaacagaatgtgaggttcaatatgtgttaagtaacaaagaaaatacatgcaacaaggacggaagatcgaaaagaagaagcgagcgtcgatggcttgtatttctgaatgaattcgactatatagcatctgatatagttatactctcaggtgaatttgtgctcaagataacttgctcgtattttactaatattaagcgaaaatgtgatttctaatatataaatacttccactgcagctggagtattcggtacagcaaaaatactttttcaatcccaattaagaggattagctgtctcggagaagcttggctcaggattgagctgcaatggcaataacgtcgcctatgtagctgaaagctcggcccctttaaatgctattggactaaataggaatcagttttcgaatataccttttcaagaaagaccagggccttcgatttcttcggcatatacttcattgggattcaccattcaggtttgagtcatattatattggaaaaatttcctttatatcgaacctacttagtatacttattacgagttgttattgtgaaaaatgaatagcctttttctcctctcttttgcagagtgcagtaattccaacagcctatccaagcttcct

SEQ ID NO: 103580 - DNA, 934 bp, Mimulus guttatus
  Intron number 1 from transcript mgv1a015277m (locus mgv1a0 15277m.g) derived from phytozome v7.0 (chr-ID scaffold_26; pos 106934 to 107867)
tttgtctctgtcttcattctctccgcttaccaagagtaagacttcgtatctactatacagatctgcgcttctttttcacctctactgtgtatactttctcacgcattattttctgttttttgtccaatttttttcatgattttcatgcatttaaatgttttgtgttggtgtttggagataaatcagagctggatgtagcttgtttttcatcttttggttaccgttggatctgatggatttctcgcccaatttatctgcttttattttaaccttgttttttttccagttgatgttttgttaccttaattgcaggattcctttattgtatttagttttttattttttatttggaagaatgaggtattcatggaatcataggcatggttgtttgatggaattatgttaaattagtgagtttggtaataatctgactaataatagtgcaattaccttactgtgagctaatcgacttactggacgatgatgtcgactgtgtttccgaggatagataggatttaagctattgcaccctttactgaattagaattgcgaatgttggtgcttcttgatttggattttacaacgctcgttttaggttatttttcggtgatgaaatttacagattactcagacttgctagtttactgttgtcttaatctttgacacactggagtttttgttgattgaattaatctttgatggttcttaatcatgtgaagctgtaataaatgtctcgattcttgattagtcgaaagttcagattcatatttaacgagtccatgtgtccatctttacaccacatcatgtcagttgattaatgacaagtcaaatcccttgaataatcggagcttttcgaagttttttgctgtgaaaattttcactttcttatgcatcctactataaaacttatttaggttcaacgaatttggtgttg

SEQ ID NO: 103581 - DNA, 484 bp, Mimulus guttatus
  Intron number 2 from transcript mgv1a014742m (locus mgv1a0 14742m.g) derived from phytozome v7.0 (chr-ID scaffold_44; pos 285960 to 286443 reverse strand)
tggttaacaaggtaataaattagtatgtgttgaactgtgaaattgtgttaactggcaatatttttaagccccgttcggttgacaatataagattagccaagatatgattaaataatctaatcaaatcccatcatatattgaaccttggaaaatccagtagaaagcatgcatagaaggcaagataatgcatgataacataatatttacaggtcgacccgtcaaattatttagttaataatggctaatctccccaaccaaacgaagccttacattattcaaatatcccagatgagaaattacaagtttacctgtaaaaaaaaagtacattgttatttattttgtttcatggacgagagacgagtattttgtcaacttggcatgtttctattaggataattaatatggatggtccatttttctcttcatccattatattgttatttatgcaggatatttattttcgttcgttgtacaaatacgtaga

SEQ ID NO: 103582 - DNA, 750 bp, Mimulus guttatus
  Intron number 1 from transcript mgv1a004404m (locus mgv1a0 04404m.g) derived from phytozome v7.0 (chr-ID scaffold_79; pos 705041 to 705790 reverse strand)
cgaattgaaatcgattctgcagccggagaagtcaagtaatttttttctggaattgctaatcttttgattttttttgctttttggttttgttttatttctcctttcgtttcggaattcaaaagttaaacaaacgttgttatggattgattttatctgcttaatttgagctagtttgccggccttttgggtgaaaagttggagcttcgttttcagtcagtgatttttaacttgtgtgctttaattcggtagaagtgatttagagatagtttttgtgttgaattgaggggagaagttaagctagaagcttaatattgctcagaacctcagtttgattactgcatgtattatttcctttgtcttctctggtctgattacattattcaaccgtttgagttgcagttgatatagttataaataccatcaattgaaatgttgaaactatttttgtgatgccgaagagtttttgtcgtctaagccttaagttggtctgatttggaaacttgtacttcgaagcataatcaagatttttggtatttgaagctttgttcctgtagtgtttgttgaaagaattacatgacaaccaatgtttgtttgtttaagaagatgacatcggtttgttttacctttacagattgtttggtttgaaatttagattaagcttgtgaccgagttaaattttttttgacttagttgtaaatatttcatgtgaatataggaattttctgagcaccgtattcttagagagccagc

SEQ ID NO: 103583 - DNA, 821 bp, Mimulus guttatus
  Intron number 2 from transcript mgv1a001703m (locus mgv1a0 01703m.g) derived from phytozome v7.0 (chr-ID scaffold_255 ; pos 126769 to 127589)
gactgaagttcataccgcgggatcaaattgataaagtaagtcccccaatttttttcaatttgatgttctgaagtatggtatgatttgctcaggttgtatgcctgcttcagtagcaaactctgttagaatacccttataccgtgtactgtttcgattatcagttgtgtttatgtgagttaagggtttccttattctattcaccaatcattacctggttacatgaaactttgcttttcgatatgctatgttagtcgaagttgggattttaaagtaaattatgaggatactgtgaaactgtaattgtaaaatagtaggattttgcatatcatttgaatttgaaaagcatgccagaggtatatgtttcatacgtgtatagaacatatacagacataaatgaagtatgatcggaagaaaataaccatttctcaccatgaataaaacatcgtgaataaaatatgtgttattggttgttgttgattgttagattagtccttggtcattgttgtttgatgtttgtgctaagttcggtctttttcacaattattaggattagtcatgtttcttgaatggaacttcagtggaaggttgaaaaatattccggcattacttgggatgcacttgttttgagaataaacaatcgagtctggcttaacaaactaaatgttaaaatcatagatcttaaagattgtagggattgtactctcaatcttgaaagattttgcttagattaggattctactaggttttaacaaggtataggaattttaggatttcaatcgaaattttaactatcattattggttctgtcttttaggaaaaag

SEQ ID NO: 103584 - DNA, 839 bp, Mimulus guttatus
  Intron number 1 from transcript mgv1a007187m (locus mgv1a0 07187m.g) derived from phytozome v7.0 (chr-ID scaffold_54; pos 485207 to 486045)
attccgtagaactcaacgtactgagagaatctctggtaagattcttatttttctgcattctttccattttttttttttgtatttaatttggtgggaaattcgtgattggttgcttatgggctcatttttaatttcatttaattgatttgagaaactaggaattttttggtgttggatttacttaaggtatgagattggtctggtttttgccaagaaaatgtaataatggatgacttgctttgtctgaaacttgtgtgtgtgtgtgtgtgtgtgtgtgtgtggaatcgtggtgtgaagattgtaaatttccgatttccccgatttcgggccgaatcccaattttggaacaataattgccattctgaattccgattttttatttttccgaaattgttttttctccaaagattggaattgcaatgccaaaattattatgtattttgtattttaggttaatagaaaatggaatctcctgagttcgcgaaaaaaatcgattttgatttttggaacaagtgttttcattcaaatttccgaaatccggttattatttttttggaacagaattggaattagtttttcactcccgaaaaaaaaaaatcggaattttttcgaaaatgctaattccaatgcgaatatccgatcgatctatccgatttctacccctaaatataggcatagaattttacttctttcaccggactattataagcctgtcggtgaaaaaactcggtttcaaaatttcattcttttttatttttattttaaatttatttttaaatttacaagtgggtactcatttattttcgtcccacttcgaaaaatttcaggtagtgcaggtg

SEQ ID NO: 103585 - DNA, 895 bp, Mimulus guttatus
  Intron number 1 from transcript mgv1a011765m (locus mgv1a0 11765m.g) derived from phytozome v7.0 (chr-ID scaffold_11; pos 2619632 to 2620526 reverse strand)
tctatcttcccaaaggtctgttgttttattttcgattcatgctttttcccccttttaattttctcctgattagattgttgaattgaattgaattttagtttagtttgatccagctttatttttatcctgttgttttcaattgtttttgtttaattatggatcagtgtgtaaggttttccgattgaattatgtttatgattctgtagtccgtagatttgtggaatttcacttaaataaacacatgttcaatgcttgattttagtcctctttcacaaaaagcaacttttgtataactttaggattcgtttggattgatgaatttgatggtgaggattttgaatctagaatgacaaatctattgaacttgtttggatgaatttattttttcgaatcatgtacgtttattttgagctgtttttgagtcgtttttggtgggtttcggatccgtgttatatggagtcgtttgaaattattcattcaaaccaactccctagaaaatccaaatccttccaactttagtaatcactcgtttcagaacatggtttactgtgcaagtaatttattttgggaaaagattaggataggttgagtataaaggaggagtcttgctcgatttttcagtacacgacaccattttgctttaaggaatacattaacggtgtaatgagaatttaccaactttagttctttgcaccagaacaattaaacgactcatttgacatacacaacgtgtttcacatcctatcctcgtcgtcatttgacattttcactttttgttgaattttcacttgccttgatagatgatatacgtttaatatatagtccactgtagtacataatcgatgttgacgtgattagtgcaatatattatactgataatttaaattaattacag

SEQ ID NO: 103586 - DNA, 534 bp, Mimulus guttatus
  Intron number 3 from transcript mgv1a000029m (locus mgv1a0 00029m.g) derived from phytozome v7.0 (chr-ID scaffold_178 ; pos 333403 to 333936 reverse strand)
ctggtgctatttgtcatctgtgtttgaacacataggtttgtccagactgttgcccctattggttttgactgtttctcaaatatcaaaataaaaaatatcaattctcatgtatgttgttagacagcgacagtttccgtccagtgatttgaattccaatagtggttgtgtacttggaacaatcagaactagacatgaattagatatcttcaaattttacaaggacaagtctgatattgggaatttttactgcatgctcaaaatattgatctttcagtaccatttcatcagttctctcttatgattgtgcattaaaaaatgctaggaacttatcagttactggttacttatcagttgtcacgtattcatgtataagtttgcaacattaaagtatttggattttcaactttttttgttgtttgtgaaaaataagacaaactcaatagcatgtgattatgtcatagattgactatgtttttctccttttcatcccaaatggaaggttatcgccttaggttggtttcctgcttattgctg

SEQ ID NO: 103587 - DNA, 776 bp, Mimulus guttatus
  Intron number 2 from transcript mgv1a014500m (locus mgv1a0 14500m.g) derived from phytozome v7.0 (chr-ID scaffold_121 ; pos 723735 to 724510 reverse strand)
ttgtcttgtacaaggatttacgaacaaaagtaaaggtaattagaagaaagaaaaaaaaaaaaaaaaaaaaaggatatctttgtgctgcaataattttttcatctttcaaattggcattcttagaacctcgataaattagtaaccttgtttaaataataatttctctcggtcccgactcgataaaaaaacgtattaaattattagttcgataatttaatatttcgctgaattaatagaattttgcttgtcccaactgtattaatttatagaggtttttttttttttttttgagtaactgtatattaaaaatgcagtcttttatacagtcgggtcataaaatgttaatttggtaacgaaataattctaaaaactagtgctctatcgtctctgccttcgtttactgtactagtttatgttatttacggcattcaatccatttttaagcaaatcaagaagtggcaattagctccgaaacgcctttgtctaacttatttgcatgtccatattcgatctaatttctcgatttacgagcctatgagaaagcacgacttctaacggcgcttttgatctatataattaaagggcctcgagtttgtgttatttcgataaaagggtttctaaatttaatttactggaatgccattcttgaaactatatacaaattttgatacatttaatttcatattttaaattaatatttgtcatcaagagtttttctagtgttcgatcgtttatcttactccgtctgtattgccttttttttttttttgtagctt

SEQ ID NO: 103588 - DNA, 580 bp, Mimulus guttatus
  Intron number 1 from transcript mgv1a014500m (locus mgv1a0 14500m.g) derived from phytozome v7.0 (chr-ID scaffold_121 ; pos 724548 to 725127 reverse strand)
tcggcgccacaaacaatttctctcgccggtaaattagtgtgtgtgtgtgtgtgtgtgtgtgtgtgtgatttcatacttgtttggtaatcgaagcctgacaaaatcaaaattgggatttcgaatataatatttttcatttcattaatgtgattcaatttttttttttcaattcaaccatatgtgtgtgtgtgtgtgtgtgtgtgtgtgtgtgtgtgtgtgtgtgtgtgtgtgtgtgtgtagttatatactaagaccatgattagtaagtgtggcgaatcgaatcgaagtagtatctttcgtccaattccgaatttcgaagtaattacattgtatcgaaattttcttacttgcaaatatttgtcaaattatcatgtgttcgagtgtggatgcgagcgcttgtgtatcgtaattaaagttggctactttgataaaatcgtcaagtagtatatctcgttttagtatattggtattggtcgattctagagtcttgattgtttggttttatgcatagaggagatacgatgtttcttatcttttttccgtaggttgaaacaacacaacggtgaactaaaaggtggtg

SEQ ID NO: 103589 - DNA, 957 bp, Mimulus guttatus
  Intron number 1 from transcript mgv1a013373m (locus mgv1a0 13373m.g) derived from phytozome v7.0 (chr-ID scaffold_221 ; pos 244361 to 245317)
ttcaaagagtatgtaataattattattcgtatttttatttattttaaataatttttgacctagattttttgttgtttcattaatctttggataaaaaaaaaagattattcaaataattgagtgtgtgaatctttttcaacactgtttgagcaaattcaaaggctggtctacttgtacggtcaaaaagctaatctcaaactatgccaaattaaaattatattatattattaattattttttaacatcttcatcaagaacccttttttttttttttttttttttttttttttaatttaataatttggtgtgaagaacccaaattcgattttggtttctaaataacaaattaaatgtttttgttagcgaaaaaagaaataattagggaacaagaattttgaaaattgacaagggtacaatttgattcgaaaaataattgttcttatagtgattttttttctcattcatctgtctgtctttttggacatatattgttgtcttcattctttccgggcataacctcaccttctatcacaaacccttgtccttcctaatacattaatataaacaacatatttttatattatatataataatatatatatatatgtatatgcacaccaaccaagtgtggattgcattgttaattttctctaacttattaatcaaatctcctcttcttgaaatatatatatagtatcttcaaattgatagttaattttaatattattagtagtactccaaaatatgtgttatttgacagtccatatttacttttaattagtaaattttaatcaatgcaatgaacttcataatttggtgtgtcaacatcatttcatgatattacataaatatacttttaatttattttttttcctttctttttttgtgttttatgatctttttttattataattttttgtagggtgaccaagcctcaattgttggtggtgccataga

SEQ ID NO: 103590 - DNA, 430 bp, Mimulus guttatus
  Intron number 1 from transcript mgv1a011742m (locus mgv1a0 11742m.g) derived from phytozome v7.0 (chr-ID scaffold_27; pos 568886 to 569315)
gtcggaaatctctccccgaatctcgatccaacaaggtaaaacgatgaaatctcccttcatcagttttccattttcaaagctttcctgaagtggtgaatgcatttaatttgtgttttaatctgtatagttgttctagggtttcggttgataaatattgtttgattttttgtttcccctgctttcttctctttctcttctgtactgttttctgagtgaattttatcctttctgattagtttctactatcgtataaaattgatgatgctcccaatgtgttcgataaattgccgataccagaatttcatggaattgaggctgataaaaaatacgtgaattagtttgataaaagtaatactccgctgttactatagcaagttgaatttctagataataattatttttagttgattattagttgattacaggcata

SEQ ID NO: 103591 - DNA, 532 bp, Mimulus guttatus
  Intron number 1 from transcript mgv1a005373m (locus mgv1a0 05373m.g) derived from phytozome v7.0 (chr-ID scaffold_18; pos 1822966 to 1823497 reverse strand)
cgagtgttgctgctccacgatcacggcatcaactggtactactttttcaacgtttttgtttctgctacggtcttatgttgttttgctgtgactattcatcaacatttttttgctcaattaacttgattaattgtttactaatttgtttgattgtgatgtatggattcttaggtaggattattcaagtgaatttcttaatttaaattttgttgggtgaacaagttgttgttttttttttttttttttcaatttcgcttattggggcagaattgagtttattcttctcatagctaaactataagctctgttgttcttctgctggctgcttgtgctatatgtttatttactgtcgatatataggtcaccattgcatgatttcatggtatgttataaaatagctacagttgttagaaagaaaatggaaatgaagatctgtatcgactagcaaatgcattcaagaataatattcgtttccattttttttattaagagctgttgattcagtgcaaatctaacattaggtggattcctg

SEQ ID NO: 103592 - DNA, 917 bp, Mimulus guttatus
  Intron number 1 from transcript mgv1a010845m (locus mgv1a0 10845m.g) derived from phytozome v7.0 (chr-ID scaffold_104 ; pos 866630 to 867546 reverse strand)
cttccgctgattcatagtcgaggagataaaaaaaggtgactctctctctctctctctctctagctttagctttgagttttcgatccctgattctccgcatgtttttagctgctcatttttttttaatttttggtgctgatctgttgaatttggtccattgatttctgtgtgagttacaacttcttgaattttagcttattaactgagatttgagaatcgtttgatgcatagttagtgggtgaaaacaaaaaaaaaaaaccccctaacaatttatgttttttggttatgcatctgcagttctggatttatctgatatgaattgcgctcgcattctatgaattttgcatcatttcttatttagttattgcttgacgcttgactgttggtcaactctggagaaattgcctttcctaagtactgattgttttctccagggttgatacttgctctggagcttttcagcattattttttcattcttaaaactgtagaaatggtatttatggggagagtgggtaatgttctggtgtttgatctttttttgatgttattgaatatgttgaagtttgttaatattctcccatttgccttattctctgttatgtgttctctttgtaacttttcttttgaagattgagcaagttataacatgttattcctattatatatactggaattctcacgattttgggttgacctaaccaacagttttaaacatatttgctgttcttacgtccatctgtttgccttttcttgtttttcttttctcatttgttctatatatttatctcttgcaacttcatcatctctgaaacatcgtcttggaacgccaataactgttgattgattgggttgtgctttcgagtgagacatctgaccgtattctattattatttattggtttgtaggttttcgagc

SEQ ID NO: 103593 - DNA, 728 bp, Mimulus guttatus
  Intron number 1 from transcript mgv1a009194m (locus mgv1a0 09194m.g) derived from phytozome v7.0 (chr-ID scaffold_8; pos 490936 to 491663)
aatcgacgcctctggcctcaccgccattgttacaggtccaggatgattcatatatctgcatttcttttcttattatttattatataattaatttatgttatatttttatttatctggaaaaatgttttgcctttttttatgtggctgtaaaattgtctggatggaaaatggaggctaatttgtgtgtgttgtaatttaggcacgttttgtaaataataataaattaaaaaaaaaaataaaaaaatcacacacacaaacacacacacactcattgagttcttttacctgtttgtaaatcttgtcactaaaaaaataatagtctttttaagtagatttcactaataagcttttaagtagcaagacctcgtggatatcaaacgagggttaggcaaaaaatgttgtcactgtgtttgtcactaatatggtatcagtaattctatatagtgacaataaaaaatggttgtcactatttctatgtagctataatagaaaggattaagtgacaacaaaatgaactattagtgacgacattcaaaatattaggacatttttcaagatgctttagttggtaaactagtcttgatccggttaatcttgtatgtacatttgattttttcgttggtttattagttctcgtttacccatttcgcaaatataatgattttttatttttttattaattaacaattataggggcgtcgagtggtatcggtacagaaacggcacgt

SEQ ID NO: 103594 - DNA, 427 bp, Mimulus guttatus
  Intron number 1 from transcript mgv1a026885m (locus mgv1a0 26885m.g) derived from phytozome v7.0 (chr-ID scaffold_4; pos 2838524 to 2838950 reverse strand)
tccgccattgtcaggcatattgaatccaattacaggttcgttgacctaattttcattccgcttattagaactgcaaattttattctctgaattgaaatttcataaatttttggggttttaatttgttgaaaacgaagcttttcccttaattaatccactaaatttgtttctgcaaagttatgttttgcccttttttgggggaaaaaatgatatagatacagaacgttgatctttccatatagtttctatttgattaattaaaagaatattgacttttcaaaaccaaaataaaatcaaacagaaaccatagttgcagatattttgttagattttaagctattaaatgcagttttcttcatcagtcttaactcaatctgctctgtttttttttttcttagtttggtggaagcgatagactacatactcg

SEQ ID NO: 103595 - DNA, 761 bp, Mimulus guttatus
  Intron number 2 from transcript mgv1a008403m (locus mgv1a0 08403m.g) derived from phytozome v7.0 (chr-ID scaffold_17; pos 1202452 to 1203212)
ttcaatcatctgaattgggggatttcatcttcgaggtatgagcatttatctaactcaattctctcgtttgtgcccatttttaggcttgattttggatatttgtgcctttgtgagttctgcagaaattgcgattctagatttcgatgttgttattttcgttgatgtgtggtgatgattgagtgcagctattgattttttcttaatttttctgtcgatgtattaggttagtatttggattcaccagtttcttatttgattgttctggggaattccctgtgggacttgtgcgattattgacatttttgttttagggcgaggtttgaaaattttctgggatttttttgggaaattgttctaaattgttttagatgaccatatattaaagagtaataggcaaattagtatctcagcatttagttttccttaataaaatgtgatgaatttatatttcgttacacaaaatgagagaaattttcagtggtcaaatgcatattgcactgaatcgaatatatactggctaaagatccaccttttatctacatacccgttatgtgtgtgtctctttgtctccgtgaaggcttgggccattctttaaccaaaatatcacccggacatcacagattcctatttggggtggatcgtttctgaagcagctactagaatttgcctttttattcaattgacaaattcatttgattagttcttaatcttcagacttcatctttcatctttattctaatagttttgttctgcagctaaga

SEQ ID NO: 103596 - DNA, 696 bp, Mimulus guttatus
  Intron number 4 from transcript mgv1a006302m (locus mgv1a0 06302m.g) derived from phytozome v7.0 (chr-ID scaffold_1; pos 3747049 to 3747744 reverse strand)
ttaaagtgagatttgaagaatacttgtactgattttagattaatgcagttattggtttttgttatagtctattttagacgaattctagctttcttttcaagatgataatattgatctgctctagagaaggagctgagatactagctaatgtgttaataagtaattcgatcagaataaaatccgcaaatgccgagtgtcaatcaccatttttttacgtagaagttgtttttcttgtttattaccacacaatcatgcttgtttatctataaactggtcttggctgtctcacatccagcctcccaccccagaatatttgcttgggagaaaataattcaagatataaagctttggaatactgaggtcttattcatcatattgttcttttttttaacttcttagatttactggtttgacttttttctctagcatggctttgaaatggagactggagctcacgaaacaaacatttgtgttgttaaagtgctttgaaaaaaccaaagcatgaattgatattaaaattagaagtcctttgcttcttgttgactatattacactaaatttactctgtaaatgagatttttttagaggctggaacaatcatatttcttttgaattcagctctgggattttttttatttagtgaatgtggatattggaattttatgcggctctccttttttaaccataatgcagaac

SEQ ID NO: 103597 - DNA, 313 bp, Mimulus guttatus
  Intron number 3 from transcript mgv1a004716m (locus mgv1a0 04716m.g) derived from phytozome v7.0 (chr-ID scaffold_24; pos 1837247 to 1837559)
caagtcgagccagtcgagtacctataaaaagagttcgttttcttccctgtttttttcacctcttgtatattgtatggatttgaattcttgaaaggaaaaaaaatcgataatgtttcttggatcattatcgttgctttgtgtactatcgtgtattatcaaggggtgatcgtaatttcaaagatgcgtatggatttttctagaaaaaaaaaatgtaaaaagacgtgaaatatttgtatcgatttgttattttattgtcaattttttttttgagtctttggcattgtctgtacaggaaaatctgccgcaattcaat

SEQ ID NO: 103598 - DNA, 532 bp, Mimulus guttatus
  Intron number 1 from transcript mgv1a014996m (locus mgv1a0 14996m.g) derived from phytozome v7.0 (chr-ID scaffold_9; pos 3115741 to 3116272)
gaccctaacttaattcaagaacccactgtttacaggttattctcttttttttttctttttttttttctttttttttttctttcctgaatgtttccttctttagtattgaaataatttctgggatttttattcattttctttattcttctctaatttttaattgggaaaattgcagtttacacacttcaagtttacatcgatttcacgtttggtccccatatttacaataaacacatttggtctctcctgttacaataatttaacaattttggtcattttggtcaattaccgttaattcatcgattaaggtgtgatgggcacaagtttgattctgttagtactaacagaaaattgacggaaatgactaaaagtgaatttttaaaatatgagggatcaaatgtgttttttatgaacattgaggagcaaatgtgaaatcagtgcaagtttgatggataaaatattttcaatttctgggattgtgtttgtttgatgggtttaattttttttaaatatatattattttgcaggttgc

SEQ ID NO: 103599 - DNA, 719 bp, Mimulus guttatus
  Intron number 4 from transcript mgv1a016459m (locus mgv1a0 15051m.g) derived from phytozome v7.0 (chr-ID scaffold_18; pos 2201196 to 2201914 reverse strand)
ttgcaggttcaacaggcattttcgggcttcgagaggtgatttgtttctaaaatatgacttaagatccgttgtctatatgtagtggatcgacatgtttcttagaagttagtctttgatatgagttccacttgccttgtttctttgacagctatagatgcatataagctatctttagacttatgatatgcatagccaatataaactcgagatacttgtcttcttatctttttagtatcataatgaagtaagttgaccttagttggatcctgtttttacatgctgataattgatttaaatcatcaaatacatcttatgtgggagcatttatcttgtgaaaagttataaacctattgatatccttttccttggatcttggtcgtagatttgaactctggtgataaaaaaaaaatgattttcatcgacctatgatttacatgtgcaatagtatcttatgtgattcattgatcgttgttgtaagtttgatcgagattattcctatgccttatgtcgcactttctctttcccatacatttagaagcaatgcttataaagaatatgaatgagtctcgacacttgataaagtatccttccacttaaagaagatagtacatggtcctgcattttattggctgctggttgtgttggtagtactacttgcggttatgacaagttacgactatcatagttattaatttttgtcttccatgtttgagtagggg

SEQ ID NO: 103600 - DNA, 532 bp, Mimulus guttatus
  Intron number 3 from transcript mgv1a011712m (locus mgv1a0 11712m.g) derived from phytozome v7.0 (chr-ID scaffold_82; pos 427551 to 428082)
acttacgaaattctttggaacccttccaatatacagtaagattcttattacacgcatataaaattacgatattagcattttacacgcatgtgtgtgtgtgggcgcgcgcacgcccatccatcttggtattggaaaagtataatacttatgagacaaataattatttgaagtatttgaattttgaatgttttagatcaaataacgaaactaaccagtaactgatcgtaatattgatatgtttaattttaaaaataagattccaaattttcattttttttatattttcatttttctagtcttatcatgtttttatgcttagttttcatatcttatttttcactctatattatatttggaagaaaaaaaacacttttgatatgtgaagaaacttttcaaaaaacttatttttatttaactttattgcttatagtatttaatttaattaatatatatgtgtgtgcgcgcgcgagcgctttcttaagaaaagttgttacattatcattacattataatttgtataggtttcttgtgg

SEQ ID NO: 103601 - DNA, 628 bp, Mimulus guttatus
  Intron number 1 from transcript mgv1a016034m (locus mgv1a0 16034m.g) derived from phytozome v7.0 (chr-ID scaffold_3; pos 2975818 to 2976445)
aaaagcacgaaaaagaagagttcagatcaagcgaggtgattcttctgctcttctcttcgtatttttcgctttttttttttttcttttttttctttcctccgtgttgcatgtattttggaattataggtagggctgaggttatttagcgatgaattgatgtcgatttaggattctagggttacgtttcattgttgatatagcttcattcgtgttctatgttgacgccaaatcttcgatttctcggtttttttccttgacccacatcagaattatgtgttacattcataattttgttaaaaattagggttatttgatttcgcaaatttggggattttgattatttattagtgaaattggctttccggatgtgcgcattgtatcttgaatgcatgtgcataacctttcctactgttaattaccaaaacgccatcggaatcggtagtaactttgctctgttgtttgtcaaatcccccaaaccctagatttacacctttcttatctcccctgattaatactgatatcgtgagatttgtattggcttctttcactttaatttcatactggcttgttatttgtttctgattatgttctgaaaatgagagtaattgttgtcttgatatgcgtacag

SEQ ID NO: 103602 - DNA, 319 bp, Mimulus guttatus
  Intron number 2 from transcript mgv1a002183m (locus mgv1a0 02183m.g) derived from phytozome v7.0 (chr-ID scaffold_25; pos 948242 to 948560)
gactttgtaagtttcgtccttttcgtttttgctactgctgttccttatcgttgttcttccttcggttttgtttaaataggcaaatgtaagtgtcgatattgtccggcattcaagttgatcatacagttagattattattattattattagatgacggtgctttgccagttgtcccgaatgccgtttttcattttatccttttaatttgagttttatcatctgttggatccattttttgtggccgagtctgacttatgttcgccttttctttttttttaattcagactcgggttttgtgcccatatttatatacaccatt

SEQ ID NO: 103603 - DNA, 807 bp, Mimulus guttatus
  Intron number 2 from transcript mgv1a008646m (locus mgv1a0 08646m.g) derived from phytozome v7.0 (chr-ID scaffold_25; pos 245149 to 245955 reverse strand)
acactggagttcaatttgtaagtatttatttatttatatatttgtatattatttaattatttaattaattaatatgtcttggtacttttagtaacacaacatactataaatatatttttcaaagtgcatttttaaatttaattaatagatctatgtaattataaatatgtcccaccatggtactacaacatctatagctagaagacaatgtgatgaaaataatgcatatatatatatatatatatatatatatatatatatatatatatatatatatatatatatatacttaattatttatattttcaataacattttacaaacttttttaactcaaaaatcaaatgtttgaatattttttttttatgttcacttctctcattataagttaattatgtattgaactcaaacgaactttactacaagtttcttcggaaaactaccaacattactaattaaaaagtagcccagtttcgcacaattactaatgaaatactccatctgttccataatatctgtcactttcgataattattttgtattatattatatttcactttaaaattcaaatattgcattgattacatatttttcagttatgctcttattaactctccaatactctatctgcattaatcagtaaataagggtattttagtctaacaatatctattttcctaaaatcaagacatatttcattgagtttcttcagatgtgttacagtatgtgaaaaacgacacttatttagtaataaaattttaaatttttgcaggtgaacataataagaatagggcaacaattgcaata

SEQ ID NO: 103604 - DNA, 715 bp, Mimulus guttatus
  Intron number 1 from transcript mgv1a019361m (locus mgv1a0 19361m.g) derived from phytozome v7.0 (chr-ID scaffold_368 ; pos 20154 to 20868)
tgtgagtgtcactccgcctttaaattattattattatgttcgataacctacgtagcacgaaaacttcaacttcttaacgtttccgcgtttaacaagttccgtacacttgaggacacctgtcaaacattttatggaccattttgcagcttctaaaaagttataagcatatttgaatagcaaattttcatatatttttgttacttccttaatttcattttttttggaaaaaaaacttggaccatattaatcttcagtttcaaagttcacaatattttgaattccaaaaggctgattcagcaaaagatttggacccttaagtgaaagtcaagctacgtctagtaatattaattttgaatatatttgtatgaaaaatattaacaaaaaaatttatatataaataataacttatgtatatttatgcatattcataaatatgcccctatacttttaatatttatatatttcccccaaagtttcagtatccttttttggacatgccggtttcccgtgtcagatttcccatattgccgtttctgcatttgtgctacatacttgataacctgacagtggaaaattacttttcttgatctgtctttcatttaattatcgaccgtagcaaaatatttatttgtattttgatcaattgattgagagtgtgtgtcacttatatatataaccagcccggcaacaaccgagtacgcggagcagctaaggt

SEQ ID NO: 103605 - DNA, 650 bp, Mimulus guttatus
  Intron number 1 from transcript mgv1a004003m (locus mgv1a0 04003m.g) derived from phytozome v7.0 (chr-ID scaffold_48; pos 579208 to 579857 reverse strand)
tcgcagaaaaatccttcgcccggctgctcattctggtaagatttttatctcttactatatgactgtatgattgagctttgttttaatcgactctttaattttatgatttttttatttattttttatgaattttcttaatttatttgtaacatcaaatttgagatttactggcatgcctaattaccaaggaactgggttttgttagatttaattctcaatatttcgtcgtttggattgggatttgataattggctgccctgctatttttcatagtttatgcatgaagcatgctatcagttttattggatggttatcccctgtctttcctatgtgtggttatgaacgggtgtaaccgcgagagataaatttagcacctactttaaattttctccacggtgggtgaagtttggtttgcaatcttactctgtttcttgctgctcccttttatatgggcaaagtgattgtgggtggttcatttcttatgacctttttagctgctgacatttataattgtttagagttctgcatgcacatggatggcggcttgtcttcgaccccttttatcatcttgatatgttagattcattttagtgggccattgagtgaatcactgctttctctcgaaactcatgtcaattataggagaagca

SEQ ID NO: 103606 - DNA, 230 bp, Mimulus guttatus
  Intron number 3 from transcript mgv1a000069m (locus mgv1a0 00069m.g) derived from phytozome v7.0 (chr-ID scaffold_159 ; pos 261651 to 261880)
tggatcaggctacaaggggggagaaaagagtaaaggtacagtatcttcttacttaaattgcgaaggtgcatgtagtttcagagttttttgttaaaggaagatgtgagatttagtttatccttttgcatttatgtatcatatatttcattaaattttttgattagttttttaattctgagttacaaaactgatcaggaagaggaacagaagttgaggaaaacggctctcaa

SEQ ID NO: 103607 - DNA, 510 bp, Mimulus guttatus
  Intron number 1 from transcript mgv1a002702m (locus mgv1a0 02702m.g) derived from phytozome v7.0 (chr-ID scaffold_92; pos 955294 to 955803)
ctggaggatataggaattgatatcaggtctgattactctctctctctctgattgcccaaaaactgaagaaattgaagattttattattctccttattgaattttctatccccttttttcgataattttttgtgtgctgtgagaaagattttgtttttttttttgtttttaaataattgacttatgctatttacgaggctgtacaattaatccgggcatggatttatatcggtgtggtatgatttgatggtcggaggtcggaggggtgatcgatttcctgattgcctctgcaaatttctgaaaaaattagttattaggttttgcttggtttgtgcttttgctgaagaagaatttttttttgattgaattgaataggagccggaagcatttatgttgaatttgcattgtgtgtgtgtgtgtgtgtgtgtgtgtgtgtgtgtgtatatttccttctgattttaattgactttgtgcgacagttcggatatcgaagttgacgaaataagaggtg

SEQ ID NO: 103608 - DNA, 698 bp, Mimulus guttatus
  Intron number 1 from transcript mgv1a002038m (locus mgv1a0 02038m.g) derived from phytozome v7.0 (chr-ID scaffold_102 ; pos 381384 to 382081)
catcaatcctcctgtcaattctctttcgtttggtatacctatgtttgtgttattgttttatttaccgaattcagatctttttttgtttttttcaattgaattatgctatagcttgttcaatgttaattcgatggctttcgttggttttttccatatggtttttttgcaagcgtttaatttgttgtagatgtgttgccttataattttttgtttatggagatctacttataattgatcacgagtttataagtgaacctttatttattcctagaaatcagttggataattctatttttaaggttaattttatacagcataacgcctcgactatcaaattcgagctattaccgaaaaacttgtacactgctgtaaaagttttgagaagggaattaagtgaaaatggatgtcaggaatttcgtcggttaagtatttttctggttaatttggaagagggataaaagggttcagctgaggaaaatgcaaggaggaacaagaatcattgaaattcgatattttcacatttctttttgataattttttaaatctgttaaaattatgaagaaatgtattttaaataaatgccttagttaatgaaatgtattgatttcaggcttttcagcctttcaagcaaacactcacttgttctatctgttctgtgtatagtgttaaacagcttaaaagacacttgcgaacaggcc

SEQ ID NO: 103609 - DNA, 873 bp, Mimulus guttatus
  Intron number 1 from transcript mgv1a012850m (locus mgv1a0 12850m.g) derived from phytozome v7.0 (chr-ID scaffold_154 ; pos 424988 to 425860)
cacttcttattgaagaaaaaaaacaactcagcaaggtattacataattctcttactttattattatatatgttccaaaagaataagaatataatgggtttgttttcaattactacaattctacaattcttgtttacagtgtggattgtattttgtattccgcttgtgtgtgggtttgaaatttgaaatggatagtgttggggttctgatattgaaaagtatatttggtggaattggttcgtggagtagaagaatgagataaatgcaaataagcatgcaaaatttacaagaatggaacactgaatgtttgtttatatgtagcaaagaaagagacttgatagaagttgaaatatgaagaaatacaaagtttcgatgcaatcaattgtttgagtttgttgagaattgaagtacttaaacataagagagtaggcctaggacattacccgatttaaggataggtgtgacttactcatgcaaaagcttcatttgggctttaaaatctgactaagatattacgtaagaatgtcggttgcctgatatcgagagaaatttgtactctgttagatgaattattttaaaatggaatacttttgatttttgaagtaggaatcacttaacggccttttgcaatgctgcattcatattatattaaacacacagagagagagagagagagagagagagagagagagagagagagagagagagagagagagagagagagaggatggtgaataccgacgttcatcatgtctttgaaactcaattcttgattctcggtatattcattcattgtgtggttaagaagtaacttgagaataacacaaatgaattatgttttaggaagttgaagaaagtgtaagagtgctaaaaa

SEQ ID NO: 103610 - DNA, 633 bp, Mimulus guttatus
  Intron number 2 from transcript mgv1a014667m (locus mgv1a0 14667m.g) derived from phytozome v7.0 (chr-ID scaffold_1; pos 2575381 to 2576013 reverse strand)
tgctgaaacacttgttattgaattggaccaactaggtacaattaatttatccccttttcttgttctatgtgttctaattggtagatttgatgtgtttttagggttttatattccttgtccatttaaatttggttcttacagtctgacaatgatgtttactctgtagtcggaaacttatcaccgacgaatatcaatcgaaaaaaaaattaggttttgtagtaggagtttccacttggatcaatattgtttattttgcattcatccatttcgataaacttattgctgccagaaacgaaagacatttatgatgttattcgaatagttgagaattttcgaagtaaagctttgaccagtatgatgttcgacaaagaatatgattaaagaacaaacaagaatcggaaaccattatttacatttgaattgattttatttttcttgttcaatttgaagattgaagcatatcactaactactcgtattttcgatgtgttgaatgctggagttaaaaagaatcaaatttataaaagttgaaacggggtacgacttacgagcctaatgagtatgatatttcacatgaaatttctctcgttttttttcaggttcgcaaggagcacaactgcagaaaactttggag

SEQ ID NO: 103611 - DNA, 442 bp, Mimulus guttatus
  Intron number 1 from transcript mgv1a003163m (locus mgv1a0 03163m.g) derived from phytozome v7.0 (chr-ID scaffold_8; pos 2536163 to 2536604 reverse strand)
caaaggctttttctccgggttttgtttaaattgaggtcggtttttctctgctatatctaagcaagcttattttcgtaccttttcgtatatttttcagattcgtttttacaatccgattagttatactaagatctaaactagggtttcaggtatctcaaaaagcttcaaattttgacattaattattatgaattatatgatgatctgtgtttggaattatgtgtttgttaaattactctctttacttatctattcctctttttttttttgttttgttttgttttaaatatcatgatacagccgattttagttcttcccctttgttctcggtttcataattaaaattttagtttcgatttgcagaagttactacactttttttaattaatttttgatgtgtctctgtagggttgtatcagtagctaatagtgagattggatttt

SEQ ID NO: 103612 - DNA, 548 bp, Mimulus guttatus
  Intron number 1 from transcript mgv1a023215m (locus mgv1a0 23215m.g) derived from phytozome v7.0 (chr-ID scaffold_18; pos 675673 to 676220)
gcgccttttctatctttgccgccagattttggggtcgggtatatatgtcgtgttcttctttctctaaataaataaatatatatacacattacacacccaaaataaataaataaattttgtttcgttaattaatttatgtagtgacatttaaaagttcaaaaggcacaaaaatcaaaggcgttaaaaaaaatgtgcgtggccatatcaactaatataaaattccatgcccatgtgaattatgaataaaaaacttcacaatatcttatacgtatcctccctcactgctcactaatctctctctctctctctctctctctctatctctctctagtatatggctgtactgagttttgggagatttttaatgtagagccgttgtggtgttggattactttactttatacaccataaatgtgtgtgcatatatatatatatatatatatatatatatatatatatattatttgaaattgattgattgattgatgcttttgtggtttgcaattgagattcgaatcttgtgatggaggaatcaatctggaaggaca

SEQ ID NO: 103613 - DNA, 427 bp, Mimulus guttatus
  Intron number 2 from transcript mgv1a023215m (locus mgv1a0 23215m.g) derived from phytozome v7.0 (chr-ID scaffold_18; pos 676281 to 676707)
cagcgaggtttctcctcgatacgttcgtctttcgtgtgagctttctcgacatactctcttcgtttctaattaaatcttctagaattagaatgttctagctacttgaacgagcaacttaattttgttgtacttgctatctgatttttttacattttttttagccaattgtacttgttaattcatgaatgaaattttatcgctttattgcatttattacccatgtgtaataaaaaacgcataggcctgtcgaatgcaaattaataaacccgacatttcacggaatgcttatttttttctattcattttgtacgaaataatagtgattcaaccttgattaatatatagaatggttcaaatgtttgattgtgcagttattttgactataaaataaatgtgtatatatgtatgtatgtatctattacagagg

SEQ ID NO: 103614 - DNA, 660 bp, Mimulus guttatus
  Intron number 1 from transcript mgv1a015663m (locus mgv1a0 15466m.g) derived from phytozome v7.0 (chr-ID scaffold_75; pos 306502 to 307161)
tgaacattactcttttaggtttaaatttttaccaggtatatattttttttttttctgtcttctatatctctgatttatttgccctaattaaatccctctttgtagtttgtctaatctatgcaatcatgcgttcgattggtttgaggaaactgaaatcttcgcagcattattgaaataattgtggagacaaaccctgatttttttttttttgatattggtagctttattgatttgcaatatattttgctggaaaaaaattgtaaaagctgaagatgtaattttgagcagagagtaactagcttcagttcttgtagtttgtaagaactactcggtctcggtgtgaattatgttgtcgtactcgttttttcttgattttcgaataaactccttattgcattgcctcgacttttttgcgcagttcttttgttctctgtgtgtgagtatgtaattgcacaatctgattccactttttgcttttcccgttttctcttatcgtacaccctcgtttatttccttgttacattcttaaagtatcaagctatcacagaatttgtggtgtagtcgtaaacatggttgaaacatctatgtgcatctcaaaacaaaaaaatcaatttgtctgttgcagttcctaggtttctcggatttggaagctgattattt

SEQ ID NO: 103615 - DNA, 560 bp, Mimulus guttatus
  Intron number 2 from transcript mgv1a015663m (locus mgv1a0 15466m.g) derived from phytozome v7.0 (chr-ID scaffold_75; pos 307274 to 307833)
ctctcactaccccctgcatactataatctcacgcggtaagttcttcatctaacgaatgattttcttatcactgatatactattcttttgattattgctattagccaaaaaaatctagcaaaagatttcttgatgtagaatatacgtagtggaatgaagaggttaaaaaaaaatagaaaaaaaatgcttgtagataatcacacatcgccatgtaaattgagaggctagggccctcgtttgggaatgttggtgggattgataagattgattgaattggttaggattacattatccatgataatgtaatatccttaataagattgtgcgataataggttttagactaaatatgtttcgtgggagtgattaaaatctggggccttttttttaatcttttagtatgggcttgaaacttaaaccccaaaaatttgacaaagtttgattatattatctatcgaacgtaataaaaattcccaaacaaggcctagaagttttctctacaacttatcttgaactcttcccattttgcccttcaggtacctatcacagcagcatcgtatag

SEQ ID NO: 103616 - DNA, 834 bp, Mimulus guttatus
  Intron number 1 from transcript mgv1a004983m (locus mgv1a0 04983m.g) derived from phytozome v7.0 (chr-ID scaffold_96; pos 630777 to 631610)
caattgacagggagcgcatcaaagcattagttcaggtaaccacacacacacacacacatatatatatatatatatatatatatataatttatttcatttaattcgtgttagaaataaattatttcaagttggttaggtcccattcaatgcaaatcaactacactagcataataaactcaaaacaaataacacagtaatttaacttagagtaatcaagtcatactattgaaatattatatgtagggggaacttcatggatcggatcgcaattagtgtcctctggggaaattcatttttttttgggaactaaaaaactaattcaggttattttaaaaaaaaaatcacaaaaaatgggaaatcgggtaggaaggaaaagaactcgttccagagaattagatattttcggatcgaaatcggcagcatatggaaaattctaactattagtcgcctaaaatgtaaagtgcagaataaatatagatattatatgtgtaattttcggacaaaattgaatttttagtaattattttcggatattgaaatcggactggaaatcattcccatggttgttcttcttccatcttatgaactaatattttcatattttataagagccgatgaattgatcttcgtgattgtgttagtctaactcaagacaccggtttatctgcgagtggaataagtactgatcgatgaccgatgcatacattagttaaacaattaggtctctccttattgatgtttagttagtgtaataactatacatggcgaaaagcgcaagtatttttcttaatgtttttttcttcttttattcttctatattatatatttcgcagg

SEQ ID NO: 103617 - DNA, 1056 bp, Mimulus guttatus
  Intron number 1 from transcript mgv1a012768m (locus mgv1a0 12768m.g) derived from phytozome v7.0 (chr-ID scaffold_120 ; pos 611512 to 612567)
cgagtccaagcctgacaaacgtctcattctcgtcggtaattttttttgttttttttttcacccattttaactccgccaatcaatccctgctatttcttagttcttactcatcggccctaattttttgtttttgaattgtattgctttatgggtttagggtttttttttttaagttttggatttgaatttatggggattagattatatttataacaatgctgggtgtgacaagatctaaaaaattgagggagatgacttttggttttgaaattaaattgcgataattgttgggttagaactgcataagaccgattttttttttcttctagcaatgcttaatcgaggttaatttcttttagatgtggtattcggtgagttcattgatgcggatgagtgtttaatgttctcaattctgttaatttaaaacatcatttcgcatctcctgtttcgatttgacttgcttccgagactagggtgcatttcttcaaaattgaacctcttcttcgagttaaaaagtggagcctttgtgtcgtttataacacaacgtgcatttaatcttgattgattaaatattgccagaagtattttgctggaaaaaaaaaggacgaaagcagaattgatcacttttaaaggacagcttaagattgttttagtttatgtaagttctaaagtgcgggagacaattcttgagtattttcaatcccggtttcaggatgaagtgatttaatatatgtatggaggacaattaaagtatttttccagtcaaattttgtgctgatatgagcgagttttagtaaattttgatgtactgttgtatctgcagttatatgagcgagttttagtaaattttgatgtactgttgtatctgcagttatggctccagattctgtttttctcaaactagttgctgtgaaatcctagtacagctttcaagaaaaaaacatttttttccagccaaaatatgtggtatgttacttatcccgttaatctaatgcagagaacattttttatgttactgcagggccaccaggatcgggaaaaggtacccaatcacca

SEQ ID NO: 103618 - DNA, 838 bp, Mimulus guttatus
  Intron number 1 from transcript mgv1a017334m (locus mgv1a0 17334m.g) derived from phytozome v7.0 (chr-ID scaffold_64; pos 879692 to 880529 reverse strand)
atctcgactgaccttcgccggtctcctccaccaaggtatgaatgattctccggacaagcttgcttttcttttctttttcggttggggtttttcattttatagtgtgatgaatacgcgctgctgtttgattgtttttatatgtatttgtttcaatctgtagtttccatgtgaatataaattgtgggagctgtaaattttcggaaccctaatgaaattcagttgcagttagaattgattcaggagattaattgttgtattttcgttatgtctctggtttatgaattttgtgtaaatgatgaattgttcatatatgtgtgtgtgtgtgtgtgtgtgtaatttgtatgtaacttttttggttgcgtttgagtaatgaaagaaaccatcttttctgaaaaaagtgtagtgatcttcaaaatataactatctaaataataattaaaactatataaacgcaacagttaccgtatgctcgtaaaaacctttgtctctgaaatgttggattttatgcccatatccaacacgaatgcgttagtagagaggtcttacctaatatgtatgccatggatttgtattttcgattcaagccatggatggttcttgctcgaaccaaaagctcgtttcttgatattgtgtttgttttgtttgcttaactcttgcctttttccacatcctcgttacgtaaccaatgctacacgttgacttgttttttggatagaggcttattgaaaagctccaattactgttattttagtacgaaatgttcgacaaaatatttctgtaatgtgttcattgacattgtgtttaaactcgatttgtgggattttaactagggaagaaa

SEQ ID NO: 103619 - DNA, 459 bp, Mimulus guttatus
  Intron number 2 from transcript mgv1a026419m (locus mgv1a0 26419m.g) derived from phytozome v7.0 (chr-ID scaffold_53; pos 213703 to 214161 reverse strand)
cctttcgtcaacctcgtgtcatttccgagatccttgtaagtattccgctttcattcctttgttttttttacctatttgtgtgtttgctatctctcttttacattttttgtattaattccaatgataaatgttattagaaaacttgcaataattaaatttcgattttttgaagcatgtacaaaaaatggtaacgccccttgaaccatatgattaaaaattccaatttaagtctagtatttgtatcagattgcttgtaaatactgttgaatttcagctaattggatctaattaggcatacactaatcaattattgttttcttgttttccttctcatttgttacaactgaagatcctttattgagatcttcgattggctcatgaaataatgtactaaattcgtaccttttatgaaaattgtttacagggtggtgtaatattgggtccatcactgctaggaca

SEQ ID NO: 103620 - DNA, 686 bp, Mimulus guttatus
  Intron number 1 from transcript mgv1a026419m (locus mgv1a0 26419m.g) derived from phytozome v7.0 (chr-ID scaffold_53; pos 214299 to 214984 reverse strand)
acatgtagatttccacgtgtcgatgacatggatgccaaatgtcgtaattttaagcaatgagggtttcaatttatatattatatagatagatagaacactatagacttgtatttaaatgccccatgctaaattacatcatataaaatattctcttccaattttagaaataaaaatagcttttaaattgcctttattatttttagaaaataaaatcagtttcattgaatctaagtaaaattagtaaactacttttacagaagtacaagtatttgatcgatgcccattatattttgggagcccttagcaattggtatagctactcagaagaaaatacacctctgattgttcttacatgatatagtccctaatccaagggttaccactcaaactaaactgaaaatattctcaaatatgagatagttaaatctgttattttttttgttttcccacttttttagttgtgtttctccctctctttcatttgcactttcgattcctcacactgtgacggtgtcattagtaattctgagtatgcgttcaaaacgacgaaagtagtttaatatttgttttacaagacaagagaaataacaagtagagatatacaatacaaattccttttttttttttttttttgagaaaccgtagcgaagaggaaaaatgtcaaacagttcggatcaattgatagt

SEQ ID NO: 103621 - DNA, 760 bp, Mimulus guttatus
  Intron number 2 from transcript mgv1a016788m (locus mgv1a0 16788m.g) derived from phytozome v7.0 (chr-ID scaffold_109 ; pos 438467 to 439226 reverse strand)
cgcctccttcaaggccattgaattggataccgagggtttgctctctctctctctctctctctctctctctctctctctctctctctctctctctctctctctctctctctctcgttagcgtatatttttctgtgagttttgtcatttccaattgaaaattagaaaggattttccgtcggcaactttttaccacgttttctgcatcgtttgtagcattttgaatttggaacgaaattgcgtccagatccatgaattaagccccactcattcaaaaactcagtacttagttttatctttggaatgacagtttgttgggatccacaaattaattacacatgaaattggggaaatctgctccgcagattttcaaagattcatatctaattttaacttaaagagtttcagtacaatggggaaatctatgcttacaccaggcaaaatcatacacaccaagatgggtgtgtgtgtgtgtgttttcgtgtgtatagaaatggttaactacccgatgtgctttaccgtatgtagcatcgaattgtcctaacttaattcgcattgcaaatttctctaccatagctattgttgtcgtacgactgtatcttattggtgtgtgacgaaggattcgtattttgactcactttctgatattcagtctttcaaaaaatcgtcttcttgtatttccttcgaaaaatacactactagtttgtgaaatgaaggattacataatctataattggcatctattttcataaatatgaaggtg

SEQ ID NO: 103622 - DNA, 709 bp, Mimulus guttatus
  Intron number 1 from transcript mgv1a021580m (locus mgv1a0 21580m.g) derived from phytozome v7.0 (chr-ID scaffold_92; pos 393116 to 393824)
ttccgttccaatttacacccctaactcaaccccttgtaatgcgttcagacggttaacaaccatatatttttgggtaaactacgaaaaccccccaaaatttagatttaattaccaaaaacaccttctattcgtaatcaccaaaaatctcatgaggtttgtttctttcttacatcaactctcttacagtgtgacttttcacggattttttttgtttattctagggaatagactttacacaatttcagatattttcttttatttctcacctatttaatagaaggtataatagattgtacacattttctattaaaaaattcgatcaacagttaatcagaggggatgttatttgttagttagcctaagttcaggggagttttcgtaatttaccctatatttttctatcccagaagtcaaagataagaggtgtgaaatatatatatatatatatatatatatatatatatatatatatatatatatatatatatatattaaacatgctctttttacaatttgttcaaaagcagactcatcacttctttcaaatctttgtaataataaagcaagtgtagcagcaaattatttacctaaattatccccagacatgaaaacataccttttcttccttcatatttttctgctaataacaacttctttattgtcccctccaaaagcatcagcctcagctacaactgaagcaactgctctg

SEQ ID NO: 103623 - DNA, 669 bp, Mimulus guttatus
  Intron number 1 from transcript mgv1a009090m (locus mgv1a0 09090m.g) derived from phytozome v7.0 (chr-ID scaffold_112 ; pos 840140 to 840808)
accgttaaggtaccgccatcccatctaattattatatcaagctgactgatgaacttctgagtgtgaattaatttctggattcggtaaattcctataaaattgatgacaaattagttgccccaaatgcaattcaattttgttttttggtgacggcttaaaaatattgtttgcggttgatgataaatctattactcgattttgtatttccattatgatgaaagatagtagcaccaaactgtgattagatgacaatcaattaataagcaaagatgaaactagaaattttggttaaggtttaacaaacacagtacttaaattaaagcgagttgaagattacgcaacccacagtttgaaggttgagagctaaaaatatcgtatgtcgtattcaaggtttaatatgcttgacaagatatcggacacaattagattctttctttccgtgacatattcttcactgcaaaccatatttaccagttgattagttgaatagtgcagattcctttcattttatatggtcgataagtaggcatacacagatgagatgacccattatatatacggagttttgtattaactagacattgtgaagtttgggatagagaggaggcatatggaagtttgtgttcctgtcgagttatgatattttcgttaatgatggttaggctttgc

SEQ ID NO: 103624 - DNA, 844 bp, Mimulus guttatus
  Intron number 2 from transcript mgv1a009090m (locus mgv1a0 09090m.g) derived from phytozome v7.0 (chr-ID scaffold_112 ; pos 840848 to 841691)
gagattacgtgtattccaaagggtgagttttcttcgacaatgtaactttgaagtttactattacggcagttcttgcattattgttcttttatttcagttgtccattgtcattatgtttgtttttgtatttacaatacatatggggctatagctttttttctatatttttttttttgtaatttatgctttgatgggattcactggtccggatgttcgccacaaatgttgaataggtttctttaacgatgtttgctccactgtaatcaatggatgtttggatatgaaggtggataggttaactctatatcaaatatgagcataggtgttgttatttgggtggcattgcagtcaagtaacggcttggaatacttaaaaaaaaaataatatgaaagctcagatggtactcactattggtttatttctcgaaatcttgaaaggaaaatgattactgattttggtgcccctttgcttttaaatcttttggcatgtccatggatgtagaaatattcgtccttcgatatactaccggatggaattcagagagccctgctttttattgcttatgtgggacttgtggcgatgttcttaaacggttttaagaattattgttccccattttatgaaaaacagaaaaaaaaattaccattcaccagttgaaataagtgatatctgaccgaatctatactaattaatacgaatctacaatataaaaataatgtaaaaacttaatgaaaatgagttacagaatgtctggtttatattcactggatatattttctctatggatcctttatcaagaaactgaataccttttcttttcttcgggttttcaaatcatgcagag

SEQ ID NO: 103625 - DNA, 751 bp, Mimulus guttatus
  Intron number 3 from transcript mgv1a004887m (locus mgv1a0 04887m.g) derived from phytozome v7.0 (chr-ID scaffold_164 ; pos 168649 to 169399)
tcaacgttactggcccagctgatctctactttgaggtttgttttttcatttatttatttatttttattatagctataattattttgaactagaaaatttccgattttcgaaaattgtaatgaaaaaacttatctcaaaattgcaaaatttcgaaccaaagtcgacaattttttttcttcaattttatgattttatccatgtagtaagaatacataacatattaatataataagtgtaatttttgggaaaaaaatagcattttaaaagttaaaatgaaataaaaaaccaggattcaaatatattccagttccgattaaaaaaaaaatcattaattataatcttcaaaattcgaaatgaattcattgttcccaaaaaaaaaaaggaataaaaaaaagtacagtttaatataaatataagggtaaattccactttacccccttgtactctgcccaagaaccactttaccccctcgtactcttaatttcgtcgatttacccccttgtacttgtacaatttcccaatacaaccctcttcgtcaacttttttcgattttgactctgacgccatttggtcaagagtcaaaatattgacgtaaatattgaattttttcgattttgactctcgagattagaaaagagaaagtttcacacattcatatatttttttctttgcactgagtggaatcgatcaatttttgggtcttgatttttactaagttaggtgttcaatttggggatatcttggaagggga

SEQ ID NO: 103626 - DNA, 813 bp, Mimulus guttatus
  Intron number 1 from transcript mgv1a010658m (locus mgv1a0 10658m.g) derived from phytozome v7.0 (chr-ID scaffold_297 ; pos 194033 to 194845)
tggcctggtaattagttttttttttccttcacattttttgtgcacgtagagaaactgattcgtctctgtgtgtaaacttttatatatgttttatttttattttttggttttggttaattaattttattttttggttctgtgtgtgaacttctatatatatgttgattgtttcaatattttctttggtgttcgtggatgaatttaatagaaatctagggtttaaacggtgggaggttttttcctcttcaattgtaagcttaaatttgtggcatgtttcaagaaaagatttgatttagagtacgaatgacgtattatataaaatacactttatatatatttatatataatgctatttcctgacagatcagaatgaaagagctctttctgtttatttgtgtctatagatatacgttatcaagaaatgaataaacaaattggaatcaacttttcacccgtaacgatttttcgttatttttcctgataagtgcagagtttgtgtatgtgaaattagatatactcgtgttagttccaaaacagggcaatgtgtgtatatatcacttccaatggaaaaacttgttgcagttgttgttatctaatcatcatcaatctgcttgtttttcgtttcaattttcataatcggaagttgattaagcaattcctcttagctatatggttttttatatagagatgtttccggttctcgttgtttgcattatctggctcagttcaggaactatgtgagattatttattacaattgtttttcggaaatcatgcaggagaagcacactcgttgaaagtagagaaaatatta

SEQ ID NO: 103627 - DNA, 580 bp, Mimulus guttatus
  Intron number 2 from transcript mgv1a021710m (locus mgv1a0 21710m.g) derived from phytozome v7.0 (chr-ID scaffold_401 ; pos 53225 to 53804 reverse strand)
catttggtttaactcaaatcaaggcgattttggtaattttctccactttccttcatttcattttcttgttggtttgccctccgtctcttaatttattcgaagctagattcgacaccgtcgttcagtaaaagcttgtttgtactcgatttgttaacataacgaaacaaacttgaacacatatacttttgttattgataagatttgagactcgatcgctttgagtcgggaatcgattagaaaaaaaaaattaaaatcaagctactcgagtttgattcgtgctaacctctattgcttattaatccaagctcagacacaactctactcaatgcgcttatgcgtgcccctagttctgttgtttcttgaatatataggagaattagtttttgtgttcaaatttgaagataaaaaaccgctaaacatttttataggcataaaccctcttgtgatccaaagtcacgacaaatatactctttcaagctaacaatgtaactctttttgtgattctctttcattgaaatgacataaaatatgctctttgattataggatattgttgccggcgggagcaatactacggcaac

SEQ ID NO: 103628 - DNA, 557 bp, Mimulus guttatus
  Intron number 1 from transcript mgv1a014920m (locus mgv1a0 14925m.g) derived from phytozome v7.0 (chr-ID scaffold_2; pos 358713 to 359269 reverse strand)
cgtggctgtctactctctctttcatctggttttaggtcagattctatttctcttcaatggcgctcgatgttttatttttatttttatttttttaattcaattttatttgagaattagtagtttcttcttattattgcccattcagttgtgcgtttatttagtttattcagttgacagtttcagcgttttcttttatggtttactatatctctggattaaaattggaatttaatcactctttttctactcttcagacagtcaaagaattaacctttttcctgttttggaattaatcattttctgtgtgtgtgtgtgtgtggttttttttaatttgatttttttttataagtttaatgttcaatcttgatattctgttctgatttgacgtgggctatgcaaacttgccaagtacagattagaaagatgaatctgttaccaatttaccctttgtctgaagtttcagttgttttttttcagttcaggtagtaatatttgacttaatagggaaatctattgcagcaatattcgaacaaaggcccgatttgttattttgaata

SEQ ID NO: 103629 - DNA, 484 bp, Mimulus guttatus
  Intron number 1 from transcript mgv1a003208m (locus mgv1a0 03208m.g) derived from phytozome v7.0 (chr-ID scaffold_2; pos 4035161 to 4035644 reverse strand)
ctattgccagtcgttcgcaggtatacttttgaattggcgcttgcgttctctgtgcaattgtttgtttatctatcccaattgaattctgagggactaattaggactctattggatggtatcttgattttctttttgtcgagtctgatttctgctggatggaaaccactgttgaatcatctttttggatgtatcagatggattaatagttaatattgcccattgtggatatgcaggatgttatcttgtttttgtttgtttttgtgttaaccgggcgcaaattacagtgggcgtacgatttgtgttttagctttggagggctggtctcttaaaatttgtgatctgggaaagaatttttaagtttagtaatgcttttatgagaaagtaaagttttttgaaatgtcttgaagatttttgctttccgatatgactttttttttgtatatttctagaactataccattttaaaggaagaagatatacggca

SEQ ID NO: 103630 - DNA, 519 bp, Mimulus guttatus
  Intron number 2 from transcript mgv1a016937m (locus mgv1a0 16940m.g) derived from phytozome v7.0 (chr-ID scaffold_4; pos 455791 to 456309)
tcaaggagaacaatcttcaggttatttaattgccttttttgtttgttttgttgagtaatcattttatctcttgaactaattgcgtttcgtttattaataaatagtgcttcttcatccttcaattgttatcgctttgtcgtaaagtttgagttggggtgaacggacattttctttgtgggatttacaggtgtagtagtgtcttgaaagttgtttgctctccgaataatttgcttttgctacaacctaaatctttatcggcaagaatacgttgaagctaactcactattgagtattgcctgatcgagacataaagtctttgaaatactatgtccactaaaaatatacactttttcgcaccatagcatatgaaattagcagacttttctgtgtagggtggttgtgaatataggcgtgaccttttggaattaatttttgaactgtttttagcgtttttcttgattatttcttgattatcgtgtattttttttggtcttcttttgtaggatccagtcaataaga

SEQ ID NO: 103631 - DNA, 689 bp, Mimulus guttatus
  Intron number 1 from transcript mgv1a015551m (locus mgv1a0 15551m.g) derived from phytozome v7.0 (chr-ID scaffold_44; pos 1327525 to 1328213)
ccaatatccatctacctccaccacccctgcccctggtatgtaccatttttatcctctgcactcattccattgtctttttttttaattaataatttggtggataattttggaggataaggatgggcaaaccaaaaccaaaccgaacatatatagttgttttagtttattagttttctcttccttaattagatccacgttggtgacagtatgtattagttaattttatcatgattttttgttacaagttggaaattctactaatgttgatcctttcttgatgggaatatgcctgattttgctattcattttatttctatctatttcatttgattatgttactatccccttgccaattattattccaagtatctggcttccttttgggtcgtcgtgatgtttataattcgtaaattgtaatcggtcgatcggagtggcttttatgctttctttcccaaaagactcattcatgtgcctgtggtagtagtagatatagatatgacattcaatgttgaatgatctgattttgagagggaatgaatctttagttatatcatatatgtttaagtttcattttactttctcaaggttgtgtataatctgatattcatttaccaaaaaatgaaaatgaaatgatataaagcctgagacacacaaacttttcatgtttacatgtaaacaaaaacaagaag

SEQ ID NO: 103632 - DNA, 463 bp, Mimulus guttatus
  Intron number 1 from transcript mgv1a000687m (locus mgv1a0 00687m.g) derived from phytozome v7.0 (chr-ID scaffold_121 ; pos 304346 to 304808 reverse strand)
atctcttcttcttcatcatttttctttcacttcaggtatgaatctgatcgtcgatgctcgattttttccttttttttttttgtagtaataattgcctgcaaaagtttccgtgatcgtttccagtaattttctcgtatcttctgttagggatcggattttattttttccttcgtcgatttcaattttttgttttgttttgtttcatgttgtttacagacagtttcgataacagcatgttaatcgcttctgagtattttttttttgttcggatataaatgatttttttcatgaaattggaatttgtttttatatatttgatgtttccgtggatttattggtgttcgtttgttgattatggcggtttggagacggaatggaagctcatagtgcataattttttttgttgatcaagtgttgaattttggatattaaggagtattttctttgattttgtcacagagca

SEQ ID NO: 103633 - DNA, 668 bp, Mimulus guttatus
  Intron number 1 from transcript mgv1a021482m (locus mgv1a0 21482m.g) derived from phytozome v7.0 (chr-ID scaffold_68; pos 569404 to 570071)
gtatcaaagctattattctggtcagatctctctctctctctctctctctctctctctctctctctctctctctctctctctctctctcataatcaaacggtgatacggggaaatggataaacacggtgaaacgacaaatcctgccaacgggaatacgggaacttgggggaaatgtgtaaatattaaaagtataagggtacatttataaatatgctatattaaatgtaagtttttgttatatatatatatatatatattatttttctgtattttcatacaaatatattaaaaataaattttacaattaactataaatttgcagttgatcacgaaatcatgaaaataattagggaaaatacaaaaatatttgaaaatttgctattcaaacatgtttctaaattttaaaaaaattgtaaaatggccgataaggtgttcagtaggtgtcttcaactttccgacatgaaacgtttccgaaacgcggaaacgttaagaggttgaagtttccgtgctacataggtttcacctggatcatttcatctttttacttggcattacttttgatccaaaccaaacctctcactgtagtttttagcattgttttagtaattaaaatatataatgcaataaacgcaggatataatcgccggaggaaccgatacatcagccgc

SEQ ID NO: 103634 - DNA, 1004 bp, Mimulus guttatus
  Intron number 1 from transcript mgv1a001105m (locus mgv1a0 01105m.g) derived from phytozome v7.0 (chr-ID scaffold_7; pos 2011495 to 2012498)
cttccaaagaggccaatctgttcaagctcatcgttgtaagttttttcgccccccgtcgagattctaaaatttgagatattgttttatctagggattttgccgaacttgtgattgaaattttgatgtacggcgaagtgtaaaaccctaggaattttttttagcagatttgtcgatgctttgactctgtcgtattgtttgttttttttgtcgaattgtagtgttgtagactcgcagttcatgtttttgtattcaacatgcaggcattgcgtatgtgattctttgtaatatttattttcatctgagcatgcaatagtcaattgtgttgaatagcactttgcattcgactgcaattaagtgaaatctcagattttgagtgcggaaatagttatttctgtttgacatattttaatggggagatagaaaatgaagtacattatgggcttctgggacgacctgcttatcaattttttctttattcgtatatttatgcaaagattcgagaaatggatacatgtttcacgtatgtcttgttgaatgcttgtagcttagggatcgatgtagcttaaagttgcaagacttggtagttagggtacattaagaacaaatgcacatgagtattggaatttggaagtgatcatgtaatttgttagagacattaaaatttgtcgactgaagaaaatgaagaggaatttgtgatgaatactgcataattatgtttataaatcggtaatattcacgagctgttccacctttcatggaattgtttattagaatttgtactatttaaaatgtaagtacatacatacatgagtggctttataaaaaaaatccactgggtaaatgattcggtttccaatactaattctaaagtgatggtacacgtttttgttatgcaagtgtacattctaacgcattcaggtctatgattatcataagttttgagacatcttttgaattatatctacgcagaaatcctacgaaacaaaacagtacaagaagggtat

SEQ ID NO: 103635 - DNA, 489 bp, Mimulus guttatus
  Intron number 3 from transcript mgv1a000055m (locus mgv1a0 00055m.g) derived from phytozome v7.0 (chr-ID scaffold_4; pos 2921562 to 2922050 reverse strand)
gctagagttggaggctgttgaagctttcctggtatgtttcaaaattaatatgctatttctttggaacgactaatttagttggtagtacaatactaaagaacattactgtcattgagaaatattagttgttaaatagtaacaatgcatcttcccgttgcctgcattaatagaggtacgtgtgaaactgagaatatttaggaaattcacgattctggttctgatatttactagatgctgtataacttgcttcatgagttaaatgtttgaaaagttgatagaatgtgggtaatacggccttctttcctggatgggttatgtccactccccagtttatttgaatcactttatttcattgttaagacatgggttgctaaatgttttaattcctttgaagacttttgcactctagttttgctcatatttgtttttccaggagttgcatttcttataagatattcttaattggatgagtaatgttccatttgtagg

SEQ ID NO: 103636 - DNA, 939 bp, Mimulus guttatus
  Intron number 1 from transcript mgv1a004360m (locus mgv1a0 04360m.g) derived from phytozome v7.0 (chr-ID scaffold_148 ; pos 575303 to 576241 reverse strand)
tcaattgtcttccgccgccgctttcttccgatccggtaactactgctcttcgtttacgctctcagatcaagtttccttttttttttttgacatttgctattaggttcttattacctcgtttaaatcttattgtttgacctatgtttgtttgagaagaatctgacgtcacttgtgttgtatgtttaccttgaattgctgcatcgaactcattttctttgttttctcatactcactctcacttgttgactttttttgtttgtttattgcttgtgtaagtcaactcatgttatcctgcttatctcaacattccttatccttacaaatcgttttggttgttgattaaattacggccacccctgaggtaaggtcaaattacgaacaaaaagaacccatcgcgattggataattacgatcacccctcgactatgaatcttcttacacatccacccttatgatggaaaattcaacgtaattttcttgatgcagtggaatattctttagtttgtactcgtttcgtgaaaaaaatgtagtttctcatgcaccaaaatctactacaatctgatatttacaagccaaaagacacaaattatgattatcttatttcaaaatgtggagctcgaaatacggagctcgaatgaggtttaacgtgtacaaactagagaatattccacataatctagaagattccactaaaaaaggaggggttttttcgtaatttgacatcacctcaaggtggccttacctcaggggtggccgtaatacgattataagtttatccatgcaatgaagcgaataagtttcaatcttcggctaagattgagctttgtatatacggtttattgttcagaacccgattgtgcttgttagtttatccaccgtacatctttctttaatttcccttgatgaacttacactttgcttacttttgtccagcattct

SEQ ID NO: 103637 - DNA, 399 bp, Mimulus guttatus
  Intron number 2 from transcript mgv1a000613m (locus mgv1a0 00613m.g) derived from phytozome v7.0 (chr-ID scaffold_109 ; pos 629236 to 629634)
ccattcacagggtatcactttttccaccttttttttataagtaaaatatatttgaggtttgataattgccacccacaggcaggcagacaatcatgttacaggatagcctgcacctacaatatccaaagaaaaagttactggaaaagaaaattcacgttatataccatttgttgataatggggttattctatctctttaaaatacgttccccatgttaaaagaataaaccaatacatacaatatctaaagaaaaagtttagtgaagaagaaaagaagggactataacttctattagtgatggggtattctctctctataacataagtttgctgagatttccattaattgttgtgtgatgttcatgattgcagattctggatcagtataaagaatctcgtg

SEQ ID NO: 103638 - DNA, 220 bp, Mimulus guttatus
  Intron number 2 from transcript mgv1a012210m (locus mgv1a0 12210m.g) derived from phytozome v7.0 (chr-ID scaffold_115 ; pos 812047 to 812266 reverse strand)
aagagaagttgctcgcactgtagttggtattataggtcagtttctttattttcattttttctttagcaaattaattttaataatttctttaaaatctcacaaattgaaaaaagaaaagaaaatccgactctttattttgattttatttggcaaactaatgaattcttatataatttattttccagggaacatcatttcattcgtattgtttttgtcccct

SEQ ID NO: 103639 - DNA, 852 bp, Mimulus guttatus
  Intron number 2 from transcript mgv1a008372m (locus mgv1a0 08372m.g) derived from phytozome v7.0 (chr-ID scaffold_50; pos 63578 to 64429)
ggctggcctgtgagtctcatctctttcgattctcgattcgcctttcgttccatatgtgtttcttttttttttttaagacgatttcatcgttagtgagctctaccactgattttgcttcgagatttcaatttgatcaaacaatcgtgtttttagtctatgcaacagtgcataggaattttaataaataagtcctgttcggtttttattttaatgcatcggaattttaatatacatctttttaaatcatgtttgttgcacaaccagtggcgagtccaggaatttgttacagggtgggtttaaatattcggatccgaaattttcttgaggaattttttgtgacaaaatcaaaaaataggaaaagaaaaaaagaaatgaatttttttagagcttttcttgcattaatttggattttgggtaggctaattaataaaaattggtgttttttttttttttgcgtaatttggattttgggtgggctaatgaatacaaattggagtttttttttgcattaatttggattttgggtggacttattgataaaatttgggtgggctaaatagatatatgtgtataatttaaaggagaaattatcaattgagggtggactggcccctgagcacaaatgatgttcttgaaaaaaatttacttatgtttattttttaattggctcagtaagctgaaatatgttctaaaaatcaacagagccaattacaaaatcatttgcatcattcacatatttcgtcttctagttccttgttagtattagctagaattaaaaaaaaaaagctattaacgattagtcatattcatgcttcgcccgatcataggaacggccagacaattggcgcgata

SEQ ID NO: 103640 - DNA, 1023 bp, Mimulus guttatus
  Intron number 1 from transcript mgv1a009186m (locus mgv1a0 09186m.g) derived from phytozome v7.0 (chr-ID scaffold_32; pos 492361 to 493383)
gagccggcccagctgttaaaggtagactttgtaaaaattgattaagaataaatcgtcttctgattcacaagtaattgttggttttgatttatgtagttttgtggagtaattgttctatcggttttgttttatttttatttatttttttctgaaaggggtcggtttctatttgctgatgttgggtgtaattgaaggtgtatgcggccatgagaatctaaggtttcttgttaaaagtcgaattggttacatgttctgtggattatggtgttcttaggtagaaataattgttaattgaaatttgtccaatctaaatggaaggataaacattgattaggtgctaattttgaagatgtttaaatggtttagttcttctggtttcaacttaaatcaatcagttaagagttactaaaaactagagatttcgaacaaacgtggatattggatctaaatcatgttccgtctgatgataattgataacacagtttacaacttagttattaatttgttgtattacttcacgagggaactgccggtacttgctgctgtggaattattaacatttcattctggattgtatattaatatcggttgtcctatttattgaaaatcgtaaatttctttttttttttcattggctaaacgagaatcggttagtcacgtgtatatgagcttactgtatattgttctacttatcaacttggtttgggatgtcgtttgaaatagcaagcaactttatgatatctgtgcactgaacttgtgctgtttgactctgacatgttatctaagttgagactcttaagtaaaattgaaactgactttaaaattgtagtcgcaaaaattggatagtaatattggtcgatgcatgttaaatctgtacgtgttgctggacatcaccattatttttttccttatattttaattcttctagtccgacttgtatattgtggcatttaaattcaaattctgaacgtttattgtggcattacagattctagtgacggggcattagaaaacccttttctg

SEQ ID NO: 103641 - DNA, 293 bp, Mimulus guttatus
  Intron number 1 from transcript mgv1a016896m (locus mgv1a0 16896m.g) derived from phytozome v7.0 (chr-ID scaffold_115 ; pos 56658 to 56950 reverse strand)
gcttagtgtggtgagtgttatttgtaggattaactttgaattttgatattcttgagccattgaatgcttttccaggattctatcattgcagcaattattaccttttgttggttgaatataatttaagtttaccaacttatggtggtaactattcgtttcttaatttatggtggctaatatccttatctcttctacacattttgatatttcctatcttttaatatattatttctaattctgaactcttgtatgctttagtgtttttcaaactgcaaattttcgacaagaaatca

SEQ ID NO: 103642 - DNA, 960 bp, Mimulus guttatus
  Intron number 1 from transcript mgv1a021880m (locus mgv1a0 21880m.g) derived from phytozome v7.0 (chr-ID scaffold_30; pos 1321447 to 1322406)
tgtgggacgagtgggtccaggtatatttcttgctacggttacctgtttcgtttttaatttggaatagatgaaattggattgattttgaattgactaactaattatatggttagtaagatgttcggttcattggattagattttgtattgaatccgttaaattctggtataatacgtaatgggggtggaaattggaacagagttctgttaattacgatccaaatatttccgattttatggaacaatttttttcattccgaattatgaaattcgaatttctgattttccgatttttttaacggagttggaagacatatttaaatctgatttctgatcggctttaaatttccaaaaaaattgattttttttactctaatgtaatttcgtctcgaacgtagaagtgtagctgcttttgaagtttctttacttgttttgtttttcctaaagtacttattcctattggaatcgatttttttttctttatgaagattacacttataatgtcaatatcataatgtattttatattatcggtgagtaaaagtttggaaattccgaatcccgtcgatttaaatccgaattttttcgattgtggaacaagtttttccattccaatttccggaattccgctttccaaattttccattttgtcagaccggaaaccgaaatagcttttcacttccaaaaaatatgtttttttttttgtggaagtgctaattttgatccggtccgtccgattgacactcctaatacgtaatttgtctataaaacctcaaacttacaaaaaaattagatgtaattttaaggataaacagtcttcctcatttagtcacccctacaaaattagtctcatgggtacgaaataatagcatttaattttatgctttcattttcgtagcaggtttacggatgtggtaactgaacaaggtcttaattgttattttttgtacagattcataccg

SEQ ID NO: 103643 - DNA, 401 bp, Mimulus guttatus
  Intron number 2 from transcript mgv1a014627m (locus mgv1a0 14627m.g) derived from phytozome v7.0 (chr-ID scaffold_121 ; pos 662199 to 662599)
gacccagtgacagtaattcctcaaaccctaattctcaattttagattttttttttaattttttttttattttaatgaagaaatttttgcttttttaaggttcttgattgttgggttttttttttttttttttttcctggtatcaatttgaatcagagtatatgttattggttgtatcattcttgattttctatttatcaattcttgaactaagaatttgagatcaattctatttagggtatgtgggattgattgttacaggtcgaaagacacgtgggtctcgaagaattcgagacggctcgctcttctacaaatgatttatcttttttcgttacgtttttttgatcgacaactgtttgttaaatgttctcaatgaaactaactaactcgtaggtccttacc

SEQ ID NO: 103644 - DNA, 608 bp, Mimulus guttatus
  Intron number 3 from transcript mgv1a007133m (locus mgv1a0 07133m.g) derived from phytozome v7.0 (chr-ID scaffold_16; pos 1017169 to 1017776)
tttcaacagcggtatatatacgcttacgatcatactattcttattattgatttagacacttcctatttttttaatttttttttaaatcatcattgaacattataacatactcgagaaaatgcttactcacagaaataaggttattttttgtcacgaaaagattatgttatctagctcttcgccttaaaattattcatttttatcttcatataaacgcatcttgatattgcaatttttgcgattgtcaatctttttcatgtttcgcattctcatttttccttcctctatgttacatcgaattgctaaaaactacaccatgttattttattgacaaaaccccccacgataatttttttagcacttagtaccaattttttaaggggttgtgtgctaaaaaaaattgaatggtaggggttttctgcctacagaatagtacggcgtagttttttagcaatttgatataacgtaggggtactaattgcaataaacccatttgtaaaatgtagtttcacaccatctctgtttctcaaaaccaatattaaaaagatcttcaccgtcgatttcatcaaacaggtagtgggaacggtcggatacgcagcaccagaata

SEQ ID NO: 103645 - DNA, 276 bp, Mimulus guttatus
  Intron number 1 from transcript mgv1a016633m (locus mgv1a0 16633m.g) derived from phytozome v7.0 (chr-ID scaffold_181 ; pos 432770 to 433045 reverse strand)
actacatcagagtctaataaaactgaagctcccgggtaatgactcttactactattgcgctgtacacattttttttcttcttcagtgcctttattttttgcttttagttttaattttattagtgcttgaaaattagattttaattggttaacatttttgccttatttgtatgtctgaacataaagattcctccaacttcgtagaaagtaagtacacttaatgtttctttctatttttatagtacctctacggacacagggaacccttctgcgcaaa

SEQ ID NO: 103646 - DNA, 673 bp, Mimulus guttatus
  Intron number 2 from transcript mgv1a012858m (locus mgv1a0 12858m.g) derived from phytozome v7.0 (chr-ID scaffold_79; pos 343155 to 343827)
tgaaaaagtatgcattagagtctgtgttcgtattgtatggtcttgataatttatctttccttttagatcagtgtatgtagctacttatatcataatgcgtgaagtttactagagaaaaacgaaggaaaataagaagaaataatgacttggatagaaatggtcttctttgtataggttgcatttggatagaaaaacctaatttgagtgaagcatatcaaatgacttcacgtatgatgcatttgaattcactatagtaactcaagaagttgttcaaaagtaggagctaaacgattacttcatcactttaattcttattctgaaaaaacagcttgccgcttgttctttcacgttcaagaagcctcgaaacaagttagttgatggaacgtatgatagtaatttctttctgttgattgctttaatgttgaatgttagccgcatgattgtttcatctctagataaatttgtgccatcttgtgaaattattgtggaaacatattgcttcaatagcttatcgacttctcagtttttattttggctggaaatttcgtttcactcttggccaccgggtagcttttcttaatgaatatagttcctctttctttgtattgctaataatatttttcaaattttgtatctaggaaaaagcttgatccgctagaagcttatataccag

SEQ ID NO: 103647 - DNA, 666 bp, Mimulus guttatus
  Intron number 1 from transcript mgv1a008170m (locus mgv1a0 08170m.g) derived from phytozome v7.0 (chr-ID scaffold_3; pos 3186318 to 3186983 reverse strand)
aaccctcaagaactccaccaccaccatcttctcatgtaataatttctctttctacttttaaactgtgtttttttaattatttatttttggtgggctgtggtttgaatttatttttttgtgtgatttagctgccaaaatccattttctgcctaattcttggcgacccaattgagaattgtaggctgtttggtcagaattttagggtttggttttaatttaggtctaaatgcagttcccagttcggattcttgaaaatgaatctagggtttcgatatgattttttgtgtatgtaattggttgtgtatactgagccaaaaccgaaacacaatttttttggatatgattggttggttgtgtatgcttatgattattttagtttttggttttacttgagagaaacaaatgccgagcttagctcgattgttaaagtcgagttccacagtcgaaattttgtcgactggtgttacgtcattaggaatatgtttaaacggcatccaatagtttatagagacgaaaagaaacagcatataactttgaatttaattatggtgtcgactaagcacaacattcttgttcaaattcgccaccgccccttttcgtttttttcaccacaacattcttagtctcggatttctttttaattgcgattgtgtttatttcgatagg

SEQ ID NO: 103648 - DNA, 940 bp, Mimulus guttatus
  Intron number 1 from transcript mgv1a005844m (locus mgv1a0 05844m.g) derived from phytozome v7.0 (chr-ID scaffold_33; pos 1777019 to 1777958)
gggttctcaaaattgctgattttgggcaggtcagattttggtttttctccttttattattgtgtttgtgcttcttatagattctccaaaaccttttatttgactgaagatatgatgatgatgtttcatatgaatgcactttgtcaagaaattgagataattggaaaaatgatatatttcaaacaccaatactctgcataatagtcctaattcctaagttgagatagcgaaaaacttttagacaggcttatctgaacaatttgccaccaactgcctcgttgaaatgtatatcaagggtaacatccttttcccatgctactttttgaatgaaaatattcaataatcgcctctgtttcgttgttctgtggtagaagggatccatatttagctttatacttctgtttgttgcaattattttaccgttgttagtagaatttgatcttgggatcagatagatacctatctttcttcttacattgtaattgtcaaattctaggaattggttaaaaaatatcttcactgcaaaatgctcgagccaagctagcattacaaatcttccaaagatgatttcagattttctttataaatgattaggactatttcatgttaagaattaagttattgtaatttacgaaggatacataataaagtccatttagatttttggtggcacattttctggttacttatattacaggaaggaaagtgatttttttttcttgatctgcatcgaatacgattatttgtatatgtgaatttatttagattgtaaaacgttgactggaagtcggcatggctgtatatgtgcttgagatattaaaaagttttaattttttctcatcatgttaaaaagttgaccaatatttacaactgcagctaaatatctttataaatctctctgttcaggctaggatacttatcgcacctcaatttacgggcaa

SEQ ID NO: 103649 - DNA, 896 bp, Mimulus guttatus
  Intron number 1 from transcript mgv1a003155m (locus mgv1a0 03155m.g) derived from phytozome v7.0 (chr-ID scaffold_242 ; pos 231163 to 232058 reverse strand)
atccaagagttgcagaaacctgcaggtaaatctttttacttgtttttttaattataattattcaattaatcaccgtacaattcgattctgcttttttatttttatttttataatttaaaatttaagttcttgaaattgagtgttatattcttgtctctgttaaattagccttcaaaatcgtcatgaatggcaacaagtcattacatgccagggcttttcttttaactaaaaactaaattatttattagtgggacaggaaatctgggccatgtattactttctaagatgcagcttattctatgtgatccatgtatacttactatttattatatgtttattatatatgacattactgattactgtaatgcaagatcttaagtcctgccaaagttttgttaaaattaaaaacctgaacttgccggtatacttgtgttgttttctttaaattttcccaagtctgaaatgtacctgatgtatttctaaataaaagattaaatattctctttgattgttaaatacttagctgaatatcattacattaattagtaaatatgattcttgaatgtggtaaggtattggtacttgacatttggcttaaaagccttgaacatttttcctggcaacaggattagctttgtaccttttggttttcgacacaaatagtatcttatattcttgttctatgcatttcgtagttatatcatacgcttttacttcatcttgtccgtaaaagatgaaaaaagtcgagtcttttgatacttctgtttaactgaaaaaaatagtaaagaaactgataagttcaaactatcagtcccgactaatattttgcttgcttctgatgacaattgtgttgataccgaaattgcagatatttggccgaggcccacgtccaagcc

SEQ ID NO: 103650 - DNA, 922 bp, Mimulus guttatus
  Intron number 1 from transcript mgv1a015282m (locus mgv1a0 15282m.g) derived from phytozome v7.0 (chr-ID scaffold_68; pos 778450 to 779371)
gttctcaagtaacttcctcactcttatcaaaatcaaaatgatgctgttattacattttgtgaaatgtttatgatttggatgaataagttgtttcgcacttttaatttcgtttaccgatgatgttttttctgagtttcatgtgattcaatttctgttgttctatcttaatcctataattttcagctgataatagttattgttagcaactgaatacccaaaagacctgcattttgcattctgatgctgaatgaatcatttttttctgggtgttgggagcttggaattggcgaagcttttgaattcttgtttgtaaagcttttgatttacaaagaaaatggcgttggttctgtttatttaaacaatgttatagctgtattgagagttgagaagcatcgaatcgttatggggtcttactattttattcgatgtgtttcgaaagaatttttggattcattagtagtttgcttcagcttttgtttcggtctaggttaatttgttcgtgcatccaacgttgtctgtgtagaaacctcggttatcattagagaaggcttatatcagtagagagtgaagaatcatcgaatggttatggggatttaccattctatttgatgtgtttcgaatgaatttttcgactcattagtagtttgtgtcggcttttgttttggtctaggttaatttgttcttgcatccaatgttgtctatgtagaaacattggatatcattagagacggcttatagcagtatcggaaactgtgtttatgctgtttcaaacaatgctcgtctattatccgacctgatttgggcaatgactctttaaatatttaaccctcttgtttatattaattgcaacaataattatttgctaagtatcgatatttggttatcaggacggagctttgccggtttagcggacacaagatat

SEQ ID NO: 103651 - DNA, 1029 bp, Mimulus guttatus
  Intron number 1 from transcript mgv1a024343m (locus mgv1a0 24343m.g) derived from phytozome v7.0 (chr-ID scaffold_50; pos 1347452 to 1348480 reverse strand)
ctgcagctagtggtaatttatctttatctcttactacgtttttgcttttcgtgcattaagctaagggttaaatataaatacaaaaacacctttgtactatgaactttgtatcatatacccctgtactacacataaatacaaaaatccccctcacattacattttttcaaaatatgacaaaaatacccctactcaagcatatatatatatatatactttgagttattttccactatatattttaacattctcagttaattttacgtgggaaattttttggtatgtagctgattttttttctccaaaacatctaattgcttatatttttttaattttctaaataaaaccttttattttttgtcattttaagtttcttcatgtttttttttcttaaatgtcttccggtagttcaaacatcctaaggttacaaacatctttaggaaaaaaaataaagaaattcaaaatgacaaaaataaaaggttttatttagaaaaaaaaaacatataagtaattaaatgttttgaaaaaatatcaaaatatcaaaatttctcaagtaaaatttatcaaaaatattaaaaaaatatagtgaaaaatggctcaaacaaacccttatatttttaggcttaacatgggcattttcgtcatattttggaaaaaatataacatcatgggggttttgtatttatgtgtcatacagggagtatataatacaaagttcataatataggggtgtttttgtatttaacccttaaactaatgcaaggagtagtgtcagaacttgccatctttaatattaaaagatttagatgcttatcttttttttttttggataagaatttagatgcttatcttcatttgtcccataattcattatttaaaaaaatcgttttataatttggatggtaattaattaattataacaccatgcgcatgaatactgttgcttattcgttttgagacgttggaataattttaactgtttcgatcacttcatacggatggatatatgcagctctcaatttgttgaagg

SEQ ID NO: 103652 - DNA, 678 bp, Mimulus guttatus
  Intron number 1 from transcript mgv11b020741m (locus mgv11 b020741m.g) derived from phytozome v7.0 (chr-ID scaffold_2 59; pos 45359 to 46036 reverse strand)
acaaaaaacactcgctacaaaagacacgcacataagtaaaagtacaaaatcatgcacaaaattactcacgcaaaagtgcattcgcaaaaaggttcatgaaaacacaagctacaatcctaggacattaatacaaatcaacaaacatgcacaaacacactcgctcaaatggacatgcacaaacgtacatgtaaaaaaacatgcgcaaaagtgcattcgcaacaacgttcttaaaaacacgaaatacaacactaggactttaatacgcataaccaaacaacagcaagaacactagatacaaaagatacagtggagtgtagaaataacactcaacgtttacgtttacgtggatttttttatggattaaatttatatttctgttgtaattggtggatttagtattctataggtacatattgataatgaggtgtccatgatgcaaaaatgatcaaagagtaagaaaagagttgcaattaggaaaataaaatcaaattagaagagtggattcctcaagatcttcggtagtgtccacgaagtcgagcataactttctcatccggacgccaaatcaactagttccggcggcattagaaacctatttcagctggcaacaattcctgtctaatgtcaaatttctaaattcggactcgatcatggtcaaaattagattccaaaagcgatc

SEQ ID NO: 103653 - DNA, 989 bp, Mimulus guttatus
  Intron number 2 from transcript mgv1a011236m (locus mgv1a0 11236m.g) derived from phytozome v7.0 (chr-ID scaffold_85; pos 342421 to 343409)
atcccgccgattatcggcccgacattgcctttcaggtttgctaattgctcgcctacaaagtttattatgtgtttgtcggtacagaactttggttattgtgatgaataagagttctttgctctgttattttatgtacagtttggtatgtatctggttttggtggcacttacaactgatataaaagaatatctttggtagacttttcaacttaacatatgttatgatgctatagcacccacatttaattcacagcagagactacgagtgcattttttttaaaaccgtactaaatgtgttcgatatttacaagaagatagattttaaagatatgtgtaatacaattttggaggaatattaagtcataagaagcctaaatctggactcgagctccgataaaactgttgacatatgcctactcgttggactcgtggtattcttcatatgtcaagatattggttcaaagtaaattggaaataagattagtttgtctattggtcaagttcccctgtattcgtcgtatttttctgtgaactatgcataaagctcttgaggccatgtttggctgccaagataggattagccaacataagattaaataatcttatgaaaacataattgttttggtggaccatggaaagtccaccaaaaagctccctaaaaggcaagataagtcatgataacacataatatttccaggtcgactcagaaagttttgagatttgccaaacggcaaacaaagtccaattatttaggtaatcatggctaatctccccaaccaaacaaggcctagatgttctcttctcttgcctttgatacacaattttttttttttacctgcaaaactattgcccgaaaaatggatatgttttttcttccacattagatattattgatctcaagttgaggtactttctgtttctaacaaacgtgcattcgacatttccaaacttttaggcgattcaaacaattttagacagccgtgtgaacaa

SEQ ID NO: 103654 - DNA, 1039 bp, Mimulus guttatus; identical to SEQ ID NO: 103573
  Intron number 1 from transcript mgv1a024002m (locus mgv1a0 24002m.g) derived from phytozome v7.0 (chr-ID scaffold_138 ; pos 535876 to 536914)

SEQ ID NO: 103655 - DNA, 796 bp, Mimulus guttatus
  Intron number 3 from transcript mgv1a013599m (locus mgv1a0 13599m.g) derived from phytozome v7.0 (chr-ID scaffold_246 ; pos 210023 to 210818)
gagactacacattatgtaatcaaacattttcttggccttctaattgcatttttatttatttattattttgtatattgtgatttagcaatttagaatttcgctcatggaatttagaagacagttaaaaaaaaaattatctccggttcaaaattaatgaaactctgattagtccaactcaatcagagggatcagatcgaaattagcatttttgggaaatttttatttattttcagaaagtggaaactaattccaatttcgttccgtaaataaaaattgaaaagccaaatcattaggatatcggaataaatagatttattctgaaatccgaagttttcggatctgaatatgcggaattcaaattcttttattcatctgtaatacgaaatacataataaatatttatattataattaaaagtgtaattttcagaaatactttatgaaattaaaatcgtatcggaatacggaatcttatgtaattcaattccattaaaaaatctgaaaaatcgcaatccaaacatatagaatttggaatgaaaaataaaatttcaaaattgaaaagttttgggccagaatctccggaaatcggaatttcagttccaatttccacccctaggtgtaacattagtagctaactgcgattcctcccaatgggaaagtgaaatgtctatattataaaattttaattaaatttaacattcttaccttcattttatggtttttgtttctaatctcacgtaataccttcttaaatcccaacagaatcgagggcgatcattaggtactacgcggagaaa

SEQ ID NO: 103656 - DNA, 1043 bp, Mimulus guttatus
  Intron number 1 from transcript mgv1a000547m (locus mgv1a0 00547m.g) derived from phytozome v7.0 (chr-ID scaffold_247 ; pos 193031 to 194073 reverse strand)
ccaaattcaggacatatttctcgaacaatacgaaggtaacactcgccctccgtttcgttattgaacgtctggatgatttttttatttatttttattttgttttgtttttttatcgtgatttgacgaatcgttttaacgatggaaattggaatcagcggaaattagattttggatattcgaaaaatttgaagtgctaacttaagagaaataaatagttcgaaaaattggaataggatttcggcggttgttcgagattcacctatttgacgccacctaatattttttttattttttatttttttctgttattttgtaagtagtgttggattagatgacatgaatacgaaagactacaactgctgaagacccagccggtgtcaataatttattcgattttgaatttgctaataatattgcaacaaattgctcttactgctgatttttttttattgaatattctttgaagaaattggttccaatcaattgatttaagggattagtcagttaaagttcacgatcactgacaattttaatctgtcgaatcgaaggagcaataccacggtatgcagttatcagaaatagtacagcttacatattgcgattggaattttgaaaaacctcctcggatgagcttggcaagaggcctttttatagttttcgagctattcatggtgcaggagaaaattattaagaaaaaagtgggggtttaacaatcacttctctgctcataaaatcttaattttatactccaaaggaattcaacaatgccgaggacaactttgttcctgatatgtctctcattttatatcttatttattcccattttgataatttcagatggatcagccaaaattaatctccatttattcgtatcgagtctttgcttcttgttttgatgaatgtaattgatcaattacttccactttttatgtcactggtttgttttgaatcagaaattttgccctattatttgcactagtttgctacattcacaatttctttaatcacttttaacaggtttccagaagaggaagaaacttacg

SEQ ID NO: 103657 - DNA, 937 bp, Mimulus guttatus
  Intron number 2 from transcript mgv1a001534m (locus mgv1a0 01534m.g) derived from phytozome v7.0 (chr-ID scaffold_4; pos 2967111 to 2968047 reverse strand)
gtcttttggctgtgcctctgctgaaacaccaggtatatgttctttacttggtttttgtgaaaacacgattttgatttcgtccgctgctactttgtggctttggtgaagagcaagagcaaaactgcgtgagataaaattgcctcgaattcctggagaatcccattttttcctcttcttattttcgtcattgcattagtcttgcatttgacatttctgttttattttaaatttgtgcctgcctgtcagccagatgcacatttattattatgaatgtgaagagctatttagctgatccatatgtctaactttgaataatttagtatagaccctggataacttgtaagtcacttgaatcttaacttaatagaattgactgaaacatgtgtcttgtgaaaaaggatgcacatatgcactgtctgaatattcttttgcacggatagcttttgttactccacatctcttgaataatttttgaagaagaaaatgaacatatctacagtacaggaaatcataaaaatgttctccaaatgaacatagaacaactaggttttagttattttggtattttagtgggaaccgcagtggacctcattgactggagaatcattttgtcaaccttgtattttatacctgtaagagtattatctccgcacaagtcttgcatttgagaaattggttcaggatttagacatgacttaggagtgtttcttctatttttttttgatgtcatggtgctctgttcatctgattgaaaaagtggaactggcgtcagatttatcattcactcttgttagcctatattacatggggtttcattttacctttttgattgccatcattactttgtacccttagaaggatgggtattatttttttttcgcacaccatctgtactcacacttgttgaatttctgggcagcgaattgctttatcctgg

SEQ ID NO: 103658 - DNA, 610 bp, Mimulus guttatus
  Intron number 1 from transcript mgv1a004460m (locus mgv1a0 04459m.g) derived from phytozome v7.0 (chr-ID scaffold_60; pos 1321630 to 1322239)
atttctcgtgctggtttcctgaggcggcaattaaggtatttttttcctgttaattaatcgtttttttttcttcttctcgcagttcatcttctacttatcgcgccgcttcggattttgattattgtgtgtgtgtgtgtgtgtgtgtgtgtgtgtgtgtgtgtgtgtgtgtgtgaactacactgatttatttcatttaactgtatttaattgagttcagcatttatgaaaaagtgtaatttgagattttgccctctattacttatccgagtaattgttgtttgttcttctactgcatgagacacagattgattgttaatcacttgtatgtatttgaaatctgaatttgctcaattttttgttataattggactatttaattttaattagtcatataattggttctgcagtacagcattgtgtacttcattctgagtatatccttgttaatgtatgaagttggcacggaatttttttttcggttgcaacaaaatcattgtatttggtggtctttttactttataatggtagactataattttttattttttatttggaacatatttcgtgaagtataaatgattttatatggtggatttttcagctagtagcc

SEQ ID NO: 103659 - DNA, 408 bp, Mimulus guttatus
  Intron number 4 from transcript mgv1a004899m (locus mgv1a0 04899m.g) derived from phytozome v7.0 (chr-ID scaffold_7; pos 554526 to 554933 reverse strand)
gaaaaatactagcagaaggaattggggaagttcaggtattttattttatcataataaaatatcggaatcgaaacaaattggtcgatgcctgagaatttctaaaaatcaaattgtcgctcatgcggcagttccgattacgaatacgttcttctctttatgacgtgtagtccgcccatagtgttgcattgaataagacatcaactcatacaagtgatagtttatatgcaaaaatattatatttgtctagcatttattttaattctttgattttttatatttcgtcttttatattattgtttctgtcaataacccataacgattcttgaaaaacgcaactaattaagtcgatatttgtttagctcgtctctaatgtcaggggcaatgctattatttcaggaaatagttgat

SEQ ID NO: 103660 - DNA, 166 bp, Mimulus guttatus
  Intron number 2 from transcript mgv1a003018m (locus mgv1a0 03018m.g) derived from phytozome v7.0 (chr-ID scaffold_271 ; pos 253102 to 253267)
gctggactttttcaatcttctttgggctttttgaggttttttttttttctttcttcttcattataattattatgtatatataaataagtttgaattaattgaattgatatgagtttgttttggtattacaggctaggatttataatagattttctgtcaaaggcaa

SEQ ID NO: 103661 - DNA, 581 bp, Mimulus guttatus
  Intron number 1 from transcript mgv1a010468m (locus mgv1a0 10468m.g) derived from phytozome v7.0 (chr-ID scaffold_98; pos 110813 to 111393 reverse strand)
aaattctccttgagggctttgaatccggtactcagataactcatttttttttaaattaatttatttatttcgtgtttatttcagtaattagaggaatataggtgttaacgaattgattttcacactgaaagtattttgatattcaaaaagtttgctgagtttagaattgggaaatacaaaattattgcttattttgaaaaaaaaacgagggagaattcgagtaaaatatacgaaatcgtatatatggagagaagcaaccaccatggatatatgctttaagaaattcatttgaggaaaattcctatttagttgttgtgaatgtgatgctcccttagttgctgctcgatttctttcatatgatatgtaactctgtactatcgatctattcatattgttgttgattgttgaaccattgtcttttgctcgagttaaattaacgagtctccgagtaacaaaaatcaaattgaaatttcgtgattttatgcatgataaactaatagttgctgatcttctactttatcactcaacagacactgatgtataacatcgatttcttgaatgtacagacgagctgatagaag

SEQ ID NO: 103662 - DNA, 696 bp, Mimulus guttatus
  Intron number 3 from transcript mgv1a010275m (locus mgv1a0 10275m.g) derived from phytozome v7.0 (chr-ID scaffold_4; pos 2150586 to 2151281)
actccatcgtcatcaacatcggcgaccaacttgaggtaattaatcaaccaatttgcattcaactcccctgggtttactctattactaaaagaactcccagtgtttttaagtattataaaagtttgccctataattccatttttagtagctaataacctataaatgcatcatttagggtgtttttcactaaaaaaaggtattctatgggttttatgcaaatatttataatacatatttaattaacagtttgacgcaacaatgttgaattgggatataatttcaattataatacttagattaagctatttatttttcttggttttaaattaactgattgttttgatttttcctttgacaattttgctcctattacttcaatacctaacaataaattccaactacaacacatacatagatatatctatttatttttcttacttcaaattaactgcttactttgaattttcattttgacaattttgcacctcctactactacaactactaatatttcaaaattcaaacatcaattaattctcacaaacagagcaactagagaaattcggttggaagagtatttcagtcatattatttacttattttccctaaatatacattttaattggaagtggaaattcaggtaaaaattataaaccaagatttgatttatttttttcctgtgtgaaggtgataacaa

SEQ ID NO: 103663 - DNA, 637 bp, Mimulus guttatus
  Intron number 1 from transcript mgv1a020183m (locus mgv1a0 20183m.g) derived from phytozome v7.0 (chr-ID scaffold_113 ; pos 756897 to 757533)
ttcaagcaaggagcttcttttagggttaccggaaagtgagtcttctaccaattttttttttaatttctccttcatctttttggtgttttttgaatttttagttttatttgctaatcttttttcatttttgtttgattgagcatgtactctctctgtaagtacttcatgaatgggatttggaattcggatttaatttcttaaaataattattaaaaattgaattttgtggccgtcagaaagcatgcatgttaactgtttgataatatgccgcttaagtaaagtatttgctattcgaatttaaaaactaagaatgggattttttttatgggtgaagattagatcatttaatttggaactgcccaattatgcatcatgctttgttgtagccatacttgaattggaaatcttcaataagtgtagctcgtttttcgtctttgtataagttagaaaagctcgtttttctgattttctggattccatttttttccatttacgtaagcgtttatcaagaatattcaaatcgttatcatagcctacattccacaagcatgttatgaagttacgtaagtttttcatttttcattttttcgtctcgtttttaggctgcaagagtacaatttagaggcagcgatagcgg

SEQ ID NO: 103664 - DNA, 518 bp, Mimulus guttatus
  Intron number 1 from transcript mgv1a005632m (locus mgv1a0 05632m.g) derived from phytozome v7.0 (chr-ID scaffold_2; pos 3779243 to 3779760)
gggcagcacggtatatagtacttgtttttttgcctttctttttttttctttgtagtttgttattggttgatttttgcattttttttgctatattagttgtgtatgttttcgttgttttgttgcaagaagtggccggaaaacttgaatatgttactctgccttttttgaataagccaattgttgtggcatttatagtaattggcatatttggtgttttatgtccagttgtttggtgtttctgattaattgccgtcttcaatggtaaaaatcatcatgaatttcttgaaaataacaaaaaggtgtaaagtgctttgagtccgatttcctcataagctgttaagctggtcaatgatattcaaacattgtttgtttttgctttgctcttgtgtcacggatgattccagtcttactctatgaacttctagtaattgatgtattaggtactcgtctttaggaatttggaaatagaggtctcgtatttattctgatagatttcttgacatgacaggcagctgctg

SEQ ID NO: 103665 - DNA, 591 bp, Mimulus guttatus
  Intron number 2 from transcript mgv11b024655m (locus mgv11 b024655m.g) derived from phytozome v7.0 (chr-ID scaffold_7 75; pos 13845 to 14435 reverse strand)
cagttttgcgtgagtaattttgtgcatgattttgtacttttacttacgtgcgtatcttttgtagcgagtgtttttgtgcacgtttcttgaagcccattcgtgtcctcgaactgtagcgggtattttcatgatcgctgtaggaatccaattttgaccatgttcgagtccgaatttggaaatttgacattagacaggaattgtagacagctcaaatagctttctaatgccgtcggaacaattcgatttggagtccggatgagaaagttatgctcgacttcgtggacactaccgaagatgttgagggatcctctcttctattttgattttatattcctaattgcaactcttttcttactctttgatcattttttcttcatgaacacctaattatcaatttgtacctatagaatactaaatccaccaattaaaaaaaaatataaattaatccataaaaaaatccacgtaaacgtaaacgttgagtgttatttctacactccactgtatcttttgtatcttgtgttttgctgttgtttggttatgcgtattaacgtcctcgtgttgtatttcgtgttcttaagaacgttgttgcga

SEQ ID NO: 103666 - DNA, 1045 bp, Mimulus guttatus
  Intron number 1 from transcript mgv1a005624m (locus mgv1a0 05624m.g) derived from phytozome v7.0 (chr-ID scaffold_17; pos 2255624 to 2256668)
attccttggcatacctaccccactctgtttttcaggtatgcttctctctctgactaaaatattcccctcttccttttttttttaattttttttttctgcatttagtttgtgatattcctttttttctctacctttttgtgatctctaacagttttactaaaaatattggtctaattgagaatgtgagttctcttatttgcttgatttttcacatgggtttgagattttgttggattccttgattcgggtagatgtaagggttttaacttttttttttagttttggatcgtcttaatttctgggatttatctctctcccgaaaagggatcttccatttttctcctcgatacgttaatgtctgctctgggtttttattttcattttttcgtatgattcatttggtgtttgtgcttcaatttctttcttcatggatctgggattttcttatgcatattgattttcgtgaatgggattctttacagagtttttagattctgtttttgatattttcctctgtatttatgatcggagtaagttaagctgttctcagatctgaggtttagatagtatcgatttcatccgagttgctcgaaaagtggagtatgcagcgaatgacgtttgatggctgttttccattggacgaaacttgctcattttaagcagttttaacttcaaaagttttaaccactactacgagagtccagacgtcatattttgcggttttcgttttttaaattattgcaatcgttttgaatattcgataaatatttgatgcatcttcaccgggcacacgtcccttttgtggggttttttctttttttgctagaaggagccaggcatttattataagaattaatgataattgattgccgcagctaatagttggtcgtttctgtgtgctttctcttatccgctaacgaatctttttacgactgatgcttttagaaattcaattatcgagacaaatacgcaattcatagtttttaacgctcgattgttgttgtttctaggtatattattcattggaactgcgcgccctcagtcg

SEQ ID NO: 103667 - DNA, 419 bp, Mimulus guttatus
  Intron number 3 from transcript mgv11b021529m (locus mgv11 b021529m.g) derived from phytozome v7.0 (chr-ID scaffold_2 7; pos 1021456 to 1021874)
ctagggtggtaattcagtaatttttcgttttcttatcgtctggcggatcaattttaaagatcatatatctatcttttcatgcacaataaaacctcgagttcattgcaatcagtatccatgtgtgacatcaaattgttaaagaaaactaccccgcgttattttttttagcaattagtacccctgcatcgggggttgcgcgtgctaaaagaaaaattgactcagaggaggttttttgtcaataaaaatatcatgggatatttttttagcaattcgatataacacaggggtactgattgcaataaacccgtacaaacccaaaacgatcaatgcttttatatatatatgatacatttcgaatatgattttcacaatgcttcttcgtttctactgtgtgtgaaattcagaaaggaagtgaaaaa

SEQ ID NO: 103668 - DNA, 823 bp, Mimulus guttatus
  Intron number 1 from transcript mgv1a006289m (locus mgv1a0 06289m.g) derived from phytozome v7.0 (chr-ID scaffold_36; pos 1239455 to 1240277 reverse strand)
gttgcacattcgtcttcactgcgaaattcaaacaggtaacgttacgtaatttttttctgtaattaattattggggcgattgtttatcagtgtgtttttcttggtagattatatttcaattattgatgatggccttttttttttttttttaaatttaataatgctaaagtatattaattaggatatgagcatgagcaaagtgttctgagttctatgtttggattatgctgctgctgcttttttttttttttttttttaaatggtgttatcatttgctattatagtgtttagaagatctaaagattaacctgtgtgaagattctcgattactcgattgaattggttagatgatttttttcgtgaatttctacgaatattagctcggattggaataaaattgtgagtaacccatcccacttatcggccttcaaagtgaaaacaatatttgttagtaatttgcttgcaaatcgttttcggaggtagattgaaaaacatgttgaagtttcactccccgtatacatattctatatgtgaattgaatttagctaagctaagttgtgtgcactttaaccatgtgcgttatgtttagagatttaacgagtgtatctttagttgaattgatcaccatttcgttgtatgtgactaatggtttatgtccttttgattggcaattagtcaatcttcaatatggattcatactctcgtattgttaccgaaaatttcttattttcttgatatttcgtatgatgccgtcatatacttacatatagtgtccactctgatttgcagattgtgattacatagtttctattaacttatcggag

SEQ ID NO: 103669 - DNA, 946 bp, Mimulus guttatus
  Intron number 2 from transcript mgv1a012415m (locus mgv1a0 12415m.g) derived from phytozome v7.0 (chr-ID scaffold_174 ; pos 498652 to 499597 reverse strand)
ccacatccgccgacctctctaccttcacttttacggttagttttattaagacactctatttgtctcatattatttgtctttttcacagagtttttcctgtctcaaattatttgtcactatacaattccaacgaagcattaagtgcaccgtcttcagttttacccttatcactcttaattaattaactgaaaaataattaattacaatgatattttagtgatttcctatgttttttgctatcatcgatacacatttattgattttttttaatatatgcaatgcaaaaaaaaaaaaagtaaaatgggacagatggactagtatatatatttttcttggctatattttatgtagttattgaattttactacttaatttcgagagagtcgcgtccatttattttataggcaaaaggaatttgaaattgcattttgaatatctactatatggatatttattgagcaaaattggaagtttaagcactccaaaaacgaattgattccttcacgagggaaaaggccgccccacttgcacctgctagttacactttccttgcccaagtggacctaaccgacacataaattttaaaaacaaacccctattattagttgtcgtagtccctcaacaagattatgtttcatattataatattatagtagaatctcgataaattattaattttgcataaataataattattttcggtcccgatactaatgtattagtttgataatttaatatttcgctaaattaatagaattttgttattcccgattgtattaatttatagaggataactgtaacgttatatattaatcacaacacacaagaaaacgtaaagtagtgattagttaacttgaatatagactttcggtttgcacacataagtgtataactagagttatttctttcttaattgcatataatttaggagtttggagtgaaagtg

SEQ ID NO: 103670 - DNA, 796 bp, Mimulus guttatus
  Intron number 1 from transcript mgv1a000433m (locus mgv1a0 00433m.g) derived from phytozome v7.0 (chr-ID scaffold_24; pos 39941 to 40736)
ataaattgggatattttattgaaaaggtagatggtgttgtttggttataccttttgattttctgatatttgttgatctttcttttacggaatttagatttttaatactgtgagatttatcatatcggtaagagaaagaaagaattattcaagaattatgatgggttttgggagagaattgtgatttttgtgataaattatgtttctgttgatttttgtttatatgtactaaagggtttaactagatgcagtgtagttggggatgatcatatgatttatttaagctttaacatttaaacatgcttggaaatgtaatggaaggatcgcatgaatcatcgttcttggtgctacgtctgtgcaagtactatagtagttgttatcattgttatagctctcattgctgtagatgacacaagctcgtttctgctagataaaaagtcagagctacggcttctttttattgcatgtgaatttgacttcatatactactttctctgtcccaatcctcttgttacattgtatatgttgtactgtgtttggttgacatgccatttatcattctggaaactaaagcatttaatcaagttcatgttctagatgatctccataatattgatgtaaatacagtctttatctggaatagttggtgcactcaaatcaatagtcagggttatgattttagctttaacaagaactgtgtattcttatctcgctaaaatgtttccacttggcgtgctgtacaaaagtgctcacctgctattgattctaaatgtgtgtgtatggtttccagaaacttc

SEQ ID NO: 103671 - DNA, 879 bp, Mimulus guttatus
  Intron number 1 from transcript mgv1a010266m (locus mgv1a0 10266m.g) derived from phytozome v7.0 (chr-ID scaffold_54; pos 1272438 to 1273316 reverse strand)
acattttctggtaatttatttaataaaatatttgattttctttctttttcttttttttttttgataaatgtactaataatatttgattagttcaaaatatttcaagaagtcgtgtatgcaactttcttcaatttagagcatatctatacggttgacttatgaaaatcaattaagatcatatatttgtaatcttttttggttaaaatattttaggttaaatcacggccaccattgaggtaatgtcagattacgtacgaaacaaacttataatctttgagtaattacaattatctctcaattatgaatctttttacacgtccgctctagtgatgttaaatttagtggaatcttctagattatgtggaatattctccaatttataataatacccattttacctcattcgagctccacatttcgaaataaatggatcataagatgtgtctcttgacttgtaatatcagattgtggtgcatcagaaatcgcatttttacaaaacaagtacaaattagagaaaattccatgaaatctctattgaatttgacaccataatggtggacgtgtaaaaaaattcataattgaggaaaatttgtaattacccaaacataagggttttttcgtaatttaacatcatctcaagttgaccgttacccaatatattttgtagatttatttagtgttaaaaatatagaagggttgcctaattgtatattcttgtgttgtaaaaattgcttattttatttcaactaatattcttatcttaggattcaaataaaaaaaaatttactttatagacacacaattttttaacctcattttttgttttttttgtggaactttgaagtgaaactatacactcatatagtaatttgctaagcg

SEQ ID NO: 103672 - DNA, 837 bp, Mimulus guttatus
  Intron number 1 from transcript mgv1a000488m (locus mgv1a0 00488m.g) derived from phytozome v7.0 (chr-ID scaffold_102 ; pos 315467 to 316303 reverse strand)
tactgacttacacgattgaagtgcaatacaaacatgtgagtgattattcttcctctgatgtactaaatgatgagattttgtgcctatctaggtgtggaatttaggaatattttaggggtagagtaagttgtgtatttaatttcctgcaaatagtggtgatagatcgtgattaattgtactgtgagtttcttttacatgataactttgtgttccttttgatggatttgaactgctgaaagatttgatggcacacgtctaagaggtcatatttggtatttatggagtgaaatttgaaaagagggatttgttttttgttttttatggtttcctttggctacgtgattgaacggacttcgacttgccgaagatgcaaaattacgattgttcttcttggtttgagttttgtggaatttctcaactgttattcattagaaatccgttttggtgtcatggtttagtagatgaaagtgaaatggtaaattaaattcaatgaaaacttcactcattttgatgcaggacaaaccaagcatcaatttctagaacttctggttatagttgagtagcatcaatttgctagttacgtcgggttgccaaaagataagggaccttgccatcaattaattagattctagtattcctgccattgtttagtgttaggtatcattcaccttttgctttgtaatcaatgattggagtatacctcacatatattatgaattctggcttttgttttcattttatcaaccttacggatcacacttttattgtctaaagtgctgattattactcaatttcctctcagttcaagtgggacttagtgaagaaagcttctcaagt

SEQ ID NO: 103673 - DNA, 540 bp, Mimulus guttatus
  Intron number 1 from transcript mgv1a005388m (locus mgv1a0 05388m.g) derived from phytozome v7.0 (chr-ID scaffold_85; pos 384006 to 384545 reverse strand)
ccgaaagagaaccagctcttccaattatccctaaggtttggctttctgatttttttttttttgattgcacgagttctgaaatagtgaaaatagtttattagattatcgcaataattagatttttaataaatgtggttttgattattttttgagtttttttttttctgttgtaaatgtaattgaaataacaggttttgccttcgattagttttttgagttttggctgttgatttaatctaatgttcttcaatttatctaacaattgtgattgtaaaaaaaaaaaattgaactaacaacttttgtcaatgatgggattttttatttttcgttggagttaactagtttacgatatgtcgatacaccagttcgatatgcaattcaaagtctgtattaggagtctagtaatggcaattcgttccgattaaccatcgaaacaacgcgagtaaaccgacatgttaaacttatcgattacaagaaactggatcaattttttttcaagggttttgtaagcattttgtaatttaattagcctttcctcag

SEQ ID NO: 103674 - DNA, 788 bp, Mimulus guttatus
  Intron number 1 from transcript mgv1a004660m (locus mgv1a0 04660m.g) derived from phytozome v7.0 (chr-ID scaffold_3; pos 4104184 to 4104971 reverse strand)
gataagcgcaaatctctgtaagaaaaatataaatcaagatttcattttttttttttttgttttctgcaagtaagtaagcacacacccgtgcgtgtgtgtgtgtttgtgtgtgagtgtttcttcagctttgagcaaccatgcgtttgtgtgtgtgtgttcattgtgaagagttcacacacacacacacacgtgcgggtgtgtgtttatcttctgtgtttctgtgtgtataaccatgtttatatgtgtgagtgttcttggtgatgaccgatgagttcacacactgacacacacacacacacatatttatgtatttgatatatatatgtatgtatatatcataagcttctccattttcttgggatcatgaatgaagtctagatttttttaataataataatacttgtaaattagtgatggttgccaggtttttactcagttcttcaaccccatctttatcatttatttatttatttatgtgattttttgttctactaaacccatattttatggtagttttttttttatttttctcaaataaaatttattatttaatgggaaatagttattaggggcagtataggtaggtacaagtcacatacatacatacatttcttggccaacattgtaaatttacacatccctcaatatccattttaaactaatttctttaaataagaaaatataatataaaattcatgattttgcttacattaaatcaagttacataatcagacaataacatttgttaatattgtttgattgttttaatgtgtgtgtgtaataaaggt

SEQ ID NO: 103675 - DNA, 481 bp, Mimulus guttatus
  Intron number 2 from transcript mgv1a023300m (locus mgv1a0 23300m.g) derived from phytozome v7.0 (chr-ID scaffold_5; pos 2780890 to 2781370 reverse strand)
taatcagatttctggccattaccattattcgccaggtatatattattttttatgggaaaagtacagtgtgcaccgtcatgtttgcaccgattttgtattttggtccctcatgcacaaaaatacacatttgattcctcatatttaaaaaaaataaacacttttagttatttccgtcaattttccgttagtactaacggaatcaagtgtgtgccactaaaagtgttaagctattgaaacttgatggacaaaatgtgttttttatgaacatgatggaccaaatgtgaaatcggtgcaaacaagagggatgaaaattgtaatttccccttatctttatctttctttttgtttcttcttttttttttttttttttttgttaattagtttgttttagtcctatagagtagtttctttaaattgtcaaggactattttttttttttttataatattatttggcaggaataacaagacgtgtccaaaca

SEQ ID NO: 103676 - DNA, 649 bp, Mimulus guttatus
  Intron number 1 from transcript mgv1a011896m (locus mgv1a0 11896m.g) derived from phytozome v7.0 (chr-ID scaffold_22; pos 1329398 to 1330046 reverse strand)
agggtattttcacctctctctcaatttttagctgttctccttttttctttttttaagtaaaaatataatattcaattggtgatctgagagttgaaccaaactagatggagttttgattagttttaatcacatttgatttgggaaagggatttcaaatgaataaaacaagaagaaagctctcatcaatcttatgttgtctatacacttgtgttgactaggttcgtatctgtactctgtgctaactgtttccttgtgatcaacatttgcattcatgcgatttccggcttccattgcttccaaggaagtcttgcatagatttcgtgtctttgtttgttttgtgtttccaaagatggaggttaataattccaacacctcggaaccaatctcccaaaccagacctactaggcacttgacctacatgtgctttcgcgtgtctgcatttctgtatatcacaaaatttattttgatcatacaactccaaattgtttctttgcaaatattatataatcccgacatactattttatgttaactctgtctattttatgtttgtagacagcaaaagcctaataataataataataataataataataataataataataataataataacttccaacttgtgataatgtgaaacaggaaag

SEQ ID NO: 103677 - DNA, 944 bp, Mimulus guttatus
  Intron number 1 from transcript mgv1a026908m (locus mgv1a0 26908m.g) derived from phytozome v7.0 (chr-ID scaffold_59; pos 517927 to 518870)
ttggtgttttgttgggggagtgagttcactctcgtttttcctttttttttattcatttttttttttggtcttgcaatagcaattagcttaatttaaattaataatatctaaattattattggggttatatttgtaatttcatgtcttgatcttagtaaatttatttatattttgatcttgcatgaagtaaggtcttgcacttagtaattttcgtcttgcaaatatacgctgccataaaaatattataggctccacttgaaactgacattcaaaccattagagtcaattatactatttgtttgttcaggtacatgcacttgattataaccaacaattattaaagctccggcggattattatttaatcaaacaaaataaaaatccatcgagtttcaaaatttacacacaaaaaaaaaaaaagaaaaaaaaaaagtcttcaagcttcacgtagtgttccatttaataactttttaatagatattgatataatactaattaagaccaatctcttgtcggatcatttgataatgcctccatcttaatataaacaaattaggcaaaaagacaaaaacaaaaatggaggctaagaaagtctcataaaaataaattatctagtattcatggaaaaaattgcaccgcttggactaacaacttctgaagaatattcaacataagaaatcgcattttttctccaacctcacctatatatatatatatatatatatatatatatatatatatatatatatatatatatatatatatatatatacacacacacacaaacaagccaaacaattatacaacatggaattcatcagctatgcaatctatggagccatcgccttcatttcccttttctcctattactaccggctttccgctaaaccaaaaaccaaatcgccaccagcagccggcggggcacggccctttacaggtcatcta

SEQ ID NO: 103678 - DNA, 559 bp, Mimulus guttatus
  Intron number 3 from transcript mgv1a026495m (locus mgv1a0 26495m.g) derived from phytozome v7.0 (chr-ID scaffold_1; pos 1323934 to 1324492)
gggaaggaaaacggattgtggaatctgtttccaaggtcaatttacactccttcctgtaatttcaattcaattcaattcctcttttgattttcatttttatactgatttgaatttgatgatttcattttttgattgatttcttctgaaattatttgttcatctgattttgggagatttttttttattattttgagcaacaaatgtaggatccaattatggggtttgatgccctaattttggcataatgtgacaaaatatttgatctatttgccctaaactgtaatcatcccctgcaactaaggaaagtgatttactccatttatgggcaatctaacaaaattaggtatatctatatatatatgtatgtatatcttaccataaactgtcttcttgcataatttaataaagttgtaaactatttggtttcatcgattgttgaattgctatccgattgaagaaggctacattacatttgtcgttttagttggaagttcgtaaattgtatatatatacctctaacgaagtagctaacaaatgtacattgttgtttcatcagata

SEQ ID NO: 103679 - DNA, 1034 bp, Mimulus guttatus
  Intron number 1 from transcript mgv1a002542m (locus mgv1a0 02542m.g) derived from phytozome v7.0 (chr-ID scaffold_201 ; pos 177169 to 178202 reverse strand)
aggcttgctgatttcatcccaaatcttgttagcaggtattgaatttctaatttaaatcatcaaaatagtagataaagatttgatttttctgtaattttcttattgggtgaattacgggaatcgttaaattacgaaaattcctctcatgtttgggtaattacagcgggggcggatccaatggtctttttttgggggcgagagttcggtaacttaataagctatggatttacggtggttcgcgggcggtgccccgaatttttttcggtttattttgaataagcaacaataattatgtaatttttttttaataagatgatcattatatctttatttaaacttcataaccttagaaatcatgtattataaatgagtattttagtttttagggggagaatatactacaatataaaaattaataaaaaataggattaatttttttttatcaggggcggaagcccccgaagctattgcctggttatgcccctgattacaaccacctgtcaactatgaatcttcttcggtgtccaccattgcggtatcaaatttagtggaatcctctagattatgtggaatattgctctaatttgtacccgttttaccctattcgagctccacattttgaaacaagatgatcataaaaatattaaaatgtgtctctttgacttgtaaatatcagacttgtagtgcatcagaaaattgcatttttgcacaaaacaaatacaaactagagaacattccacggaatttataatattatgttgaatttgacatcataaggatggacgtgtaagaagattcatagttgagggcggtggttgtaattacccaaacaagaggggttttttttttttttttttttgtaatttgaccttacctcgggggtgtccctaatttacccatattcttttcttgattgaagttagtgtctgaatttgatgctatttttttctttctttctaaaatttgtaatgtatttgttgctaaaattatatgtatcagtgggagaattccctgcccacatccagggaggatat

SEQ ID NO: 103680 - DNA, 760 bp, Mimulus guttatus
  Intron number 3 from transcript mgv1a016755m (locus mgv1a0 16755m.g) derived from phytozome v7.0 (chr-ID scaffold_123 ; pos 193624 to 194383)
tcatcactccctctgttctctctgatcgtctcagggtaattttctattttttgattttttattttggaatttttttaattaatttgcatttaatttgtttatatgaagattagtgttgtctgctactaattacatgtatttaggtttttttttctgccctgtatgttgtgttactaaagtgatgtagttggaattgatagttacgatagtaatgtagttatcgatggttacgatagtaatgtagctggcattgataaatacagtagtaatgttgttggaattgatagttacgatagtcatgtagtttgaatcgatagtaatgtagttgggatcgatagtgaaggtataattttgaatctaattcgaagtattggtagtgatttatggatggaatacactatcttttaattgcaatatagctaggtgaattgcttctctatgtttcggtagcttgccaattttatttctccttatattgtagcaaatgttgtttgttatatatttaatttcattccgtaagtatacgtcgtcaattacttaatattcatcaattacatggttctcaaattattttctcataataaaatgaaattagttaacgaaaattcatccaacctcagcgccagtcgtatctatttatgtttgataattattcgtttctcgagtgattttgaaacaaatttcagattgggttttgatttttgttatattaatttatgttacagattagtggatcacttgcaagaaaggcaattaggga

SEQ ID NO: 103681 - DNA, 440 bp, Mimulus guttatus
  Intron number 1 from transcript mgv1a021402m (locus mgv1a0 21402m.g) derived from phytozome v7.0 (chr-ID scaffold_73; pos 983847 to 984286 reverse strand)
catcacaaagtgaggaattgtgttttttttttttgttcccatctttcagatctgtattggtttcgaagtaaatgaatcaaatgtttccttaaatctttgtttttctttactcttcaatgtcaaattatttggtaaactgcttcatgttttttgagactgaaatatacttataatttctgagttgttgttcttcagcaaacttgattttaagataataacggtacagtgattatcttctctttggaagatggcagtccatgccctttccggttgaggcttatcttatactcatttttaaagaactttgcttaaatatgttttgaagtaaatgaaattgtctctacacttacattatttcctgcatcctcattcttatatttatgtcttttcgtccgtaatcttgcatatatatttactatatctccgtggtaattgcaggt

SEQ ID NO: 103682 - DNA, 1056 bp, Mimulus guttatus
  Intron number 1 from transcript mgv1a016277m (locus mgv1a0 16277m.g) derived from phytozome v7.0 (chr-ID scaffold_7; pos 518578 to 519633 reverse strand)
ttacacctcaacttctcttgcgagctatcttgacagtagggtttattttatttatttatttatttttgttattaattggtttcttgaattttcttgggagatattttgtgttgttgaaatcagtattttgaggttggaatttgaatttcatcatgtttttttttttcttgagattcttacaatggtggttgggcagattctgaattagcagttttgttgaggagaatttgtgtttgaaattatattttataagtactatgccttttactttgattctttatcatcttcctttatgattgagtagatgctgttttccgagcgtttttaagtaagaagagcgatttgcagttgataagaaaattaaaaaaaatacttcgctagcaaatgctgtgaatgctgataggcgatcaacacttttcgagttaaagattcgatttttagggattgtgttggagtgtgcgttaaatttgaagtagcaaatttgatggatataaacacttttcgagttaaagattcgatttttaaggattgtgttggtgtgcgttaaatttggagtagctaatttgatggagacaaacaaacagtttttgatttaaagattcgatttttagggattatgttggtgcttgttaaatttaaagtagcaaatttgatgggtttcattcatacaatccgataatatctatcggcttgtgcattatcttttggggtgtatggaaacactctgcttatcgttgttgatgtttaattgtttagcaatatcaagattgtatatatatgttccgaattatatatttttcactactatatttccggtcaattacaaatatcacaacacctgataatgagattaaattatgatttagctgtgtccgagtaaatttgtaaattttaatttctccccgtgttagatttgtggtgcaaaacctctctactctttcctcatcttttcttaagcatctattttttgaaatcttttttgaactgcttctaagttctcacctttaaattgaaattttgccttttccacagagaaacttcttgtattacttcgag

SEQ ID NO: 103683 - DNA, 695 bp, Mimulus guttatus
  Intron number 1 from transcript mgv1a000652m (locus mgv1a0 00652m.g) derived from phytozome v7.0 (chr-ID scaffold_4; pos 4055432 to 4056126)
tagaatacgacaccgtaacttcaggttcttattacgattttatctctctgcttttttattttctgtatctttgattggtttatcttatgcattggttaaaattggattcggtggtgacgctagtcggactgaatcacgttcggttggaatgctgaaatttctttgagctgagaaatgtatttggtgtctgtttatggtggaaaattaaattgttcgagaatcaagtttcttaaactttaagatagcatgcttcatattttcgcttcatttttatagagaatgccatcacagcattattgcagcttcctgggaaataagttcttttcgtattattttatttttctcaagatttgaattcgataatttattgataaggaatggcattgtatttaaagaggaatcgaaatttgatgtagaaacgtattcaaagatgtactgacaaccgagattaatggcttatgagatgctcacaaagagataatataaacattaattcatctgtaaatgggctagaagtctgctggtcatctttctgaatgtgataccaattctgtaggaacaaaacaactcctgcacaattttgtagtattttttcccccttctctttaatccctttcctactgttgcatcatgatgtatttgaaacctaaatatttgcagtttgaacgctaagagacaacctgcaaagaaaatca

SEQ ID NO: 103684 - DNA, 600 bp, Mimulus guttatus
  Intron number 2 from transcript mgv1a012189m (locus mgv1a0 12189m.g) derived from phytozome v7.0 (chr-ID scaffold_66; pos 715416 to 716015)
gctgtttcttggagcgggtatattcttttttttatcccctaatctccttacaaatatatattaattaattaatttttattttgtctagtattgatatgcttttgttcgatgtatttatagttaattaatttttagtagtgtgtttctttttgtgtaatatcgatttgcttttgtttttgttcgatgcatttacggttaaacctctataaatgaataatacagtcgagaatagaaaaattctattaatttaacgaaatattaaatatcgagttactataattttagcacgttctctccatgttgggactggaagaatttattaattaagcgaggttatgaatttatatcgaggctctactgtatttgtttaattatgtggttgctggtcggctgcttttcttgtttattatttgcactcgtatgagcccttccgtagttaaagatccaatcttttatgtaatgatcacgttactgaatcaaattattgtcttatttttttttaaagataaatatacaattgatgtattgtgtgaagtcataacgagagatcgaattcgaattatttgtgtaacagagcaaaagaaggagatactgtgttgg

SEQ ID NO: 103685 - DNA, 892 bp, Mimulus guttatus
  Intron number 1 from transcript mgv1a004282m (locus mgv1a0 04282m.g) derived from phytozome v7.0 (chr-ID scaffold_11; pos 698227 to 699118)
ttctctagctgattctagtcgttcctggattttaggtaaattgaaaaccctaattctgtgttgaccctaagtctgtgtacttcaaattcaaaagttcgagctgattgaaaccctgattttgatttgactttaatttctttgaagtttttatgtttccgagatgcatgtggtgttttgttggaatcctgaattcgatctgtttctgaatttttctgtactaaattggataccagaactttgaatttgggaccttagggctggagattttatagtattgggtgggtcatttagctgtttcttcgatgtcatctttgacggctacagacaattttattgaagatatcgagtatatttttttcataagtgaattgatattctgttattgacattcaatgtgcattttagttggggaaataaaaaccctgtgttggatatgagaacttattctaatttagcgtttataggtgtcatctgatgagtgtaggtcattgttttagcgttcgtattctttaatgttctggtttttctaccgtttctggaaggaagtgtggcattttacatctgacttatttccccttttaaaatttaatctgctaagtggaaagaagtattacaaattggcgcagcatggaattggacgaactcgttgttttagcttatctagttcaactcctgctcattaagatatttttcaaataatttatgtgctggattaaatatctgacatattttacattcctacaatattgttcgattgtctggttctggagatctatgtataaaagtttgttgttcatttccaagttgcattgtggaatagatttatttgactcacctgttaaacacattccatgcagtgtaacttcactcttactcggaacagactccgtgc

SEQ ID NO: 103686 - DNA, 732 bp, Mimulus guttatus
  Intron number 2 from transcript mgv1a009605m (locus mgv1a0 09605m.g) derived from phytozome v7.0 (chr-ID scaffold_11; pos 2481810 to 2482541 reverse strand)
aatttccgggaacacggccatactggggaagtttggtaagtctaacataaataaagtatgtaccgacacaaataaatatttctcaacattaataaaacatgatttgttggtttttcttcacgattggattagtccttggttgttcttgttccctgtttgtgttaaggttcagtcttcctcaaatttcagaagttctcttgttatttgaatagaagaggatatttagcggagggctgaaaatggcttggctttacttaggcttcacttgttttggtgataaagcaatggagtgtctagcccaagactgaatactagcctaattcttataaaaatgtaaaatcattgaacaattttaatgatttaaggattttacctttgattattttgtttggattaggattctactaggatttaactaggtagtgtgtggtaaaattgtaaaatcctaggatttcaggaactgagattcaagattcattttttattgtccaaaatttcatgttaagtcagtcaagaagcaacttatatactgttatagagatacacatcccaaaaaatagagcacttaaaacaagcaattaggatgaagataatagaatggaaatacattgcgttgaacttgtctcatcttttcttcttgctgcctgcgtgggacaaatgttcgccttaaataagaaggccagagttaaactttattttacaacacttgcctattttgtaggtttggatcaa

SEQ ID NO: 103687 - DNA, 638 bp, Mimulus guttatus
  Intron number 2 from transcript mgv1a000199m (locus mgv1a0 00174m.g) derived from phytozome v7.0 (chr-ID scaffold_75; pos 483141 to 483778 reverse strand)
gtgcttccaggtttgcgtctctccactgttttcatcatttagaggcaatgttattattattgattaaataaatttatatcatatgcatgaagtattttgccgttttaacttagtgcacttcagagctttagaattttaagtttattactggttttaatttttgccaactatataatgctagttatgattgttcatagtgcacttgcttcttttcaaatgcctgacgatgttagctttgtagtggagtatcgtcttaatcactacaaactaggtggaattgttgttattagaataagcaaaaggtcaccctttaaatagttgtgtaatttaagtattgtagaaatatgtcagaagttatgtcgcatgtttttgtcaagatatatggaaaagcaaagaagctcccccttatatttaggctgacaaataacaagaaaatagtttgtctaaaggacacacactcaagcaccacgttaagagaggctccgataccactaggccaagtcttagttggtattatttagcatagagtagatgggctgtttgttcatgatgcaagttgtatctataatactgattttttggtgcattggtcaaaattttcagaccaaatcttgaacctgcatatctggatattgggg

SEQ ID NO: 103688 - DNA, 787 bp, Mimulus guttatus
  Intron number 2 from transcript mgv1a007480m (locus mgv1a0 07480m.g) derived from phytozome v7.0 (chr-ID scaffold_13; pos 865242 to 866028 reverse strand)
cgagcaggacgcgtctacttcacaaaacgatagcggtaaatttgttgttgatggtgcaaattgtgggttatttagttgcattacaggaattcatgctcctgtttcttgtggttgctagattgtgattagtttgttgtattaccaaaattactagcacttgtttcgtttttcgacggtctgattgtaggttatttcgttccattgaaataattcatgctttgaatattcacgttgaatgtagcttttccttgtacaaaagtcctgttatcgttattttatctgaagatatatctggcatttgaagatttggttgtaaggaaaatacggtgaaaacttgttattcatgttgaatgtagcttttccttgtgcaaaaagtcctgttatcgttattttatctgaagatatatctgccatttgaagctttggttgtaaggaaaatacggtgaaaacttgttatgcatgttgaatgtagcttttccttgtgcagaaagtcctgtaatcgttattttatctgaagatatatctggcatttgaagatttgattgaaaggaaaatacggagaaaacttgttattcgtttattttgctgatagaatacatctaaggaaaatgattcgaacatagttcaatatctgctgaatatccaaaagatttggccattggtgtagatttgcttgaaactttctggtttatcccttagtgcaaattgatgcgtattctgctaatgattattgtgttctccttgctaactattacagccgaagaagcatctaggtttcagtcactcg

SEQ ID NO: 103689 - DNA, 999 bp, Mimulus guttatus
  Intron number 1 from transcript mgv1a001559m (locus mgv1a0 01559m.g) derived from phytozome v7.0 (chr-ID scaffold_11; pos 2171250 to 2172248)
gggggcagtttaccagatacaatttcaacgccattgtaagtttcttcttttttccttgattcatttggtacttatctatgattggatttgattggattggattggatttgatttgattggcagtgtctaaaaataatatagtatgtgataatcatatatttgtgatttatgattatgcaatccttatattggataaaggtaagttacgaaaaaacctcatcctctttgggtaattacaattgcgttttaactatcattttaactatgaatcttcttatacgtccatatatttaaattgccaaatttagtagaatcttttagattatgtggaatattctctagtttgtacccgttttgccccattcgagttccatattttgaaacaagatgatcataaaatgtgtcttttagcttgtaaatatcagattatggtgcattagaaactgtattttagcacaatacgagtacaaactaaagaacatttcacggaatctagaagattatgttgaatttgacaccataagagtgagacgtgtaagaagattcataattgaggatttggttgtaattacccaattaagatgggttttttcgtaatttgaccttacctcatgggagggcccgtaatataccccgtcgaaatttcttcataggattgtgtaattgtagaagttggggttgtatatgcttgatttaattctgggcccaaaacatttgatacatcttgatcttgactctattgttgtgtatcaaagtccatccttattccccaaagccatcccccactgtcagaatcgtacatattttacacgcatccacatgtacacgtacgtattttttcgtgttagcaatacagtccatacgtgttttaatgatgttgtattaacattgtcttgagtcagcacgtatagtaattatattacgtcgatccattccatatacaaaaacgaaaaatgaagaaattctagtggtctctattattaggtcacagatcgagat

SEQ ID NO: 103690 - DNA, 769 bp, Mimulus guttatus
  Intron number 1 from transcript mgv1a015508m (locus mgv1a0 15520m.g) derived from phytozome v7.0 (chr-ID scaffold_13; pos 952458 to 953226)
gctccagctaaaggtaactcccattttcaatttctcaccgatttaagtcttagaaatttctgttgctggtggagcagcaattattattcatcagttcacatattttttttactcatttccaacagtttaaattgagtggcgtgaaaatcgatttgatttttttttattatgcgcttaatttgggaaaactgtgcatcatatctattgtgtgaatgtaaaaaaaaaagaagctatacctttgatttcgtatggtagaaaaatgggtttcaatgttagcacgaaaagcagaaagcctgaagtgtatatcttggttaattaggtatttaaataatttatttggcagattcatatatctttaatctcgttggaagattggattggaaattactagttttgttatgatttaagttttatagctacaatagattaagaaatggaaaatttgctgcatttcgcttcggacttgcatagttagtttatggagttgcatataatttgctacactgttgaacggtgttcataatactgtattcattatttttttcgacaaagataacactatattttgatatacaggaactgtaactacagttagtaaaaatattcgaaatatgttaaagaacatgtgtctcaatgtgaagattgtccatttgatgaaattttgatatattctcctctgttttgactgttctatggtgcaagtttttctgcatatcttgcttttacctgtttattacctgatttgtttgttacgcatgtgcagttgata

SEQ ID NO: 103691 - DNA, 558 bp, Mimulus guttatus
  Intron number 1 from transcript mgv1a008737m (locus mgv1a0 08737m.g) derived from phytozome v7.0 (chr-ID scaffold_482 ; pos 22061 to 22618 reverse strand)
tcaacgccatcttctgggttcagaaccaggctaaggtactaaattagttgatcttcattttggtttttgttgtgttaattgaattttagtagctttttttttatcatattgctaaaacagtcctcatgtaattaaagattggcaaaaaaccctctatattttttttttcttttgaaacataaaaccatctaaatatagagtttctattggagtaaatacatagaggtattgaatactattaggagtagaaattggaatgaaatccgatctcctccgatcccgttttgttcccttattcttttaatcaaaatcggaatgtatattagatttcagattttgatatgattttaatttttgaaaactgcataaatcggaatgtatattagatttaaggtttctgacaatgttttaggggttaattttaataaccaatactaaagggatcttaaagttattttagcatacctcaggggtctaggtgaaatttaccaaataatttagttatgtttaatttttttaatttaaaattaaataacagggagtaggtgggcgggaccc

SEQ ID NO: 103692 - DNA, 816 bp, Mimulus guttatus
  Intron number 1 from transcript mgv1a004015m (locus mgv1a0 04015m.g) derived from phytozome v7.0 (chr-ID scaffold_122 ; pos 321851 to 322666 reverse strand)
gctgaccgtttcgctcaaatttccgaggccctaacgtatgtatcacctctgtttttttttttaaatttaattattttgtttactccgctggttaatttcacgacatttcagtttccttgtatcgatcttttggtaattggtagtctaatttattttttattttttgctatttggtttctgaggaggatttaatgagcagaaatccaatttcttgtgcaaaattgggtgcaattgcattcaattgaaacacattgttgcttgattgtcggtgaaattaatttcggaatattcgtttttctgaagcacagttgtatatttgggccgtttattctactaaaaaaacgaaaaattgcatgatcgtaattgtatgcgtggaaatttgtctcaaatgtgtcgtgtttccatggtaattatttcaaattatcaggcagtatttccatatatgtgaaagaacaacattaacatttatgcgaatgatcagttattgctgtgtttttccccaaaatttggggttcttagtaaagaagtcttgtcactctgttgatcttggtatatcctgtttctgccatttctctgttcagtataaaaacatttgtcgagcaatggctagtatggaataataacaattacaaaatagtagtattttatttctgatgtgttgtagctaagaatttgatttggggttatcaccatacgtgtagtattataagaatcgggaatgctggtttccccaatcaagttatgtcttgttgcaagttaattcttttgtgttttgttttaggcggccttcgtgttactcttgtatacgggttaata

SEQ ID NO: 103693 - DNA, 708 bp, Mimulus guttatus
  Intron number 1 from transcript mgv1a014822m (locus mgv1a0 14822m.g) derived from phytozome v7.0 (chr-ID scaffold_238 ; pos 240137 to 240844 reverse strand)
ggcaaacaggttttcttcttcttcttcttgcttcttgtgtgtgcacgcgcgtgtgtgtgtttgtgttgtatttcatgagttttctgagaagggttttggccttttgtgtttatgagtgatgatctttgattgcttgaaggaattgagtgcgttgacttttgcttttttctttgaattttggttcatctgtgcttgattttggggttgactatttcttttgatatagcttttgcatttgctgtttttaatttagtttttttttctttttttcttgaatttctcacatcatggttttgaattttgatcatggaatcgaatgatgtcgatttggtaatttttttttttgtttttgttttcgatttgatgcactcggtagcgaaaggatcaattactctcggaaaaaggggaaatgtacgagttaaattactatttttacatgggatcattttcatcgttcgataagaattttcccgagtgactctactaggagcccgtttcgactatacccataaagtttgccttggatcccgaaattcctaggaaagggcccgcgggcgtgcagtgtatttcgttcgataatcttggctattttacttgctgtgaacatgtttgctttttaatttttgccatttcatcgtatatatataactttataattttgtttttggtgcagaaattgaagacgcgcgttatcagaaagaacgtgaa

SEQ ID NO: 103694 - DNA, 620 bp, Mimulus guttatus
  Intron number 1 from transcript mgv1a017659m (locus mgv1a0 17659m.g) derived from phytozome v7.0 (chr-ID scaffold_9; pos 1366711 to 1367330)
ggaggatattgataaagaggaataacacggcggtggttcagtggttgattcagtgggcacatcttccagaagctgaggctacttgggaggaagctacggagatggaaaagaagtgccctcattttaagccatgagtcatggcttgggaaaatggaggagtggtgtaacagaattaaccgttttttaattttcttttattatgatttaaacgacgtcgttttaacttattaaaacgcgttcgcgcttttatttttattacgttttttccaaagttggaggggagagccaaacgacgtcgttcgagaaggcagcatggacaacatcacatgcacagcgtgttctgagctaaggagagagagagtcgttgctgtatttctataaatgggcagacaaacactaagagttggcaagattatcagtattctagtctagcttagttaatgtagagataaggtagagttcttgttcctttatccccaagtttgttttcttttcttcaagattgtaaaccctactttgcactttgagtgaatacaatctttcagctgaaatttcaataattaattcgagagtttattagattattgagagtgatttgtgataaaagcagtttcaaagtc

SEQ ID NO: 103695 - DNA, 412 bp, Mimulus guttatus
  Intron number 4 from transcript mgv1a004231m (locus mgv1a0 04231m.g) derived from phytozome v7.0 (chr-ID scaffold_17; pos 1306790 to 1307201 reverse strand)
cctccacttcagaactttgaagagttgaaatcaaggtaatacgtcgtttgctggttccttttctcctggaaatcatatacttcagaaatgaaatcgtgaaatacccaaccgatttgctgtgtagaaaaatgttttggaattcatccatgtgaatttaaaccatagacttgtgcttagaatcaaaatgcactgcaccctaaattgtcatatgtgactcaaagcatgagcaaggtgttgtttttgtgtaatcgctattggtttctggattcaatcttttttgttctcccgactagtttttatcaaaagcaaaatccatgtccttgattttcttcttaaattagtgtaactcagatttaatttatgatttgttcgtacaggtataattgcaaatcatacatattgcgcaatttga

SEQ ID NO: 103696 - DNA, 902 bp, Mimulus guttatus
  Intron number 2 from transcript mgv1a006637m (locus mgv1a0 06637m.g) derived from phytozome v7.0 (chr-ID scaffold_33; pos 671042 to 671943)
ttagccccgggactaaggtttccagtcttttcaactttctcaagccaatcacgttgatgcatgttttatggataaattaattgaattgatttacttttggatcacttatcagccgattgccagaaactttaaatattatgtgtgcgtttgtgttagtgtttgtgtgtgtgtgtgtgtgtgtgtgtgtgtgtgcgtgcgtgcgtgcggggggagggtgtttggctgggctgatgagatggttctatgactttaagacaagtactggcattttgaaattgcattattgctttttaaatcttgacgtcataatgagattcaggtttttatgtgcaaatacaacaacttttttccagattactatcagttggattaataggtaacccgaaaagggtcttaaccgtaggcatttttatgtgaagagtgatcagaacacagataatttgtttatgtggcctctttaatgacgattgatgcagataattacatgttctattgtcttttcgcctcatgtttggccatatacggctaactaacagatcagctcaaattaaaatttatgttgaagctaaataaccagtctacggaacagtgttgtaaaacaccattttggttatggcatggaaactgcatgtaacggggatactctctttagattaagtccttgtctgcttggtgagataagccatcactaattaaataattaggtcttatttgatgtatggttagtgcagtaactttcgggcgggcctgcaattatggaaaattcttatctttgcttatggggggttttgaattggacctaccatagcccaattagcatagtatgtttgaacttcagagtatcctattttttttcttgaatttcaggtccgagtgcagggtaaagctcatatttatagcag

SEQ ID NO: 103697 - DNA, 784 bp, Mimulus guttatus
  Intron number 1 from transcript mgv1a008547m (locus mgv1a0 08547m.g) derived from phytozome v7.0 (chr-ID scaffold_101 ; pos 838379 to 839162)
ggtcgaaacgcagacggctgttaaggtgattttcgctatcagattaaattgaatcattttaccttttttttttctttgaattaataaatttcaaaagggacatttgaatttgtggcctgctgtgtagcgatatagtcggaattcaaccggatcccgatccgttgatccatttgtgttttttttagtggatttctcggatgatgtaaaatgattggattaattctttgtttcggaaatgaagatatgtgattggttcatcgctttcttatacatttctgaagtctaattttcttcgatcaggacgaactgcaggaaattctcttttgttttaaagtatgaaaactgccaacatacagttatggtctcttctgaaattgttagcaattgcaagactttgtatatctttttttttttttttttttttaacaatttgcatttacggccacccgaattacgaaaaaaacctctcttggataattacaaccattcatcaactatactttgtcttacgaaaaaacttttcctttagtaggtaaatctggcaccgtgtaagacaatatatggttgattggtgattgttattatcaaaaaaatgaggggtttgtttttcgtaatttgagcttacttcacgggtggccgtattttgcgccgtattttgcccttctttttgtagaggtattttgatatgtggttcttcagtcatgcagtatttgtgagttgcttattcactcctcatttgttctgatgtaattgattgcttttttttctttgaatgtttgtgcag

SEQ ID NO: 103698 - DNA, 451 bp, Mimulus guttatus
  Intron number 5 from transcript mgv1a008547m (locus mgv1a0 08547m.g) derived from phytozome v7.0 (chr-ID scaffold_101 ; pos 839856 to 840306)
ctgtctttgaaggcagggttattactgtcgagaaggtaaactgtctcttttgaggccattgatgcatgcattttgtggtcgttcaatatttaattgtatcgttttttatatattaagttcggttcaaaagtttatgctatctatcttcttgcctgaagtttctttggcaacagggtagctgtgtgtagcagctcttcatcaaactaatcaaatcaaattcaaatcaaatacatgaagcaaatagcagactgttattactgagggttgtgtgccctgaatttcttctttttctcttgtgttttgtggtattcagtttttgtagcgttatctttcgaccctgttgtttgaataatgccattaattacgagtcttggaggaagtaactctgatgggttatcaaatactccgttttgcaggctaaacgagggagggggcgaacacctactccagg

SEQ ID NO: 103699 - DNA, 911 bp, Mimulus guttatus
  Intron number 1 from transcript mgv1a002980m (locus mgv1a0 02980m.g) derived from phytozome v7.0 (chr-ID scaffold_117 ; pos 839672 to 840582)
tcgatcgcggatctgataaccctgtttccgttcaggttcgctaattttgaattttttgttttttttaaaaaaaaaaaaaatctgaaaattgaacgaaaattggggtttttttttttcgaaaatttagtgttgtataacaaaattcccaacatcagttaaacgaattttggtgattatttttgaaaatgaattttctatttcgggagtaacggaaaaattgggggtggggttttcactctgtggatgtgatttgaaggggattttgggatttcgcgcgaaaacaaaaataaaaataaataaattaaatatatatacttttttttctatgggaatgctctgacttctgaagatctaaaggtggtgtggtgtgtgtgtgtgtgtgtgtgtgtgtgtgtgtgtgtgtgtgtgtgtgtgtgtgtgttgactcagtcaaaatctatatctctgtgtgtgtatgttggaaaaaaatataataaagattatccatttctatttttttctttttcctatatatacgtgcatgcttctcttgctaatggttgttaatttatttgtatttaatttcactgaaaaaaaaaacttgtttgtaaatatttatatatttattattattatttgtctaaaaaaaaagaaaaaagaaaaacagtgtgtcttgaaaagggttcagatttgtctttattgtgagttgattattgtttcttttggttacaagtagagtagcatgcattattatcttctttctcacttgtactttgatgctgctgttgtttcattaactgcttattattattattattattattattattattattattattattatgatttactgttgtttaattttattggtttctattgatatttattttgcaggagaaaaagattgtgaaagtgactgacactcctcc

SEQ ID NO: 103700 - DNA, 888 bp, Mimulus guttatus
  Intron number 1 from transcript mgv1a000066m (locus mgv1a0 00066m.g) derived from phytozome v7.0 (chr-ID scaffold_41; pos 1413542 to 1414429 reverse strand)
ggtcgagcctatcaatcctcgtgtcgcttacctttgtaagtccttattgtgactttcatttgtctgaatactttagaatatggatcgccgtttgtatttttcgtatattttcatttcattcgattccataatctggtttcttgaggccgattttctgctttgaaccaatttttctactttgcgctcgaatgggatttttttaactccacagtaaaatatacatactatcaagaaatttagactggaaattctttccataattctgtagtgatacatctgcattgttattattattatttttttgtgcaattcatatttgcagttgattttgctgattattacatcttttttttaaaattaattaatttattattattattaattttttttcaatgttgtctagcttctctttggttctgtactatctgtttcatttcctgaatgttgtttccaattatgtcaaaatgagtcagcatatattggaaaattgaaatgtattgttagtgaaaacgtcttcaagcatagtcattgggcttcaccgaataaaaatcgagctggatttttggttgttatttctaattaaaactgtaatgtaatctgattattttactattctcactgttttcacattattttgctttatctttgactcttcgatttctggactatcgtttcatcttttacggagttccatctagttagcaaaaaaaaattagacatttactcgccgcagaccacagtttgagatttccctgcttcgcacgagaggaaattaaattataaataaattaagatgctgtctgaaattataagcttttatatatcttttagttgacgactattttggaatcaggtcgattctacgccttcgaaaaagctcaccgtctc

SEQ ID NO: 103701 - DNA, 731 bp, Mimulus guttatus
  Intron number 2 from transcript mgv1a025149m (locus mgv1a0 25149m.g) derived from phytozome v7.0 (chr-ID scaffold_3; pos 4171048 to 4171778 reverse strand)
aaaaccaggtaattgtttacttatatttttattttatttttaatataagtggaaaccttaatttagtaaatgttagaaattgtgatttagcagttaattataggtattaattccgggtggtggaaatgtgaatgaaattttcgattttcgttgatttcggccggagatttttcgatactgaaatggtattttgacatttttcaatttccgatttctccggttatttttttattatcggaatttgaatatatgtgagtttccaattttcgatccaaattttaaattctgccgattctggttcgatttgtttgtatttagaacatacatgtttttttaatttcaacttcccaaaatccaatttttgatattttccgattttttatagaaaccaaattgtaatttgttaatcacttcaaaaagaaaaatggatttttttcttcaagattctaattcagatccgatctgtccgattttcacccattagtattccaaattaatacgacctgtctcgtagccacaccacgctttagatttcttctcttttattttttctccgatgaggggaagaatagaactttaacttcaaaacggtcgacctagaaaaattactctcgtatgcttgcacattaatagcccgtattctcgtattatttcactaatttttttttctaaacaatatatgccacactgttaaatataggtgacactatcgggtttattgaactttatcg

SEQ ID NO: 103702 - DNA, 976 bp, Mimulus guttatus
  Intron number 1 from transcript mgv1a018077m (locus mgv1a0 18077m.g) derived from phytozome v7.0 (chr-ID scaffold_419 ; pos 13219 to 14194)
ccactgattgccattctcgagttaccacataacatatctatatagtaactacatgtgttcaccttgaatgtatcgaaaataaggaaaccgaaaaactgaaaaccgaaaacgaaaccgaaacccgaaaacctgactggagtggaatcaactagacataacagtaaaagaacacaaaatcacaataatccactagctatattttttttaatgaacatctccgataatattcaagacttaagtaataatacactcatagtttttcattctctatggtttgtcttattgaatatactcgaagaacatatgccataggcccacaacaaaacaatattctaagactaaaacagatacatagttcccaaaagaaatgcggtcgagcatttcatgatgaatatcatagtgttttctgcttagagtataaacgctgttaaaaaatactcgcacatttgagtagaacttctcattgacttcaatgaaaccaagattgttgtagcatttcacttgtcttcaaatttatgcacgtaaaaaatttaagaaaaaaatctcatcgaaaaaagaaaaaagcacatctagctacataactgctcctgggaagagaggcaatagcgaaagcagcgaaaaaccaacatttgaaattttatctgtttctaatccagaaggacgagttacagtctagttcatacattacaccatgaaggatatgagtactattgttttgtgactggaaacatactaacacaatataaaaggatggccaaatgatctagataacttacaggagtattagattcacttgttaagccaggaatgatgattatgatgggattcttgtcatctcgttgtagtgcatcattcgtctgaaaggcttgtttcttaactaaaaagaaagtggaaaaaaatagttaaaactatcagaagtcgaatacaccatttcatccaaaatttgtggaatgtgtatcagcagtttaccaggtta

SEQ ID NO: 103703 - DNA, 1003 bp, Mimulus guttatus
  Intron number 1 from transcript mgv1a010324m (locus mgv1a0 10324m.g) derived from phytozome v7.0 (chr-ID scaffold_170 ; pos 95892 to 96894 reverse strand)
gctccggtctcaccgccattgttacaggtccttttcttcactttcgttcttaaaattttttgcttttatttttttaaattacttttttattggatcatgtttctgaattgtttatgtgattgaagttcttaatttattgttatatttaattcaaattttagtttagctgccgctactgtgattagtgtgacggcgggggtaaactaatcgaatcgagcggatcgcatgtttgttctagtttttgtttgagactagagctcgagtagttgaatttttgtacatattatatatatttttttgtaattgagctcgaattcgaccgaacttcatagcttatcgaacaaaaatatgtgttcaagcttggttcgttgttttgacaaacggagctcaaaagagattttaattaacgttctcgaactgagaatcgagtagcttgatttgattttcagcgctgtgtgcgatatcttaaaataataactgttcggcaacatcattttcgtttgatatagtcaaaaacgagctttccaaaaagaaattctcttacttttgtaggcctaaaatgtttaaattttaagaattgtagtggagagagatttcgggtataatattcaaatcgagttacttgatctattacagtattacataattagagattagtctattggtattttaaataggctcttgatgctgcttctatctgttgctcatacatatctgtttttccagatcgtgtttcgatcccttccaatttattgtgtacaatttaaggaattattaatctatctgcatttaaaacaacgaatggatcaacgtataacttgaagcataaatcaaaccaaaaatgagtgattcgatgtgaattgattgaactgaaaaaagttaatggtctatgggttgttttaacagaattaagtcgtttctttcctcaatgtttataatttggtgatttatctaatttgcgttttcaggagcatcaagtggaattgggacagagactacacga

SEQ ID NO: 103704 - DNA, 904 bp, Mimulus guttatus
  Intron number 1 from transcript mgv1a010668m (locus mgv1a0 10668m.g) derived from phytozome v7.0 (chr-ID scaffold_4; pos 71808 to 72711 reverse strand)
ttgaaacgatttatctcggcggaaaggttttcaattttttcccccttttttctctctcattacgaatttcagttttattattctgattagatctgcttctaagcttttactactcttccattaatggcggaatacttgatttcgtcgctaattgcgattttccgtccaattattctaatctgctttttttttttttttttttttttttttttttttttggtaatgcatttattatgtattttgtggttttcgattcaatttccggtattaattaattttctgttagggcagtattttatgttatcataatgaagatacattggtggtggtgatgaatttcctcgtatagcttgtgattctttaatgtcattagttaaaactggtttgtcatctagaagaatatttagtgacacctgtagcttttctttattgaaaacaattctttactacagcttggttgttgctgtctgtttttgtttcttttgctagtggttagaagttgcaatcattacattattatcactatctcattccataccatgctcttttggaagctggaaaaaaatttattttatttatttttcctgctttgactaatttaataattttgtgggtgaacatggtttacttttttcttaagaatgaaaaagttgcttctatatattctggtgtttcccttttcttgaaggatgatcaaagactagatcgtaatttctatttgattattaatagtttcctgtttgggggagaaaatattaatggtactataattgcgggtttttttttcttctttattatggttcttgaattttgattttagttaaatgtaggcctttgcttattgtaacttaaatataatctttcaccaggagcacattgtacgaacgggtagtggttctgtatc

SEQ ID NO: 103705 - DNA, 847 bp, Mimulus guttatus
  Intron number 1 from transcript mgv1a001911m (locus mgv1a0 01911m.g) derived from phytozome v7.0 (chr-ID scaffold_23; pos 1060388 to 1061234)
ctgtcgtatttctgcgtgcagttgtcttcaggtgataaatttgctatattaattatcaaattatttcaactctcattttttcaggaatgggatacttagaaatttgtatgtaggctacgtatttcttggtgttgttgattctagatggatcttggtaaactcataagaatattgtcacgtaaaaacttttggcctatcctgatagcattccggcattctataagtgccttatgtaacccgtcgtgtgttctttttgactgtgttgctacacctatatattgccgcagcacatcatagcagtcgataaatattttgttgtcaagaacccttttcgaacttgaaggcagatatagttccttagctgttcatcatggaaacaattgtttctcaacttttttcccttttacaacgaaaatcatggaaagaatcaaacattaatctgaaggtattgggttctgagtaatataatccaactgttagcgtccggtttctggtttctggtcctggatcatcagctgttacttaccagttaaccttatttttttacttttatctttttgtttattcagttaaaaaaattaactgatggaaccgctcaatcacttcatcgtgattgttgatctgaaatggtcaccagaatgtgtttgtttctaaaacaaaatagaaattaatgtactagtagtacgtaaagaatttggtcacagtgtcattgtataattcttccttatgcaaccgaactttgctcgtgattagtttaaccttttttttggcttctttggattttgctaatagttcattgttgctttaccatgtgcagtatcagagtattcactgttgctgctgtcat

SEQ ID NO: 103706 - DNA, 425 bp, Mimulus guttatus
  Intron number 1 from transcript mgv1a025814m (locus mgv1a0 25814m.g) derived from phytozome v7.0 (chr-ID scaffold_360 ; pos 78393 to 78817)
gatagattaataatttacaacccttgggaaaagaggtttgaagaaagtgaagtaataatttacaatccttgtgaaaagaggtttgaagaaagggaagattacaaagtactttttcgcggtggagtggttacggttccatatatggagagtatgtacttccccattgagaaaccgaaaccgaagaggaagtggaaacgaaagcgctcgatagatatatagtctctattttttgtctcgagttcagtgtcgaagattcttttgatccacgcatattcgttatgttttaatgttttggtttttatttacatgtcattcaggtttgttcatatcataacaagtcgattctctttttgaaaataggggatattttctttacttattttttttgctgtagtaatttattgagccctttcagttcttgttaa

SEQ ID NO: 103707 - DNA, 181 bp, Mimulus guttatus
  Intron number 2 from transcript mgv1a013596m (locus mgv1a0 13596m.g) derived from phytozome v7.0 (chr-ID scaffold_11; pos 1803674 to 1803854 reverse strand)
ctccctctggaatagtgtttgatcaaacaagtgagaagatccgaactcatatcattagtttcaataagatcctttattagccgaatacctaattacgcctcttgctcaaaattttcgctcgaaagagactatttttaaagagtcttgtttttgtttataaagtttgttttttctgttttag

SEQ ID NO: 103708 - DNA, 749 bp, Mimulus guttatus
  Intron number 3 from transcript mgv1a015886m (locus mgv1a0 15886m.g) derived from phytozome v7.0 (chr-ID scaffold_169 ; pos 238605 to 239353 reverse strand)
tgaacagggatcccaaattcaccaactttgtggaggttagcatttctacatcgtattcggatatcgatttttcgtttaattgtagaaatcattttgaagcacatacgaatattgatgagcatgggctattgattttatttttaatttgtcgaaactacgattaactcaaaattttaactcgatacaagggtttccggattggcttttcgacatacttgagaattccgatttttcgttgttagttattgagtagttgtacaaagttgcaacaatagtaggttagtggaaatgctttgaatgcgtgcatatcgtatttccgattcattctggttaaaatggagttctcgagtataaacaccgaaattagtgaaaaattaaattgtacaatgtgagagtattagggactaaagaatttgtctacattttgaattaaaacccgtaaaagattattttccgagctcctcgagttttggtcgtattaatcatttgtgacgaattcgagataaggttaaatttataccaaaagaagttattttcttgtttctatctattttccatcttcagtttctacatttgtaggctcatcgattacgggtgacttaattgcactctcccggaagaatctttaatgttgtcgctcaggacatattgttgtgtgtttccatttcaattacaattgacctataatccgtggtcaacatatttctgttgcagttccgaacccacaaggttatctacaggcggtacgc

SEQ ID NO: 103709 - DNA, 793 bp, Mimulus guttatus
  Intron number 1 from transcript mgv1a013459m (locus mgv1a0 13459m.g) derived from phytozome v7.0 (chr-ID scaffold_81; pos 101021 to 101813 reverse strand)
gcttcaagatatctgcgttgctgatctcacttctggtaattaaattaacttaaattaattctctcaactttatctttttctcttttaatggccgctgtatatatatatatatatatatatatatatatatagagagagagagagagagagagagagtgtgatacttatcatttaagctccatgaatattttgattttaatccattttcttggcataataggatagtttttgctaatgttgaaaaaatatgggggctttttagcaatttgaaataaaatggagggtttccttataattaactgataactgcattaatgctcaaacttgccccactacctaactacatactgctaaaagtaaaactcatctcttttgatcaaaacatatccagttgtctttagaccaagtgcattaaattcctcctttgttcaaacactcattaattatttgcatttattttattattgctataataatttcaatagaagctatactagaattcctccacgcggtaatatacagttaaacctttatatattaatacagtcgggattagtaaaattctattaatttaggcgaaatattaaattatcgaactaataatttagtaggtttttatcgagtcggaccagaagaaactattatttaagcgaggttattaatttatcgagtattaatttgtcgaggttctctagtgtatataagtccaatgcaaattaaatatctgtttggtcatgtcataaaaaaatttgttgtagctgtgaagatcaacggtttcccttgcaaatcgaat

SEQ ID NO: 103710 - DNA, 608 bp, Mimulus guttatus
  Intron number 1 from transcript mgv1a008393m (locus mgv1a0 08393m.g) derived from phytozome v7.0 (chr-ID scaffold_245 ; pos 51652 to 52259 reverse strand)
ttccgcgccgccctcgtctcctgctaatcttaaaggtctatcaattattgttttccggcgctactgtttactgatctctagattttttcaggaatttttttatatttgtgtttatctctatgccgaaaaatgcatttcacaattccgtgtttaattttgtaacaaaatcgtttcgcttattcattttgtgtggtaattggatatgtgaaagttaattatatttccttatcttttttttttttcggtctttcgttccacgattattgattgagctccccaagcattgttacttgataattgcaaggcatttttggattacctacaaaacaattgaatattatgggcaatttctctttgtttgagataattcttcgtgcttcaaagttctgagatacttccttcgtaatattcatgtaatcccaatatcattaatctttgccattagagagaatattgaaacaggtgcatgtatcctcaacgtgaccacatttgattgatagtttagtaccggtattgcaaacttccatcgttcaaatattaatactgtatcgatattttgtatcgatatttcagcacaagcaggtctgaaggattttcttaacatccgt

SEQ ID NO: 103711 - DNA, 739 bp, Mimulus guttatus
  Intron number 1 from transcript mgv1a009237m (locus mgv1a0 09237m.g) derived from phytozome v7.0 (chr-ID scaffold_51; pos 578454 to 579192)
agctctcaatagctagggtttcgacatttccaaaggtatcgtcttgtctttcgagctcaacgtttttatggtgaattgttaactttatccttgtaattatcaatctctgaccccgatctatgatcttgtcactcggtatttgtttttcgtttctggatttttgttgaatactctgtttaattgagataattgtgaaaaatgtttatacatttttttgattttcatttttattaggaatttatttctgttatgaaatgtttggatcgatttgttgcttgagaagttttaaatctagagctcagttgtgttttgaatagcagtgattgcgaaagtgaaatcgaggctggagagaacaaatttttcctgaatatttaccaatgggttgaattgaaattgtaaaattaagttaccttcgaaaatatcgagtatttccaataaattctaggagatgtcaccccctaattgatgaacattatgtttttatttatatgtaatcagtgaatctccaacttatactttgattggtttaatattagtcagacttgaaattggtacttggtttttgtttggctactttcgattaaatgattcatgaatatatatgtagattatcacttgctgaagatgttgatttgccagaaaggattagtattcaagattgtaaatgaaggttttggccaatgctgaatgtgctgtgtaattgttgatgcaggtcttagaatatcggagttgaggtgaa

SEQ ID NO: 103712 - DNA, 445 bp, Mimulus guttatus
  Intron number 2 from transcript mgv1a014621m (locus mgv1a0 14621m.g) derived from phytozome v7.0 (chr-ID scaffold_51; pos 1228512 to 1228956 reverse strand)
gtgtcaggattattggtggagaccacaggctcaaagtatgtacaactttccttctcatttatatttagtttcgagggtctcattttaattcgttatttcgtttcactttatttatgcattttttccaggaatcatatcattcttaacctttgttgagaaattgattcatgaggttggttccctatcttctaagttgtacttggtgcaaacacagttgtgcattcccgtttgttggtttccaagtgtagcacctttgagtttgtgttcgtgaaccttgattatgcatcagttttagaatttttgttttggaattaatgttgtgttgtgattctttttaggttcttacaatgtatacctccactatttgggcagaaaaatgaagaaaatcactctttacgtttttcttgcagaactacacttccactgtgtctgtccatcctgaggt

SEQ ID NO: 103713 - DNA, 704 bp, Mimulus guttatus
  Intron number 1 from transcript mgv1a014621m (locus mgv1a0 14621m.g) derived from phytozome v7.0 (chr-ID scaffold_51; pos 1229103 to 1229806 reverse strand)
tcctcatcaagcatattaaagcgcctgttcatctcgtaatctctttatttatttattttttaattttatttatttttcaattttcaacagtttttgctgcgtaattggctgtgtgttttgacattttattttgatgatggattctgattgattatggttggattttgatggatttacaagatgttagtggaaattgtggaattaattttgtgatttattgagtttcaaattggcagaaattttcgtaggcttttctcgattgtctttgattttctgtatgcctgtaactgggagattgtttgtttggtaatcggaatacaagatgtttgcttggagaaaacttctggtcttgttaatcagaatacattgcagctaagaatcattttgatcattttccctgttttcgcattggggttaggggctaggtttaacattgttggaggatatgattttggtgcaagagcttttattttctggcaaagaaagaaatatgtctgaaaggtttagatatgtaatctcgattttgagcatattgactatgggcaaccactgcaaagtttttgagagttagtcgaccttttttctcatctggtttttatgtgttagcgattgtttgatctttagtgtgtatacatattgattgtatcacacatcatttgttcatggtaggtttggtctctagtcaggaggtttgatcaaccaca

SEQ ID NO: 103714 - DNA, 479 bp, Mimulus guttatus
  Intron number 1 from transcript mgv1a003735m (locus mgv1a0 03735m.g) derived from phytozome v7.0 (chr-ID scaffold_45; pos 1013730 to 1014208)
ctctacaaatccggcttccaaacctgggaatacaggtttccgtttaattgacaattttatttatttaattttttttatatgcagattgtatttattttttgccctaatttgttttctagtgttttttgaacaagatcaatctgtttcagtagtgcctatatttgaatttgcagctcaacagttatgtatttggaactatgtactcgtatattcgttgttcgaaataacttcgtaattgtgtattgtcgtaaaattgcaactaatgatggcattgctaaattagctggtgaaaaaaaaaattattttctaatttaattcttgtccaaaattacgaccagcatattcatgtgtgtggatgatattatcaaatcttatagttgctgaaaggcataataatgttgatgttgaaattcatactcgatatcgtttgtttgcattctgcagctccgagtttgcgctgcggtcgtatttatatatac

SEQ ID NO: 103715 - DNA, 455 bp, Mimulus guttatus
  Intron number 1 from transcript mgv1a003584m (locus mgv1a0 03584m.g) derived from phytozome v7.0 (chr-ID scaffold_32; pos 341825 to 342279)
tcctctttcccaatcctcagctttctgcaaacgtaaattctctatttccacgaacatttgcatagatttgctgttgttcttcatttcattttcgaaaaactgttttgacatttatatagatgtttaaatgttatctgaatttattttcgtgatcgaattacagtttgattttatcggattctcaagttaaatatgggtcagggtcgaaatttgaccttatttgttcttgttcaaataaccgatgaagaaaaatgattaactcaaaataattcattgatagttatgttgttttggttttcctgtgattcaattctttgttgtaaattgataataacgaattgtttgtggtaacttgaacctagttccttatgtttctcatttggctttttatggatttttcgaaatttgtactcatttcaggcttctgctaagccaagagcacaggcgaagaaatc

SEQ ID NO: 103716 - DNA, 736 bp, Mimulus guttatus
  Intron number 1 from transcript mgv1a016050m (locus mgv1a0 16050m.g) derived from phytozome v7.0 (chr-ID scaffold_41; pos 171714 to 172449)
cacaagtaagtcactttatttctagctggttaatttgttatgtaatcatttttcttttttattattatcggggagagacatggttgtttcgatgcttttatttgttacttatgccccgcttaaatatcaatagtctaattgctttctagattaattaatatgattctttgcaaatttcacgctagaagatatagaggagggtgttcaaggtatccttctaatccatatatgattgtgtgattgtgtaaacttcaatttccttttgtgatgatgattacctttggctgcataattttgtacgttgtattatatggaagtgagattaggaactccaccactggagtttagtgtacgaattttgtttgggagcgacatcttggctgcaagtgatatacttcgattaaaaaatatctgcttctctattttccgtttaaatgagactataaatttgtgaatcattatttgttatgttatgtagaggctaaaattcctctgaaaaggcgcacaaagattttgcttgtgcactcaaaggtaagtgcttgtgaaatagatagatagatagattgatagagatagtgttaactgtagcagatgaagaaaacccaaaatttatcaattatgtggtgttgatgaggcggtgaataaaacatgtttattgtatatttttgtttttttcttacgatttattttggttcgtttaggttttcgtatctgttttgcttatttgaatttggat

SEQ ID NO: 103717 - DNA, 616 bp, Mimulus guttatus
  Intron number 2 from transcript mgv1a003813m (locus mgv1a0 03813m.g) derived from phytozome v7.0 (chr-ID scaffold_266 ; pos 173229 to 173844)
acaaggtgagtcatgctttaattcaaagggttgaatatgcatcaaattgacaattgtgcttctatgcatgttttcactttccttgtgctttaaaaggttattgattttctaagagaactgccctttgcatttgtttgaaaacgttgtacgtcaacagtctcaacgatagatgattgagtacattggtgactaaagatatttcctccttttaaactgcagtaaaattttcccttcttgtaaagaaaataaagtttgagggtgatttgattagctaattagaatatgaaataggctcgagtatctccagattcttctcttttctttttctgcaaatggttgctccagtccgttgaaagctcattagaatatgaacaggtgattgcatgataaaatatgagaaacctagcttattaagctactgaagtgtgaggaatgaggtcttttctgcagtattcacatttaatctgataatgttgtctagatttttaaggtttttcgagttatgcactcccagtatttaaatatccacttgacccattggtgtcaggatatatttgtttgaagacgggatagctaagtcatatttttcaaattatgtagattattgcgagggcaa

SEQ ID NO: 103718 - DNA, 841 bp, Mimulus guttatus
  Intron number 1 from transcript mgv1a004877m (locus mgv1a0 04056m.g) derived from phytozome v7.0 (chr-ID scaffold_4; pos 176037 to 176877 reverse strand)
agagccctctcagttccgacgctatctttaagcaggtaggttcgcattcgcagttctttttaggtttcatcaacgtttatttacgtgtatacatctccagaatttgtgaatattaaatgaagctttttactctcaccgggaatctggtgatgaattcctagaagcatcttgttttacttagtctgttatttatttattagcattcgtacttttctcctgtttcgatcttagaattaactagctcgagttgcaccattgatgccatcagttggtaagaatttgaatgaggcaagataacatcgacatgctgcatttgttttatggtcctactgaagaatgttgaggatactttccggaaatagcaaatccaaaaaaatccagagttggcacggtgaagacatctagagcaactgtttctgtggttggtcttgtaatggatatttgtacaagaagagacaagttgcagtattcctgaagtgacctctgggagattaggttttaaaaaatactcaaagttggcaacttattgaaagattgaaacaatagtgatttagattgcggttatttgtgcttatatatatattttttttaccacttttattcctctggggattaatgggcagtgtgagatttttatagttggacgtaagacactcagggagcaaagtaaacgtacgggttgtacttgcttttaactgttgtaatttggagatgttgcgctttgtttgggaggatccaacaaatttctggtgcaccatcaactagcaaatacttttgggggtgttagtttgcctgacaagtatctgatgttcataacttattgttttcttgttgcagagtc

SEQ ID NO: 103719 - DNA, 598 bp, Mimulus guttatus
  Intron number 1 from transcript mgv1a016623m (locus mgv1a0 16618m.g) derived from phytozome v7.0 (chr-ID scaffold_129 ; pos 238483 to 239080 reverse strand)
ctctcaagtagatctgatctcaaagcagcaaagaggtaactgcaaaacccttgattcactcttcctctcacacacgcactacacactttatgtatgtgtaatatatacttacatctttgatcatttgatcgtgatgaacagttttctattgctttgtttttggcttgaattatggtttcacttgagtaaatctagctgattaagtatcattgtcaattttatgaatgcgatttattaaattagtgttgattgggttttttcttctctttttctgataggatttgagtttgtgattatataatgtaatttagttgtatatgagtttgatctcaatcaactaggttgaatttgtaacattttcagattgatctgagacagagtttttacatgacaatttaatttttttattttttgttgaatttgtgcccaataaaaaattgtgaatgatctgtgactgattcactggctaatcttgcttaacctaagttgacacaagtattcatgataaagcaccgttttcgtataccgaaatgtcgatttttgattcattgatttaacatgtctgaattttggcaatctgtaaagaagaagtagagag

SEQ ID NO: 103720 - DNA, 653 bp, Mimulus guttatus
  Intron number 2 from transcript mgv1a016009m (locus mgv1a0 16009m.g) derived from phytozome v7.0 (chr-ID scaffold_109 ; pos 294337 to 294989 reverse strand)
agcaaggtattattattattactctcttaatttatttttatcttttattgttgcgaccatcgctatcggttcttgatttgttgctccactaaatgtggatggatccatttgcgttatgcagttatagattatgtatttatgtgttgaatttatagaaaaaaaggtgggttaattctatatatatatatatatatatatatatatatatatatatatatataattttgaatgtcaacgtaagtccttggttgggtgtatatattgtttgcaattgaatgttatgcctcttgcacgatttttcgtatttagagacacatattactgcattagaagtcatgtgcactgagtgaacacacagtcaatgtgtttttctatgtgattctgtttgtgtgtgtaaccgcataattactatatgatgctgcaaacagcaaaggaaaaggagatacagtcacttaataataaagacagcaattgtgaatttctagagacttgattggcatcattttgatttttttcactagtcacgaaagtcgggattatttggatatcacattactttgccatcgtttttaagttgaaatgtctgtttcacgttttcttcctcgggaatttagatgatctttatgcgacatttttctccccatgcagtggaa

SEQ ID NO: 103721 - DNA, 382 bp, Mimulus guttatus
  Intron number 1 from transcript mgv1a016009m (locus mgv1a0 16009m.g) derived from phytozome v7.0 (chr-ID scaffold_109 ; pos 295207 to 295588 reverse strand)
ttcgatccgacgacgacgtttattgtaattaataggtctggtagctgttttttgcactcgccgtttattttaattttgattgttttacttttgaggaaatctgtgattaattaattaattaattttttttattcatgttttctgttcacgtgtgattttaaattgcaggtagattgtaattaatgtctggttgctgtttgattgtcgtttgcatttgaggaagaaaaaaaaaactgttgttttactggtttagtaaattaatttctcttaccaattctatttacatttgagaaaaaaaaaactgtgattaataaaaaaaaagaaattgctttttttgatgttttcagttcacttgtgattataaattgcaggtaaattagaa

SEQ ID NO: 103722 - DNA, 891 bp, Mimulus guttatus
  Intron number 1 from transcript mgv1a009723m (locus mgv1a0 09723m.g) derived from phytozome v7.0 (chr-ID scaffold_130 ; pos 142984 to 143874)
aagaagacttgttcgaagcaattgataaacgtaatctctcaaattttagctcatttaaatctcctaaaagcatgatgcctctgttttgtgtgcatttgattttgatttgtatggcagatctgaaaattctgtttaatttaactcagatttccatgcgatcgctcatgctcatttacatgcttcctgcgtttttgtttgatacccgatgaattttgtttagtttcagaaatcgtttcacgattatttactgttattatgatatttacttgctaacggaagttttaaatacgatgaagaatgtgaatgtattctggtatatatgtttagatctactcgctcagattgataaattttgcatgtttggtatgtaaagtgtaattcctgctcaccagtttccgttcatgattgttatgtttttcagcgtggtagtattgatttctgtttgggcggaaagtttcgctagatttgggttctgatagtcatgcgttaacctgtttatgtttcatgatcggcgtaattttttttttttttttttttaacaaattacaatcgaaaaaaatgttcttagtttcccgaattaaataatttcttcacactctgtataatcttcctgaattaaatttgatttaatagtagacgtatggtaaatggaatgcttctctaagttgatgtatggatgtctctgtttgataattaatttgtccttatgttcattttctatggtatgttaagaaaattgatgttcacctggaactggaagttgaatgtaattcttcagtacgtttttcggtgaatttcccgatggaaactgatttttctggtaatttttgttgggcaatatcatgaatctgttctgatagattttcgatgtcgtttttgcagtgacagctc

SEQ ID NO: 103723 - DNA, 932 bp, Mimulus guttatus
  Intron number 2 from transcript mgv1a021420m (locus mgv1a0 21420m.g) derived from phytozome v7.0 (chr-ID scaffold_5; pos 679107 to 680038)
tacaggtcgaattttacaggtaaaaatcgacatttagatgtcgattttgaggtataaaattcgacatttgaatttgtgctataaatttgacatgtcaatgtcgatttttacctatgaaattcgacgcttaagtgtcgatttgtagcatagtttttcgacaccttggtgtcgatttttgtttttttctcattatttgtatttggtcttacatgagaaaaaaaagccaatttaacttatgggcatacttgtcattccatcttaataaaatagaatcttttggaatctttctttaatttggtcttgcacaagtggattgagtattgcatatagccgcagcctaagttttattgtagattgtagaaggtgctccatattttatccgtcttcaaatctcgcctagggcccccaaaatctcaggaacggccctgtgtacagtagatggtatatttaggaggattgattttacctgcaaaacaataatttagcttattcgttggagcatgtttttttgcttacaaatactatatggatggatttttagctgataccatcccaaaatatggatggttggagatgctctaacatattagtaaattatgacaatcttctatcaaaaaaaaaataaaaaattatgacaatcgggctgggtttctttcaaagcccaattgttacaaaaatccagcccgcaaagcaaaattactatttgctgactcttgtttatcttctgatcttcaacctctagtctaaacctcactactgaaactcaagtagattccaaaagatgaagaaaatgattatttattcgtaaattcggagttcaattgcgtcgcagtgttcgattacaatggctgcttcaattgcttctctcaattcaacaagtttccgttccttgcgcagaggacccatcccccaaaaccgaattttatccccat

SEQ ID NO: 103724 - DNA, 754 bp, Mimulus guttatus
  Intron number 1 from transcript mgv1a007789m (locus mgv1a0 07789m.g) derived from phytozome v7.0 (chr-ID scaffold_68; pos 1248435 to 1249188 reverse strand)
caggatataacgacacaggtgtgaaactgaacatttgacttaattccttatccacttttaccgatgtactatcatgctgtactctataaaattcatgctcaagacatgttttttttttttttttttttactaaatctcttactcgaaaagtactaaagattaatgcgtttaatgggtaagatattagtttggatgtgtgtaataatgaacatttaagtttctctgtcatcgtcaatgtttatatatagcttcttacagcacaattcaatgtcataacgcatgtcccgtcatgataacattgactttctactgggttacatttggtattttggttatcaaaatttattgaaggtccatttctttttataaataaattaacagttgcaatagaacatggactagcattgtagagtataagtttgttgtgatacaaaaaaaaatgttatgaaattgaaatgtgattgcaatgattgtatggtattattttatcatttgaagaatgtctaccgtcctctgtttgaagtaaaagacgatccttccttcttcaaaccaagtgcttttcctggaaccagggttctaggagagataaatattatgatttagtgatgaaggggttttacttggtcatttcattttgttcaattttctttgaatgttcttttacactctagtatccgatgtcttgtatctcactgagaaattcattaacctctctaaatcattcgcagcttttctcaactttgttactgtgcag

SEQ ID NO: 103725 - DNA, 582 bp, Mimulus guttatus
  Intron number 1 from transcript mgv1a019232m (locus mgv1a0 19232m.g) derived from phytozome v7.0 (chr-ID scaffold_244 ; pos 38373 to 38954)
cagggaagcgagtcgccaagtttcaaaccaagaaggtgagttctctccacaaaccaaattaattatttattccttcattgctagctattattttttttcttcgatttgaaccaactgattgtgtgtttcttttttggggaattatttatttgtttcttcaatctagatatacacattgttttctaatccactcgtccctacacacacctgccagagcgtggtatgctacacctggttatttacaccgggtgaatttgattgaataagtatcttgttagcacacaaacacatgaatgggtgtgtgattatatgtacatctatggatcaaatccaaccaacgtaagtaaccagctgtacgtaccatctaatttccacaagcacgtgtatgtgtgtgcttgtgttacgccgtttcttcatggcttctcaaaattggtccgtaaacagtgtgtgcagatctatggtgtgagattatgtggtctatttcaccaggtgtagaatcacaaaagccccagagtgttataacttttatatctttctttatttttttttccctatagtgtgccgagatagtttacggtgacg

SEQ ID NO: 103726 - DNA, 513 bp, Mimulus guttatus
  Intron number 2 from transcript mgv1a015704m (locus mgv1a0 15704m.g) derived from phytozome v7.0 (chr-ID scaffold_22; pos 778932 to 779444)
gtgtcgataaaggtgtcacatctgttgttatcaaggtatcattcaatctctctctctctctctctctaatttttaatttttattgttgaaacataattccgaaactaagaattaagtttcagttgcattttctaaatttgcaggattttttatttttttatttgcatcatattcttcaatttagtgtcctgttaggtcatgataaatgtcttaacccaataattaaaccctatctaggtcttaatttgggtggaaatgataaaatgtctattcaaatcctctgaaattccccaacacttaactgtattactcctaacaagtgtgtttttaatttttattgctacttcaaagaaactcgaaaaaatttggaccaatagttaattttgctacgaaatgatttacgaaggaatttggtgattattagttacaacttacaactattgtttgaatgtttattcggtcacgcttatgtttgcagggattagcggaacacaaggatacgttgggtgcacc

SEQ ID NO: 103727 - DNA, 480 bp, Mimulus guttatus
  Intron number 3 from transcript mgv1a007294m (locus mgv1a0 07294m.g) derived from phytozome v7.0 (chr-ID scaffold_6; pos 3383529 to 3384008 reverse strand)
cagatatagaaggtattattaatgatttgctgtttattttgctttatagtgtgcttctggtaaaatgcttgtggatagtggaggagccgattgtacttgagatttaattatgcagttctttttacttgtatacacattctttttaactttcacaaaatttacatttgagatctctatttcaaaactccaaatgcagatatgaaatcttgatacaactagccaggcatgtttaaacaattttgatggtagataaaattatttgttttttgttaaaagattttttttttcttaattaaattaagtttaaggatgaaagttggacaatgtcttatttgaagaattatttaagatcacattgtgatagttgctataacatcctacttgccccgttgagggatattagtaccttgctatgaatctgacaactctagatccagtattttctactgtttttcttttcctgtgcaggtagttctgaaa

SEQ ID NO: 103728 - DNA, 693 bp, Mimulus guttatus
  Intron number 1 from transcript mgv1a021777m (locus mgv1a0 21777m.g) derived from phytozome v7.0 (chr-ID scaffold_1; pos 1415445 to 1416137)
tatagtggagtacccactcccactccacacacacagtacacattttctttctatagctttcttcatagttattacagactcattacattcaataactgattcccacctaccgaatttcccttttttttttttaatttaattatttatatagaggaatcatttgtgatgctagtgaccaattcccttgagaagatggccattcctttactcttgtctctttcatttcctctcttcgcatttattacctattttacattgtagacttgtagtgtagtgtcatcttctttacagttaacgaaataaaaaaaaaaaaaattggggttggcttgattggaattggattttttcccccaattacaatttcttgattctttggtgggttttagttaaaaatttgatctttgttcttgcccatttatttctcatattctctttgttgggagtgttgtaattggttgttttttttcctatgtttctgtaattttgtgagcccaattagcacttcttgaatgtgctgtgttgtattacaaagaatgcagaccgtttgttttgtgttgatgctgttactgttactactagaattgacagtgggagaatcagacattgatgcacttctgcaactcagaagaggaatccacacagacaattcagttgaagttcttgcttcatgggattccaactcactagcatccg

SEQ ID NO: 103729 - DNA, 540 bp, Mimulus guttatus
  Intron number 1 from transcript mgv1a011914m (locus mgv1a0 11914m.g) derived from phytozome v7.0 (chr-ID scaffold_1; pos 1146240 to 1146779)
caccctccgccgcggcgatagccggttattttacggttagacgattttgttttgtttacatagtttaattttcttcatttctttcactggatttttaactgtggagggaaaaattggcgcgggaaagtaattttgtttggttggttaatgcgaaatttcatgagtttctgcttgtttaatactgggcgaagtgattcagtccttcaattggcttaatctgttgttatttgataattgatactgagttttttcatatgtttgagatttggggattatctactacaataatcagtcaagtagaaacaattaaatctttttttccctatacaattgaataaaattcgtttatttcagtagaactaagtgaacattatgcagctgccattgtttaaattgtgccactgatggaaaaaatcgaatatattgacgataatacgaacctgttgggcgatgttgtagacttgtttttttgggttttctcttacaaatttaattactctttcagatccacagacggtgaatcatattcatttcctgatt

SEQ ID NO: 103730 - DNA, 986 bp, Mimulus guttatus
  Intron number 1 from transcript mgv1a009860m (locus mgv1a0 09860m.g) derived from phytozome v7.0 (chr-ID scaffold_5; pos 1580322 to 1581307)
ctggtccgttttttcatttcgttttccccctttttaatttacattcttttgttatttgatttttgttggatttggtaaatgttggatgaacacatttctggattgcaaaatcaacaaagtaagaaattgaactatgttcctccttcaattgaaagagacctagttttcagggacttatcgatttgtaaacggattgtagaatgttgggagttggtctcgatttaggaaaaagatatggttataggactgacgtttacctgatccaattcccatacgataaactttgtcggtacgtttacttgagctccagcccatggtgcattcagttcccagcttctgcatcttttttaacaaaaagtagaaggaatttcaaatattagatatctcaatcaagaatgatgaatttcaaatatgccattattgggaatacttacaagccaaaggcgcggtaatcattaattgctccggtgaaaccagtttttttcgaatttggtgatgtaatagtcaagctcctcctctgttagccaaggtgctctgtcagcagaatatgtaaagcctttacctttgggaaagtaacgttgagcagggtttcgaaaagcaaggatgtttttggggttgtttcttcatattaggatttatttgaaatatgaacatatatgaggagcctaaacccttttcatagtaaaattggaacaagctcatgttcggtacataatttatgtagcatatagtaagtgtgtaatgaagagttacaaaagatataagaataaaaatggaaactatattttgctgaactgcatgtgggacgtgttacatgttctgtgaccgcaccctattgtctcatatgttcaccagtcatgtttacctaacaaattgatgcaatttcctaaatttgtggcctttttctgcatttttcgtttaattgatggcgaagttttcggttatttacaggcatacaggctgaattggttcttggaacaatagca

SEQ ID NO: 103731 - DNA, 659 bp, Mimulus guttatus
  Intron number 5 from transcript mgv1a012886m (locus mgv1a0 12886m.g) derived from phytozome v7.0 (chr-ID scaffold_1; pos 499486 to 500144)
aagaatcagttagtcgaagaacaatttcgtcggcatttcgtttttgcacatggttttgttataatacaacagttatctcattaacatgcataaaccactaatatcatttagcgttctccgatttgagtatataatttcaatctgtttttctaagagctgcttctgcggaatctctactgcttcgtctactcgattagcgtcttatactgcattttttgacgtgctaattcttgaaaagatgcatatatattcatgcctcgatggagtgaattgtgatgcacaagttccaaaactatgtagtaaattaaggcctcgtttggtttgggatattatccatgattaactaaataattggactttgtttgatgttttgtaaacccattaactccccgggtcgacccagcaatattatgttatcatgccttttcgagagctttttgtcggaccttccggggtccagtaaaacaattgggttttcattagattatttaattttatcttggcaaccaaatgagtcctaagtggattgtttcgtggttcatttgatcttttgctgttggacaaaacacaaatttgaattttagttttttctatctaattttcgttccttctactataatgcagtcgagaccttttggtgtctctcttctaattgctgg

SEQ ID NO: 103732 - DNA, 660 bp, Mimulus guttatus
  Intron number 3 from transcript mgv1a025945m (locus mgv1a0 25945m.g) derived from phytozome v7.0 (chr-ID scaffold_1; pos 2390830 to 2391489)
tcttctggtgtttgtggcaaagattgtctctgcgggtaaggattactagaattacttttgttgcaacttgagagttgagactgtaatgggtatatttcgctatggtggtagcttagaaattaacatagcagattctagtttgatgcaatctgtagctttctgctttactaatgaattgtggtgtactattggattatttgatgggttgatttggtccagggaccttgaatttataatctctatacttcacaaattgtcgatctatagttgatcttctactacctcttataactacagttactcattcccctcttaaatatattatatgaaaaacatagcaagatttttcttcattaatgtaaaaggtttgaagtaccacagtggaaggatccaatatcttatcatttttgtttcatttcctgtggtaggagtttttcaaagcataaatgtaggactgcttcttgcaagtttcaatactttgaagctttgaccccctttcctagtacatgcattttcttgttccaagaagatataatcagcattaccaaaaaaataaaataataatcatctctatatcgattgatgtcttatacattttcaactctgaactatgatcaaggagtacattagcttgatttttctctttgttttttccacagc

SEQ ID NO: 103733 - DNA, 922 bp, Mimulus guttatus
  Intron number 2 from transcript mgv1a015983m (locus mgv1a0 15928m.g) derived from phytozome v7.0 (chr-ID scaffold_2; pos 3399948 to 3400869 reverse strand)
aaatcgaaggctgattccaggaaggccgacagcaggttaggcgatgttttttttttcgttgctatatttttgtcgttttggctgattctctgttgattgatctgtataattctactgagtttattttgggtgtattttgaatgttttgctggtttccagatttttacttgacgaaatataacgagtggtttggtaattgaaattgttggtaaatgcttcaaataattcagtctcagattagatccactcgtaatacctctttatttttttttattttttttctgctaaataaaatcagcacgtgattcattttcgttttctctgatggatctgaaatcaagtcaacctgtaggtgctacaatggattttgtattagtgttatccagtttttttgttctaaatacgattagaaccaagtttgaatcagcatagttttaaatacatctcatgattttctgagttttgtatctgtgattgattgtttatcttccattactgactgtatttgatgatacaattcattgggatgcctaaacatttcagtaaaatattgaaaatctatgttacatagccttgcactgaatatcctatttaaccaaatatatttgattttctggtgatgataatcagtgattcgtcttttgttaaaatgttctctggttatttttgaagagctggtcacagttcatcgagttatgatttatttttgtttcgttcaaattctgactgatgcattttcagtaagtacatcggatctattgattggatagtctgttttattgttggggcctttcgttttggatcttctatggtttcagtttcttcgtgttgtgcggatgttgtttgatggagcttataaattaaccattaatttctggtaatagtaggcttgctgtcaagaagcagacaaagaaggagaagc

SEQ ID NO: 103734 - DNA, 249 bp, Mimulus guttatus
  Intron number 1 from transcript mgv1a001757m (locus mgv1a0 01757m.g) derived from phytozome v7.0 (chr-ID scaffold_32; pos 1678329 to 1678577 reverse strand)
agttgggttctgctgcagctagaattgtcactcaggtatcaatgttccaagttgttattttttttttgattttgcaatggaattgtttttgatgagggtttaatttgaagcacactagatgtttaatgtttgatgattagctgtttaggatttaaaaaaaaaaaaaatttttgaagaatttttctgcatggagaaacaagaaaagacaaacggatacatctaactctttccaattcaacatgcaggacg

SEQ ID NO: 103735 - DNA, 850 bp, Mimulus guttatus
  Intron number 1 from transcript mgv1a014009m (locus mgv1a0 14009m.g) derived from phytozome v7.0 (chr-ID scaffold_8; pos 3345654 to 3346503)
aatccggaatagtaaatctcttctctttcccgatttaacttatctacggttttttagggttgtaatttggttcaagttgtattgaatttgatagatccacttaggttttggtttgagctgtgttcagaaattctgtttaattttgctcctaattcgattatactagatccaggattttttttttcctctttttttttgtatagctaaatgtttatttgtttactcacgggattcttttgtggtaaagttgattttgttttctcttttgcaaaaaaaaattattattaggagttcacatcttaataaaaacaattaaaattcagttttgttttattttcaagctttgagatctcttattttgatgaaattatagtagctgtaggttgatttctgaatcagaactgtgaaatttattggcagaagtgtgtggttttgattcctctcgaccgtggttttaataacatatctgattcatttgttataacaaattggttggcttggataattttcctccatagggagtttgttgattactgaatgcattatttatcaaaaatattttctattacttttacgtgcatccaatatctcatatttcgttctcgttttaggttcttgttagaaagtaaaccacacttcgttcagctattatggactagaagcatatattagccacaatatcacccaagcgcaccaactgttaaatctgttattactctcaattagttttatctcatgttattataatatttacgttttcccattttgaatggtacaatgtaacttattcggtattttatgtcggtgtttttcagtgactacttgttcaagcttcttttaattggagatt

SEQ ID NO: 103736 - DNA, 754 bp, Mimulus guttatus
  Intron number 2 from transcript mgv1a014009m (locus mgv1a0 14009m.g) derived from phytozome v7.0 (chr-ID scaffold_8; pos 3346507 to 3347260)
gtgttgggaagtcgtgtcttctcctgagatttgctgtaagcttctaattgttggtgtttgatatagaaattcaaatgcgtttgttggttagataattcccccctctctttacgcagcaattctttttggaagattttcataacattacacgtttttccttcttaatgagatggaacatttctaaagaaattaagattaaatagaaacaagacttttagttttttcatgttgtctttgagttgagcaatggaaacctgatcgatcctggctgcattgttcagttggagaaaaacattttttgataatagtagatagaaacggttgtaaggagtcatattagtatctgcatgaatcaaagctgatgagctactattgacctttgtgagagaaatttaaaatttgatctaaatgtagccgttgaaacgtttcggctgtgtatgctgtgagtcaaatcaaaagaaaccccatccagaggaacttccacgatagcgcctttcgttttgttccataaacttcactaactctgttttcttttttatataccattccttaagttgaaagaaatatcagttaaaaatttattgtatttgacggagtgggtctttaggcaatggtagggtgttaaactgttgaatattcgttttcagcactagggttttcagctgtgtaattaaaccatcatctttttttccaactgttttagttgtggtgaaatatggtcagtgattgacagtgcttgtgattttggtgcagg

SEQ ID NO: 103737 - DNA, 819 bp, Mimulus guttatus
  Intron number 3 from transcript mgv1a019086m (locus mgv1a0 19086m.g) derived from phytozome v7.0 (chr-ID scaffold_416 ; pos 41518 to 42336)
aggtacaaattaaaacttgtctatattatttaatgctgcaaaattaattattaaattaaggatttaatatttaaccgtatattaattgcatcatttaatcaattaattgttcagatcaaaggacttggttttaatacattaaacagaaaccacttgtgaatttaaaatacgaattattgtccttgttttatactccctctgtcccatattatatgtctttttagagagttttttttgtcccaaattatttgtcattttacattttcaatgaagcattaattgcattattgtcaattttacccttaattactcctaattaattagttgagaatcaattaatgtcaagaatattttagtaatttgatctgtcttttactataatctatgcacatttattgattttcttaatatgtgcaaaacaacccaaaacgacatttaaattgggacggagggagtaattattaattaatatacttcgttgacttctttgcgtggtcttcttcatccgtagtaatattgtactcaacatgtaccatctgctacgcgctttaattcgtcacgcgctattttttattattattaataataataataataataataataataataataataataataataataataataataataattttattattattattattattacccaagattaaataaagcactgaacatagatcttttcttaatttttttaactgaattatgaattatattcttaataatttattgatttaattatgagttttttaattaattaattaattaattaatgataatcggatgcagcttcgacaggtg

SEQ ID NO: 103738 - DNA, 722 bp, Mimulus guttatus
  Intron number 3 from transcript mgv1a014797m (locus mgv1a0 14797m.g) derived from phytozome v7.0 (chr-ID scaffold_245 ; pos 33187 to 33908 reverse strand)
aggtacatgatctcatcccattattcaatcatttgtggtaatcgatatatactgcaagatcatctcaaagtgttcctaattctgaattgcattgctttgcgattacgtactttgtttatcctgtctattttttatttttggattgagctgctattgaaattagcatttggatagatggatagagcgctactgcagtcgtaaaagtttgttgatgtcatatattggaagacggaagctgttgcatttgtcgtgtttggttatacttgtctttatattcggttttagtgcatgtagttgtgctttttgatctagtcgtccattattcacttaaacatgattttataccatgtgaacagaagctttaagtatgtcgtcatattttgcctatcaagggaatgatggtggctaaaccaattagcctgctgtcagtcgtattttcccactcttgcacaaatggtcgttgcaaaggttttcaattacaccatagtaaaatttagactcgtaacatgttgttttcaggggcatgaccatgagattagagaagtttgcgtctatgaaccttattctttgtgtttctccttgtatcagtgttcaaagttcatatttttcatatgttgggtttatttaagattcactcatttcaatgtctttgatcgatattgatttttttttcctgtctgcttgtagatttttgagaaaaacccaaccacaatcaagaacta

SEQ ID NO: 103739 - DNA, 451 bp, Mimulus guttatus
  Intron number 1 from transcript mgv1a023400m (locus mgv1a0 23400m.g) derived from phytozome v7.0 (chr-ID scaffold_211 ; pos 84517 to 84967)
aactcgaagaggttccccatttttttacatgttcattgtttatttttttaaataatttgattattttattttgtgtttttctttattcaaaattagcttgcctaaactttgaaaatatatatgattttatttattgaaattgttatatactctatgatgtatatttattattcatggactgaattgttttatattaattattaaatacatatatgaatcaggcattactcgttgccgattttgggcctcgaatcactatcaaatcgtggatacattgagagaagatatatactctggcaaactcaaatcagggagtgaaatcaaagtaattgttcgaatttattttctatacgccgtatcattttttttttttttttgtcgattgtgcaatgtgagttattcggcatcgaaattgagttgaattatagcctgtggtggtggtgtttttagg

SEQ ID NO: 103740 - DNA, 695 bp, Mimulus guttatus
  Intron number 2 from transcript mgv1a019185m (locus mgv1a0 19185m.g) derived from phytozome v7.0 (chr-ID scaffold_2; pos 2519537 to 2520231)
gttgtttgtgataggttttctataccgtggccaaggtttgattttgttctgttccttaaccttctcatacaattggattgtagtttgttgatgagtaataagctgagtaaaatactgaatttgctgattgtagtaatggatggctgtccgattaataacttcaatgtggaattagtaacgtttttagttctaagtgatctggcaagtgaaaatgtatgtaaggttgatcttttcccaacaattagtaataagttttcaaaatcaagaacatagcccattaccgagatcttcgaatgttatgatttttgtttttaatttgtggttgcttatatcgcctgcattccagagtagtcgtgaatacaaactcagaaaagtaaaatgtttaggttgatcgtttatttgatttagccgaactgttacgtataagagagccttcacttaacaatatcagtagagaaacatcggtgtactttttgaatgtcaatcagcagtgtagtttttgcacgttttaactgttgttaccacaaaccggagcaacttttgcatctagcttttcgtggtttcctattggggatggcttaggctaggaatttaatgctctcagataaaatgttatgtacttattatgctttgaccgacgggaattcgtttgccttataggtcctttcggaagtcaaaaatttgtcagtccggtt

SEQ ID NO: 103741 - DNA, 980 bp, Mimulus guttatus
  Intron number 1 from transcript mgv1a012943m (locus mgv1a0 12957m.g) derived from phytozome v7.0 (chr-ID scaffold_27; pos 915784 to 916763)
ttcctctctcgattggtactgcttttccattttaggtacggatttgtattgttcgtttgttactggtttagctcaccgtttatctgtttgattgtttttttgagctgatgaatgattatgattggttaattcaatatgtatagatggtgatttcgaaaaaaaatctttagttttgggtgattttattgtttgtgttactatcttgttagagtactgggccgtggtttttctgcaggtgtgatggttgctaaattgttatgtattttaaaagcattgattacggtctacgcaatcgaataatcgaacagttattttcgtcgattttcaagagcgaagacgactgttgtaaacattttgtacatagggtttatatttattgagcttgattattcaggatgtaggcagtttttgctcaaccactctataaattatttcttctttgttgttatccatcgggagctccatgaaattaaacctcagaattgtagtattgtagtagctatttatattttcgttggcactctttatttcttgattgtttactttgtaagtgataccagaccatttacacgtgttctacactcttcacctcaaacaaatggtaattagaaagaaattgaataaccgttgtagaaaattgaagagatcattactttaggttgtctgtgttaactttgactgaaactctgtctgagatggacagagtttaatgttagtgtttttgcagctgacgactctttccataccataacgaaatcgatgaattgtagttaaatatttttgttacttttgtatgttaaagaacaagttaatgagcaaaagtcaagaaatactacaaaatctgcacgcgttgcagttctcttattctcttatgttaattagaactattccagtttgggttctaatgtcttattgtcttggattaaagcactattcctcctgtaatattcgtaccttgttcaggttcttctagataaaac

SEQ ID NO: 103742 - DNA, 716 bp, Mimulus guttatus
  Intron number 2 from transcript mgv1a012057m (locus mgv1a0 12057m.g) derived from phytozome v7.0 (chr-ID scaffold_1; pos 2561378 to 2562093)
ctgccgaggcgatcagcggctgttgcctttgctttgtatcctttttccgattatttttcttatgtatctctggtcatgctagatatatattttaaatatgtgtgtaactttgatgttgataattcagctaaatttttgaattttttgttaattttctgattctgatctttaacatttttaggtcccataagttagtcgaacaacacaaaatttgtgcattgcttcataagtcgaattgtttcgatcgaatgaccatgacaattgaagcattgtggaggccgaaagagttcaccagtcattaattaggtattttttgttaatgagcactgctaaaatttcgagatgatagagaaatatgaacctccgttggtcatggagatacggggaaaagggaagcagaaatcagaattgtgataattattgagaatatctaaattagaactatggatgtggatggtgatcagatctttttgggtccgtcaattttgattatcagtcggtgtttgagacatgaaaatgcagcctcggaagaatgtgtgaatcattttcttatatcaatcatctctacatgaattgcgagccttcaattttatcatttcataacattaaattagtttctaattagtttcataacattaaattagtttctaatttggtgaaactcaaattcatgggcaaatttagtatccttgactacatcaatttcacagtacact

SEQ ID NO: 103743 - DNA, 606 bp, Mimulus guttatus
  Intron number 2 from transcript mgv1a022814m (locus mgv1a0 22814m.g) derived from phytozome v7.0 (chr-ID scaffold_3; pos 2149608 to 2150213)
catatcccggaaattataatcaacaaacattttcggtatgcaataattaaaatatacgacgaataaaatttaatacaaaaaaaaacctatcatttatatatatatatatacaaaaacatattctaatttatgtttatttcaatcaaaatttacaaatgtttacttattttatgctattttttttcgaataccatagtgtttttttcagtaatattttgcgaagatgtgttttgaccccacatttttttgtaaatttgtgttttgtcccccatttttgttttcttctcctccataatcctatgtaaattatatacatttttaaaatttaatattacaatatataaaataaaatggttaaaagttatactatttaaaataaaatccataaatatgtcctatatttgaattttttttatcaatatctctagaaaatcgaggatggcgttccctgacccccaattttatacaatatataattattagaataatttaaattaattcaaaaaaaatcatgctctaaatatgacacagttataatatttttttattttttattttttattttctttaggggctggattttgtggtggctgaagcaaaaaagta

SEQ ID NO: 103744 - DNA, 445 bp, Mimulus guttatus
  Intron number 1 from transcript mgv1a003176m (locus mgv1a0 03176m.g) derived from phytozome v7.0 (chr-ID scaffold_4; pos 3784113 to 3784557 reverse strand)
gaaattcagggttagcggttccaatttctccgccggttggtcctccttttttaattttacctaatgaattggttgatttaagctgtaatcctttatgtagttataattttcatttcatcaattttatttttggacgcatttgcagctgttcgacctaattttccttttgtttctaaatgtttgtaaacggaatagattgaatttttgcccaatcgtcttcctctcatcgttattcggtgtttcagaaaatttttagactccattatgtttgatttactcatgtttctttatggaaaaacatgttattcatagattaaagactaaattcaaacctttcaagaacaaacactcttcaccttgtgttgtgttgtgttgagctgtgtctgatgatgaccttttgctgatgttagggttctgggtttcctccaacaaagagagtgattct

SEQ ID NO: 103745 - DNA, 440 bp, Mimulus guttatus
  Intron number 2 from transcript mgv1a007445m (locus mgv1a0 07445m.g) derived from phytozome v7.0 (chr-ID scaffold_4; pos 2226411 to 2226850 reverse strand)
agaggtcgcttttggctctccaggtcgcttttttttttttcctttcacgtttctcgttattgtttgttctccatcttgtatgaaatcattcacaaacttctgcggttttggtgaaaaagagtaattggaaattaggcatgctaaagaatgcgtgatattacggttttgactttttgactttcttgaatggtgtatcgtattttcttcttggtttattaaatttatgtcgtgggttttcaaaaaagtgattttttttctcactggatcgaaaaagggtgattgagtttctaattcttttaggaagatcgaaaatattagtacaactacagcagcatgtgaataaacattgtattattagccaatgttgtgcgtacttctattgatcgtcttagtatctcgacgcagggcccacttgctgccccggttttgcagcacctgac

SEQ ID NO: 103746 - DNA, 521 bp, Mimulus guttatus
  Intron number 1 from transcript mgv1a007445m (locus mgv1a0 07445m.g) derived from phytozome v7.0 (chr-ID scaffold_4; pos 2227389 to 2227909 reverse strand)
aattttcaaggaaaaataatccgtcagttgttcaggtactgtgtgttcttcgtctctcctttgaatctgaatgcttgcatttcaatgtttctgaataataagaagaattaattcaagattgttttttttttccatttgtgggctggtgagattctttcgggatctgtatttgtaagcacatcgcacactggtttccctgtattaattcgtttgatgggttgtgaaaatgatgcgtattaaatgtactgattaaacctcaaatccaatgtttattccgtacgatgtagaaagaaaaaagattggatttttattgtgatttccaatcgtagtgtagatttattgtcttcctgttatgctatgacctatgtccgaggctaactaattcactataacattgttttaatttttaaactcttgtcttaatataactcattaaagatctgttaatccagatttccccatcttaataaatccatcattcttgttttttttttcttttttctaatcagaaattcacaaag

SEQ ID NO: 103747 - DNA, 739 bp, Mimulus guttatus
  Intron number 2 from transcript mgv1a018771m (locus mgv1a0 18771m.g) derived from phytozome v7.0 (chr-ID scaffold_57; pos 1357904 to 1358642 reverse strand)
tagctgttttagatcctagtcaaccagtttctgtggtgagcctctttcgttagcgataaaattaaaacaaattattaggttgtgctattgatccttctggttctagactagatacaagttttaaaaaaagaaaattcagtttgatatatcaagaacaaatttgagctttctaaaatcagatatttttgtttttcaattgttttgagtttgaatattaactaatgcagttttagtgatctcaagatttgaatcttctgcctctttcttaatgaaaattcggttcggtatttggtaatttttatttttgaattccgatattcggtatggtatacggtattggtgtccaccgtctggtataccgtaccgtaccgaatacctaaatatttaatatatatttattttaaatcctttcaggttataaaaatattctaaaatacttgtagattgataatgttttccattatttacaaattagcctctattgataatcactttatgtttttagggccggtacttgaaatatgaatgtcaaattcaagaattatttcgtttaaatttttattttaccttttctaaaataagaaaatatattttggttttaccggtaccgaaccgtaccgaaccgaataattcggtaaaaaaccatacggaaccgaaatatattttcttatttgaaaccgcaatacctatacgttgattctatgtgtacgtatggttgtagacagtgtacgacaaaaac

SEQ ID NO: 103748 - DNA, 640 bp, Mimulus guttatus
  Intron number 1 from transcript mgv1a012091m (locus mgv1a0 12091m.g) derived from phytozome v7.0 (chr-ID scaffold_36; pos 221761 to 222400)
gattgcttctcgattcggagctccacttcgtctaggtgagtgggccccccatattctacttttttttcccaattttttctgattatttgatttgccaaaggtgaattagggttgtgaaagaaatattgatttttgttcttgtttggtttgtgtttataaggtggcaatagcttgccaatttgcatcaattaggtctatacagtacaaagtgagttctttcctcttttaaaaaaataaaaaaatgaatagatatttacccatttggcgaaatcaggcttgataagtaatatcatgtatgcgttaaagattatggttcgccttccttgattttctcttgaatgttaatcttagatggttgcactgatgaatattgagaggtgttgttggatattaaaaacagcttttgttaggaaatctatttcggaaaaccccgtcccgatccaaaaatccccaaatcccaattttcccgatcccgaataatccgatatcccagaagaaatctgttccgaacccaccctactatatactttgtgaattcttctcaagtataacccaaaatttgcactttggagggttttttttactagtagcaaaagcgagttctttgacatatcgtaatgcaattttgtaggaaactgaa

SEQ ID NO: 103749 - DNA, 609 bp, Mimulus guttatus
  Intron number 1 from transcript mgv1a000623m (locus mgv1a0 00623m.g) derived from phytozome v7.0 (chr-ID scaffold_5; pos 1024803 to 1025411)
aagattgtgtctccatagtaccttctaaacctcaggtttctcccaatttaccataatgccatctgggtttttttgctgcccactcttcaatttcaagacaataaaaatcgagtctttttttttttttaaataaagtttttggggtctgagatggtttaattctgtgtttttggaattgggtttttggaaagatctgatttttatttatttatttatttattttattttactataatagtataattttgccaagattttatggttggcagtggcatgttgatgtttgagttacagtgatttcttgatctgaaatttggtcaaatccagtgtttaggtagtgggttgtcctaagtataaaataaataaaaaaacattcttgaattcttgcatcttttgtttgaggaaaataaagggtcagatgttttgtttattcctgctgtcaggatttgtaacttcagtgatgaatttggttcactgctccttttcttgatcattctatgctgattttgactcattaatattccgatttttttcttaccttattgatgtaccggtaataatcgtgctaatccaggtgcaaatcggaacccattcgtttacattcgatca

SEQ ID NO: 103750 - DNA, 603 bp, Mimulus guttatus
  Intron number 2 from transcript mgv1a012074m (locus mgv1a0 12074m.g) derived from phytozome v7.0 (chr-ID scaffold_7; pos 3221435 to 3222037)
cttttccagctccctgttctcttccaaggtacaaaaatgaaaaataaaaaaataataataatgaaaaaataatatttttcgattttgaattatgaattatgaattatgatcatcattaatggaaatcggaacggaatattcaaattttgcattgcgatcagaaggtttccgattttggaataatatttttcatcaattttcgaaaaactacactttatgaaatcaatgcattcatcgtgtttctactttctacgattccgaatccgtgaatttccgattttggaacgaagttttctcgttccaaattccgtaattccaattttcaacatttccggattttttcggaacccaattagaatttttccaaaggtgctacttatgtaatgtcgggatccgtatttttcgacccgtttaagcttacaaaattttcgaggctatgcagatttgatgaagtatctactctgatctattcttctctttggttcattgtttcgaaatgaaaattgaaaacaattaaaaaaattgaggaagatattcgatgaatttacggttacagttaatcccgcaggcaccgttgcagataacgtgcgttacggacccgaa

SEQ ID NO: 103751 - DNA, 543 bp, Mimulus guttatus
  Intron number 1 from transcript mgv1a002073m (locus mgv1a0 02073m.g) derived from phytozome v7.0 (chr-ID scaffold_27; pos 1889654 to 1890196)
tccgggtaaattttggatttttgcttgtatattttgtggtttttcgttttctggcttcataggaataacattttcatctttatagtcctgtgtccgcgtaatttttggatcttgattgtatatttgggggttttcgatatcttcttcgttgtcttttgagcaacattttctgctttatagtcttgggattggtatttatgctctccataattgtgtttatcatctgaagctatgaaatatgaggactgattcattttctttaccacgaggcgcatgttatatttccagtgcaatccattcagttgttagtttaatggtaatttagttacttaaatgatggtaggaaagtttgatggtgtcgtggaatttaagaaagaaaaagtcatgaagatttgttaatcttatttttgatgtgattgattcatttagtgagctacagcgttgtacggttgttacgattgttgtttacttggctttgacggcctgtgttttgattttacttctgcagtacaaggaagtcttgggcaagggtgcattcaaaac

SEQ ID NO: 103752 - DNA, 847 bp, Mimulus guttatus
  Intron number 2 from transcript mgv1a010800m (locus mgv1a0 10800m.g) derived from phytozome v7.0 (chr-ID scaffold_83; pos 930415 to 931261)
tggaaggtttgctttctcttctatttttttaattaaactttcttcattttagatgaatttagtgttacgtattgtggtactgattcgttcttatcaatttctattaatgaaattctgatagggcaagactaattttttggttcctttgatattgaacagttaatattatatcgagaggatcagattaatatgatacgagttcgtacccagtaatcccttacatttcttaccgaagctccctcattacattttttttcctgccagttcattctaagcagtgcgtaattctcagcttttaattgttatcttaatgaaacgtacccaaaactctaaattacgaggggattttttaatgggggataattttgggaataaggaaactctctgtttgttaatgttaacatgagaggagcctgttcacaagttttttattgcattgttcaattaatggaacctgatgtcttttatttgaatatgaatcatttgacaagatgcctgctatggtgaaggaattgcttcactgctggtaggtgaagggttcttataagcattcaaagagaggcttgcctggatattaagagattttcttgctctctcttttgatatttacagatctgcctcttcatttttcgactccgtcttatttttatgcagctaacatcatattcagtataactgtatacacaaaagatgactttcactgcattagcttaggttgatagatatgtctttacttggcacctgtatttaattgcatgtgtgaagacttgctctgttgtctcacttacaggcatattgtacacatgtgatagtaagttgtaattttacgtggctacagaaactcttg

SEQ ID NO: 103753 - DNA, 955 bp, Mimulus guttatus
  Intron number 1 from transcript mgv1a005825m (locus mgv1a0 05825m.g) derived from phytozome v7.0 (chr-ID scaffold_4; pos 882382 to 883336)
agctgtaagccgaattcgttgaagataatcgtcaggtatatttcgaagctgcattggttaatctgatgtgtaaaacagcttcatctagcccgatataattttttcctatggttttggtatttttcgccaatgggataatacggattttcccgcattggctgctgaagatcacgtttttcaaaaaaagtttgcatttgctagggatttgtgtactttactttctcaatttgatctcatacttcatgaatttgcgacctttttcttttaatggctaatcaatcaactatgcttgattagaagattagtcactgttcatcattccaattgattaattggcagtattttctgttattttcttttatttatttcttgaagtttactgattgatttacacatgctaatagatgggataatattaaaatggccatacttgttggttgtggacttgctatctggtgttagatgaaacatgttataatgatctgttgcgtttggtgcaattttcgatttattgctgttaattggtgaagcgacttcaatttgattgggcaactaagaatatagagtgcagtgaaaggtagcgttgtgagatattttaggggcatctggtgataacacttatttccctttctgtttgtcctagtcactttcctactttagaattctgtcctatttgaatgattgtgagattcacaaccagcttcttttttttttttttcttctttcttttgaatcgattctgcaaaatacacatctacaaggaatcttgatccaaaaactttctctttgggaatatttacaacataatcttacttttcaaggttctaagtaaaaaaaattcacttgaaagccttttcttttttcttccgtgtctgattgaagcttattcatataattgtatcctcgtctcttctttcaactttttgtcgtctaaatttgcaggggaagcctgaaa

SEQ ID NO: 103754 - DNA, 638 bp, Mimulus guttatus
  Intron number 2 from transcript mgv1a025923m (locus mgv1a0 25923m.g) derived from phytozome v7.0 (chr-ID scaffold_59; pos 232767 to 233404 reverse strand)
ccaatcattgcccaggtttggattgttgtttatttgttttggataataatctcttcaaattgtatgttgttatgttgttcttcaatcacctatgagatatgtttgagttgatgttgctttaggatagcgttttagccttaaccaacattttggttgacaagacttgatttttttcactttgggtaacatacaatacaactcaaatactagtattgaaatatagctagtgtcgattccactgtactcatgtactgtgactcaatattattctattcatgtatgcataacaaccattttgttttcggtacttagactttataggagtacaatctgacttgggaaacaattaacattttgaattgattagtatacagatcaaattagattatattctcgtcccgtatggagtagttgagcttgcatcgttggtaccttttggtttattagcatgctttctagttctcgtttttcatacgatttatagttattctcagtatctaactactcatcgatgccttcgcattacatttcgatttttttttttacgtttataggactatcaaggtttttgaaatgcatttaaggctctgctgttgaaaaaatctcatgagatttttttttgaatttcaggagctgtg

SEQ ID NO: 103755 - DNA, 862 bp, Mimulus guttatus
  Intron number 1 from transcript mgv1a013448m (locus mgv1a0 13448m.g) derived from phytozome v7.0 (chr-ID scaffold_12; pos 1482050 to 1482911)
ggtgtaagaatattttttcctctggctgaggccgttaatctgttatggggatgagggtttacagactgtatagggaaactttttataattagttaaatcatgtgttttctcactaagtcgtttggacttactcgtttctcttcttgaatgttatgcgcagattaagtatcaagccattgtgttatacacttaagttgtgtaataaattgaggtgactttcggtgatgtcactcaaatagatgtttttgtaatagaatgttaatagtcgtccattttggaaccctatattttacattaatttctaccaaattcaatttgtaatgtagtattaattttttttgtatgtcaactataaaagtttgaattggattatacgagtagtgttctccaaattccaggctctacaattagtgtctgggctatttaacaaattgcgcctattgaaaaagtcaaatgtttctatctaatttggaattttccttattataaaggaagaaaatagtaaaatactgtgtaacacaagattttttttttacagttacatgtcatttaaaatacaaattaaataatagtaaaatatgtagtagctagttaattttcttgtagagagaaaaggaaaaattgaaaaaaaatagcaagaacagaacacagccgcgcatcccatcaccacatcagatcttcttcagttcttcacgccacccccaattctgaaacaactgccgccggcgctgcctccggcgttgcctccgtgatcacgtggatctctcgtaccaacatcttctgcatttctcaataaacactacttagaaatgcataaaacagcgcaggcgtggttcagtggtggccctagcagcgatctcga

SEQ ID NO: 103756 - DNA, 150 bp, Mimulus guttatus
  Intron number 1 from transcript mgv1a006771m (locus mgv1a0 06771m.g) derived from phytozome v7.0 (chr-ID scaffold_211 ; pos 218069 to 218218 reverse strand)
ctgattcaggttagggtttattaatttagtcagaaattccatttaccaacttttttttctttttcccgaagatcaattatgggtttattttcatttgatctatttgaatctgcagtaatcgagtttttggggtgtgtgccgttgctccag

SEQ ID NO: 103757 - DNA, 724 bp, Mimulus guttatus
  Intron number 1 from transcript mgv1a000241m (locus mgv1a0 00241m.g) derived from phytozome v7.0 (chr-ID scaffold_13; pos 2302868 to 2303591 reverse strand)
gaggcctagggatcgagtaagttcccgattctcgtaattttctggtcaagttattctttattacactgataactagagtgattagctaattttgtgtggtgttgacatgatttgcagccagtgcaactattacttctacagatttagtaatcacattgttgttgtttatgagaatgtagttgcttcacattcttgctattaactggcctctgtttatttgctatgtgcggaggatgcaataaaggcatcgttgaagttgcttatttagatggttatatgtctaatattcgtggagataacgacagttatttctaacatgtgataaatgattatgtcattgattgaagtacttatatttttttttctgttatctgtttgccaacgtgtgaaaattccatctactcgaagaatgcaaatagtgttatcaatatcatggcatatcttcttcatatacttcagaatgttgccgtattcagtttactaaccttccggttatttcccattaataagctcaaatggcagaagagcttcataatatcgttgtgttcatacataagaaaaatattttagttgtatcaatgtgcatcagatagcatttcccggagaaggcttataaaaccatacattgaagttctggctatttttgttgttatttggccttctatttaatgaaacatactcttcttatataattgtttgtgttgacttcttacatttattgcag

SEQ ID NO: 103758 - DNA, 526 bp, Mimulus guttatus
  Intron number 1 from transcript mgv1a027092m (locus mgv1a0 27092m.g) derived from phytozome v7.0 (chr-ID scaffold_90; pos 403009 to 403534)
acctacaaacgacgcacgaaatctatcaaacaagggtaattttgttcacatgattcttctaaaaaaaaaatcttgttatttactgcttcgatttatttagttctaacataatagggttttctcttatttccatttttctggttgttagtgttttaggtcggtgaatttttggaactgaataatcttactgtatgaaaaatcatgggtttccttcaatttcaatgttcgttaggttttcccttttttaaaaaaaaaaaattatttttgctggtggaaattggggattctttcaattcgacagatgttggactttgtattttttacattctttgaattagtcttcttgttttaggaattactactgttattaattatactgttgctgatttattttttgtactcttgaaatattccgattgctttactattcagttaatctagtaccctgggtatttcggttcaacgttgctcaagttcgaacgcggtttgttttgtttgtcatgtagtgagattaacagcgaatcaa

SEQ ID NO: 103759 - DNA, 961 bp, Mimulus guttatus
  Intron number 1 from transcript mgv1a006918m (locus mgv1a0 06918m.g) derived from phytozome v7.0 (chr-ID scaffold_36; pos 754529 to 755489 reverse strand)
tgcgtgatccctctcatcaagctttaattgataaggtaaccactgatttctgcataatttttccaatgttttatgattcgttgttagttaggttttttttttttgagattccgacagttgttcttgtatgattgtttttgctgtggcgtataattgggagagacttaagtcttaactttgggctttgaacaattttagaacaacagttttcgattacattacttgaaggattagtgaggtactgggagtgcacagacttcagcattgttgttttattttttttaggaaatgggttgaggaacatacttaaattacgaaaacaaatctggcgagtcgagtttgataagtggggaatggtaataatatagttgatcaagattattttgaaagccgagtgatccgatttaattttgataaatataatggttcttgagatggatattgtgagcgaacgacgattgtttgggaatgttgaatttggaggaagtagtttcttttgttgacgacggtggaggtatgagatgaaactagaaaatgggacaaaagatggtttacgattaaacatttgctcgtattttttgttagctttaattttatccatcatttattatttgatcaaaagacattcctgtctttgtcaacagttctagacaaacttcagccgaaatctttactttttctaaagatctttcgaactagcccttctcgttattttcagtgtttatgaaaaatttaatattttcagtgtctttgtcccattacttattgttcgtccgattgagtagaagtatcagaagaaggtaagaatgaataaatcttattcgaagttgatgctataagttaaaatttgctttacgttaaattttgtaaattatgttgtttactgtcgattttcacgaacctgcattccgtgtaagctttgcatgtcctgagtatgttcctgttttccttgtacttgtag

SEQ ID NO: 103760 - DNA, 840 bp, Mimulus guttatus
  Intron number 1 from transcript mgv1a008039m (locus mgv1a0 07743m.g) derived from phytozome v7.0 (chr-ID scaffold_2; pos 3818755 to 3819594)
ttactcaggtgacactatttttctcttatctgtttgtactttttatttagatgatgttaattctggtttgattgaatgattttatatgaattggttacaaaattcaagtttttttaagaataattgaaatatttgaattgtgattctgcataagaatgattttattgtttcgtaaagagtgcaatttaaacaaatagctctataaaagttgaatctgaaatgattcctatttcaaatagtttctaaagttcaatttgcgtggaattatagtgggaacttttcatgcttatggtatttctaaaactgcatttaaactcatatcggtctgattgttttagttggttttggacgacaaagatttcaggattaagtaggtactctgatattaatgggattaaagaaaaagttttaagagaaaatgtttttatttatgtcatgtgtaatatttttaggtaaagttagtcatatatttacagccattattctttaatataatgattcaagctttgtggagtgatatcatatataacacaaacctaatgcacatgggaaaaaactcgattatcgttgcatcttgactgggatgttgctgacatgattttatgcactttgttaatgaatgtcgatgcatgctccgaatcccagggtgcattgatgcctcatgttatctgtgatatgcattcatgacttggggtacgaagagatataaaataatcattcttattgtatcatttattcgattagtgccatctgcaagtactattttcaacgtttcatctgcttgttcagttttttcttcaaacttctgtttccctgtaacagctcattgggaaaacaccg

SEQ ID NO: 103761 - DNA, 531 bp, Mimulus guttatus
  Intron number 2 from transcript mgv1a020021m (locus mgv1a0 20021m.g) derived from phytozome v7.0 (chr-ID scaffold_25; pos 1292785 to 1293315 reverse strand)
tgaggaagaggaaccactggaaacgtatcattcaagtacgcttctttcaaaattgatttaaaaaaaaagtaaatgtggattattaatcttgcagtgttgaatcttttggctgatatttatgcaactccaaccatactctgttttttagccagtgttgcattctcgtataaaaaattgattttagccgacagaattattagccgatagattatgtaaatgtcttttatagaatataagtacagtagattgtaagatctaaaccggcaggaacgagttaataaacaataatttggttattgagtttggattgtgtgaatgtataggaatctacggcatgaatcagttaataaacaataagttaacaaacaaaacgacgaagaaattactcaaaaaaaaaaaaacaaaacgacgaagaaaagaaaaaaaaaaagaaaaaatgggtatgtagacatgcaatcgatattaaatttgttgagtttggatacatttatacgagcaaatatttattatgtggatcaggtaggcaagtgg

SEQ ID NO: 103762 - DNA, 938 bp, Mimulus guttatus
  Intron number 1 from transcript mgv1a008431m (locus mgv1a0 08431m.g) derived from phytozome v7.0 (chr-ID scaffold_33; pos 782526 to 783463)
aagcctcgcatcgtgtcagtatttttctttctctctctctgttactcttttcatttctcattttcagtttcataaattgttgaggttagctcatcttctcagacggaccaatacacggctaacatgattccgttgccatttgcgaaaatattatgttaggatgtgatttccccatttagatgatgtggatgttaatatttcaaagtaacttattaatttctctaaggatggattgggggcaaggatttcagttgactcgggaaagagttgaaaatgagagttaacagttgcaatttattctagattgtattcgcccgaacaagcggaggagggaagacttctagcgattaggtgaatgttgtagacgatgttttcttctgaagggtatatttatttaccatatttggagtaggagacactggctagctagcactattaagataaagaatacccttatgaattatgaactaaggcatctttataaaacaagctaagctatattttcattgcagaggaataagagtcaccacctagattttatttgtccaacaccctctgtgtttgcatcttagtgaagactgttgaataacaaaggcgatagggagtttctttttaagccatgttgcaccaggtgtactccatttacgactgtgcgttggaagaacattggtctttggtttattacgtgatcatggttaaaccatcagttactaatgaatgtagaaagttgagttaggggacgatgcgagacatgcactttgaggcatgccacatacctcctatatctttatttcatgtaattagactattctaatgtgcattatctggaaaagaaagttagtaaactgtttctattttgtgtaatagtgttgcttacccttagttgtgattcgtttcctttgaacttctttttttaaaatatatttttgcagggagct

SEQ ID NO: 103763 - DNA, 987 bp, Mimulus guttatus
  Intron number 1 from transcript mgv1a006027m (locus mgv1a0 06027m.g) derived from phytozome v7.0 (chr-ID scaffold_3; pos 1642657 to 1643643)
acatcaagcatctgctgctagtaagttctaaacttattattattttattttgtatatatatatatgggaaatgatggacattatttttatttttattttaccttttagtagctatagacctttttatgataaaaattaattatcatccaatatttatcattaactatctacataactacatttattctttataatttccaatctaaaacatatccgaataaactctttaaattcgtttatattacaaaatattttgtccgatgaaaaatattcactataatcgactattttaaatatctcgagatgatattctaccaaaataatatcctaggtacttatttctcataataagtaactagggacttttaatgaatcatgctattataattagggttaaaggggttactggggttttcttttttcctttttcttttttttttttccgattattagaatactaattatattttaatttaaattatcaatgtgccaatcatcctatgaaatccaattttcttattaaagaagaccatccggtctaaatttgcaccctaaacttaatccgttaacagtacaaaactctggtagatctagaactggattttaaaaaagaaaatataaaaataatgtactaaaattaagataattgagttcgattcgtatttggctcaatattttatagaataaaactcaaccgcaagttgcataatcggtttggctacactctttgttttttgttttcttgtttaacaaaaatataccaaatacagacaataggaaaacgagagatctgatttattataattaattagtatgtaacgtgaaatcattgtcaaccatgtgacccacatgtttgacaaacttaagataagattttttctttttttgggttgaagataataattcttttttatttcattttttgaatttttggaattttatatatgtttaggatttattcgtagctggaatcgacaccacaagtga

SEQ ID NO: 103764 - DNA, 499 bp, Mimulus guttatus
  Intron number 1 from transcript mgv1a010297m (locus mgv1a0 10297m.g) derived from phytozome v7.0 (chr-ID scaffold_26; pos 1451526 to 1452024)
aagcccttaccagcgaccaccctccgatttaccaggttatatatttactcgtattttctattatcatttttccttatcttaacgactaagaattcaatgcgggtcccgtcttatttaacattttttttttatagaaaaaaatttgaagactaaatcagtgttgattattgtcaaatggagtttatgacacagtcaatggcattcttgatttatatatatttactttgatatttgttaccgttgactttgatcggcgtatatctaaaacatggctcgttttcttttttttgtacacgataaagggtctagttttaaatcaacttgcaatgtagataacaagatccgaattatttatgtgcacgattgcaatcgactgtttttagatgataatagtcgttgttacagttcgtcgaagaaacgaaaagcctcaatttacgtaaatgtgtgatgatgtgtacttgcagaaggaatttggtacttagttcacccaaacgagaaa

SEQ ID NO: 103765 - DNA, 1022 bp, Mimulus guttatus
  Intron number 1 from transcript mgv1a019408m (locus mgv1a0 19408m.g) derived from phytozome v7.0 (chr-ID scaffold_6; pos 3434010 to 3435031)
aaaatcaccccgttttcttcatccgttttctcgaggtacattttttgtccttctatactaaatacaagaccttattcttgagatgttcattgcaaaatcaagatttgtttcaatttattaattcgttttgtttttcgttttcatctatgtataccttatccgattccttctgatttttttctattgtttgtatcttgttcagaatgtttgtactagagatgatgattttgatggcgaacaagtttcgagtgtcctcctatctcccccccacatggtagtgtcaataacggtgtccaatcattaaatgacaggtactcgttatattcatttaatacttattacattgattccagaattgatcgcctacttaaaattggattctttgattgtaattggaaaacaggaattatggacgcgtcttggagacttgttctaagctcgaggatcttaatttggatgttaggaggaattccaatgacataaacagagtggattctgctgaagattccagaaggtatttttcgtgcagtttctgttgtcattttctcactcttttacttttatttttatttaggcttcttaaatttgatgcaaaatataaatatagtatgtggatgcatattgcaggcaggattcattacacacaccgattcatgaaataatattttctgctttcgtgttattacatttgaggtcgacacacttaaaaactacacatttagttcccaagacttcttgttttttttccgtcatacataaaaaaatagcgcatgcattgtacactttcatgccaaatttcagacaagttgctattgattcttttcttaccccttattttgttaacctattttctctttgtttgtaatctttcttacttccccctttgcttcgtcaaatttggcatttttcacaattttagaaacggaatattcatctccaggttatcaaattgaactgcaatattttttatttttttttatttcgcagctttctgctttgctctcagacgtagtactgaatat

SEQ ID NO: 103766 - DNA, 346 bp, Mimulus guttatus
  Intron number 4 from transcript mgv1a014167m (locus mgv1a0 14167m.g) derived from phytozome v7.0 (chr-ID scaffold_168 ; pos 566664 to 567009 reverse strand)
caaaatgtaagttacgtttttttcaagaaaatttcaccagctcatcatcttttagaattttcggttatcagaaaaccggttactgctgggataatcttcaccatcttcatagaattgttcttccgaattcaattttctcatgtagaaaagttacccaccctaatcacacactaagaatcttagggttgaagatataatcaaacttataatctgataattctgttaatcttcgtttcgaatctttccatacttctttaattatcatactgcaatattccttttttttgcgttatcaagactgtttaagtgtattttgacttataatttgttcgattctaggcacccc

SEQ ID NO: 103767 - DNA, 749 bp, Mimulus guttatus
  Intron number 1 from transcript mgv1a012626m (locus mgv1a0 12626m.g) derived from phytozome v7.0 (chr-ID scaffold_32; pos 757419 to 758167 reverse strand)
caagttgccccaattatttttttcacatttctcgggtaattttctaatctcgtgacgatgtttggtctctctgttgaccattgttgtttttctacgctgtcggtcggattatgtttgttaatttcttcatttttttttttttttttttttttttacaattggtgtgtttatttgacgattatgtatgcccgatctttcatactaatctcttcgagaatctgggttcgaagtctctgttttactcgcattagcacgagctatgaatttgattttgcgttttttttttctccgtattttatgtgatttgaaattgtctgttggattaattgtttcattgttagtgctcatgcatctgttgattaagtttgattatgaacacgtaatcagttagctctacctcaaaagaggataaagatatcaaagaaaaaaaaaaatcaatcttgtaaaggtgattgatttttgtcaccgatccaatgtgttgtttaggaaatccaccaatcgacaacgaataaaaaaaattaattctttgtcggtagacccgatttcgtattaaaagagtgggggaactggtgagacaattagaaagatgaagtcttttgtttgtgtaagagatatgctgtaattaaatgttttgctgttccattctgctgtaataatttagatagagtttttgatttcatgacaaagttttgatcgtacttcgctgtattgcagtgacgtcaagttggtgtatagtatactatacgcca

SEQ ID NO: 103768 - DNA, 702 bp, Mimulus guttatus
  Intron number 1 from transcript mgv1a024881m (locus mgv1a0 24881m.g) derived from phytozome v7.0 (chr-ID scaffold_37; pos 1390482 to 1391183)
ctccctcacagcccaagaacacgaaaagttggctggtacttttcactcactgcaacaaaaatacacttcaaataatgtctcgatattgtgtcttaaatgtgccgttatgaaattgtgtatacatcggattgaaatcgtgctcatatttacatttttagaggcaaataaaaacatcgcaaatgttaaattcccagcacaaaagtgtttgataactttcgaaattgcatctcttatagctaattaggctgcaccaatataattaaaaaaagaaaaaaaggcatcaaatctcagaaaacaattcactctgttccacaacatttgttccacaatgtttccaactgtgcaaaatctatttctaattaactggtaattatcttattgcaaaatttgaagctgaatctgtttatacaaaagaaaatggacaagcttaagcatgagattacttattgtcccaaaaccaaatattgagatcaacaaacagttaaaatgcgaaaacaagtatttgagccaacgtaaaaaaattaaataacaactcatagctgaacagacatctttacacattgaaacagtagattttttttattttttttttgtaatgtgtagtgactcttatattattgtaatttagtattgaatcttcgatctcagtactttaagctattgcgcaatcaggtcacgagaaagtcctatcgatattcccaa

SEQ ID NO: 103769 - DNA, 737 bp, Mimulus guttatus
  Intron number 2 from transcript mgv1a014793m (locus mgv1a0 14793m.g) derived from phytozome v7.0 (chr-ID scaffold_2; pos 3610443 to 3611179)
aggttcgcgccaagtccaaattctggtactgttaattttctcttcccattatttatttatttatttatatcaattttaattttcagagatttcagagaaatttaggttggaaaaatctctgcaattttactctttggagtttcattcatttgatatcacatcacgcctttgatattctatgcgcacatttattctcttctcaaaagtgatgcatgttacaatagttatgcagatcaaaatacattttggtttcattgattataagttggttccagatgttacaaatattgtcaaaattttgcatgattataaaacgacgagcttgagtacccaagtttttgagtagattatattgtttattgcatactttatcacttgggaggtgtgcattttatttagtagtgtatttatttattagagaacacgaataactattgcaagttttgggtgagtgcaacaaggtttgagtcttgtatattctggatcttaaccatattttgctattcaatttctattttggttttcgataatcattatagtcttggcaatctagtgaaaaaaatcactctggaatgaaatctaacttatttcaatagtctcaccacactagacttatattgttacagcaaccgattttatgtaaactatgagtttgaggtttatagtttgataattgttcgtggttgatttgaatttgtgaaggtatttcttgaggaaacttaaaaaggtgaagaaga

SEQ ID NO: 103770 - DNA, 787 bp, Mimulus guttatus
  Intron number 1 from transcript mgv1a000980m (locus mgv1a0 00980m.g) derived from phytozome v7.0 (chr-ID scaffold_164 ; pos 207574 to 208360 reverse strand)
caggtaataaatcctggtatcttttattttacatattttaatttaaaacattgacttcatatattatccaaaaattatgttcgtaaatcttgggttgatgttagtatttcataagtagaatgtaagacaaaaacggcaaagagtaacatgtgtatcccatgcttattgaattatcaaaagttttaatgagagctcgtggtgctaagagttttatggtttgtgtttggcatgctgacatgggaaacaataatctcgctaacgtgtgtctatgtgagcatttgtgataataagccttctcagacaagcaattccatgtgtcctgaaatacatactcgtgaacatatttcgatgttcgtgcatatcactatattaggtaatgttataagtgaagtaaactggtataattattctagccacgtgtaattttttagaattaattatgccttgtgcacgtgttcgttcatgatatatttatctcataaattcttcttataaacaattaattttaatgatgtttttagtatcatggcatggttgaataggttgcctctagtttttgcttctgtttatagcatgaaacatgttttgatgtggctactttttctttctgttcagcctcgtttagttgctcatgtgggcccacctccaaattcgcttcttcccatgccgatacaagtaagattcccctgttttttctgtctttttttaaaaattattttttttgttccaaacaaggttcttgaaagttatagctactaacacttttaagtcattctttttattacag

SEQ ID NO: 103771 - DNA, 649 bp, Mimulus guttatus
  Intron number 1 from transcript mgv1a000153m (locus mgv1a0 00153m.g) derived from phytozome v7.0 (chr-ID scaffold_273 ; pos 197971 to 198619 reverse strand)
aagcagaacaaagacccaaggaaaatcgctagaaagtacgattttatttttatttttatttttctacgggtgcttattttggatcatgcaagtgcattcgcttttattggttttatttttttgctttttgcttggttgattttttgttttccttgtatttactgagaaagatggttgcttttgtttaatttggagaatttattcgagtaaaattgagaaactgaacagttgaaattaagatgattaagcagggcagtttgccccttaatttgaggggaaaatgtcctagatatctctgtgtgtgtgtgtgttgaggatctgatttctgaagttttgggtgtgaagaagatgatgcattggactgtaccttgttaattccacagtctaatcaaatatctaggtacaaatgtaaatgtttgtatactgaaggcatttagtattttaattaaataatattgtatgagtttggtttatatgttgcattagtttacctgagtgggaatttgttttaccaccacctttttgacgaatatactaccatctttatgtagttgtgaccctgaaataggctgaggcttgacatcgagtctactgttttctttaatttcatacaggtaccagatagacctttgcaataaagcgttggagg

SEQ ID NO: 103772 - DNA, 993 bp, Mimulus guttatus
  Intron number 2 from transcript mgv11b016570m (locus mgv11 b016570m.g) derived from phytozome v7.0 (chr-ID scaffold_1 58; pos 327182 to 328174)
gtttgtaagctattatacgagaacagggccggtcctgggtgattggaggccctgggcaagaattaaaaccgaggccctaaattccaatttttttttaaatgtatatatatatatatatatatatatatatatatatatatatatatatatatatatatatgtgtaagatatggatgtattaaataaaaatgggtattagaaaaaaaaaattaatttaacaaaaataaaataatttaattttgtgaaataaaaacaccaatatcatagaaaaaacaactaagtttaaactgtagaaactaacaatagagaaatatataggagtgcaagaaaaattaaattagagtaaaacaatgtacatgagagagaaatggcaagaggacaaaagatgttgggtgagaataaaaaagagagagagagagcgataattgacaagatggattgggtcaaaaaaaattaatgtggaaagtgggggttaaacagttaagaggttaatagaataggggttggaagaagagaaaagaaaaataattataaaataataacaaaaaatatatattttttgggccccattgaaaagtgggctctgggcctgggccctgctcgccctgggccagggccggccctgtacgagaatgtagatttactcggtgcacctatacggttcgttgcgacctgcaggttccttcatttaaaaaaatgcaacatacaaattataataaaaaaatccaaattattgcatgcacaagaacacaaacagctacaaaccaattcggtttctcaaatttgcctatatataaaccaaagcatgcatgatgtttcttatcacttcaaaaacacacacacacacacacacacactcaaaagccaaccataaaagttcgttaaataaaccagggttagtcctctaataccaaaaaactccatctgcttcttcgatattcttctttctcctcgtaagtcgtaccctctctcgttctcgcactaaacccaaaa

SEQ ID NO: 103773 - DNA, 611 bp, Mimulus guttatus
  Intron number 1 from transcript mgv1a025697m (locus mgv1a0 25697m.g) derived from phytozome v7.0 (chr-ID scaffold_7; pos 3234161 to 3234771 reverse strand)
tgatctggtaacattcctttgtaagagattatgtatatatgtataatcatatgtatgtggatactggatagagtttaaattgtttcgcgtatttgttttctgtgatcctttttaattctaaatttctgtcggagaggcttcgattttgaaatatggatgcgtcttcctcttatttttgttgtttgatgtttatgcattttcattttaatatgatttgaatacatgtgaaacaatgagttattgaatcaaaagattatgagaaacacggacacggaattctatttttgaagtgacgattactagctaggctgtaaaagtgtacaacaatagccattggaaagtgaattgcaatgagaactgtggtgtgcagtttcagtttattcagtagcattgtagttcgattaggctagacgtcctgcagtttgtaattaattgatttggttaatttagctacaactacgttgcagtttgtcttaagctaggagtgcatgaagatttgtttaaataacaaacttggtttggtttattccttcatctgatgaatataatatactggatgatctgattgttgaattttgccccagaataacgtttcacgggaagcacaaacg

SEQ ID NO: 103774 - DNA, 398 bp, Mimulus guttatus
  Intron number 1 from transcript mgv1a015902m (locus mgv1a0 15784m.g) derived from phytozome v7.0 (chr-ID scaffold_130 ; pos 392384 to 392781)
ctgatatcaaacgcctcgccaatttctacattgaggttcttcccctatttttttctgatgtttaattgctttcattttcttcttttttccgtgttaaatttatgagattgaaattgaaatcgaaaaaaaataaattaagatagggtttttgtgggtctccgtgaatttccgatgtcgattactctgggtttcagtttctagggttgaaattaaattcgtaagaaaaattgcaggatgcatgtttgaattttatgattataaaattaaaaaaataaaataaaaggggcaattgattttgtgggttttttttttttttttttttttttttttaatttgtttatttataagatatttggatttgagcaagtggagagtccaagattcgattttggggtgat

SEQ ID NO: 103775 - DNA, 603 bp, Mimulus guttatus
  Intron number 2 from transcript mgv1a014773m (locus mgv1a0 14773m.g) derived from phytozome v7.0 (chr-ID scaffold_20; pos 739439 to 740041 reverse strand)
aatcatcccttaatcaaaacaactacttctttcaggtacagtcagatttccctctcattcattttttctccatctgtgtattgtatgtaagaaattgatcgattcgtttattaattctacatccttcttttctattacacttctaataattcagcaatttttgttctcagttggaaaaattattgcgttgctaatagtcggaactaattttctgtagattgatctagtgctggtttattttatttttgatttggattttgttttcaatatttcactggtgggttccgggataaaataatttccaagaattatatggaaccaagggttttgtttcggttttaatttttcttttaaatttcggattctggtcttgtttggataatttgaatgggtaattcggccgccattaaagctgtgggtaactcaattttcaattttcatacttgggttataatattttgaattggtagagagcaatagagttagttgttcttgtaaaggtttgtagaatgtgaagaaaaaaaagaaagaagaaagaagaaatagattatttcgagaaagataatcgatcatcgactaagtaagtaagtttataatagagta

SEQ ID NO: 103776 - DNA, 960 bp, Mimulus guttatus
  Intron number 1 from transcript mgv1a019836m (locus mgv1a0 19836m.g) derived from phytozome v7.0 (chr-ID scaffold_114 ; pos 380894 to 381853 reverse strand)
tgaccggagcaaccgactctttaacaaaattgcaggttgggttctgtgtttctgatcatttgttttaattttattttcttactacacaattttcaaaagttcgtttttatttgttttactagttatcctaatttcatatataaattagtgcacattttggaagatttaacaagtactccctccgttcctaaataagtgtcgtttttcaccttggtacaaatcttaagaatctcaataaatatgtcttgattttaggaaaatagatattgatggaccaaaatacccttgtttattaattaatgcaggaagagtgctatagagttaatgagggcaaaatttaaaaataagcaattaatgcaacattggaattgtaaagtgacagataatatgaaacaaaagaaatcctcaaaagagacagatattatggaacagagggagtatttgcaaaaacttttacaaatagcttatgagccgatactttttttttctatttaagtttatttttatataaattgcgaacactcttgaacttttagaaaaaaattcaaaaaacaatcttgtacttccaaaaaaaaaaatctataaatcctttaaatagacatgtctagtcgatgtgggaatttgaatagtagatgttgcacatggttatatatacgaggtgaatttgaatagtagatgttgcacatggttatatatacgaggtgaatttgaatagacatgtctagtcgatgtgggaatttgaatagtagatgctgcacatggttatatatacggggtgaatttgaactgtaaatctatacaaatcacacacacccatgtgtatgtatggttacgggttagttatttaatcaaatctacggttaatattatattcagcctgtataaatatccaggtgtagcatctaacttcccactcattctccaggcggcactaccaacctcatcccgcactgtgtcgac

SEQ ID NO: 103777 - DNA, 326 bp, Mimulus guttatus
  Intron number 1 from transcript mgv1a018350m (locus mgv1a0 18350m.g) derived from phytozome v7.0 (chr-ID scaffold_44; pos 926027 to 926352)
cagcttatcttgattcatccaactggcaccttcaggtattgttttttctcccatggctgcccctctataccttctttccctataaacctttattaatttattaattaattaataacaattattcaaaagctaaatattcccacccccacccccttttttgttgttcttctgggttttttttttttttttttttaacgtctttgttagctcttttgatttctttgaatattcaagaatacgcgttttcgatttcttgattttgtattatttttttatgaattttacttacagcatcagaatcatcaaataattggaatcggcggcaa

SEQ ID NO: 103778 - DNA, 476 bp, Mimulus guttatus
  Intron number 2 from transcript mgv1a000661m (locus mgv1a0 00632m.g) derived from phytozome v7.0 (chr-ID scaffold_43; pos 1178376 to 1178851 reverse strand)
gatcctatccaacgcctcttggcagtagggacactgtgagttcaatgtcttttcaacatgaatactatgtaattaagtctggtcttgtttcgttcgtctaaatatcgttcatcgacaaggcatactaattattcactttgttacttgtttaacctgtctctgaagttcaaagcaattttttgatgttaataagtcattcttaggcagttctctcgttgcatttatctttggttaatcggtgttttacacttttactataatctacgctttcttcatgttactatatatgctcccctcatttaatattattttattgtttcactacagtaacttgcttgtagtttataaacatagttttttaaccccgttcatggtacgaggatacgtagctgattacatggttgattgattgttagaattgaacattcatgccatggtgtttgtaattctttattttcttaaattgaattgcaggg

SEQ ID NO: 103779 - DNA, 941 bp, Mimulus guttatus
  Intron number 1 from transcript mgv1a009422m (locus mgv1a0 09422m.g) derived from phytozome v7.0 (chr-ID scaffold_329 ; pos 23578 to 24518 reverse strand)
tgctgtcactccaatcaagaatcaaggcacttgtggtacaaatattttcttgtttttgtgtctgtttaacttttttcgcactaattgggacgcatgcacgcatgattcttatctcgattatacgtaactacacacactattttctcttaaaagaagattcatttactattggagtttcaatttgaggatttactttattttttgtttcgaaaattggatttcaacgagaaggaaaagaaaaaaaatgaaaatagagttagagggtgtttggctaagcttataagctgttaaaaagatttaagagcatataagctcttctaaagcgtttggtaatattttacaaaaagatcttaaaaattcaaaaaataatttgctgcctctaccccacccttttatttaaaatgttataatgagtaaaaatagcttataagatcattatccaaacattttaaacattaattctaaaaataagacgtaacaacttatcaactcataaaacagcttatcagatgtaagagcctatcaactgtgtaaaataagctttgccaaacgaaacctaataaaaaaacaaaaaaaatatttcaacctactctcaatgccatactagaatagaaaagcagataatcgaacattcaatcggctagaatggcaaacacatacactaaaacattgatatagagttcggaaaatacttcaaactacgaaaaacttgttccgtaaaacgggacagaaaccaaatctactgacattgaaaataatacctaatagatttttattgtaagccaaatacctaaatatattctaacaattttcatttccgagaatttcttcgacgataatctagagaaaaaacattaattaatgaaaaaaaatcgttaaaaaaaatcctacttgtgttttatttaggcagttgctgggcgttttctgcaatagcagcagta

SEQ ID NO: 103780 - DNA, 705 bp, Mimulus guttatus
  Intron number 2 from transcript mgv1a012212m (locus mgv1a0 12212m.g) derived from phytozome v7.0 (chr-ID scaffold_270 ; pos 33978 to 34682 reverse strand)
tcaccagttctccaaaaccctagacaagaacttgggttcgattcttttacctttatctattatttgtcttttgtatttaatcgcgttggattgagtagattgttattgaaaaatctgaggacattgtgcatgctcccttaaacctgcaattgcctatttactttttcatttttgagttgtgtatagtttctttgttgacttaaaatggtggttgcagttgcaaaagtatgtttatatcttatgacactatcccattcatttgaacgattttatccttttgcaaccaaaatacttatgttactatggctggcctatgtatcaaaatatataatgtgcgaagaacctaaatcggctgattttgtttcacaaaatcattgtgtaatgtggatttgtaatcatagggttctgcctgtttgttagattgtatgttaaatgatgttctgtgtatcttgttttctctttcaaatttacaaaaaataatagatgcatcaagccgtctcatatagtttagttaggcttacttggcctaaaaacaggaactcaaatatcttaatgtgaagaattccttttaatagtaaaatcattccaatttatgatgggtcttatttgttgtacaagccacactatttgggtaaagaatcattttgtttgatcattcaaatttatatattctgttgtcaacatgcagcaacaagtctcttcaaa

SEQ ID NO: 103781 - DNA, 981 bp, Mimulus guttatus
  Intron number 2 from transcript mgv1a016985m (locus mgv1a0 16810m.g) derived from phytozome v7.0 (chr-ID scaffold_82; pos 1012873 to 1013853)
cacatcatctcggaattgccgggctctttctcagggtacactctgctgcacttctccagatctctagctagtatgtcttagtttttttacttctcagttttcttatcataacttttgtgtggttaccgaaatgtgtccaagattgctgctttacttgttatcgacatcttattgtcgtagattgttagtataagagaattatcgaaagctgtgttttaattttggaagagtcagtgaagtaactgaaagtcggaatcgaggccacacgtctggactgactgaaattacgtgttgtacgaatatgaaatttgatgtctaagttttcatactggtaactaaatcttaaaattgatgtttgctacatgcttgactatgcgttttgtctcatatattttgcttgctttaaagagtgattctgtgatttaatcgacaagaatcgtttactcgtgtgagtagtcattttaagtgatctttattgtgtgtgtgctaaaataatttatcctgattgattgaccttcattcatcctgttccaactgtacctcgtctgcatacaatgcttaagtaccgtttcaatttctctagcacagtgcgcgtgaatcgatgtaattttaaataacacttacatatcctgaaagtagaaatgtgccttcataatcccaaataagctctatcgtgtttatttgattcatgggaggcctacactaattacgggagttcgctgatagcacctctctatttccaggaggtgtttcaatagtacctcaccgtatatacattgcttgcatatttttttacctttaaagttagccttcttcccattttttatatcataaaaaagtgaacttgaattgtaaagaagtaaaagaagctgattttgaatattgtctagcttgttagcgatcgaatttgggtcgtttcttttgttggatggacggcaaaaattagcaatctaactggaatattttaattcctgcaggcac

SEQ ID NO: 103782 - DNA, 920 bp, Mimulus guttatus
  Intron number 1 from transcript mgv1a010846m (locus mgv1a0 10846m.g) derived from phytozome v7.0 (chr-ID scaffold_5; pos 796437 to 797356 reverse strand)
ctagcagtgtcaagaaccttgcttccagctccgaggtacatgaaattcacttttttttttttatttatttatttatatatatttttaatttttattttatttttgtctaaaaatatgttgtaaatttagagctttttaaattttgggatttgacaaaaaaaataaaaataaattgggatttgcaatttgctgtttttaataagtaaaatatgaatttcatcttgattactagtttctctacttggattttggtggcttgaattcaacattttatttttattccctctgtttcacatacggtagaacttggataaattagtaaccttgcgtaaataataacttttctggtcccgacttggtaaaaacatactaaattattaatttaataatttaatatttcactaaattaatagaattttattagttccaactgtatcaatttatagaggcgtaactgtagtgtgcttaagattttggcacatattatgaaaaatatgtaatatgcatgaattcagaagaaaaaaaaaaagaactaaattaccctttcttattatttatgtttctaatagttctctctccattaagagcatgagtgcaaaataatgtaataaacgcgtcattggaaatttagtgacatataatatgaaaccaaaaaaaaaaaaaaaattctctaaagcgacagttaatttgaaacgactggactaatatttacgaatggattgatcttactaaaatatatacatttattgttactccaaacgcttccacttaggatttgtaattttaacaaatttcgactttgctgagatacgctgcaaatataatgtgatcggtaatcttttatctcaatttttgaaatttgtaatatttttggtatacttttttaaatcactgaaatatataggaaccagaaggtagtg

SEQ ID NO: 103783 - DNA, 958 bp, Mimulus guttatus
  Intron number 1 from transcript mgv1a011766m (locus mgv1a0 11783m.g) derived from phytozome v7.0 (chr-ID scaffold_79; pos 962744 to 963701 reverse strand)
agaaccaacagcagtaaacagtcagtttcagataggtgagttgtttctgattatgattatctaggtttattattcgagttttcttatctctggttgaagttatatatgtgtttatctgtcttgctagtaactcctcttgatgtgctttgattttaatcatcagctttgtacgattattatatctcgttttgtttgattttcagtctcgttgcccttgattggaacctattcgcctagttttgttaattgtctatctgtttagtaattcgagtgagctgcggtcggaaatattagagttgtagaaaatcgaaagagttggagtttctgcacgaatatactccaccatccatattagctaaactgtaaaaagaaatagaagaatcctatcaatttatataactatatatataagaattaaattcaagaatggcttatgtagtcctctttcttgttgcatgctcactgtattaatgtttctacagtatgtcgggttattacttattagctatcgaaaatggatctgtagactaagatataaataccataacgagaagtatacgtttttctgctctctggtcatggaagactcgagcgctactttatattagaagttaataacgtctagatacataatagaatcattcgtaagtggacggaataaataacattgcgactgattgtcattatagggcaatccgagttcttgtaaagcaaatgcaagaatcggaaacatctgatttcccaccatgatatattaataacatgctctactattctttaggtaaaacgtgtttttgttcgggtctacttatatttgaaactgtgtttctttgtcttcttgggaatttttctagatgatgaggtgaatttgttggaagttaaagtgatcaacatacatctgaaactatgatctgatgttgtggcgcagggatttctctcaaggctggtggattgattg

SEQ ID NO: 103784 - DNA, 774 bp, Mimulus guttatus
  Intron number 1 from transcript mgv1a014933m (locus mgv1a0 14933m.g) derived from phytozome v7.0 (chr-ID scaffold_419 ; pos 70166 to 70939 reverse strand)
gcacccgtaacaagatactctctgtaagtccctttcccttctttcttatatatatatatatatatatatatatatatatatatatatatatttctggatattatttttttgtgttgattaatgttttgaactcatagtccatttgttagatagtcacaatttaataattgtatgagcatagaaaggtaaactaagtttgttggttgaatgtttttcttcatatctgttgcttctaagggttgaaactggattctgatccgaaattttctgattttgtaacaatatttttcattccgaaattctgatttctgatttttttttttttttttggattgaaatttgaatatatatgagattctgatccgatttccggaaataataccagaaatcctttttttccctgaaaaatacacttataatatcaaaattattatgcattttttattttaggttactaaaaattggaattttccgaattcccccggttgctatccaaaaagtttcgagtttggaactagttctttcattccaatttccgatttttctgttttttttggaatttaattggaatttgttttcacttccgaactaaaaattgattgtttcccgaaagtgctaattccgatccgatctgtccgatttccaccggtagttccttttgttggctagttgcaatatattagataacttagtttaaacaaaagtattacatagaattagaagccgatactaatattctctcgtttattcgcgtaaaggtacgtgagtatatcg

SEQ ID NO: 103785 - DNA, 903 bp, Mimulus guttatus
  Intron number 1 from transcript mgv1a015329m (locus mgv1a0 15302m.g) derived from phytozome v7.0 (chr-ID scaffold_159 ; pos 189523 to 190425)
atcaggcaacattcaacagatctcgcccaaatcaggtgacctccttctctctatctcttcttcgcgcacgcacgaacacaatcatcggacgaaatggatgtttgttgatgaaccgtttattattttattgttagtttattgttaaatttgttgattctagggtttgaacattacaactgcgggaattttcgataaaggattggaatttaggtattttgcagctgccattgttgtttattttgtagctcgtaatataattgatgggtttttttcgcgattgactttagaacactttgatcacagcgttgattcatatgtataagtacggagatagttttctgattttatggtttaaataataattactttgggaaattctttattgtgtattccaattgtcgatgctgtaaaggtcgagtcttctaaactcttctacatagaatcgtttttttttgttcgagggtaagtggtaaagattattaaatcgtaaaatgtgctacttggtttcgatttaattttttatacaatgtgaatttatccgtgtccgcctcgcctaaaagtgtgagttagagtgacgtagttgttatctgcatatggtgctgtgttattcgagtttttatcgtattttctttttctttgatatccggtgatcatgaaagctcgtttctttgagcttctttttcctgcatcctttgctcaaaatctcacgtatgtaatagatgcatttgcctttagttgtttgttacgatacttttgaaatcgatccttcgtcttattgagtttctattttcattttgttgaaatattgtcaaaaacaagaaagcataaatgtaatgaagactgattttcacttttgtcgtgtccaccattcgatgtacagctgtttgttctacacattgaaag

SEQ ID NO: 103786 - DNA, 934 bp, Mimulus guttatus
  Intron number 2 from transcript mgv1a015329m (locus mgv1a0 15302m.g) derived from phytozome v7.0 (chr-ID scaffold_159 ; pos 190731 to 191664)
atttgctgctggttccactgttttgggttacagaggtaataaattttctcctttttttgcaagtttgatttgcatgttcttgagactcttgacatcgacattccgaagcttttgctcttatacatcctaaattattgaataatgacgaggtactagttcaaggaatctgatgttttctgttgattgtcttgtatttaatgtgttttacgagtcaaattaacaagcaaaaactcgtttaaatggttgaataaaatatatacgtcggcagtccgaaatctgaaatgtgaaaacgcatagtcgtatattgtttaggactcgttttggttcacaagataagattatgcaatcttataagaacctaattatacaatcccccaattaagatacgctaaggcttcgtttggttggggagattaaccatgattaactaaataattggaatttgtttgatgtttggtatccccaataacttgccgggtcgacccgcaaatatgatgttatcatgccttatcttgctttttagtcatgtttttttttattggatcttccaaggtccaataaaacaattcggtttcattagattatttagtcttatcttggctaatcttatcttggcaaccaaacgaggcctaagataagatctcaattttcgataattgtgggttggcccgaaaagttattgcacttgttaaacatcaaataatacctaatcattgaattcatggcttatcttaacagccaaacgaggcctaaaactgagttgtcaagatttcttatctctctacacattaccttgtatttctaattatccttcatacaagacctattatgcttgagataattgtcggtattttgctgtgagacttaaaagtttatctaatcgatgttcgattaatttactgtaatttatgcagcaaagagtgtttcgactgcc

SEQ ID NO: 103787 - DNA, 600 bp, Mimulus guttatus
  Intron number 1 from transcript mgv1a010147m (locus mgv1a0 10147m.g) derived from phytozome v7.0 (chr-ID scaffold_208 ; pos 377586 to 378185 reverse strand)
gcgtaatcgaagtgacccttaattttttttttcaggttaagtattttttttttcatttttttttcaattcaagatttttgtattcttgaagtatgtgcactggttcttttaatttttccatttttcatttttttaatgggtttttaatttttgtttttttaatttttgagtagatgggttcaagaattgaaaagtgttaatggttttttttttagttttaatttaaaaaaaaaattatttaaattcttgatgtgtttgttcaaattcaagcatgttgtctggacttgtgcctctgattattttaataattatattttcatctgcaattattttatggttaatctctatgtttatcttcagtttgtatattatatttggtataattcagccttcgaattcggaaaaaaagaatactcatacggcatcgttcgcgtttattcggtacttgataaaatcaaattccccggcattcgatcaagtacttgttatagttgatattaaataacgaaatgtggtaatcgcacgacgagttatctgctctaataagttgctgatccgtatatttttctaccgtgacaggcgtctggtgtctctacgaag

SEQ ID NO: 103788 - DNA, 842 bp, Mimulus guttatus
  Intron number 2 from transcript mgv11b018595m (locus mgv11 b018595m.g) derived from phytozome v7.0 (chr-ID scaffold_6 ; pos 2950275 to 2951116 reverse strand)
aagaacaagtaaagtttattctataggtatgtagatgtatttcttcatttctcatttaacctatttcctcaatgttttgttatttatttgctttcagaaaagtggtattgcatacaggtattctctatttcatttcacaatttatacaacctttttcttgaaacccatttcttttccatttttttggcctatttaatgccaaaactgtgtcgttccaatcttccggtccaatcagactttccaaatcttctcttttccttttaattttgaagcagctcgacgacgacacgcctgcttggttgtcccttttcttctattccgcgcgctgcagaacgacgccgtttggccaacaattgttgacttctgccgccgcctcgttcgatgcccgccgtcgccgcttcgttcgatgcccgacgtcgccgcttcattcgatgcccaccgtccttgccgccaacgtcacttccgaccgcatctttcctccaatggcaggcgtctccactttcgatcacatccaaaattagattatcaatatatcatatcaaagagtcacccctccgcagatttcttcttcgattatctcctccgtcgtcgttccaccatgactcgtatccttccgtaactattttctttaacttttttttgtttatgcataattaagtatgaatattttcatttttcagatctttgattttttctttattatatttatatatatatatatataacatattaattgaaaacacatgttttgattttccgttttctttctgaaattaatttcttctcgttgaactccattgaatttagtgcgtgtgtgtgtgtgtgttttctggctcggttgt

SEQ ID NO: 103789 - DNA, 785 bp, Mimulus guttatus
  Intron number 1 from transcript mgv11b018595m (locus mgv11 b018595m.g) derived from phytozome v7.0 (chr-ID scaffold_6 ; pos 2951148 to 2951932 reverse strand)
cttcttcacagctgaggttagtctatcggaaagatggtctgtctaatttttttcattttctaaataactatcgtgtttcttcctatgttttctttgactgcgaggtacgaagccttgcaataagaatgtaaacaaatgtttcacttttgtgggagtgggaggtctctcacagaaattggcaaattgatccaacctgagatctcgtgtacttctgtacttctggatattaatattggtaagaaactactatatctaaataaggataatggtagtaatagatcatcagctgatttccttattgcaatgctaatgaaatattaaaattagcaacctaaactcgcaaattagttagtaatgctttgatatttgtatcttcgaattaggtgcttctaatgtctgtaatatggaaaacacccaaatgggaatggtcttgtcagcattttttttaaatggaaagttacattacattgaatagttttgtagttgtcgccccgtctaaatgcgtatgagttttactttcattttctcagtgtaattcgtgcaatcgcctaattgatacatgtttactggctatttatggtttatagctgaagtttaattgtttgtgtttatcttttcagtagtcgtaagttgctgcttcaaatttgttttttttttgagttctttggtattttgattgaaattgtcgactgctttacaattaacccttgaatggttctaatattaaaattgtgttttccaatgaaacagagagacatcgtatacacgggagacactctcaaaac

SEQ ID NO: 103790 - DNA, 798 bp, Mimulus guttatus
  Intron number 2 from transcript mgv1a005556m (locus mgv1a0 05556m.g) derived from phytozome v7.0 (chr-ID scaffold_164 ; pos 404412 to 405209 reverse strand)
aggagaagctttctactgcattcactgtttcagtggtgagttagttacttctattgaaatacgctctttcgttctcgcgtcttgctctgggatcgtattttgtcgagttgcttattatttgattttatgtaatagctccaacatattctttaggattgatgtcaaaacgtaatttctgacaagcacaaacatacatgtataaattatggctaaattaccgaattctgccgattctgatcagaatatttccgattttttagaaatattttttattttgaattctgaaagtacctatttttgatttttttttctatttttttggaatggaattggaattcatattagattctgaattccagttcaatttaattcctgaaaattacacttgaaatatcattttagtatgtattttgtagtataggtgactaaaaaaatgggaattccacattccgccgactgcgtccgaaatttttcaatttttgaaccatgttttcattccaattttcgaaatttccaaattttctgataatatttggacaaaatagaaattagttcttcactttcgaaaaaaaaaggtggaatttttccgatcggattggaaaatgatgtcaagtctaattttattagagtgattaaatcaccttgtgctgaacaatttctttcgaagtaatatagctacgctcatttttctgttcaaaaagaaaaaaacaaggtcggaatgtaaaaatctcttgaggtataaaaaggaatgacatcattataggacgcaaaacacggtacaagtacgggtgtgtcagc

SEQ ID NO: 103791 - DNA, 701 bp, Mimulus guttatus
  Intron number 1 from transcript mgv1a019256m (locus mgv1a0 19256m.g) derived from phytozome v7.0 (chr-ID scaffold_164 3; pos 6361 to 7061 reverse strand)
ctgctttacaaggtatgtttagaaaacacgagatgcgatctcataaacttcgttcgtagcttattgaacgaaaatatatgttcaaacttggctactaagtatgttgaagaaactgcttttaattaacaaatccaatttagtagcttgatttgattttcagccgtattctgagtaaatagtatatatatatatatatatatatatgtatgtatgtgtgtgtgtgtgtgtgtgtgtgtgcgcgcgcgagcgcgtttcttgggttgttttcatgaatcatgagtttattgcacatttagtactcgtgtgttatatggaattgctaaaaaaaatccacgtgttataaatatcaggagtttttaggggtatttttgtccaaaaaatgcatcataggaggtttttactaatatttataataggaggtttttttagaaattaagctaaacacaggggtattgaatgcaataataaacccttgttttcatgttcaatttaaggaattggaatataattgcaatatttgctgtttagctgaacattactaatgtttgaacattgccttttcattttgaggaactgagtttaatcagttatttatttattttttcattttttttttgcagttttcttattttcatccgagatataacttgagcttataattctcaggtgaaagtggttccgaaattattggtcgattgaaa

SEQ ID NO: 103792 - DNA, 758 bp, Mimulus guttatus
  Intron number 1 from transcript mgv1a014069m (locus mgv1a0 14054m.g) derived from phytozome v7.0 (chr-ID scaffold_37; pos 914141 to 914898)
tgcatctattgctattgttttttggtccagcccaggtgatttatcaattatcgtcttctcttcgcttttgattctgcgatttctgaattagggatgtattagaaactatacttagtgcgtgtttgaaggatgtgttttgaatggcggtgataatcaatttggggaattaaaattaaaatatttgtatttgagaattaaaatgtcttaatttggaagaattaatgaatgcatttgttgttgatattgactgaaatttgtgtgagtgccaagattgtttgaaatttgatccagcattccccgacttggagttgaattccgattttgttatagtcgagatttcgtttgatttttgacgaattccgattgtagtattcccaattctagaaagcccgaatatacggccaaatatgattctttgagtacttccgatttttaatttcattcaattaggctattacattttaccaaccgtatacgtcaattccgaacgggattcctaatatccaaacttttcttctggatattcgatttacacaaatagtgaaaataacattgcaaacagaatttggttgcttgctcgtcagataacgaattgtgtgacgaatgcacaagtaatattaggaaatatgaataggagaattttttatttttttatttttacttatgtttcgtgtaatgaacatggcataggagccagaagttattaaaatatctagcttgcagctcaagctggatttctttcgggctacaccggtata

SEQ ID NO: 103793 - DNA, 662 bp, Mimulus guttatus
  Intron number 1 from transcript mgv1a000862m (locus mgv1a0 00862m.g) derived from phytozome v7.0 (chr-ID scaffold_242 ; pos 214991 to 215652)
tttccggctttccgactcctccaggatcctcacctgtatggcttttgctccgatgatactcttatgttagggataaagttcttcgagtttcccaaagactttttcaatacttttcctttttcttcattcttctttgctgggtcttatgaattccgaatttggctattgctaatatgaacagcatgattttgatttgtttctagttgattctgtactgcatctcaatggaaaatcctgtatttttgttttaattttatttttaaacttgctgagagcatctatggtatggtagtgttttagattcaattcacaactttacggctgtaaaattagggttcctcttttgaattgacgatgctttcagtctaaaatggtaagattgtcgttttgtttattgaaagatggggattgttcgaatttccataactattgggaaacagataattaggagctgatgctgaagttgttcactaaattcgtacatcgcaaaccatagatatttctgaaaatataaaattaccgattctttcatctgaccgtatttttccagataagactggttttcttgaaatgctagtttctcatttcttatgtaaatgtttcacttaaccattgattccatttaaaaaaaatcatatttatgcatggcatttttgtaacag

SEQ ID NO: 103794 - DNA, 907 bp, Mimulus guttatus
  Intron number 3 from transcript mgv1a015904m (locus mgv1a0 15895m.g) derived from phytozome v7.0 (chr-ID scaffold_320 ; pos 65303 to 66209 reverse strand)
accttcgttttcccaatcccgagcgtgttccaaaggtgtagtttccttaaaccatttgttatctaaacttttttattccgaatttacccatcatattttattttctcttgcatgtataatcccggaaatccccatccatgaccgtgcttgatcattagctggatgctcaaaattaagataaataaaattatctaaaaaaaaaattcattctcgtgtttctttgttttgactagaagattccctcctcgcaccaactgatgagtcgaaagatagtttaaacaaaatctgcagtatcaatggtgaattacgcatttgagtgtctcattgtcgaaattaacttgaattttcaatgttttggttcggtaattcataaagggaccatgtttaggcgtgtaatatgatggctcgtttcttagtagtattacagttgcctgtgattagtgaattcgaagtcctgcagttggtctcattagctagtgtatgtggcttatatatcagcagccataaaatttgtaaatgccgaatattatcaaattaattcttcgtgtgtagctaattcatataaaagacagttgattttagatcattagatatgctatattacttttcaaagtatctgcatgtgacattcgatataattttaattttttcaatcacgtataataataagccgtcatccaacatgttaattgcttacacgtcgatttgtaggaaatacggaaacacatattaaactgtagtgtcgatgttgtaatggttctgcaatatcgtaaaatattttgaatttccttttttcttgttttttggtaaattcaatattttttctccacttgatccacacttggtcgccctaatcatgtgcttagtcctaattgattacgacacgattgaacaggtacgcaaatcg

SEQ ID NO: 103795 - DNA, 585 bp, Mimulus guttatus
  Intron number 2 from transcript mgv1a015904m (locus mgv1a0 15895m.g) derived from phytozome v7.0 (chr-ID scaffold_320 ; pos 66298 to 66882 reverse strand)
agaagcctgctgtctgtaaaatttgatttaatttctttcccgattttgagaagagacgatttacattgcaattgaagtatgtctaccaagtgtttgatgaaatgtcttttagaagaagtctttttcgtttatgttttagtgtaaatatttgttactgtagcagtcaaatcacgtcggaagaagtgagaagtttttccccaaatattttttgatgttcaatttgataagattaataaatatgatttcacgccggttctttgttcacgttgttctttcaatgtcacaattgaatttccgtgtacatgtaggtttatatgcttggcacggcaaaatagtgttcgattttatataattggtcacactctcattcttgcaaataagtatgttctgtgtctataatctgtgtaaagattcgatagactcggtcaaactgcagaaatctcgacacctccttgtctaatgcttgtttcgagggttatttcattcttctttaaagaaatatatttgtaaatggaataaattgatatatattatttatttatttaactaggtcggagttggaaggcttcggaactgcgtctgaag

SEQ ID NO: 103796 - DNA, 429 bp, Mimulus guttatus
  Intron number 1 from transcript mgv1a015904m (locus mgv1a0 15895m.g) derived from phytozome v7.0 (chr-ID scaffold_320 ; pos 67028 to 67456 reverse strand)
cggcgccacactgtaactcagccttctttctactggtatgcactatctcaactcttattgctataaaccctaaatttattatctatggtaaatttagggtttaacatatgattttgtgcttagatacaaacacctaaaccgaatgagaatatgaccgaggggttttactggggttttctaaaacaaataaagctttctattttattttctcgatcttttaaaacactgaatctcttcaattttttgatcaagaacaattttacccagctcgtatatttgatcaagggaggtgaattttgtttttaattatttttaatttcatgaaatgtgttattgggggtttttctgcgaattaggtcatttacagttctttgatttatttatgttattgttttgtttgcagaaagctgttaggttttgcgaatagca

SEQ ID NO: 103797 - DNA, 582 bp, Mimulus guttatus
  Intron number 2 from transcript mgv1a018529m (locus mgv1a0 18529m.g) derived from phytozome v7.0 (chr-ID scaffold_2; pos 1981637 to 1982218 reverse strand)
gcctgattttcacaagctttcttctatattgagcagtgagttgtcaatgatttctggtgtgctgctgtgtggtgttatttgattagtagctaaattttgtagattatttatctttagatatcatgattgttagtttatttgagaatgtttaaagaaatcaatgaacattccatttatcttttagcttaaactctaatcattcaactctcagtgaagaggtcattccaacttctggcaagtcacacaccattttggcaattgcacctgctaggattttgagaaaagataaatcaggctacgtgcaagaacattctgaagataaagaggaaaacaatattctctgcttaacgtctcaaattctgtcttcgaagtttttaaaagaatggatgttgtgcacgtgtgtctttgcttgtttttcggagcttaacagttccttttattttgtttcagatacttccattgttcaaaaaatactttaggatcagtttcattttttttaatctgttctatagatgattctaatatctgtatatcccgtatgctgcaggcacttcatttgactggatcatcataacttcccct

SEQ ID NO: 103798 - DNA, 653 bp, Mimulus guttatus
  Intron number 1 from transcript mgv1a018529m (locus mgv1a0 18529m.g) derived from phytozome v7.0 (chr-ID scaffold_2; pos 1982237 to 1982889 reverse strand)
ctttggtaatccttttcatttttttggcgaaaatttcgtgtaaatcctgttgcaatttgtgtacgatgctttttttttttttttttttttttggaatttggtgtgttgtagggttttatcgccgtgacaggattctgtgaattatgttcttaggtgctgcattactattaaatattttcattaatacagaaaatgtttgtttggttttaatttcgaagaagtttgagggtttttgctcgaatgagacatgtgacttatcgattttctggtatagcgtgtgaatggcaacatcgaaattatgttgtttgtaaaatattagtctagtagttttctggtaaaatatgaaataatcaactaattatttcattattcgcaatattttgtgcttaaagaacaatcgtcgtaaacaagggtttgagtgatttctcgtgatttgaaatgtcttagtttgcctacatgttatgcataatgagtctgttcattctgtagtcttctgtagtcctgggaagttactcttggaatatcaatcgtgctatttgtacccaactctcttaaactattttgtgtttactacaatcagtatatagggcggtaacatgttccgttttttgttttcaggaaactcgtggaattgactgcctagagctccctct

SEQ ID NO: 103799 - DNA, 858 bp, Mimulus guttatus
  Intron number 2 from transcript mgv1a013493m (locus mgv1a0 13493m.g) derived from phytozome v7.0 (chr-ID scaffold_148 ; pos 601588 to 602445 reverse strand)
gatcccgattacaagaagtttggaagaggtaaatattgtaaatgtgaactactttatgagctatgatttttctttaacccccaaccctcaaatataaaaccccaataatcagtatttgtgttgatagctgaattttttaatgaaaatatggatggtgattaaagaaatattatctcatggtctccttattaggtatctatatctgcagtttccccgcttctccctatcggccggtctatagattatttatggtgatttttttatggaatgtggtattaaatatgttttttttttcctttttcacttcgagctggacatattagaaaagctaaagcctggaaacattttctcctgtagtaattgagagcttatttattatgaatgaattatctttttattggaatcatttattcgggaggtgggaaggaacaatggaacgcagggaaggtgattgttgagatgttttagattttggttcatttgacaatgtaaggaattcattttttctgacctcgttgctcatttgatgatgaagtagtttagatgaaacggagagacaaacggagaaaaaacaaatagttttattctttagagctgccaatgcttgctgatatctgctttcatgaaagtcacagtcgatgctcttagcactgttgccactgactcaaagtcattcctttgattagtctagatacttgtggtttcaggattttcgtgatgcaatatatgtttgtggaagaatagactatgagctttcaactgtgcttttatcaatttattcccaggtcattaaaccatctttgtgttctattcttgaaattagggccaagagaacttacaggtgctgtggatcttata

SEQ ID NO: 103800 - DNA, 776 bp, Mimulus guttatus
  Intron number 2 from transcript mgv1a016480m (locus mgv1a0 16480m.g) derived from phytozome v7.0 (chr-ID scaffold_89; pos 388956 to 389731)
tcatcagaggtacttttcgctatgaatgttgtactttctttgccctaatttgaaattgagcaactggaaattatgaaaggggaagtattttttatttctctttctttctttctatctttcagaatgtatctgtaagtaattgaatggatatatatataatttatgctgaatttgtataattaggggtgccagctgccattttgttaggagtttctgcttttatctttgagaaagttttccatcaaaccttcctataaagaaatgagttatgagaaaatgctgaaaaatagtaactttttctcgtttttcggttgcggatagtataaataatgctgtattttgtgattggatatgtgatgaaagtataatgatgatcacgattcatatgatgtttgttcatttgcataatttgtgcttggacgtctcttatttttttgtttttgttcgtttatttttcaaagtaatgtattgaatattgttttctactccaactttaaattcaactaatatcaagaacgatactgcatttggaaataagtgcataataagtgcagttatgataacattcgtgtatttaagaactcacatttgattttcgtttcacgctaaacacgtaggtacgccaacggttatctcgattaaatatgttgtaaacatacacataatgcactaattgaacactcacgtatatcgactatatttttcccaatacgttaaaaaaaaatcttatgtatttttcttcctttgactgcatatggactttgttgcaggctggg

SEQ ID NO: 103801 - DNA, 689 bp, Mimulus guttatus
  Intron number 2 from transcript mgv1a019607m (locus mgv1a0 19607m.g) derived from phytozome v7.0 (chr-ID scaffold_73; pos 948654 to 949342)
aacgaacccaacttaaaagtaaattagtaatgttaattgtgacagatctatctggaaaaaatgtgccttccgtgtattctgtatatcaatcaagttttgaaatctatcatatccttgaccattacataactatgaacaacattttattttcccttttaacaattttttccaacgtcagatcatagttctaaaaagggaataagaattgatataagtatatcggtgcaaaatttggatatccctgcaattgtcttgtatcaactttctctttctacttctttttagaagtaaaagtttcaaatttcaattatatttgtttatattttgaattagaccccatgtgtaaataccaagttaaaagaacctttttcagactatttattgttagtcttcaatgtaaataaacgtatctttattattttagtcaacagatctaacattagatatccattggacatgaaataacttaatgacactgatagcagaaaaccattacctatcacaacaagaaatgttgaggtcttagtgatgattgtatcccggactataaatctcatctaataactcccttaccaactttacgtttcatgaagtaagatattcacaagtcaggacaatgagttcctgtgttaatatttttttcattgggtgtggcagaggaaaagaagcgattcaaataattgccatca

SEQ ID NO: 103802 - DNA, 618 bp, Mimulus guttatus
  Intron number 1 from transcript mgv1a013056m (locus mgv1a0 13056m.g) derived from phytozome v7.0 (chr-ID scaffold_17; pos 1325096 to 1325713)
agttctacagcagtgatcttgaagtttgtgagtttttcctttttctttttcaaattatctatttttcctacggccaatatttttttcttaaatttttttttatttgaagattggtgatctatttgatttaggttaagcattttaaatttgtacactaattcctgatttttcttgtcaagtaaattttgtatgctaagtcctcgtttggtttcgaagataagattaaacaatctactaattaaaattatattattggacattcgatgatccagtaaaaaatatgcctagaaggcaagacaagtcgtgataacataatattgtcggtcgatccgacaagtgactggggataccaaacatcaaacatttgtattatttaattaatcatggataatcttcccgatcaaaagattttacgatttttgtgctaactgcgaacaaatttcattagtactcgagctaatttgatctcttagttttgtttttacatactggatgaaattttcagtttgaagtagaaaatcttttgagtacatttgtttttacagatgtctgtattttcgatatttttcgactacggatgtttgatagtagtgaaaatgagcaggtttactaggtagt

SEQ ID NO: 103803 - DNA, 510 bp, Mimulus guttatus
  Intron number 1 from transcript mgv1a005025m (locus mgv1a0 05025m.g) derived from phytozome v7.0 (chr-ID scaffold_27; pos 489522 to 490031 reverse strand)
cggcggctccaccacctttaaatcggctacattttgtaagtaaatattttaattttgattataattattatattttaatttttttgttttaaaaaaaaaaagttaaattacaaccacctataagtatggtcaaattacaaaaaaacccctcatgtttgggtaattacaactatcttaattataaatcttcttacacgtgcaccttgcgttgtcaatatagtgaatttttctagattatatggaatattctcaattttgtatccgttttataatctagaatgttccatataatttagaagattccactaaattagacaccgcaagaacggacgtgtaagaagatttacaggtgagggtaattgtaattatccaaacatgagggacattttcgtaatttgaccatacatcgggactgttgtaatttactttttaaaaaaagtgaattaaatttgagtttcttgatatgttactgcagccgtcgtgggcagcgggttcatagcgcgtggagtc

SEQ ID NO: 103804 - DNA, 1044 bp, Mimulus guttatus
  Intron number 2 from transcript mgv1a004409m (locus mgv1a0 04409m.g) derived from phytozome v7.0 (chr-ID scaffold_3; pos 2711786 to 2712829 reverse strand)
atagagttcttcttaaggtatagtataatgttttattcttgatttgttttttcttttttttgtgtgttcttgttgtttgttgtattttactgcagctttttactgttacatatacgtaggttttctgatttcgaatattattattacatcttgttggattttcttgacagttcgccgagaagttgataaaatgaatgtcgaacatggattgatcagataatttgtttgatcatggtcaaaactactattgatatctaggcctcatttggttgccaggataagaataaataatctaattaaaattccttttttattttattgaaccccgaaaggtcgaacaaaaaagctacgtacgagaaggataaggcatgataacataatacttacggagaagttattggatttaccaaacatcaaacaaagtccaattatatagttaatcatggctaatctccccaaccaaacgaggcattagtgttgtattagagtctatgattttgcttctattgttgttctctatatttggtgacctctgatgttaacgaattaagacttaccaaaaagattcacatcgataatcggttagagtaacggatacagaaaatcatatttcttgattggttattgtgaattggttatatgaactatttgtactatctgcatttattagttattccaatttaactgtgtatctctaatgccgattaaaatcctagaattttacgattttaccaccctctattttaatcaggattcaagttcgggggttagtatccttaacgattttactggtgacatactttatttatgttagaaaatgttttatatatgttgatttatgtaagactttgacatgctatataaatgtataagatacgtacagtaccatgaatttacgatccgattttacgatttttttattttacagccccgttttgattctacttaaaaaatcccgatttctttgttctaattgtctctgaaaaatttcttcatttaatggtttcaggtgattcgttattcttctcctacatctgcaggtgc

SEQ ID NO: 103805 - DNA, 806 bp, Mimulus guttatus
  Intron number 2 from transcript mgv1a004006m (locus mgv1a0 04006m.g) derived from phytozome v7.0 (chr-ID scaffold_45; pos 1610253 to 1611058)
gaacccggccgatttcctcctagatcttgcaaacggtacgtttcgagtttatttttttggatggaattgaataaattatatattttttttcaaaaatgttgatttcgagtttttttttggatggaattgaataaattatatatatattttttttgaaaatgttgattacgattatcagatcggtggaaatttccgaattctgccgataattattcgattatccgactttagaataactcttttcgttctatagtttgatcggtccaatttgattttcaaaccctctgccgatttcctcttagatcttgcaaatcgtacatttcgagattttattacgatctctagacaggtgaatttccggattcggccaaatttgattcgaaaagttccgactttcaaaataacttccttcatattgctttacaaaatttctattttttcgattatttaattttcttgcccttttttagaaattgaatcggaaattttaggttttctttcgaaaatactaatttttatctgatttgtcaaattggtacttccaagtaatttttctctttctgatttggatatttatttattttcaattcgaatcccggaactatgatttcccaatttatttcttaaactcttcggaatcgaattgtccgaaaaaatgttaattttaatccgatccgttttttatatccgtctttaactttaagatcaagtcaaagccctcggaataaataatgagcaattgatataattaatctcttcatattggtataggagtttcgacggccgattcgcacgaggatcaaacg

SEQ ID NO: 103806 - DNA, 289 bp, Mimulus guttatus
  Intron number 5 from transcript mgv1a019683m (locus mgv1a0 19683m.g) derived from phytozome v7.0 (chr-ID scaffold_7; pos 968661 to 968949 reverse strand)
cacaagagtgagtttcaagtttgtttcttaccgataattgatttcgaaaaattcgaactaatgaacacgaaaaacgaagtcaactacttcaagaaatgaaaagaacagtgacgaattataaaagggagatacttcaatgattttgattttcgacattcgaaagttcataatcaatgaagtagaatattttgctgatatttcctccgagaaatgatttttttcgttgtttttttcggttttcgtcgaattttaaggtacataagacttgtgaagaaatacgatttggaaa

SEQ ID NO: 103807 - DNA, 873 bp, Mimulus guttatus
  Intron number 3 from transcript mgv1a005141m (locus mgv1a0 05141m.g) derived from phytozome v7.0 (chr-ID scaffold_239 ; pos 266203 to 267075 reverse strand)
ggagcttcctggtaattttatgttttgccttttcgagacatttttttctgaatgataaatatgttctgtgattctcatgttttgatttgatactttatactgctttgtttactcttgatgttatgtttcaaaaaaaatcatatttttctagactggccttaatttcccttccgtacctaccccaccaagaaaaaaattaaaagaaacaattgtttcttcttagcaactggagaaacagtttaataattttatcaactgaccaagaatacagcttgatgtaagctcttaatttgttttcagggataaactattataaagatttttgtcagtaaatacttgcttgaatataatttccagaaaaatggatcactatgcttccaatagatgttattggtaaaactgtatccattcccgcatctaacattttcttctgtgtctcgtttataatttgaagtgcttctgtgtaaaacagttgaagtaccaagtgagtatcagacttgtttctcctatgtttcaggaaataatcctacaacggaagttttctttaaaatatatccttcttacaagtaactatttcggaaatctaatcttgaaccactactgctatgtataataatgtgaaaatgcacaaagcatccaccttttcatttcctgttaatcaatttggagctccaacatgtcttcatgaggcataggattacatatatgacgataaattgaagttctctcgtttgattggctccatgcaggaatttggatttcttaacaatcaatactgaaaaagctatccgtgcagtattttgcttggtctttatgtgtgttatcataattcttacaagatgttggggttttgtttgaaaatattcaggttgc

SEQ ID NO: 103808 - DNA, 697 bp, Mimulus guttatus
  Intron number 1 from transcript mgv1a005141m (locus mgv1a0 05141m.g) derived from phytozome v7.0 (chr-ID scaffold_239 ; pos 267328 to 268024 reverse strand)
tggcgacgattcgatctccggcgagttttttggttagtgttgaaactcagcttttttattttttgtaagtggtttttttttttctgaatttttgctgtttggttggatatgattttttatggtgttactgtttgatgtggttgttgattgattatagaatatttgattagatttaatttgctaattattgattgtgttgaaaattttattctcggacgagattgtataatctggatattgtaaaactaaattttgttagatgatcatctgataaacaagttttaatttcactcacccttccctttatttggtattaaactattaataaaattttgccagattatttgtttattataattaattagttatatataatttaaaaaaaaaaaaattggcattgtgaaaattattgtagattgtcaactactttccttgttccttgcttgctaaagaaagaagatatcattgtcacagttaataactctgctaaaaatgtaggcatataaaagtattccagctctcgacatatctcgtttgagttaatttttttaattgttctcgtagtgaaaggcagaaaacagctgcaactttatttttgtttcttggaaagtgatgcaaatatttgttaccgtgcttttaaccaattgtcttatggctgttaggcatttacggctcccttgtagagaggccacacaat

SEQ ID NO: 103809 - DNA, 490 bp, Mimulus guttatus
  Intron number 1 from transcript mgv1a009095m (locus mgv1a0 09095m.g) derived from phytozome v7.0 (chr-ID scaffold_1; pos 4163153 to 4163642 reverse strand)
ggagtccctcctctgcctaaggttttcttcattatttctccccaaaaaattgatctctaattgttttattttatttgttcatttgatttatatggtgataaagcttagagtgtacacagaaaaatactgtgattttgattatctctcagtgtagattttggtgcaatttttcatgtgttattaattgttatatatcatactgaatttcttgaaatggttcctctgcttgtgatgatatctactctgtgccaattttcttttaattttgttaaatttatgtttctagtgagggactttcggaacttgtttgacaccaacatctggaactgcgtggggcttggtctctttcgactgagtcaaacaaatctctgtttaacttgttccatttatatagtttacgtagcatctgccataatctactcgtgcttgtttttgcatcttctaaatgttaatctctccttttaaatatcgttattctcttagaaccgga

SEQ ID NO: 103810 - DNA, 612 bp, Mimulus guttatus
  Intron number 3 from transcript mgv11b011135m (locus mgv11 b011135m.g) derived from phytozome v7.0 (chr-ID scaffold_8 ; pos 1976676 to 1977287 reverse strand)
ttgctgataactcttgtttccattaccgatctgtaagtttcaaactcggtgtagttgacatatttaccattcttaacagactttgtaatcaaaagaggcaggattatgattacctttaatattttttgttagttttaggatattgtggctgctgatgtttttattgctgcagtgctccaaaaaggaaaagatattgaaaagtagattaaaagaatgaagcacaagaatgtaattcaactgatatatgtagttaggcggatttttgttggccctttcagaaactaaataagtcacgtgactaggctcttatactgtacagtcactataaatacccctaaaaatgcaaccaatcgtcgcattggggaatattttaccaatatcccacataatcaccctaaccaaacataaaacacgctcccacggtataataattgaaatatatatggcgaaatgatggcaatgagtcttccacatggcttctttttgtatcttatcaactgccaatggaaaaagagtaaaatagaagaattgcttatcctttggtaatattttctgcattcttacagtaatataatttaatgtcatgtataatgtcagcgcttactactccgg

SEQ ID NO: 103811 - DNA, 792 bp, Mimulus guttatus
  Intron number 1 from transcript mgv1a021853m (locus mgv1a0 21853m.g) derived from phytozome v7.0 (chr-ID scaffold_49; pos 259624 to 260415)
tgaaacaactgaaagattgctctgtatcaaagttggtattcctttttatctctctctgttttattttgtgtaaattacgaaaaagcccctcctttttgggtaattacaaccaccctcgactacgaatcttgttatgcgtccatccaccatgcggtgtcaaatttagttgaattttctagattacgttggaatatactctagtttgtacccgttttaccccattcgagctccacgatttgaaacaatatgatcgtaaaatgtgtctttaggcttgtaaatattgcatcagaaactgcatttttgcagaaaacgagtacaaattagagaatattgcacggaataatgaatttgacaccataaggatggacgtgtaagaagattcatagttgttgatggatggttgtaattacccaaacaagagggattttttataatttggtcttacttcagagatggtcgtaatttacccttttattattgtacattttgaaattacttttttttttttttttttagttcatgatgagttgcaaaatgtgttttctacgattttgaaattactaatccactttgtgtacgcaatgtttgtgttgaacaatttcaaattcatcaacccttgttgttggaaactatctttgccgtgctttgtaccgaaaagaagttccctttcatattcaatgaaatcatatttgccgtattgttcgagtgaatatagtatttgttatatactcgatttgtttttttttttactgagattttgtttacacgaacgttttgcagtgcattgggcac

SEQ ID NO: 103812 - DNA, 918 bp, Mimulus guttatus
  Intron number 1 from transcript mgv1a009811m (locus mgv1a0 09811m.g) derived from phytozome v7.0 (chr-ID scaffold_1; pos 4555898 to 4556815)
ggatcagttgtttctcacccagctcagtggaccaggttattccatttaattacgtatatattttattagatcccatgtgtattgtgtagtagacaccacactcagagagaaaattattgcttcagttaatttttgttgttctacaataaacttagtagaagtagaaagttgtctactcctcacatatacgtacaaatgtcaaatgtaaattaatcgactagacccaaacttgacttgtttgaatttcatcgagccttaaattgattgtgtttgagcttggtttgagaagcaaacgagtcgagcccgagttgcttgcattttcgttcatattttattatgtagttctaatcgagctcgaggtgagcttgatagcatttggatattaaacgaaaatcttggttcgatatgttaacgaaccgagttcatacgaggtttttaacaaacgatgtcgttcgatatcgaaatgagtgccgaataacttgattttgtaaggatacaaaatgcattgaatttgagttcaaattgagtttttggtaaaaaaaaaaatcaaagattcaatgaagtttacgtaattttacaaattcgaagatgtagtaataattaccgcaagattatttgacatttcttgcattggtagtactataccgaattcaatgcttagaccaataaagaaatggtcataactaataggcccctccaacctcaccaaattccacggtctttaattcctatttgggtcaatagcatttatcaatctctgcctaattcaaacctagttttggttaggttgcttcttgttgcgctccattttatattatatttatacgtaataaacttcacaaatatatagtatatgtttcatttgtctctcactatataatctatatatatgtgcagacggtgaaaagggatttgcag

SEQ ID NO: 103813 - DNA, 619 bp, Mimulus guttatus
  Intron number 3 from transcript mgv1a009683m (locus mgv1a0 09683m.g) derived from phytozome v7.0 (chr-ID scaffold_174 ; pos 201201 to 201819 reverse strand)
gctcaccccgaaggtaagcttttagttgccgaagcctttttcttttgtgggtgcgactttcaaaagttattgcataatgatatttttaccctgctaagttattacataatgattctttgctcgaattatcttgatttagcttttgaattgagcgtgtcgtagactcgttttttcgcaattacttttctcccgataaatttgaaggctatagtgattttttttaagtttgcaccatccaaacatagtctggctttgcatttttgttttcttgcaactaaaccgttcgtaaatgtatttactcgtttgtgaagtaatacttatgagtaagttcgggaaagcccgatatcctcagcctaaaaagctgttggcagaggtatggaagtttatcttaatcgtttgttttttttgttactaacaaaacacttgattggaagtttcaaacatagtcgtaagtgagattgatgttttccaatttgaacattatgaatgaactctttcaacactaatagataaaaatactaggtaaattgaatgtttcttgtcaatgtcccgcgtggcagcatgtacttgttggacgtaactaattaacgttgtgaaaaaatgtattatgcaggagagt

SEQ ID NO: 103814 - DNA, 624 bp, Mimulus guttatus
  Intron number 1 from transcript mgv1a009683m (locus mgv1a0 09683m.g) derived from phytozome v7.0 (chr-ID scaffold_174 ; pos 202158 to 202781 reverse strand)
cactcttgatcagcctcaaggtctctctctctctctctctcctccacacacacacaacacacactcaaggtgttcttcatctttctttttactgatttatttatttatgtgtaaaatccaactcttttgtctaatgtttaattcaagcaaaatgataattttatgttaccaatacataccatttgtttactcctaagtgagtttgggtagagaaacgtcgtaaagtatactataatctcgataaattaataacgtcgattagataattttttttttatgtcctgattcgataaaagaaaacgtactaaattattagtttatatttgtttattgttattgggtttgttgtcgatttggatgacagggttgttgctggatgctgattattttcactgacttttttattttattttttctaatttttttaaattgatctttgattcagtgtagtaactattgtttagtcatattaccaatcactccaactgaagtggttggttatccgttatagtaacaaccaactatgaaatgatctgacataatagaattttgatcaagattcttcttttactataattttgatcaggattctttgtagggactcgaaaagaatcgtatacaaca

SEQ ID NO: 103815 - DNA, 848 bp, Mimulus guttatus
  Intron number 4 from transcript mgv1a014300m (locus mgv1a0 14265m.g) derived from phytozome v7.0 (chr-ID scaffold_4; pos 2465075 to 2465922 reverse strand)
tagagacactgctctgcttgccatctcaccaaaaggtacacgtggcacaatcatttatttcttttttttttcttttttttttaattttaaatttgtttttttacaaataacttctgaaattacaaaaaaagatcatcttatttgcagaactactacaatttaccccagcaaaaaaaaaagaatgtcggtcattcaacatttttgtatttttcatcggttgctgacaaataattttaatcgagaaaaaaaatcagaaaacaaaataatcttgttgttccagcatttaattctgagttgtctttgagttcagtttgtatgtatgcacttttgtttcttgtcgggggatgggtttctctgtgtgttcataacatgctggaattcttttttttgttttatttaatttgttataatgacaacaaccacatactgacataatatatattaacataattgaattgttttatatacattatcacagatatgtggggcatgattttgcacgtcgatcgttcgacgaatatatattttacgtggactagcacaataacaataacaataacaataataataatatatatcatcgtgcaaagatcatgccccacatatcgttgatataatcgacttaattaagttgcaaaattagctgtgttagtgcttaattaatttttatggtttaatttaattagcttattaaaccaaatagcatcttctatttggtacaccacatacatttcattctgggcacgcctgttagatagattagggaaaaagtttggtactgaaaaagaggcctatttattttgtaactttaatttggtttggtatgaaaattgcagcagctgctttac

SEQ ID NO: 103816 - DNA, 436 bp, Mimulus guttatus
  Intron number 1 from transcript mgv1a014300m (locus mgv1a0 14265m.g) derived from phytozome v7.0 (chr-ID scaffold_4; pos 2466679 to 2467114 reverse strand)
attaacagaagctctgcttttcgtgcgctgcagaggtttgaacttttcattttattttatttaattaagagagagagagagagagagagagagagagagagagagagaagcttgaaaattaaggtttctttctttctgtttcttataattcacgagagttttcttacaagaaaagaacttgttttgattatctatttaggtaatccaaagttgactcaaaaaaggcgtgctttttatttatttatttatttatttttattttttgtttggataaatcagatagtggaaagaggaaaacgatttcctgattacatacgcaaccttgtgaacaaactactcctaaatcaaaatcaaaatcaaaatcaaaatcaaaatcaatcctttttctttacctcttcttcttcttaattatttcagaattcacaggctgaagaaa

SEQ ID NO: 103817 - DNA, 828 bp, Mimulus guttatus
  Intron number 1 from transcript mgv1a016752m (locus mgv1a0 16752m.g) derived from phytozome v7.0 (chr-ID scaffold_255 ; pos 206675 to 207502)
acagtgtccgtgtggatctggcttttctcatttaggtaagattttttttttttttctttctatttttatttcttctctttctgtgaatgtatgggtatatatagtaattgttatttgcccaatcgcccttctagactgtcttctgtgtatttttttcttatcttggattgtcattttatctttttttatttcatatattttttcgaattgatgggatttacttgattccatgttctgacctaattttttatttttttccccaaaattatacagattcttcttaggatcggtttgggtagtactgcctctatagatctttgaatgagattattttttgcaattgttgcaatttgcaagtatgttcacacacaaacacacacacacacacacacacatatatatatatatatatgcacacacatacagagaggggcttctttattccaaaaaatgcttaaagaatcaagcaagaaagtatgtggacatttgcatctctaaccattatttagtaacaactgcaaaaaaatgtagcttgttgtaggtttattacacgagtatgcgtcgtagaaaaattaatatcgggctttagatattactacattgagttgtctatgtaaatgcaattaaacctctataaatcaatactgtcgggaccagggaaattctattaatttagcgaattattaaattatcgagttaataatttaacacgctttcaccgagtggggaccgggagaaactattatttaatcgaggttctactgtatgcaaacttttgattagacccttcaaattcttgaaactcttatgcaggttgcactacttatt

SEQ ID NO: 103818 - DNA, 792 bp, Mimulus guttatus
  Intron number 2 from transcript mgv1a013125m (locus mgv1a0 13125m.g) derived from phytozome v7.0 (chr-ID scaffold_11; pos 2122030 to 2122821 reverse strand)
gaaaaataatttcatttccacacaaaagtatgatcttcttctcttgcttagtttattagtgcctttcactttcattatatatatatatatattttttgatgtttgttcttttgatctatatgcaatttaaaatccctgtttattgctcaattaggctttttaatttttgtatgtgttcttaagatcgagcaagcgaatccgaaactggttcactactggtagtttaacctccgtttcatttagtatgaaattagtttttaaactgagcttgaatagcgcaatttcgaagtttttgacatttatacgtagataaatgaatatcgatggtcgatgtaacatttataaaccaacacaaatcgttttattttgaagtaatggatgctatgagcatcagctggttaccatgtttcgttcagtctgatttcgatattccgattcgacctcccttctttaatctctaatctaatattccatattttttggagaatgatattgttgaattcgatattttcaattaggagcatggttgtatacacatatcttatctaacaatctgttgatagctttttgcatgttcagaattattcacggacttcgatttaatactgatctctatacttgtgttgtggtacttgtgtttttcgtgttattttcatttatatataatcttccttgttgatggatactgccattccaaaaaacccaactttaacccttctccgaaatgccccttcataatttcaaaaattccatccaggtccctcaccagaacgttcttctgccgggccctct

SEQ ID NO: 103819 - DNA, 638 bp, Mimulus guttatus
  Intron number 4 from transcript mgv1a003439m (locus mgv1a0 03439m.g) derived from phytozome v7.0 (chr-ID scaffold_17; pos 2190820 to 2191457 reverse strand)
aattctcgaaagggtgttccctatcttggcgggcagtaagtttctcaatcttcactttttcttttttcgaatttttctattgaaaattgtctggtcgaaatcagtcaactaaatttttcgatttatggcttgttctgcatatgctagtcacaatcaaattcgtgcatcatgaaaagtatatcagcaaattctccatcactttaagcgtccacaagttagtcaaacgttgatatttttgacgaaacagtagtttggtttaatacgcaacgaacaattcttaatagaattcctttgtggaggttactatgagagagtaacttttcgtcattttgtcaatggttaattactggtggcatggaccataattccacctaaactgtgaagacagtgacaaaacagaagagcagataaatccaaattaaggaaccaaacatctcttgagttcgatgttattgtcaaagaatccgtccgtgttttattttttttcaatcgacataagttaaaattcattaggtaatttacgttttttaccagccataccgaagggatgtatacacaagtgaaatcattaatttgggtgtttttgtttttttgtgtttgtctattcaggcacaaggttattgttagtgccaaacact

SEQ ID NO: 103820 - DNA, 894 bp, Mimulus guttatus
  Intron number 2 from transcript mgv1a013201m (locus mgv1a0 13201m.g) derived from phytozome v7.0 (chr-ID scaffold_123 ; pos 281226 to 282119 reverse strand)
ttttgccactaaacactctttctctactgacaaaggtttgttctttgtttatgtggtttttcttgttttttttttattttttattttttttatttttttattttattttgggcacagctaatgtatttttgatagttgataaatgtgaaagtgcttgttgttggcacaatttttttttctactaatcagctttgtagtgcttgttgtggtaaaaatgctagcggttcaatgacaactaatttctcggtcttttgtgctcttacatatggtttcaagtttggatttgcgtaccctaactgtcttccactgaatgggtgtaaaatgagaaactagtgagcgtcgttcttgcttctcttgagtggggtggtacccatattttagaattttgaaggacctatctttttgtgtaacgctcctattttctaattattaattcgacagatttcttggtgtaatttgttgaagaatgttgttaaggtagtttattaaaacttctcggatattggcctgaaatcctagtaagtggtgagcgtcgttcttgcttctctatagggggaacccatgtttagaatttaaaaaaaacttaatctttttgtgtaatgcttcgattttgttccctaaattattgcgacgaatttcttggtataatttgttgaagaatgttattgaggtagtttattagaaattctcagacattggcctgaattcatagtaaggtccatctgaaatactttagacatgcgcttagtgaaacaaatctattttctggcctataatttccatcttagactcggcacgtgatttttaattgagttagcttttagttgttggaaaacgactagtgaatgtgaacttttttcttgtatggaaattaatgtttgctgtttactacag

SEQ ID NO: 103821 - DNA, 584 bp, Mimulus guttatus
  Intron number 1 from transcript mgv1a013201m (locus mgv1a0 13201m.g) derived from phytozome v7.0 (chr-ID scaffold_123 ; pos 282147 to 282730 reverse strand)
gcaaatccgtcgccgcgtttcgtgctcgtcatctcgtaagccatcgtcgaattccttttcttcttctgatattttcgatcttttaaatcatttcattttccatttttgattttttttttttgtgttccgatttgagaaaggatgattctggttgatttagttcttattcagttaattttatgctcgtattgatgattgaattaggaaaatccgggaagatggagtgattaattgtttttttttttttttttttaatttcatttgttcttagggtttcttattgttataagaattgaaggaattgattggggattattgttgtttgcacggaaagattggggatttctgtttccttaaaatgatctacccgatttaattatttttattaggcactgttctatcttggtttttttttttttttttaaatttagcttaatgcagtcttatgtgaaataattagaagatatttatttaaatattttacgatagactacattgatgattatcatatgaaatatcttggcccctctctgtgtttaccatatgtaggctttggctgggcaagctttgcaggctcctcgttg

SEQ ID NO: 103822 - DNA, 705 bp, Mimulus guttatus
  Intron number 1 from transcript mgv1a011447m (locus mgv1a0 11447m.g) derived from phytozome v7.0 (chr-ID scaffold_82; pos 657889 to 658593)
tcttttcaacgccttttcaaccttttgtttatcaggtaactgtttgcgtttacacacagtaagtgttttcactgtatgtctgttcgtgtttttgaattgggtttttttgattcctcgaattagggttctatctcggtgtgtctaaaattttttttaattcgatttcttccataggcgatcctaattttattatgtatgttaggcgcgatgctgcgaaatgtatgatgaaacgaaaattagagataaatttgatttccttttcgatttctcaatagagattttcatttcatgattcactatacaaatagagatagacactcttcactctcgtttgggctgttcagtggcattttcgaagttagtttgttgttaaaataaggggaagtcagttcttgttctttgattaactattttattcatgctatggaaaaaaaaaattatctgcgtgatttttcaccccgcctcgagataactctgcgtaaatagatcaggtcgtaacagtcaccaaacaaagcttgggctgttattttacattgttattttcaaaatgctattgtgtgtttaatcaagaataaaccatttatgattcttgtgtaatgaagatgccttttttttttttttttttttttaatgttcactatatagttctcgaattccagtttaaagatagtttccatgtttatatgttatttcagagcccacaag

SEQ ID NO: 103823 - DNA, 1019 bp, Mimulus guttatus
  Intron number 3 from transcript mgv1a011447m (locus mgv1a0 11447m.g) derived from phytozome v7.0 (chr-ID scaffold_82; pos 658745 to 659763)
gttgaaaccacaagaaaagattatagcaaagcctggtatgcttttcttagtaactttgtgaaatcggcatccttatgtttgtttcaactgaataatagtatgttttggttgcttggtataatgtgtctttgttcccataattaacaacctaaatctctgatttggtttcacttcgtgcttgcccttttgtgacgagagttggtacaagaccaacataacttttgcatttctcgaggatttggaaaggttccattacttaagaaaataattattttcctgtggaattttcattaactttgtgttgccaaattgaactcatcttcaagcgaaatcgaatttctgtaggaacatgtgatatccttttctcgccactttcaaacaagagtattcgttcaaaatttgatggtatagaacattaatattcgtagtacatgctaggctgtatgcgagatagggtaaactgtctccagtttctatgaaccttgacatataaatatttgattattttctgtatgctgtaatcgttaacttgttttgatagagctgccattttagggaggacgtcgaaaatgattcacaaggttaagctgcatataggaaaataatcaaatatttatatgtcaaggacgattgagttctgttttcaatccacctctcttgttatcccttaatgtttttttccttatttctatcctcttccgtatgttttcaaccaatagtagccttctcttggttatataatttactatactatattgaaacaaatttgtggaaatgtcacaatcttaatcctatatcatattgttttcactctttcaatcttgccaaattaatctagtacaacgttttcatttgctaagttagcaagaaagatacatgtgaaattctgatttgtttgtctaattaggtgtgattttaaagtattcaattactgcttcaaaacacaatatagcttttactaattattctgcattttgaattgatgcatgtattttatctggatggtttctgcaggctcg

SEQ ID NO: 103824 - DNA, 966 bp, Mimulus guttatus
  Intron number 1 from transcript mgv1a012461m (locus mgv1a0 12461m.g) derived from phytozome v7.0 (chr-ID scaffold_18; pos 1864505 to 1865470)
gagaagaagtccgctcctaagcttcaggattcgaggtttctgttcttctctctcgcagatcgcacaatgttattttgtatcatatgctaatttatttttgttcagatgaatgaatttttttttttatttaggcttggggtttgctagtttgatgcatcgacttgtttactgtaatgtattattgagaattgggtgtgaattatttctgcttttgattttctttttggcaattttttttactatttatgtttattgaaggctgcaacgatgttcttattaggcatgggtgggggttgtagagcgggaactgtgtgtagctctgttgttgttaaaccctagcttgagcttctatgtatattgagcaaatgatttcatattttgggattcaattgtaaaattagatttgatatgcgatttttttgaactttggtttctggtcatcgaactttaagcaaagcattcgcccttggttgcgtagatacgaacaaattggctttaccttgatacttcagttattcttcaaaatgggtgaaaaaaatagaacgtggtgattgtgttacgtgaatttcagttttccattactaacagttctagatcatatcaagcacttgagattcaggtcatgtgtcggtacatgtaaacatcgaatatacaaaccaatggacaatgaagctttctggttgacttgcaatattcattagctttggtctaatatctatgaatccctcttaggactcggttgtatgcgaaaagagttccgttgttatttgtcatccattagtcaactattctattgaactttgaaatcgtccgattttagccatttgttatgcattactgacatgttctgaatgtaatccctgcaatttcaaacttgcattgttcaagaaacggtacttaacatccatgtttgttttattgcgtctttcagatcggtaaggaagattgttaatttagataatcaca

SEQ ID NO: 103825 - DNA, 987 bp, Mimulus guttatus
  Intron number 2 from transcript mgv1a013871m (locus mgv1a0 13871m.g) derived from phytozome v7.0 (chr-ID scaffold_151 ; pos 278674 to 279660)
ctattctatccgctcccactctcaatcgaaaccaggtattattattttatccccaattatttatttttttaattaagaagcagtttattgatttttgctgtaatgttacttgatagcgtgacggtgagattgaacataggattgattgcctttgtttttcatttataaaaagaaattgcttttctgaaaattgaacaaggttgtgaatccaacttggaatatatgcagcttcaacgatggagtttgagcttttttttttttttttttttttttaatgctagctagggtgtaatttggaaccgaaattccgaattttgccgatttcgattcgaatattttttattatgtaacaatatttttcatttcgaattccaatattctgattttctgtttttattgggaacggaattgggatacatattagattccgattttcgatgtttattcacaaaaattacacttataatagcaatttttttgtgtattttgtatcatatgtgactaaaaatttggaaattctgaattccctctatgtcgttctgaaaatttccgattttggaactagttttttcgttccaatttcttcgattttttcctataacggagtcggaattagtttttcactttcgaaaaaaagtggtaactttcagaaagtactaattccgatccgagatacacttcttgttctacctaaacctatttaacatggtatttgaacgagtctgtaagcatatctccgagtaatttttcttaatgattgaggaggtactgctcgaagaaagacgagtataaatagtgtatttttggtcttcttgtccatgttattggattacacactccaaggcaagaattcaaatccattgttagaaatgaaaatgtttggttaaatgtagtgaaatccattatcatttttccgttgtgtagattttgatattgtacgaaatatttgaagggcttcgtcgttcaagctgcttggacaaggagatc

SEQ ID NO: 103826 - DNA, 1043 bp, Mimulus guttatus
  Intron number 2 from transcript mgv1a003763m (locus mgv1a0 03763m.g) derived from phytozome v7.0 (chr-ID scaffold_240 ; pos 313298 to 314340)
ccgaaggttacgatcaggtactaacgatgattttctcctaatttatagagattatttagtgttgatactacctgatgtatatatatgtatttaaagcagtgttcgatgcaaaggcttttagtttaagtcgatacgagtttgctattagtaccgctaaaatgtttgtcatcaatacttgcttcgagattgtcttcgagcccttttcttggcaacaaatgatgttataagaaccttctgcgctgttcttaccatgcacctgatgactacaggattgttatcactttccttcaaagaatttatttcttttgttctagtcatttgatattagtgtcgagtaaaggaaaaaaaagaaacaaagattagtgtcgagtacatttgaattggttatgctatattttctccgatcaaggatagtgaacttttttacttactccatgtttcttgaaattccgttccaattcttcaggaagtgaagtttattggggattctatagatgtaatacatagacgtatatatattattccgatgaatttaaaaataacttcttctagaaattcgtctcttcacgagtaggtagtcagacgatttggtcagagtaattgtcggaggtttcatgcacctgccttataaatcaatttcaagtcgacacataatattcaccattaaacaaaaagaaaaagcatacagctgctggaagtttctcatccctgggtggtcaactaaccacaacgtacaccaggcccttttctccctttcacgagcctcccaattgattgaattgatacttttacggcgtgtggtcattgactagttggtatacaaagattacccttcgacactgacatatttgcttgtggatttgggttaaatgtatgcctttaactgctttgtggcttctgcatttggcatctttggttgtgtcttggtcttgtttgcttaagttattcttccaactactgaaacgtgatttccactattatgtctgtgtaatgtgcaattcttaataggtggagagtggttcgattgcaactggtgcttcggt

SEQ ID NO: 103827 - DNA, 946 bp, Mimulus guttatus
  Intron number 1 from transcript mgv1a015516m (locus mgv1a0 15516m.g) derived from phytozome v7.0 (chr-ID scaffold_122 ; pos 359171 to 360116)
agaagatatcaattttagctcaatctcatctttttgtaagtatatattagggttcttgatcttgtaagtatatattagggttcttgatcttgtattttctgcaaaagagaagccctaattattcttttgcacttgttggttttctgtggtgtagcttatactattttttgcttgcatttttcttggtgggttttcagtttttgaggttaatattgtgtgaagattgtcttttttttttttaatttgatgaagttttatagtttatgcttatttgcagttgtgtttcttgatcttgttgtaattacttagtgcttaagatggttgattaacttatatctgcatctaattattcatagatggttctgaattttgtcctttctaactaaaattgaggacttccccacaaatttattggcaaaaatttgatctttgagcttttctcgagtcttttgaataagaaaaaaagagtattttcttggtgaataactaaaattgtggacggtgattgtaattatccaaacaagagggattttttcgtccgtaatttgcccaaaaaagaataatgatacatgttgatgttgtcttgtctcttagggttattttattttatttatttttttaaataaaatgaaaaaaaagggtgttggattccagaagtttcgtttgaagcatatctgtcaatatgtaatagtgtttggtttggtttgatcaattatttaggtgacacttcatcttaaagtgagccccgtgtttgatgtgtcgttatacaattgattagatttcttttgcttgattgtttattcttatcatcacctcttcaaaagtatattctaggataatgtaataatttctggctataaaaattcaatctttatggtttttcttgtattactttatctaactcgaaaccctccgtttttctttaggttttcggtccttgaaagaa

SEQ ID NO: 103828 - DNA, 406 bp, Mimulus guttatus
  Intron number 1 from transcript mgv1a008179m (locus mgv1a0 08179m.g) derived from phytozome v7.0 (chr-ID scaffold_62; pos 644993 to 645398)
ggggtgctcgaacttctgtagttgttcgtagcccggtaagtgctttatccaaaatctgtttttcttatttctttttgaattttttttgaaaataattactcctcttgtcctaaaataaatgtctttttgggttgttgacccacaaattaaaaaaaaactaataaatatgcgttgctttaaggaagaaaaaaaatcccagatagaatgactaaaatatccatgttttattttattttatttccagtaattctcttaattaactaatagtaataagggcgaaattgagaaaatggaaacaagaaaaatttcatgaatcggcagttaatttagaacgaattgagtacgtaattttgcaaacgcacactgattttagtattattatttttttttaaattatttcaggttc

SEQ ID NO: 103829 - DNA, 440 bp, Mimulus guttatus
  Intron number 1 from transcript mgv1a014201m (locus mgv1a0 14201m.g) derived from phytozome v7.0 (chr-ID scaffold_58; pos 924834 to 925273 reverse strand)
ttgggtttcgggtttcgggttaataattgaacgaggtaaattccagagatcctttgttattaattatccttacatgatttatttagggttttcttgtgatttttgaatgtgaatttcccctaatgaaagatctctgtctgctgtttgtgtgttgtttttcacgttcaattttgttttttataatctgaattttatttggttttgtttttccggcctaggaacgaaattagggtttctgttttcatagtctgattttgtttgctcttgctttcgaatttggtgctgttcaaggcccgaattagggttttatctttcttctttctctatagatagataattgaatggttgaagataaattggtgtgttacaacatattattaataatattgttgtttaatgtaatctctaaatttgtttggtcttgttggaacgaaacgaag

SEQ ID NO: 103830 - DNA, 335 bp, Mimulus guttatus
  Intron number 1 from transcript mgv1a009583m (locus mgv1a0 09583m.g) derived from phytozome v7.0 (chr-ID scaffold_8; pos 275346 to 275680 reverse strand)
caaatccgccggagtctcctctccgccgcattaaggtttgactttttgatttttttattttcccccaatttactttactgttattttttcctgctgttagatacagttaatgccgtgatagttaactccttgagattaagattctccgtatggacgcgtggaaacagtgttgtattcgtgtacttctgagattcagaagtttgttaatttttttggcccttttcgcaaaattgattctcgtcttcttttggttttttgtgtctggtttttctgatttatatctatggctgaaacttgtagatcaactctcactcagttctgaaatcctctcggaa

SEQ ID NO: 103831 - DNA, 458 bp, Mimulus guttatus
  Intron number 2 from transcript mgv1a003818m (locus mgv1a0 03818m.g) derived from phytozome v7.0 (chr-ID scaffold_1; pos 4458141 to 4458598 reverse strand)
gcggagaggtattgttctctctttttttgcctcttatgcagaaataatttattcatttcaattttgtattatgccgtattacaaatttaacctagttgttgtctcccattaaaattgacaaaatataagtggtaatttttaagcgggatctaagtctatggtgcttttgacttcaagctctctttatactcaacatgcacgatgatagctattttgttttgcttaaaattgaagtattgctctctgcttatttttgaaatctgcatgtatgtacatatgttattggaactacgtcgcaaatttgagaaacaactctggactgtacgagtttttcttgtgtagatattcagtgattcttttgagcttatttatgtgttgcggagctactacttcaaactttttttattatctcaaactcttcaactttttgtaataggtggatctggatttaggtaact

SEQ ID NO: 103832 - DNA, 569 bp, Mimulus guttatus
  Intron number 1 from transcript mgv1a003818m (locus mgv1a0 03818m.g) derived from phytozome v7.0 (chr-ID scaffold_1; pos 4458653 to 4459221 reverse strand)
agcctgtggcctccgcgtcacctccattaaaattggtctgtgtgtggtgttttttttttgaatccttacttttttttctacctggcctttatttggacctaggaggatttattaacattagaagaatttttcatttgtttaggggaagacgaaagaaaagcttctgataacgtaattgcatgatgcatttgtttattaattatttcattctttttatgtaagacattcagatacttatgaaacagtcacgaaactgatgattattttagaattttcgttttgtttttattcaatttggagttagttgattgcctcaatttttatttgtgtggattgttggatttgttcatgttcacatataatattcctttgctttattttttatgattaatttacttgtatccggaactgtgaattgagcggattggttttggcatcacacatttcgcattaatttagcttatggatattattctgttatgttttatgaagatgaatttgaaattttacattatattttgttgatacatctattcttttcactctgccagatccttatttgaacattg

SEQ ID NO: 103833 - DNA, 387 bp, Mimulus guttatus
  Intron number 1 from transcript mgv1a010655m (locus mgv1a0 10655m.g) derived from phytozome v7.0 (chr-ID scaffold_142 ; pos 39656 to 40042 reverse strand)
caactttttaacagagggcttctcggaccaaagtgagttcgttcaatcaatccatttttcaagtcgaattattatccctaattccgaagaatgaaaattgaaaatctcgatttttttttttgatcttcattagggtttgtagtccatcttttgtttcacaatactattgtctaaaaatcggatctttccgatatatgaattgggtctgtgtaagattctgttattttcttgtttttttttttggacaaataaaaactatgggctttcctgcatatagaatgaattattaatctgttattttctagttggaggaatccagtttcagaattgattataatattagtgttaattgtagatatttttaatctgttgtttttgtagtaaaac

SEQ ID NO: 103834 - DNA, 824 bp, Mimulus guttatus
  Intron number 1 from transcript mgv1a025651m (locus mgv1a0 25651m.g) derived from phytozome v7.0 (chr-ID scaffold_474 ; pos 10854 to 11677)
ttttaggttgctgaaccgaaatatatagagcaatggtgaaagaaatcgaaaatatatgtgacaataaacattagagatgaataagaaccctaaataaattcaaacttcgcttaattttaaaaacaaaatcaaatctagggtttattctgcaaaaaacctaaaatgtgaatataattggaagaaagcgaagacctgaaatattggaggtctttgcggcggcgacaaaggcagtggtagcggcgacggcggcggtagcggcagtaacggcgacggtagcggcggtaacggcgacggtagcagcggtagcggcgacggcggaggtagaggcgacggcgacggcggcggttgaaagagaagatggcaaacaatggcagccaacaaaggccatcgaaggttgtactggtggaaattagggaaggggaaaattataaaaaaaaatggaaaagaaaataaaaggtaaaagaggaacggagaagagaaatataagagatgaaagaaactgattaaatattatactatttggataatcataggactcacggacatttgccgttggaattattattaaactttcacaattttaagaaaaaataatttattattaattgtaacgaatatatttcattctaacggataatatccgttagtaattactaacgaatatatctgttagaaattacaaatttgtggcgttagaaaatgtccattttggtgtagtgacgtacacaatcaaattacatatatacacattatttgtgaaatgtcatctttatattgttgtttttttcgtattgcgcgatcaggccacctgagtccaaggagtg

SEQ ID NO: 103835 - DNA, 456 bp, Mimulus guttatus
  Intron number 3 from transcript mgv1a012997m (locus mgv1a0 12997m.g) derived from phytozome v7.0 (chr-ID scaffold_11; pos 1375738 to 1376193)
actggaaattggtatgtttttcttttaccgtttttagaacaatttatttatagtcagtaatttgaataaatatgaaaatcctaaaaggatgaaacatcgaattcttccgctatcagttttctcgtcggaggaaaacggaagtacattggggtgggtagggtgggaagtgttaggcctatattgcgcgaatcgacatatttcgacagtttcaatttcatatagtaactgggcttgggtgatacagtacagaatgagcgaaagcaagaaacgaaaaggatattgcctgatgtactaaatgaacgagtgagccaaaaaaaatgttcaatattatgtaaacgaggaagatgaaatgaatttgatatcaaagaaagatattgatacgaaatttatgagcatattattctgaagcactattattatgccggtgtaccctgcaggttggtcttgtgtcggact

SEQ ID NO: 103836 - DNA, 456 bp, Mimulus guttatus
  Intron number 1 from transcript mgv11b021588m (locus mgv11 b021588m.g) derived from phytozome v7.0 (chr-ID scaffold_3 1; pos 1061134 to 1061589 reverse strand)
acttcatagaacttggaatacaacaacgaagtcacttacagccctagcatggctcctagatcagccaatcgatcatctttcgaaaacgggggcatgctgcaggttctattttaattataaaccttctcttattaatttatttgtttccattttggttgcccattttaatttttgtcaggtactttgcgaagaagatgtagagaggcattgtaaagaagaggcgaatcccacctcttgttgtagcatttaattcgttggaagggtacttaattttttattttgttttgtttttatatgaccagttcattcaattatatatagtatattataggcctaatatcatatatacgtcaatacaaaaaagttcgtgttgaaacattagattgatttgaattgattgttgtcacgtgtaaatttaaaggtaaaaaagaagacgccgattacacgtggcagagg

SEQ ID NO: 103837 - DNA, 546 bp, Mimulus guttatus
  Intron number 1 from transcript mgv1a010440m (locus mgv1a0 10440m.g) derived from phytozome v7.0 (chr-ID scaffold_1; pos 3521120 to 3521665 reverse strand)
ataccctggtaatctctatttttttcttctggaaattccagtttagcaagtgttataatttagattcatcgttattaggttttgggttgattctgtactatttcaaaaaaatgtcaaatgttggggaaagaaagatgctatcttttcaaattgcatgatcccggaatgctaaacactgctgaattcgctaaatcgtaaaagtcgaatttcgatggggtgaagtatttggattgacatttagctgttctattaatcaaaatcttgagattgtcgaagtaattcaagagtggtttttaatcttggatatactgtacagtgaccatttgattagaaaatcgttgcataagggcataaagtaacgaagtttttaagaagagtaaatctagagctgataatactttggtggccaaaatgggatttgttggtgaagtgcacaccggaagtttttttctgtcgtgtggctaatttgagttccaatatacgaaatttgagttgtaatatacgaaatttgatctgtattacgttttgctgttgattgcagaagct

SEQ ID NO: 103838 - DNA, 342 bp, Mimulus guttatus
  Intron number 1 from transcript mgv1a020598m (locus mgv1a0 20598m.g) derived from phytozome v7.0 (chr-ID scaffold_755 ; pos 18321 to 18662 reverse strand)
ttaccctcattgacccgtaagcctccatagtcaaccattttatttttctgtagcattctgcaatttattctgatctgatcaagaattatattaattatcaactcaaatattcaatttctattatttgatctgagatctgtgtttgttattatgattattattataagtttttaagatttttttatttattaatttaatttaattcatgaagtttgaagatcacaaacatcctaagaaaacagagtatttaattcattttattttcatcctagtaattaataaaacaaattctgtatatatatttggattaaaaaaaaataggaaggaatattttgagatacc

SEQ ID NO: 103839 - DNA, 363 bp, Mimulus guttatus
  Intron number 1 from transcript mgv1a022040m (locus mgv1a0 22040m.g) derived from phytozome v7.0 (chr-ID scaffold_14; pos 1604104 to 1604466)
atttggagatcaataatatttcccgtgcactgctggtttatctcttacttttttttaaagcattgtggataattttttattccctgttttgagaaattagattcctagtgcttggagtgatagttcattttgctttattttgcatgttagcaaactaaataaattgtttcttaagcttattattattttctcaaatgttctctttcttgtttatagaaattaaattcctaggatgatgctcctacaactttcatagttgtagatcgaagaattcggtttaactgtcacataattttttttaagtctttgttattgatcatttttccaggccgtggatttaagtagcattgcgccttctcgaat

SEQ ID NO: 103840 - DNA, 496 bp, Mimulus guttatus
  Intron number 1 from transcript mgv1a007233m (locus mgv1a0 07233m.g) derived from phytozome v7.0 (chr-ID scaffold_148 ; pos 174693 to 175188)
agttgatctatccagagctcagggtttgagcccaggtatatatatgtatatacatatattatttttttctgactctatctgtatgtaggtgtgtatatacttctagtctgattcttattatttttattttttaatattttttttgggtaaaagtttgattcttattcttaaaagagaaaagggaaaagcttcataacgctgtttgattgggaattgagttacagttttttttttttttttttttgagaaaagttacagttaaatctccataaattaatacagtcgcgaccagtaaaattctactctattattttagcaaaatattaaattatcgaactaataatttagtggatttttaccgagccgagatcagaagaaacaattatttaagtaaggttattaatttatcgaggttctactgtatgtttaattgctttttgtttccccaaatatatatataggagagaaggactattacgaaacgcaatttgctaca

SEQ ID NO: 103841 - DNA, 721 bp, Mimulus guttatus
  Intron number 4 from transcript mgv1a004057m (locus mgv1a0 04057m.g) derived from phytozome v7.0 (chr-ID scaffold_18; pos 1510529 to 1511249 reverse strand)
ttcaggttcattttctctgcgccatctagcttggctgctatatatttgtaatgttttcatgttttggctgtatccaccgtttctttgattagtaggttaaccaattgttttctcatgcttaactataacaagtcatggatcctgctttgttctcacttattccttacatggttgcgttgtatctagagttaaatttgaatgattattgaggactttatagctaaataatggggtccaaattaccacaattttcacacttcctccaacaaaaagtcatttcctaccgaggcatagaaattaaaggctgattttcagattgaaagttctttataagtctgtgccaattccatatggttttaaagaagaaacctttgaaattccgagtgatgccaatgggccattgattctgagaatcttgtaaactaaaactgtatagagcatctgcctcaggaggttgaatattaatatggtgactttcgttgtttaccattttagttcaacaataaattttgaagtctacaatggtgtaatccatgtttaagaaatttggcgctttatgtaatgcaaaaccattcagtacattttcatttcttgtaggtttgttacaatcatttttcttttaatcctagagaatctggaaaattattttttgcttatgttttatctcacctttccattttgagttagtaaactatatctttttacagattcgagggttagc

SEQ ID NO: 103842 - DNA, 494 bp, Mimulus guttatus
  Intron number 1 from transcript mgv1a013449m (locus mgv1a0 13449m.g) derived from phytozome v7.0 (chr-ID scaffold_798 ; pos 13652 to 14145 reverse strand)
aaattccacctactacagaatcatcttcaacaagagtacgccccttctcccactacctacgtatatatatattctctgtgtgcgtgtgattgtgcgtgtttatattcttctttttcgcgctattttattcgtttattcttttaatttttgtatttagtgttaaaaaaaacaaaattgtattccgctgaccaaatcgttgtgaagaaaattcagaaaggaaacagaattgaaattgctgccaacaaattagaatatcggaaaattgaaaataaatgccggtcagttaattaggttttgattttgattttagattgctgtattctgcatcataattattgtagcttacgaatcactgatcggaaatttgcagaactaggtatctggaatttatctattattttttttttttaatttttattctgatggtagtctttgtgtggtgatgaaatctttgtgcagaggcgaattttgtagattgaatattgttttttgcc

SEQ ID NO: 103843 - DNA, 1016 bp, Mimulus guttatus
  Intron number 1 from transcript mgv1a021747m (locus mgv1a0 21747m.g) derived from phytozome v7.0 (chr-ID scaffold_75; pos 606393 to 607408)
cagcgttacgagggtggctaccgcctcattgctgggtacctttcatctatttctctttctctctctctatatatatgtatgtatttttgtatgtacgtgcatgcttatttatcaattggggttttttgtttgtttgtttgcatgagggattcctttgtccgcgttttaattggggttaatgtgtagatgttggagttgggtttgtgatgtgcttctcgattcttttaccggttggatgaaaatcaaattggatttcaatttattatgctgatgatttttttggggggttctgtttattggatttcctgggtagttgtggctactaggttttggcgaaattggagaaattgagtttattttttgatgaatgttgggtgaaatttattttttacgagtttgtcgatgtggcaggtttgtttttattggcaatgatgtaaacgaaaatgacgtaaaatccgaaccggagatgatattgtgtttgtagcttaattactgattttcgttagatggtatacttgacagtaaaaactgtacacatcaattgaatcttcattgtacctgcagtacattttcggtttttgcaattagggttctttctgaaacataaataagacagagcaggaaaaatctccaaagtttcgttttacctgcaatatataatctgttggcacggttagttgtttttgtgtagctcagaattttttaaggtgaaagatactttctggctgatcttttttttccagtgaacgtataaagaaaaagaatgggatgcattgagttgtaagcacaacgagcagttagaaaaaggaaattaggaaatcataaattgtctctgcatatgtgtctgtcctaaactattaccaggcatgtagttcataattagacgagaaggcggatgattacgagttttttctataatttcttctgtgctaagaagttaattaggataaacacgcatcatattctgttctgacctgtggagtcaactgccaggtgtattcccttcaaatatagga

SEQ ID NO: 103844 - DNA, 495 bp, Mimulus guttatus
  Intron number 2 from transcript mgv1a010343m (locus mgv1a0 10343m.g) derived from phytozome v7.0 (chr-ID scaffold_204 ; pos 27627 to 28121)
catttccacgattgcttcgttcgggtacgtttaaacggaaaaaaaaaaaaaaaaaccgttacctattttaatatgctattacattatatatgtaatatgttgcaataaaattagttatgtatcttaattcagggatggtttgaatttttgaaaccctaaatccattatacaaatttttcttagcttttttttttttttttttattgttttttaattttttttttttgaattttttttgggttttccatagttaaattttgtattttaatttgaatatgactatattgccaatcatatagacaaaaagatatgtttgcttatattattgtgaagaagaaacacatacacttccccacgttttaatttaaaaaataaacaaaaaacaaaataattctactctattctttgtattattattttggcataacctccaaatattcttattcttgtacactaattaatacaatcaatatacatatcaaatgaagggttgtg

SEQ ID NO: 103845 - DNA, 338 bp, Mimulus guttatus
  Intron number 2 from transcript mgv1a003802m (locus mgv1a0 03802m.g) derived from phytozome v7.0 (chr-ID scaffold_1; pos 3435926 to 3436263)
gaggtattatttcaattccatctgcaaattaattgtaaaaaaattctgatttggtttctgaaaaaaaataaaattcgagtctttgagagttgtaatgaaaaaaaatggagtcttgaagctttaatgaaaaaacccagatcattcttttccaagatctcatcttctatattgttgtatcatgtatctgaaattaccaagattaatttttttctcctgtctgaaaaaaatgatctttttttatttttgtgtttaatattaaatgcaaatgtgggtcatatgctgcaacagtccattaccacagctttaaaaactttaagtaattgctttttcaggtattg

SEQ ID NO: 103846 - DNA, 344 bp, Mimulus guttatus
  Intron number 1 from transcript mgv1a014609m (locus mgv1a0 14609m.g) derived from phytozome v7.0 (chr-ID scaffold_3; pos 3798113 to 3798456)
gactctcgttccaggacggtgaacgccacgcgttggttcgtatcgattgttttatttatttatttatttttcctcattatttgtttgttggggttttcgtcaattgagctctaattttagtgggttattcatcttagccgtatacatttgattgcgcatgaaaagtagtgaagaaattgggtcaattatatgttttttttttttgcattgttattttcttgagatgattttcctctgaaggcaaatgtagttgtatttgaaaattgattaatgcttttttttctttttttttctttttcctaattgcaggagaagctttataatttaatattgaggcagcaaga

SEQ ID NO: 103847 - DNA, 954 bp, Mimulus guttatus
  Intron number 2 from transcript mgv1a014609m (locus mgv1a0 14609m.g) derived from phytozome v7.0 (chr-ID scaffold_3; pos 3798498 to 3799451)
tggaggtttgtccttctattcttagcttattcatcaacatctatcaccgttttttccgttttctatcaccgtttttagggtaacgtgcattatgttagggaagagttcggtttcagcttttatcgattttgtgttgactttcattttctgaatcagaaatttggcaccttagttatatgtcaatgtaataacaccgttcaaggactattatacatgttcttcgttggcaagtgcatatgataagacgagttttcaaggttgttattttgagttatatactcggtgatttcttttctacacatgtgcatatgaaaacctattttacatagtgcactcagtttgttaaacttaacatcttcgtctttcctaaaaggctctttatgttctccccactccttttcttttctttctttaattgcttttttcatttctggcttctggtatcattggttaaacttcactttctaacgagttagttttgtttggaagcatatgaacatcgtcatgtcaagaagatatattctcgacgtcacacaatccgatgttcgtgaaaaataaagttttatcatagtcgattaactaagtcgttataaaacaaatagatggcttacttttggcatcataatttgtttaagaatccttgtttcgcttgtatttacctctacaagattcgatctttactcgacataccccacgaattctagtgttagttaagcctctttaaaatcgtccctacataaaaaatacttcgttagagttttttttattggattgttagcttgggattttgaggtgcttagctattaaataaagttttagcctttgccttcctgtttattatcgtttatgcatgtgtatttcccttttcttgtttattttttcccttttcttgtttattttttccctttcattttgcccactctttatcgacaaatttgcagaacgaacttgatt

SEQ ID NO: 103848 - DNA, 971 bp, Mimulus guttatus
  Intron number 1 from transcript mgv1a003749m (locus mgv1a0 03749m.g) derived from phytozome v7.0 (chr-ID scaffold_168 ; pos 533030 to 534000 reverse strand)
acgacgtcgtgccgatattgccaaaaaggaaagtgagccggtcaacttttcagtcaacgtaactgatatttttgggtttttttctttcttttttcttttgttgtttctgccttttgatggaattcgttgttggtgtggtgcaaaatcagtgttcaagcttggtttcttttttaaatatattttttaattattttattattaccctgttaacttgaactatgttctaatttggttttcctagtttataaattgtaaccaacgtttaaccatcgtttacatgattttttttttattcatttctaacatgaaagcttataagattggctaaagaacattttttttaatctaagctgtattttttcttcttggttcaattttcagtcgtagtaattgctaaaatcgagcttcataatattgatgattagcagtaatatttctggagccaatatataaattcagtatatactatatactgttgaaatcgagctacttcatgatcagcaatagttaactctctaggcatgatggtggttaaaaatgtttttactttattcagaaattgtcaatgccctcctctacaatttcgtactattgtttctgatttttgagaatttatcgaacatgttgttcttggaaatagatttttttttgatacacttcccaacatgaaattgggatgtcacgaatatggttgcttttgcatatctattatctcaaatcgtcaagggatttttctaatacaaattagaaaaaaattgttacgttgaacagttatttcttgtaggagtgttgtacatgaatgcttattatattgttatttttccatctcttcagaatgtatcaactgctactatccgctgtcagtttcagattgcatgcttgatttcctgatgccctttggcacatatataatatttgtcttcttctcattcttatgttggcatgggtttttgtgctcatcttaatcagac

SEQ ID NO: 103849 - DNA, 674 bp, Mimulus guttatus
  Intron number 1 from transcript mgv11b024497m (locus mgv11 b024497m.g) derived from phytozome v7.0 (chr-ID scaffold_1 6; pos 2188582 to 2189255 reverse strand)
tctgttctttcggtggtaccccaaggtcagactgtgttattacactgtttgtgcattaaacgaatatatcatttatttattttgttgcagtgatgattcattataaatttagatatatttttcctatcagttgaaaggtcatggatttcagtcgggaccgaggacatcatatttgtggttacattttagcttttagtattttatagatgaatctcaaattcagaattcctctgttatagtcttgtaaagcgtttcttgctcgttgatgagtttgcaaatacttcacatttttctatgttgctgctatgttcatcttaagagccttactgtgttttatgtagtctgtcttattaggaaaacgagtcgcaatatcttttgagatgtaattagttgcatttagaaaaaaactttgatagtgttgatatgccttcagcataagctcacctcttcgataatctttcttttactttcttggaaattttatcatgctcggactattaaactacaccaaaatatcaactccgaaactataaacattttttagctggtatatagtcgctagctaatgtatttaacgttggattatttcttcacatgatgctctttatcgagacctgaaccaaatctatgcttttgtagggaaaccttcggtggagggaaaaatctaccataaa

SEQ ID NO: 103850 - DNA, 862 bp, Mimulus guttatus
  Intron number 1 from transcript mgv1a014720m (locus mgv1a0 14720m.g) derived from phytozome v7.0 (chr-ID scaffold_37; pos 379240 to 380101 reverse strand)
ttcctgaacttggatccactcgtgtagtcttccaggtgcattcatgtttttttttttttttttttttttttttttttatctgtgtgtgtttggcgcgtgtgtgtgtgtgtgaattattgatgattggttagtatctattttcgtgggtgaaactcgatattttttcaaattgatttgtgcattgttttgactggacttgttagtaaactaatatttgatttaatttcatggcgattttgggggttttatttgtttggaaattattggtaatctgaatgagatataaatttatgattgttaaaatgatgaacaaaatgcactttggaagataatggtgtacttaattcgaattggcattggattttgttaaattttttggaatttgttcagttgggaagtgtgtaaggaaatctaattcatgcttgtgaattttgattttttgtttttttcagtgagattgttgagatgtccttaatcactgaattgtttcggtttcgatatgaagtaacctactctaatcacaccttaaaatgggagacaaaactggtttaattttaaaaaatggtgtttcggttcggtgagaattaagtgggagagcttaaaatctctgtaatgtatcgaatctcgactatatttgagccgtgattgactcacatatgcacatctctcgattgattttttattattgatttgtgtgaatttgcttgcttttatttcattatgtaggaatccattcaaaactttcgtaaaattctggtccttgaattagaagtttggtttgtgtttattccacaagggtttttctttcgttttatcattattttttttaatagaaaatctgtgattgagatgcagacaaatt

SEQ ID NO: 103851 - DNA, 951 bp, Mimulus guttatus
  Intron number 1 from transcript mgv1a009640m (locus mgv1a0 09640m.g) derived from phytozome v7.0 (chr-ID scaffold_36; pos 1480720 to 1481670 reverse strand)
ctgtgagctgttttgagagcttggtgtaaactcaggtaattctcttccttttgtatacttgtgtttttgctttgtgactgtggtactttttcctacaattttttattctgtttgttgatctatctttcaccatttttatctgaatcggagcttattgtttatgttattttgaagatacggtgaaactgtgggttgaatttattctttaggattattcgctacattttgcaggtgaatttgttttcaattttcatgtgatgtgaagaaaatttggtaaaatatttcaataattgtgggaacattacggatggcatagctaagtgcggggtttcgggttttcgagtaatgctatattctgtatatatcaatttctatgaaaaaaatattttttggtgtgtattatcaagctcatatttcagctgtcgaacattgttgaatttgtgatttagggctaaacttaatacactcgtagttttaattaagatcaaaaactgattggaagcactttccatttagaaaatagtcaacaccaaatttagagtggctagagaagccagaacacttcatctgtatgtagtatgaatgataaggtgagatgctatctgcattcgtaatgcttcccaaataataaggtgagattaatctgcatcctcgacacttctcaaataataacgtgactcagcgcagacctatataaattcatccacttagaatttagttgcatatataagcatacatgataatctatttatacgtgtcaatgcaactttgatgaagtcatttctttatacttattagataatacatatcgaaaattctttagtcatttgaaacgtagaacatttgctttcacaattgagaagttcccgctgaagtagcagttgcgatattttctctgtaatatttgtattatgtgtttaaatgtaggtatttacttcagtagcttccata

SEQ ID NO: 103852 - DNA, 838 bp, Mimulus guttatus
  Intron number 3 from transcript mgv1a021977m (locus mgv1a0 21977m.g) derived from phytozome v7.0 (chr-ID scaffold_60; pos 1026107 to 1026944 reverse strand)
aagtaagtcaaaatcccccattacattcttaatgtgtgtgtttgtcatatcgattggaattctgtcgtgttaattttcttaatcctagtttccgctacggcctcgtttatgaacgttcacgaggtttgatagtgttgattgaattggttagagaataacattgatagcttaagaaagtttttgttcgagacgattagcatgaggtagaacaaagtatatgtgtatgttcgagtaactcgaaatgcttgaaaagggtagttgcaggtatcggatgcgctcgagtagcctttctctttagagagattataagttatctacgcaagattactttgtgtagcttccttgcgttgcaggttattgaaccgataggagttataatttctagcttcaggggcaaatttgtcctaggccgagggtggggctcaaagcccgccctcgagatttacacgcacacactcatgggatttgatttgattttcagtgtcgattctctcttaaatcgtaaacgcgaatgtatgatgatgatttttagctgttgagatactgctttatcttcactagtcatgaatagatactagtagcatgatgaatcttcaaagggcctcgtttggttcccaagataagatttgccaaaataagattttgcaatcttacgagaatccaattgtataattcaaataggcgaagaagagccattttccctaattattcaattaatcatggcttatcttaccaaccaaacgaggcgttaatagattaggtttctctctgttttactaattcattgttaatgtggttgataggtacttatatagagggttatctactggagatcgcc

SEQ ID NO: 103853 - DNA, 454 bp, Mimulus guttatus
  Intron number 5 from transcript mgv1a011487m (locus mgv1a0 11487m.g) derived from phytozome v7.0 (chr-ID scaffold_311 ; pos 33371 to 33824 reverse strand)
tccgtcaaaggaccaaaggtacaatgctgtaatcctatttaagacttaatctttatgcgatttaattttttttattattgtcggcacccacatacccctttcctcaaattcaaaacgagaagaacaaaaattaaatgaaaaatgaaaatttacgtggaagaattttagagacaagttttttttttcctagaagctactggtgctggattgctttctattggttatgtcgatttaatttgatatttacacacacacacacacacacacacacacacagacacacacacacacacacacacacacacacacacacacacacacacacacacacacacacacacacacacacacacacacacacacacagagatataaatcttgaaagctgattttgtttgtggtttatttaaaaaaaatagggtcgttttaagtaccaaccgggccaagtgaaagc

SEQ ID NO: 103854 - DNA, 403 bp, Mimulus guttatus
  Intron number 1 from transcript mgv1a004031m (locus mgv1a0 04031m.g) derived from phytozome v7.0 (chr-ID scaffold_7; pos 1362040 to 1362442)
tgcttctgctcctcatcaatcacagggacccaaaggttaacaaataaacttcatagacgcaaatttctgagatttttgttttgtggtgttatattatatcttaattgattcttcttaatacagacaaaaaataaattaataatttagaatcatcaggttaggttttcatgtagttatttcacccacccttcaaaccactgtaaatatgaattttgacaagggtaaaaaaattgctcaaaaagtaacaagtagaccacaatcttgttttcacttctgttcaagatatcggtttattcggtaatatcgatcgttttattctgttcgtagtacattcagttcgattcaactcaacacgttttcttttgtagacggcccttttcgtggccaactgtacaaccctcaa

SEQ ID NO: 103855 - DNA, 338 bp, Mimulus guttatus
  Intron number 2 from transcript mgv1a011434m (locus mgv1a0 11434m.g) derived from phytozome v7.0 (chr-ID scaffold_11; pos 1726279 to 1726616 reverse strand)
cactgaatttctgcttctggccaggtgaatttttgttaaaatactatttttttacgttggctgttttgtggttttatttacgaattgtattagcttgttcatcgatatagcatttcaatttgtcgtatggcacttatatactgtgctggcagctctggtttgattgataaagataggccccttgttcactgtttaaacagaaaaaaattcatcagttgtttttttaagattgttatgccttgtttggttgaatatcgacttttaatatataatactaagattcatggtttgaaagtgaagagtgcatcattaagatatttaaatgtatgttgcagata

SEQ ID NO: 103856 - DNA, 720 bp, Mimulus guttatus
  Intron number 1 from transcript mgv11b020720m (locus mgv11 b020720m.g) derived from phytozome v7.0 (chr-ID scaffold_1 52; pos 573187 to 573906 reverse strand)
cgcatcaagaaacgtgcacaaaaacactcgctaccaaaagatacgcacataagtaaaagtacaaaatcatgcacaaaattactcacgcaaaaccgcattcgcaaaaaagatcatgaaaacacaaactacattcctaggacattaatataaatcaacaaacgttcacaaacacactcgctcgaatggacatgcacaaacgtacatgttaaaaaacatgcgcaaaagtgcattcgctacaatgttcttaaaaacacgaaatacaaaaaaaaggtcgcccaagatttagcagacggagtcagcttacgggtccatggtccccttggcggcgaaataacactcaacgttacatttacgtttatttttttctattgatttatttatatttctgtattaattggtggatttagtattctataggtacacattgataattaggtgtccatgaagcaaaaacgatcaaagagtaagaaaagagttgcaattaggaaattaaaatcaaattagaagagaggatcccgcaacatcttcggtagtgtcaacgaagtcgagcataaatttctcatccggactcaaatcgactggttccggcggcattagaaagctatttcagcatgctacaattcctgtctaatgtcaaatttccaaattcaaactcgaacatggtcaaaattggattcaaacagcgatcatgaaaatacccgctacagttcgaggacacga

SEQ ID NO: 103857 - DNA, 643 bp, Mimulus guttatus
  Intron number 1 from transcript mgv11b016390m (locus mgv11 b016390m.g) derived from phytozome v7.0 (chr-ID scaffold_1 8; pos 94818 to 95460)
ttcttgaatcaggtgccaaaggtttcatagattcccatatcggttgtaatttatatttagctttggttttgttttcgatgagtagctttagtatgttttgaacttttgattatttttttaatagagaattattttcgtcttcataattaaggtgattattgttaaatttttaataccagtttttgttcttcataattatatatgtggttctgaatgctatattttattacaattcaccccctactatataaaaaatttaacaattaaacccatgatagttacatggtaaaataggattcgtggaagattttgaaatttaaataattcagaatatacaaaaatagaacatttaatggaaattttgaagtcagaaaataagcaaacgaacagaaattcaaacattaaaattaaaacacattgaaaaacaccatacctaagcgtacaaatttattaaattccgttgatttttttttacgacctaatacttaatagaacgattgattaatataaccattaagattattataattataataattaatgaacaaacttaaacatcaaataaaattaaaaatctcacaaatgttattccccaaattaaacctaaatccaaattaatccctatgttgcaggatacttctaa

SEQ ID NO: 103858 - DNA, 821 bp, Mimulus guttatus
  Intron number 2 from transcript mgv1a021589m (locus mgv1a0 21589m.g) derived from phytozome v7.0 (chr-ID scaffold_68; pos 8487 to 9307 reverse strand)
aactgattggcagccttccaagtgacatgtgcagctatcttccattccttcaaggaattcacctatctagtaataagctgagtggcgaaattccatcgaatctatcagaatgttcacaacttcaactaatatccttgtcttacaactcctttagtgggcatataccaagagagattggcagtttaaaatttcttcagacgttatatcttgggggtaacaacttaaatggtataattctttgccttctttgttgaattaggtttatatatttcttttatgtttctcgttcaaattcagcctacatgtagattagggtaaattacaaccacccctcgggtatggttaaattatgaaacccccccccccccacaccctcctgtttgggtaattacaacgaccccctcaactataaatcttcttacacgtccacccttgcggttttaaatttagtcgaatcttagggattatatggattattatcacttttgtacacgctttatcccactcgaacttcacattttgaagcaagatgatcataatatttgttttttggcttgtatatatcagattgtgatgcatcggaaactgtatttttacacaaaacaagtacaaactagagcacattccataaaatctatatgattatgttgaatttgacaccataagggtggaggtgtaagaaaaagtcatagttgagagatagatgtaattattcaaacaagaggggtttttttgtaaattgaccaccctatattttttgtaacagttgatttgtaaattccataggtgttatcccgttcgagattggcaatcttcagaac

SEQ ID NO: 103859 - DNA, 358 bp, Mimulus guttatus
  Intron number 2 from transcript mgv1a019737m (locus mgv1a0 19737m.g) derived from phytozome v7.0 (chr-ID scaffold_13; pos 326736 to 327093)
ctccctctttggcccacttccccactcgactttaggtaacaaaactaattacatattattatatcccatttctttgctaattaagtcaaaggggtcggtcacctattcatctcaaaatttaactaaattttgattagaggaataactaagaatttattatggcctaattgattgagtaggatagtaaatgtataataaattgagtttgtcgcgtagcgctgttcagtgttcagtgcagtttacacatctcgtatggtttgaagtttatctggttcatatttataatttttgaaaagaatatattattagttaatatgaatattatattgtgaaaaaaacaggcaattgggagtaacat

SEQ ID NO: 103860 - DNA, 754 bp, Mimulus guttatus
  Intron number 2 from transcript mgv1a023759m (locus mgv1a0 23759m.g) derived from phytozome v7.0 (chr-ID scaffold_36; pos 444771 to 445524 reverse strand)
gaactaacaactggttaattcatcttgaggttgttcttcttgatatttttttgttccattgtaatatgtatatatatatagttaagtaattacttaaatcgtcttgaggttgatcgtttgattaggggtggaaatcggactgattggcatgaaactagtactttccgaaaaattatatttttttagttgaaaaaatatccatttttggaaaaagtatcagaatttcgaaaattggaacggcaaaatttgttccaagaaattttaatcggcggaattcggaatttccattttttttagtcacctataaattataattaagaacatcagaaaatgttgaattagaagtctaattttcagaaaagaattggaattttcgggcactaaaatcggattcggaattgtagttccaaattttttttggaacttcaaattcaaaatgaaaaatattgttccataatcagaaatattttgtatcgaaatcgacataatttagagatttcgtccaatttccagccctaatcttgatcggtttcattttccaagatctagtcatatgaggaaaataaaatatgttgagttgtatgaatttgaatttcctaattgattaacacgtatatatggtcgtaaacgaatcgagtcgagcataacacatctcaagcttgtttgaattcttatcgagcttttaaatttgtatttctcatttattttctaaacgagcttgatctcgaaccgagcttcatacctagggaggagg

SEQ ID NO: 103861 - DNA, 596 bp, Mimulus guttatus
  Intron number 2 from transcript mgv1a014552m (locus mgv1a0 14552m.g) derived from phytozome v7.0 (chr-ID scaffold_24; pos 1840567 to 1841162 reverse strand)
agaagcttcaaatcaaacgccttcttctcaaagtggtatttcttttttcttctttttttttttgggtatcaaattacgaaaaacgccctcatgtttctgcaagtacaatatcgaccccctaactatgaattttcttacacgttcatccttatggtgtcaaatttaacagaatcttctagatttcgtggaatgttctctagtttgtactcatttcgtgcaaaaatgcagtttcttatgcaccacaatttgatatttacaagctaatagatacatcttatgatcttcttatttcaaaatatggagctcgaatggggtaaacgggtacaaattgaagaatattccgctaaatttgacaccgtaagggtgtaaaaaaagttcatagttgaggggtgatttgtaattatcaaaacgtgaggggggttcgtaatttgaacttacttcagggaggtggccgtaatttacccaaatataaattccctgtttaaggcactgtttggtcatggtgtgccaaaattacagaaataacaaaaattaacccaagttagtttgatcaaagtgcagcttttcgggtcagcttatttgggaccatttgggca

SEQ ID NO: 103862 - DNA, 779 bp, Mimulus guttatus
  Intron number 1 from transcript mgv1a013722m (locus mgv1a0 13722m.g) derived from phytozome v7.0 (chr-ID scaffold_48; pos 163087 to 163865 reverse strand)
tacaggtaaatatttttttgtttatttttttatatgattcggagattaatcatgaaattatcaattatgctttgtctatttatgccaaatctatggtatggatttttttttcttacattgtggaatgatttcatgttcgtgttcttgattggatggagtcatttttcgtataaatcgacacaattttttgatgttttagatctgagattcagcaattagaacatgatcatgtatattttcatcgaattcttcgcttgatggttagaaatataaatattagtgatgtcttacattacatactgaatttgagctggagattgaattcatagtccgtctaattgttcgattatggtttctataattgagaatatatatgaagtctttgcagccattcgttgctgattagatggtttcgtgaaatggttgcttagggtgctagtaagttgagggaaaaaaaaaaatcttgataaatgaaattaatcatgcttaatcgtgtcattatccaagattcttgcttctaaagcaacatctatctgtgttcaatgcttgaagtttgtgctaaacccgtttcgcttgcaatgcagacaaacaaatgcttgtttgttcctggaagtaaacattctatcaaaaaaattccatcttgtcgtttgcttttcattcacgagcaggctttaaactttaaagtcgtattgtttttcgtacgttttccaatgctcgaactaattacaaaatttaactatttattattgcagaggggagaaggcattttgcagtgcaga

SEQ ID NO: 103863 - DNA, 629 bp, Mimulus guttatus
  Intron number 1 from transcript mgv1a021084m (locus mgv1a0 21084m.g) derived from phytozome v7.0 (chr-ID scaffold_3; pos 180683 to 181311 reverse strand)
tcattctcagccaacctggtggttactccaccgaggtatatatattttcagtctcagaccttcaaatttctccgattttgctccgacgtaattaattgattgattaacgcagtttattttaatttaatttgattttttttagtaattacagaaatggtgcggggttagggtttcactgtattgattgtgatttgatccatttgtagattctgttttatggagctcaagtaatatcgtggaagaatgaacatgaacaagagttactttttaattcctctgatttaattaattaccagtggtttaattttaattttctgtgattaatacattatgttattaattagtgtgagatgatcgatcttgttgtatattccgataattaatcaccggcctaattaaaatcgggctctgttttactgttcttaactgtatatatataatcatgcataatatatttaagtaagggaattagttaattgtttttttgaattgttctatatttaagagtgatttaatcatgattctgcaaaggtcaattcttgatttgcatgtctcattcttccattaattaaaatatgtttatttaatttccaggccgtttacagacctcctcagccgattcgtggagg

SEQ ID NO: 103864 - DNA, 451 bp, Mimulus guttatus
  Intron number 1 from transcript mgv1a007495m (locus mgv1a0 07495m.g) derived from phytozome v7.0 (chr-ID scaffold_25; pos 431687 to 432137)
ctctcgtctcccgattgcagggtctcaaacgaaaggtatgtaattagtatcctttcctttttccccctttcggcactagatttgcatcgccagtttcaatttgattttggtttcgtttcgtgtgaattattaataatcttcagttcgtatggattttgtttaagaagaatttgatttcaatagagaatttgaggcttgtaatcttgatttcttgtctcgaagcagaagtatacaattagtattctggtttttcttcttttctaattcatgagttgtcgtctaaataatgcatgatgttattatattttaatcaaggaaattagatgctgtaatcttgttgaaattgaatgtagattgagtcattttcatctctgatcgataatatgacatttgttattcgttggttgatgaattagttggaagagggaagtcaaacagagcagttacaagc

SEQ ID NO: 103865 - DNA, 438 bp, Mimulus guttatus
  Intron number 1 from transcript mgv1a014336m (locus mgv1a0 12112m.g) derived from phytozome v7.0 (chr-ID scaffold_16; pos 650755 to 651192)
ctctcgagaagaaaggcgtcctcgccaagatccgtgttagcatttcactcttctcattttcaattttcaattttcaattttctagggttcaatttcttatttacgcgttttatttgcctgcttcgaaattgtagaaaatttgctgggattttagtcaattgttgttaaaatgcagaggcccttttgattttgttgatgattcatgtttgcccttgatctcgtctacattgtgcatcgaaggatatcgtatatctatttcgaagtgtgaatttccgttgttaacacatttattatttgtattaatattctcataattaaagtaatgtagcatatgatgaagaaacatacatttttgtcggtttgatatagacgatgaaagttgtacctttttcttggttattaggctgaattaagagctagtgttttcgaagcgataga

SEQ ID NO: 103866 - DNA, 325 bp, Mimulus guttatus
  Intron number 3 from transcript mgv1a013411m (locus mgv1a0 13413m.g) derived from phytozome v7.0 (chr-ID scaffold_255 ; pos 293915 to 294239 reverse strand)
ttacgcagcagttggacctcctacaggatttcagggtatcgaaaatcgaaaattttatatatttttttattcatttatatggtcgaatttgattcgatgaatgacattttaaaataaaaattagaatttctgtttttttcttttccaaaaaatatagaagtaaaatgatttttgaaatttcgacattttcgggaaaaaaaattaaaaaagaagaagaagagaaccgttttttcgttttcgatctgatccgtccgatttccatcgaaagatgtggctacgtgattattaatgttttttccattatttattactcaggtctcatttc

SEQ ID NO: 103867 - DNA, 689 bp, Mimulus guttatus
  Intron number 1 from transcript mgv11b021666m (locus mgv11 b021666m.g) derived from phytozome v7.0 (chr-ID scaffold_1 39; pos 283767 to 284455 reverse strand)
tcgatttatttggctctcacgctcaattacttcgggtaaaatctcatagcttttttttttatgaatgtaatgagcctatcctctcttctttattttttttttcatagcatagtcaaaaaaaataaaaaaacgaatctaatgcaaaaccaaaatacctaagagcaaataaatcatttctcgatgaccacaaagcaattgtagcaatatccgtaaagcaaagggacaaagagccaaaatcaaatgaatagctgattgtgcatgatttatgcatgaataactgccttcgcgaatgacttaaggcaaaatattctttattgccataattaaaatagtctattcagaagacataaactaaaccagcaaagagaaaccaagacttaaaatgctaatccaatgcattttattaaatgttttatccaacaaacgacaaaaccaacacagagaacacgcatattaatgcacgtagatatttaacaattatggttagaattagaaaggagcttatatccaagtttgtaaaaataaacgagtgacagaaatattgcgtatgcaatgaatgcatatcttgtctcattataaacattaaaataagagcaccgatcggaaacgcaaaacaaggggaaagacaagaatgatatttcctcttcatacctaacagattgcggactttttctagaccttcttcggaa

SEQ ID NO: 103868 - DNA, 965 bp, Mimulus guttatus
  Intron number 2 from transcript mgv1a001364m (locus mgv1a0 01364m.g) derived from phytozome v7.0 (chr-ID scaffold_11; pos 1350609 to 1351573 reverse strand)
gatctttttggataggtgagtcaagattccaatgcgcgtggtgtatgaaatggtactttataacatatttatgattctccaaaccaaaccagtgtctatttctgttctggtgacccatttataaaaaaaaaacaaaatggttgtttttcttccttttgtataatggaaattgaaagtttgatggacacattctctaataacaattgtcctatatgtagatggtagtctggagagcatagtagtgtaaatggtagtctggctgttagaggtttagttacaaagttttagacttaccaaaataatcatgagattgtttgctgttacttggaacatgtactttctgttaatctgttatttgaataatcattcgagtcaaatcaagatagttggtctgctaggcagtatttgttggggggaagttatcactttaatttcaaacaacaatgaagtgtttctgcgtaattggctgttggctatgtaaacatcttcttactttgacatctaggtcgttgagatttgggcattacccgttgaaattcgattcacgtccgaacccaagtccttttaatatatgcatataaatagccaatttctaggcacgttggcatgaaaaaattgcttatttcgctaggagaccttaccactttacaaattgtcccatgccaaatggcccaaaactgacacactaagtcttcaaaaagatctccgtcatgtgatcaaatctggtcaaaaaattcccaaatcttgttaaactagatggcaaagtgattttttttttgggaatgaggttgcatcattcttcattctggtactgacatgtggcactcagccacataccataatgttgctgtgattgtctcagttcatactcatttctggcatcatatagctatcaaccgtagagttttattgtttagttcttttgatgaagtatactaatatattgtttgtgcagaaatcagaga

SEQ ID NO: 103869 - DNA, 805 bp, Mimulus guttatus
  Intron number 1 from transcript mgv1a007430m (locus mgv1a0 07430m.g) derived from phytozome v7.0 (chr-ID scaffold_8; pos 1154787 to 1155591)
catatccaccaccagtctcgcgaccccagcactaggtctactacgtatttccgtttatttatttatttattatgactgattagtttttctatcacctaaatttggtagtgttcttcatattacaattttgtgagcaactagtttttgctgtttttaccttgattttttgtgcgattatgattagtttttctatcacctaaatctggtagtgttcttcatattacaattttctgagcaactagtttttgctgtttttaatgattagtttttctatcacctaaatctggtagtgttcttcatattacaattttgtgagcaactggtttttgctgtttttaccttgattttttgtgcgtgaacgaaaattatagatgctaaggataaggactttgcaattgttattatgagttacgattcgtaaaattattgaattcgtaaaattattgaatgcgtaaaattattgaatgctgaagattttgtgctgaaacgaaaattgtgattagtttttctatcacctaaatccggtagtgttcttcatattacaatttattttgtgagcaactagtttgtgcctagtttgtgctgtttttgattttttgtgcgtgaaacgaaaattatagatggtatgttagagtttaaggacttttcaacgaaaattaaaattatagatggtatgttagagtttaaggactttgcaattgttatgagttacgattcgtagtaaattagtgaatgctgaagattcacaataaattgtggctttcgtgaaggtacgacatctcgccacccgtgaattggggaattc

SEQ ID NO: 103870 - DNA, 749 bp, Mimulus guttatus
  Intron number 1 from transcript mgv1a006195m (locus mgv1a0 06195m.g) derived from phytozome v7.0 (chr-ID scaffold_1; pos 177057 to 177805 reverse strand)
aatcacaacctcgtttggccttccctctcttgccggtccgaattatttatttaatttattttattttttgtttaaccctagggttttgtttttgctgcgtgtgtgtgttttggttctgtttttttttttttggagttgtcttgttttgtatttttttggtgttgtgttttgaattcgcggcattgttgttgaaatttgtgaaaatgtaggagcaattctgtggtttttcgggcgtgctcctagttgatggtaaatgttggcagtaattttgcttcgctgtgtgggttgtgtcgtaccgtttatgttcgtttacggttccgatttcgcacctgtgaacgtattgtgtatctattggctttgttactgaaaatttgtgaaatgcatgggacttttttgtttttgttttcttattacctaggaatgcgtgatgctctggattttcgtttgctctttttaaacgatggttattcttggttcgtaatttggttaactttttttgctggtacgacatcacctggattctgttgtatttccaccttcgaaatgctgtaatttattccactttcatacgcaattaacctaccaaatagttgtggaaaatgacagtataattaaatcgatccaatttttggttgttaaggctccacagagaagaaaatgaaaatacattgttttatttctttttttttttatctacaattcgacattattatgttacaaaattatagttgcatcttttactatcgcag

SEQ ID NO: 103871 - DNA, 553 bp, Mimulus guttatus
  Intron number 1 from transcript mgv1a001405m (locus mgv1a0 01405m.g) derived from phytozome v7.0 (chr-ID scaffold_196 ; pos 146073 to 146625)
gtttgggttagctacattttccccgacggcagctcgtgagtgttcggagttcaatttttgttcgcacttttttttttttgaattttgaatttgttgtgtgatttggtggggtgtttctttagcatttgttgcacatgtttgcgttcttagatttattttagttttatttttggggaaatatgttttgaggatagaatttcgaaagtagtgtttgtttatattttgggaggagataaaatactatggacttgtctaaagatgtcggaaaaatgtattttagaagaagaatttgaaagaaatgtagtgatgtttgattgtttctagttactctagcactcaaatcatgtttggaagagacgcaaacatttgaaattgttttggtaacttttatgagaagttcgataatcgattattagtttttgggaacaaaatgaaaacgttactaccgatgttatgatttaggtgtgattgttgtgtattaatgctacatattcccgattatatgttcattgatgaattttgatgtttttaaggtacgaaggcactgtttggg

SEQ ID NO: 103872 - DNA, 666 bp, Mimulus guttatus
  Intron number 1 from transcript mgv1a004674m (locus mgv1a0 04674m.g) derived from phytozome v7.0 (chr-ID scaffold_27; pos 1713925 to 1714590 reverse strand)
ccggtaaattccttttcctcaggtcgccgttttttgatttttcgatttttttgttattttcctcaactgttgaactctgtacatgaatcacttgtggcaaattatagctggtgtaatactgtaacctaattgtttagtagaatagattacgtaatttctcaaggcaaaaattgtagagttcgcaaaggtatttgctttgagtaattgagcttttgttcgacttagattgattgagcaatttttttactttactccatgacatgtgaatagttgttcccttgcttcgtttatatggcatgataattatatggtggtgcattatttaattgatgtttttccttgttaccgttgtcgtttcgactagctaggctgtattgatcttgtagtttattccctcttcaagtaatttcctattatgaacttatgatctcgtgtggctttgatatagtttcagaaggtaatacatccttcttggtttttttatttttgcgcaattatcttaaattataaattttgaccaaacttagtgtttttatgctttaccttaaagataaagaacatgagaaccattgaaacatcagcaacccaagataattggtttactatgaattcaagggaaatacatggtgcttctgctgaataattctgtgattataatgtgcaggg

SEQ ID NO: 103873 - DNA, 521 bp, Mimulus guttatus
  Intron number 1 from transcript mgv1a013717m (locus mgv1a0 13717m.g) derived from phytozome v7.0 (chr-ID scaffold_4; pos 3971576 to 3972096)
caatccatcatcctctgtttccactcgctctcgtacataattttcgttttaattcaaaacgaatgcacagtgaccctgtgtttgaatgtattatttaaatgttttttttttttaaactctgctgttagtgttgtaatgatttggattcgtcggcctgattcatttgtcattcgttggtttgtttttttaattgataaagataaagatactctattggattcttttggcatcattttcgcttgctcatctgtctttgtgaatttgttctgaaagtgggattttaagcgtatttgttagggttacttgtgtaattgagatgcttaattccatgttgtttcgggtgaaggccgtggattaatatgcgtagatgtaaactagaatacatattgctttttttttgttgcaatgtacgagctcttcatactctgcggatttgaaaattaagcggctaatttatttgcattttcttttttttgaattgaactgttgttaaacgattcgaaatatcgtagagaaaaaga

SEQ ID NO: 103874 - DNA, 931 bp, Mimulus guttatus
  Intron number 1 from transcript mgv1a000837m (locus mgv1a0 00837m.g) derived from phytozome v7.0 (chr-ID scaffold_30; pos 342892 to 343822)
cgtatccaactccgatacagtatccgatttcaaaagtatgcattctcttattcgctattttattcctatgtatatatttttctgcatttatgtgattgaaatggtggtctccagatatatacatgtgtatatatatgcacattagtgcaaaatgttgatcctttgaaattgtaagttatgtgaaattttgtatgctgccatggaatgctgttgcttatttgaaaagaaaagtaataataataataatatcatatttacgcgtagagggagcttcgagaattgactttcgaataataataataataatatcatattcacacagaaagaatgaatttctgtgtctgggtgtgtgaaaggggaaagagagggctttttttcttttttcttttttaactccgcaattagtggtgggtacggttactggaggttttttcaggtgcttttgtagagtgggagacctttttgaaattttatattcccgttaaatataacctcctctgtacatgcatgtctgtaaatgtgtgtgtaaaaattgttgccaccgtaaagtgaagggtcgggtcggaacgggacggaagttggaaacatgagattagattaagaaaaaataagaaattgggttgatttttcttttggggttaaaaagcaaaaatacatatgtcaatgttggtcgtaattttgagaagtcagtcagtcagtcagtcacacttggtcgtaagaagaaaaacaacactttacacttatggttcgaaaatgatgattgaatggtctgattgaattgcaaacatgtctagataaagttttcgacgaaatgtttatgccctaaactttaataaactgatggtagatcagccttttttttttccccctttcatactcaaagttttcttttatatattttgtgcgtgcagggaagacagcgttggaacat

SEQ ID NO: 103875 - DNA, 693 bp, Mimulus guttatus
  Intron number 1 from transcript mgv1a010209m (locus mgv1a0 10191m.g) derived from phytozome v7.0 (chr-ID scaffold_85; pos 546587 to 547279)
cggcggcgaaagagatcaatcctcttctctctaaggtagcctcctctctgtatgtatctatgtatctataattgtgtgtatgttattcagctgatctttctctctgtatgcatgtgtgtgtatatcttcgtagcttctgtattcatgtatgaaattgatgtatgcttattttctgtatgttgtttaaatgtttatccacgtatgaagcgtattgatttattctagagattattttctttttaaattacagatctgtatagatttgcgatgaattgtgttttcgagcatgatatcataatttatgtttttatgtaaacagatgttcttatcttatgatgtgtatctgttggatttgatatcagaatatgaattagtcattttatgtattcatatgttctgacagtatcaaatatatgagttggttttgatgtcaaatctacgattaaatttgaattagtggaaaattaatgatttactggatcgaaatatttgtgttgcttgtactgttgaatttactgtattagatctgtgtgttttttgattttgtttgttgcatgcttgttgactggattaattgatattaattttaattaaaatcatggttaaggaatttttaatttttaattgacttctgcaattgctagtctgaatagtgtttattctgttgctgcagtacagttttcaaggttcaac

SEQ ID NO: 103876 - DNA, 960 bp, Mimulus guttatus
  Intron number 2 from transcript mgv1a004768m (locus mgv1a0 03110m.g) derived from phytozome v7.0 (chr-ID scaffold_37; pos 613249 to 614208)
agcttatccaggtgctttaagcatttcagattctgtttttttattactatgtattgtgtatttataatttatgcactgatattattacatatatcacactcatttagtaattagttgcattaactcgacacagtatatatggtttctaactgtcccgatatcttggaatggtttgtttggtgttatgagaggcgattatagtcattgtctgaattagattatttggtaactattattccatccgtttaaaaaaacaagtgtcattttggcaatattattttttcccatgtaagagtcactttagaatttcaaggcgaataaatattttcttttaccaattttgccatttatctttgattttttgagctcattaatttgtacaattaatttgtcttcaagaaagagcacttagtgttaaaataatgagattaatgaaaagttcaagagtccaaagaataaatagcgttcaccttgtactacgaacaaaaaacatgaagattgaaaatttcatggtggtgagcaaaaagttgacaacccaatgaacttagacctcaaacctttgcaaagaagtacattcaaacaagaaagttgtaagagacttcgattttcaatcttgtctttttgtgagtaattgaaaatcttagtcttgttttcagtggttaatttaaatttccatttcgaaagttgtaatggaaaaattccaattatattccgctagttacttttagtggttgaaatcttgttttgttatgcaccggttgactgaagctttggcggaagactcctattaacggagataagcttggcgagttttagatattaaaagctcatttaatagtttttgtaaagggcaatttggagcttttccataaaaaaatgaggctatttattaggtttcttaatctctgtgcatttaccttaaaaaaacacttatttactaattttataatattcagataa

SEQ ID NO: 103877 - DNA, 1023 bp, Mimulus guttatus
  Intron number 1 from transcript mgv1a009665m (locus mgv1a0 09665m.g) derived from phytozome v7.0 (chr-ID scaffold_114 ; pos 841057 to 842079)
agcagcccgagtacaatttgttctccaggcataaggtatttctggattctggatttgaatttaattgttatatcaataattgaagatgtggatgtggtcatatatggcaattatgtaatattgatttgctgttatgagttatccctttcgggcaaaaatcggaaaattccattgtgcacattaaaagctgtttgaaattttatgatttggttttggtggctgtgtgaagagtgggtgttgttttttaattgtttcttgaatatatattgaattattaatatgtttgtttttatcagcgatcgagaatatcgtgtggttattccgtttcgtaattcttgagaaatctattattcttttctttggtgtgtgcgtgtgtctgtgaactatgaagttctgaaatttattgtatttttcgtgttttgtggtaaaatatacagttaaaaatgcaatctttttgaagatttttcgtctgtttcggattgtacttatgatatcttatatcagtttgtattcaactatggtattgttcttattgaattgtggatttaattgctttctgattttttttatttaattgttatctcagtaattgaatatgtagtgtggtcatatatggcaattctgtaatattgatttgctgttatgagttatccctttcgggcaaaaatcggaaaaatccattgtgcacaattaaagctgtttggaattttatgatttagttttggttgctgtgtgaagagtgggtgttgtttcttaattgttttcttgaagatatattgaattgtttatttgtttgtttttatcagcaatcgagaatatcgtgtggttatgccgtttcgtgtgtgtgtctctgtgaactatgaaattcgtaaatttgttgtatttttttcgtgttttgtaaaaaaagctatctttttcaagattttgcgtctgtttcggattttatttatgatatcttatatcagttttgtattgaactatggtgcaggttgagtcagagtttctccctttgtacactaacta

SEQ ID NO: 103878 - DNA, 865 bp, Mimulus guttatus
  Intron number 1 from transcript mgv1a016301m (locus mgv1a0 16301m.g) derived from phytozome v7.0 (chr-ID scaffold_4; pos 1524469 to 1525333)
ccaagctccggcagtctgcccgacccgattcactggtaaaccctacctgcttccttccgattccatttccaatttctatttgtgccggtgacattttttttgttcgccgaatttggggaaatatctactgcttatgtgattcgaattaggcgatagtcaaatattgatgctttcagtatgtgttcttctgctctgaggtcaaactcgattagcttgcctgatgagatggttattgcatttgttttagctgtggcaattaggtcagaggattagaagtagatactgctgctgcatcaagattatctctagcatttttgtaattgatttttacttttatccagtcttgtgatttccgaaattggttgggcggttaaggaaacgaacattcgacaaacaaaaagaacttaatctatgttttcattcaatgagaggtgatgcttgatttcgattatgtgttttgaactttgttttaggatatagtttatcgacgaaatagttgataacccaaattgccgtcatatgcaacttctcagcatccaatagtagcgaagtgctatgtatcgtaattgataagataaactgatcacgcatactgtatatgaattgtacatttcaaaatgaaccatacatatcaatctagaacaaaagaagaacacaatcagggtggagcaactaggtttgaatatactgttgtaattcctcaagcatgttgctttaaatatttgagtgaagtttgcctgcctataggaggagatacgacctcctcgttgattttctctcttcagcatcttataattactggtaattattatttcattacatttaatggcaatgccaaaattgacgagattgtgatgatcagaaa

SEQ ID NO: 103879 - DNA, 430 bp, Mimulus guttatus
  Intron number 3 from transcript mgv1a021678m (locus mgv1a0 21678m.g) derived from phytozome v7.0 (chr-ID scaffold_105 ; pos 747599 to 748028)
cttaagaggtaataattggtgaaatttggagtcaaattgagatattttagtcatttacacacctctagatattgactgatttttttttgtaaaagagttttttatcgcacccatttataataagtaacatgatggacttatttgtaatagactatttttttaaaactcgtaatcctctaaatggtactttttagggagtaatgaatcgtaagaggattttttttttctaatattaataccacaatcatgattagctcagagttttccaatcaaggcatcgagaagtcaattcttctttgtttttatgctcgtttaaaaggtatatatgaaaaatttgttggtaaattaaaaaaataaacggaggaaaaatgtttcaaataaaaattttactgcagatcgaccgaagtcacaacctccacttgattggcca

SEQ ID NO: 103880 - DNA, 772 bp, Mimulus guttatus
  Intron number 1 from transcript mgv1a014225m (locus mgv1a0 14225m.g) derived from phytozome v7.0 (chr-ID scaffold_64; pos 1063340 to 1064111)
tgttcaacatttttttatatctagtaggcctctcagtaggattcgaattcggatgaagttctgaacatctattagagaaaaaagaacgaaccgatcttgtaggaataaccgtaaatagccgggacattgaggaatatccagaaaggcatttcgggaatcaatctggttctatctttgttccttctgtttgaagaaaggaaggatttcaaagaatcgatctttctttgactggttgaatctctcgttgattgataatgtgtgatattcggaatcctcattactaatggattgcaaatgatctctggatagatcaaaagatcctttcagttggttagaatctgttacttgtaccaaattgtgtctggcgacgtgctatagggaaagtagttttgataaagggcgaaagatctgcgtaatttcagtatttaactgagggtatttatgggaaatttcaaatagatgggcatttttggagaactaatttttgttggataaaagtgcaaataagtttccgcaataaaaatttatcacgagatattatgccaatgtttcataacatagggtgtttattgcaattatcaaatagttttaacattaaataaattatagcccgtaaaacttgggccgaatttcacttgaacccactaaaacaattgaaaaagcccaattagccctcgctttcaactaaagggttcttcttcgtctatgccaatctcccaaacactcactattttcagacttcaccgtccgctttttgtctccgccgccgacc

SEQ ID NO: 103881 - DNA, 1006 bp, Mimulus guttatus
  Intron number 3 from transcript mgv1a025944m (locus mgv1a0 25944m.g) derived from phytozome v7.0 (chr-ID scaffold_125 ; pos 376310 to 377315)
cagccacctaaggtatgtattggttcaaagtttcagtatccgctcgttttggaatatttgaactatgcttctgtcaatgaattataagtcttaatttgagatgttttgcatcatatgtttttttaacttatctattcagcatagctatatgttagatggtgcaatttagaaacttaatttgctttaactttaggaattttaggcataatgaaggatctccaaatgatctatgtctacaaacgagacttgattcactccatatttaaaattcttacttcttagattaccttcacgttgatcctcagagaagccgacctttgaggttatctcgttgttttgagtttctctctactgtacaacaaaaaagtgcagcgtatttaattggcatctgaagctatttagctgtcgaaatcttcttgttagtggaactggaattatttagaatgacctcacagttatgaatgtggctataaaatttaattatgtaatggtgtttttctatttcttgaagtgtacattagaaacgaaatgggattgatatcaagtggggttatacagatgataagtggggttatttgttgaagagcagatttcttatggctgggaaaccatgtgatatgctagtctagattgaatcccttaaaaaaaaaaaaaaaactccggctgcaaaaagaactttgattaaattaaaatccgtgactcagttttcgtttgatcgcaaactagcaaaaccgccaaagatagcgtagccaaagttcttcattagaaacctaacatttttccatttagctagtatgttgttattttcttgagggtgttgctttagttatacatgttcgtattaatttggttgctattgttaaggtgctcttctagtgattatcattatttttcaatagcttggctcgagaagtaaaaatgtaccagtgtggactgtattttgatttgctactggattgtctaatattcagcttctgtgggtgaaagagaatttgccagagtcttg

SEQ ID NO: 103882 - DNA, 941 bp, Mimulus guttatus
  Intron number 1 from transcript mgv1a027066m (locus mgv1a0 27066m.g) derived from phytozome v7.0 (chr-ID scaffold_7; pos 3277202 to 3278142 reverse strand)
tccgagaatccattgctcggcccctcgtcttccgcgtgagtctctttttcttcctttttttccgagatctgtaatttgtggtcaatttacagaatccaaattttgttgcaattgggttaattttcgttttgcgtgattcaattttgtgtttccctgattagtttcgactttctcggataaatgttttagttttgagtagattcaattgaggattttgcacctgatatttgtttgatgctatattttattttctgtgtaccaatttgatgatgaactgttgattttaatctcttataacaatgtgtcgtcgctcacgtgttatatttcacttggtgattccctgtttcggtctatcttagttagaagttgggtttgtgagtgattcggggttttttcgaaaatttggatttcaagtcatgtatactacttgcacttaaaaatcagatttgttcactgaaattatttgtaatcgcccgttatatgggctcgggatttgaagttatgtagaatctggattagactttcgtgatgttttggctgttctatgcacatccacaagaagataattttctcaacaaacaatgagtctaatagtttattttgttgctggctagtaagaaaatgctcacgtgatgcaaaaagtgatgtacacgtaatagtatttcattgttctcgtattatggtcaatcgaaagtacacttcttggtgagttagatattttgatgcttagtcatgaaaatcagtgtgtaagacttcgaatcttaagttcggttgatttcgttgctttaatgggccaaattgctcccgaattatctaaatagtaacttcagcagaatattgattaatttccgatttttcgtttattggaagattacattaattgaggaaattgttttctttgtgtaggcttgatacagtgggggctcttcgtctaagatatt

SEQ ID NO: 103883 - DNA, 512 bp, Mimulus guttatus
  Intron number 1 from transcript mgv1a006201m (locus mgv1a0 06201m.g) derived from phytozome v7.0 (chr-ID scaffold_5; pos 1109327 to 1109838)
cgccgtcgctccggtcaaagatcaaggcagctgtggtaatatatatatatatcttcaactacccttttttttcagtttctaattttttttttattttctttaatttaaattcaatttctttggagaaaattaggtgggccacttcaaaatcttgcaataagattaagtagaaagtgatgagtttatgatggttgacttttattaccaaatacaaacaaattggtttttttttttcatctaataaagattgggtttttaggtttgttttgttgtgactgcagttgatttgttattttttttcgtaattttccgaagatcgaaacatgtaatatatatatacttgttgatgttcttgtttgcagtcattgtgcatttggggggaaaaaaatggtttttttatatgaattcatttactctagtggaatcaagaatctctgatttgaatttgtttaattgaaatttgaattgcaattgaagggagttgctgggcattctctacgatagcttccgtg

SEQ ID NO: 103884 - DNA, 577 bp, Mimulus guttatus
  Intron number 1 from transcript mgv1a025491m (locus mgv1a0 25491m.g) derived from phytozome v7.0 (chr-ID scaffold_363 ; pos 26226 to 26802)
gtaaggacacccattgtccggccggacctgcgaaggtgtcgccggaaaacgacaaggggtgacgatacactgtagagagagaaggggacaagggaagagagagaaacggcgcagcagaacaaagctgctagggttgagagaagaaagaggagtgggtaaatggagggctcagattgaagccctctatccgatggtcaagatctaggtttgactgatcagtgggcttaagtaacattgggcccgatttcccaagttgggctttgaattaaaatagctattgggcccagatcacaacagatcattttatgtgggctcaatacttaacaacatttatcttattatcttaactcttaagcgatagaggttgtctcgtccatctattgattactcttatttttttttttaatttgagattccattattgaagcatagttcaaactgcaattgaagataacagtaatacattttgagctgaaagtaaatttttgggtccctttgctctatttgtttgtcaaacataaaaatttgatctacttttacagcacgttttggaaaggggaaaaccgcttgtacgtag

SEQ ID NO: 103885 - DNA, 303 bp, Mimulus guttatus
  Intron number 2 from transcript mgv1a012892m (locus mgv1a0 12789m.g) derived from phytozome v7.0 (chr-ID scaffold_261 ; pos 112122 to 112424)
tagctactgggattttgtctcacgacggtaagttcagagataaatttttgattccgatttttacggtgggattgtgaattaaattcgcagtatgtttattcatcgaagattttcttttttcataggaaaaaaattgaaattgtgtgagagtttcaattgaagtttaattttattttacattgcttgtaaattggattatctcttttacgaattgaatattctaaggaagaacaattgtttgttcgaatgggcgataattattaagttttattgcgacttcgttcgaaggtcttgtagataaag

SEQ ID NO: 103886 - DNA, 703 bp, Mimulus guttatus
  Intron number 2 from transcript mgv1a006445m (locus mgv1a0 06445m.g) derived from phytozome v7.0 (chr-ID scaffold_60; pos 733776 to 734478 reverse strand)
accacgtccaatcgttcctttgcgtgctctctacggtaaatacgacttgctatgttgattcgctgccatatttcatatttttgtttgtgccatcaatttatcttaaattcggatatgaagatagcgaggggctttagtgttgactatggatcgagaaatttatgtccacatatcgtttatgttgactttttttcttgtgaaaagattaacacccatatcgttttttataccttttacttgccgtacgatgatcttcttgatacacataatctattgtgctgtttcatgggttttcatgtttctgtccatgtagatatatatatttattcgacttcaattacatttcagatggattttagttattcccctttcaatcatatttacgcggtttttttatgtcaattcttttttattttgattgttggtttatttcattggacactggcttctttcttgttttgattggtcatggaaatgtttacgaggtcgtacaattatcactcgtactaggttttcccgttcgtattctcgaacccgagtcaatccaagttttgagtcaagactagaacttcaaaaatatatataagtgatcaagattgaatttttatttttatttttatttttttccgaatgaaaatcaactaaaattacgatcttattccgctcaggtcgaaaaggcgaaggaagtttaccacgacgagag

SEQ ID NO: 103887 - DNA, 639 bp, Mimulus guttatus
  Intron number 3 from transcript mgv1a016358m (locus mgv1a0 16358m.g) derived from phytozome v7.0 (chr-ID scaffold_39; pos 371414 to 372052)
gactacaagaccgagttaatctgctgaaaagggtgagttttatttggaatttataatttaattggtctctttggtttgggctggttcagatgttttaatcgggaatctagttttcagaggtccatgtagatcttggtggggtgtaatttgagagatgaaagtgttttcccatgaatgttggattaggtttttgtaaatggtttaagttgatggggaagtttttagggtgcgattttttatgtttacatcttgggaaattgtaatttatggcagtcggtgtgatgtttatttttagtaaaatggtgctttgctataagatttttttggagttaaatagtcgcacattacttatcataagttggttgatcatttgaaacccaatagttggtccgtctaaaataagtgatgagtgaatcatcaaatcgtttaattctttcaaagtgagtaaatcttaaatggccgttgccctcttctctgtgtttcatccccgtgtattacttatttttgtgtgtgcttgattttgagtttcgttaagttttttccttttttgttcttatttgcatcagaaaattgcaaccgggattattgtcatttacgtgctgactacccttttatgtgaacagttgtcaggtgatatac

SEQ ID NO: 103888 - DNA, 1025 bp, Mimulus guttatus
  Intron number 3 from transcript mgv1a018197m (locus mgv1a0 18197m.g) derived from phytozome v7.0 (chr-ID scaffold_68; pos 294418 to 295442 reverse strand)
caaaattgagctcacttttgccactaattacttaggtacctctctctctctctctctctctctctctctctctctctctctctctctctctctctctctctctctctctctctctctctctcaatcaaaatcaagagagagatagacaacactatagggtgggttgaaatctgatgaatggggtcggaattagcactttctgaatctctatctctctccaatcaagagagagatagactaaactaggggtgggatgaaatatgatgaatcgagtcggaattagcactttctgaatctctctatctatctccattaaagagtgagatggataacactaggggcgggttgaaatgtgatgaatcgagtcgaaattagcattttctgaagaagcaggaaaataaaaccattttttcggaagtgaaaagctacgaagatgtattccaaaaaaagaaaccgaagtttgagtaatgaaaaagcttgttttcgaaagaaaaaaattcggattggattaggcggaaatgggaaaatttgtttttcttattcacctataatataaagtacataatattaatattacaagagtatttaattttggggaaaaatgaaatgtctgaaaattaaaatcgaaaaaaaaactacactctcgtacatatccaattctgatccgcaaaaataaaaataaaaactttcaaaattgttccaagctcggaacttttcgaatctgaatcgacataattcgaaaattccattccaatttccaacccgacaaaactggtaaaaaaaaatcactttccacccttgcatttcatgataaaaaagttgaaagtttttgtgggacttcttttcctttttctgaagaagtgatagttataattattatgcaatttcaagtgtgtgacagaacaaatatgcaaaaaatgatttaaaaaattaaaaaaaataaaaaaggcctgaatatcatgacaagtgaaatgactattttgccccttttgttttttttgttaggtcattttctattaacagaa

SEQ ID NO: 103889 - DNA, 658 bp, Mimulus guttatus
  Intron number 1 from transcript mgv1a008821m (locus mgv1a0 08821m.g) derived from phytozome v7.0 (chr-ID scaffold_69; pos 678770 to 679427 reverse strand)
aatcaagattcagaaatatttgttggtttgatcatgtaatttatcaaatttccatcgacccatctcggattttggttttatctgttggaattattgcgtttgtgtagcgagttgattagaaataattatttattgggtttattttctcgatcctgattttgatctttgagaaatttgctgagaatttttattatctgttcataatcattttttttgggttgaaatattatactgaatgtttgtattacagcaaattagctactagtttatatgcatgtgttgagttgttttttttttgctggagaataatagattggaagtgatctcgattttcgagaatcgagttattttttagaataatttgtttatgtattttttgtcagttactctgaattgtgagatgttaagtaataggattatgtactattctgttagtctgttacttaggctgctgctgctttgattttgaattttaattgttaattttatcgtctgttatttttatctgtattcgaggtgctgaactcgattggctcggttttcgaaatttagaagctctgaaaattgaataattaaatgttggccgatttcgtgatttcttcaattatcagtaaaactattttcggtgacactcgttttttgtttgtgccagtttgat

SEQ ID NO: 103890 - DNA, 920 bp, Mimulus guttatus
  Intron number 1 from transcript mgv1a010939m (locus mgv1a0 10939m.g) derived from phytozome v7.0 (chr-ID scaffold_134 ; pos 731933 to 732852)
gccgcagaattcccagcaaggtatcctctctctctctctctctctctctctctctctctctttcattctcctttcaataataaacattatttaatttatatatcttttttcgaattttatttaaaattttgaattcttgaaataaaggtgtaattagttgtgatctatgaatctggacgttggaatttcaagtgtctaattagttgttcatagttatgccaatggaattaattcagattaattaccattaattaaaaaaaaaaaaaacttgtggacgccccggaatgagctctaattaattacaatgtgtcggttgtttagtttaatacttccttagtactaagctagttattatagatttgtaatatcaatatctcacttgacctcgtaagttccaagtcaactctttacttatagactaattatatataaatttagactaagatcgtacctcgtatacttgtttgtttgattaattatatacatgtctagattctgttggtcgtttcgttacaaaagataggttttttttgatacaagattaatgggaattaatgtgcaactttttgatgcacatttctttgactccactctagatattgcatatatagagctgtccaactttttaccaattcttttcttctttacaacaactccaaatgggaaaaataggtattgatgctcttcattaagattctctatacaacaaaaacataaaaacataatgttccatttcaataggacagacgggaaaaggatcgatatgatgaagtatatattatttcaattttctaaaagaataaatctataatttttattagtatgctctacattgtttgcatttttctctggatcaatgggattttagataataaaaaaacaacataagaattattcgacgataatatgcaggaggtagc

SEQ ID NO: 103891 - DNA, 596 bp, Mimulus guttatus
  Intron number 1 from transcript mgv1a007632m (locus mgv1a0 07632m.g) derived from phytozome v7.0 (chr-ID scaffold_30; pos 1326434 to 1327029 reverse strand)
aggtataaccaaaagtcgatttcttctttccgttgttttcagagtgatttttttttttgattttttgatttttgatttttgattttgcttttgtttaattgtttgatggggatttgtgtactggattgatttttccagtttttttggggaaaaaggaaaaaaaaaaaatcaattcgtttaaaattcgtgaatattcaaagtttaaagtttgagtttttaggtttctggaatagcccttttcaaaaaaaaaaaaaaaaaaaagaaatcttgaaaaattgcaaaaatgttgttagtttctagatcctatatatatatattttttaattccatgtatttttttcttccccttttctgttcatttatgcttcttctgcaattgatggtggacttaatcaagtctgtgtttttaatcttaaatcaatttatagaatacagactgggctatattatcgaaccccgtaattttctacgaaatagttcttatgcttggatgaaatattgcattcaatttaacatcctttacatacaaatgtatatctattgtaattgatgttgtgcgatacttaaatctgcaggactcgtcacgaactttaagc

SEQ ID NO: 103892 - DNA, 871 bp, Mimulus guttatus
  Intron number 1 from transcript mgv1a016195m (locus mgv1a0 16528m.g) derived from phytozome v7.0 (chr-ID scaffold_137 ; pos 464989 to 465859)
tctacagcgcggccaagaacaagtaagtttttgctgtaatcttttgttgttcatccttaatttcgatatcatttattttcaacgctcttactcaggtaaatcctcttttccttactctttaattcatatatattcgtcgataactgccgatttctcacatctagggttcttttctcgattgtctgttagatttaaatctttgtggcgaatcgagtgttagtcttgatttttttatgatttagattcttcattttttggtttttttttttaaatctgtttattgcgtgtgattttatgtttattgaagcttgtgtttaatttagggtttatgttggaaaaatttgggtctttagtgggagttttgctaaagatctagacttgagatctagacttgagatgattataaagatctagacttgccgccacaatgatacgaattagaagctattgtttttctgcggtgctggtcaattgtaataggatttgagtttcgccgtggttttggctttctgattgcttcctttgttgttagagtttgaaatgatatcagtttcattctaatttgagaaaatgcctgctgactccttaatttcagatatttgaaaaaaaaaatgttttcttttaaaacagaattggatgcttgtaagattgtttacattgttgaacccagaaacaaaattagtctctgcagatagcattctaaaagcctctcattatttgaaataacaagcagatcaccagtgctgtatttgttggtattctgtggatgttgatgcattcattttggctatttcatatctagaaatgctattgtatgttttggttgttttctaatttctttaacttatacgcagaccactcgggtgcagac

SEQ ID NO: 103893 - DNA, 696 bp, Mimulus guttatus
  Intron number 1 from transcript mgv1a007636m (locus mgv1a0 07636m.g) derived from phytozome v7.0 (chr-ID scaffold_1; pos 3741139 to 3741834)
tccatccagaacttgtttctaacagggtttctgaggcaagtttttttttatttattcatttaatattttttatatattggcttttattaactggatttgtggggtttttttgtaattaatttaattgggtttgtgttttatgagtgagtttttgtagaaatgaattgggttgcttttacttctagtgattgaaatatagcatggactgtgttgatgtttgtgttcatcgtggattcatcattttttatgtaaattgtttgcggtacaattatacgattatgatgttgttttctgtctggctagaattgtgagatcttcatgcttgtgatgaacgtaaacgaatctgagtcgagccacgtatttgctcacgttcgcttggattttccatcgacctttcaaagctagtcgaacaaaaatatgtgttcaagcttggtttattgtgttcacgaatcgagattaaacacgactttttaacgaattttcttgaatcgatgagtatcgagtattttgatttgattttcatccctagatgttccttttcttctcatttaagtatatctagtattgaacaattgattatgtatgtcgtctttcgggatgttttacgtatttcttacgaagctcgtttttttaatttgtttcccttttcattatgtttcaggattttcaacctttcgtcccttatcacgggttgaa

SEQ ID NO: 103894 - DNA, 644 bp, Mimulus guttatus
  Intron number 1 from transcript mgv1a007580m (locus mgv1a0 07580m.g) derived from phytozome v7.0 (chr-ID scaffold_96; pos 655871 to 656514)
atcaattttcagtcttctccgttaaatctcaacaggtaaatttatcccatttatcttttttttttttctgggccttttgatttgattaattttgtccatgttgtttgtgtgcggattaaattatcaagggttacagaattcggcttcccctgtaagaatgtgattcataccaccaaaccctaattggcttgagtgcattcatcttctaaggccttgtttgggaatgtaaacaggattgtgttttttttttttgtttttttgtttttttaatctaaatgggattgattagattgattggattgctaggattagcatttgacaaagattgatcataataccatcaaacctaatcatatttcacaaacaaggccctagtgtcgggtttcggttacttaaaggttgtcttttttttttttttttcatgcgtgtgaacggaatatttatccgattagagtttcttgtgatcagatgcttattttactggagtttccaatcagaccgatctcattaatttcctaaactgaatcaaaatttagattaaaaaaaaaaaagatcggtacttttttacgggcatgtaacgcgtgactgagtttcttgagctaacatattattttacatactgtattattagtacgaattgaaag

SEQ ID NO: 103895 - DNA, 937 bp, Mimulus guttatus
  Intron number 1 from transcript mgv1a001995m (locus mgv1a0 01995m.g) derived from phytozome v7.0 (chr-ID scaffold_143 ; pos 590621 to 591557)
gctcacgctaacgctgtcgtctctctttgctccaagtaattcatttcaactgcatatctgatttttgagaattagggttttcaatcttgtgagataattgcccttttgatttattttagtttgcagttaactatatgtcatttgcaataagatctctagatcatcgtgcttgttgatttgttacgcaatagagttggattgtggtttcactatggggaaagtgatgtgacttacggagccggaaaatgtttagtgttgcacatttttccccctatttttagggggaaatgtttagttgaacatgtgaatgagtgtagttgttcaatcaggggtttctaaaaatgctcggaaactgttcgtgattattatgtaactataaagttttggaaagtgtgccaagatgcagttcacacggaaacatagagaagtattctgcttgattagctaattagtgtgctagtttagagtggggacggggtttgtgtttaatctcgttatcgcattaaacttttaaacatgctttacatctttgacatcatgtacatattgcgtatctatgtctcatgaaaagaaataaatacatttaagattctctcggttttattatttttgctatattaagctcgcttatgtagtaatgagcatgtggaaccatctataatattggcgcactttgtcttcttgacattacacttctttaggtcagtaatttaatacatgataatagtatgctcctgtatcttttaactggtttgatatgtttccaaattttcttgcaaagccgcatcatccctttgaacggttattttgttgaggcggcatgagtttttgttgctttgttcactaaattacaaaatggccgtggctccttcgtgcggagacacattttcaaaacctttatgcttctttttttgtaggacccttggcatatcgacca

SEQ ID NO: 103896 - DNA, 635 bp, Mimulus guttatus
  Intron number 1 from transcript mgv1a005616m (locus mgv1a0 05616m.g) derived from phytozome v7.0 (chr-ID scaffold_58; pos 996023 to 996657 reverse strand)
tgggcccctctcttttccactactaccaaaaacccgtaagcccctgttctctatatctatatctatatatatatacatgcacactgtctagtgtgtgtgtgtgtgtgtgttctggcataagtgtgatgatttcattgatttggccgagggtttttgaaactttgatgagaaatgataactggaattagggtttctacttgcatatttactaattacttcagatcaatccttttttttttttttttttttttttttgcgttttgttggttttgatttgggatttttgctggggattaattgatcatgcccatttggccgtatggtggtttctttttatgggcttctgaattaatgtattccattctaatatatttaatttttaatttttaattttgaaattgagcaactttttttttttcctttctaatttcagctttcttctttgattgaagaatttaagttcattccgcattcgattagcagccgatttgttgtatatttatgttgctaatcaataatgatttcattactttcgtttgatttttgcaagattaagaacactagagcagagtcgcattcgtattaatttgtcttttaaattttctgttgaacagctcaatatcgttgaagggaaa

SEQ ID NO: 103897 - DNA, 740 bp, Mimulus guttatus
  Intron number 3 from transcript mgv1a006661m (locus mgv1a0 06661m.g) derived from phytozome v7.0 (chr-ID scaffold_193 ; pos 315248 to 315987)
aacaggctagcataaacaagtaagccattagatttctatatcctttttcattttcacagcacaatctgaacttgtgctaataatcgctgctgcttgtctaaccttgttctttttggtcttccatgatttttttgacctatcgtttacataaatcacatgactgaatgatttgtgagttcacacatatttctgtattttaatgtaaggagacatggtccaacatctttaaaatggatttatgtagattgctgtaaaacgtgactgtactttgctttctaagtgattgtgtctgccttgtaagccaatccttgggcttttgtcatccgtgcttgaatattgtttcttcatgattatttctgacttgaaaatttcttaatttcccttcactgtaatggtaatgcttttacataaccgtggtcgttttttctctcaaacacaaaataaaccaaagttcaatgcactggcttccaagttcctgcaggacataacatggtcgggatttcaattttcttgtatctatgaagaatgacaaactttggagaagactgcatgccatgaaacttaagatcaatatttaatttaccaaatcatggccgtactaagtgtagatgattgatagaaaaggtcttacctgtatcttcgtaagttgaaaatagaggctgactatttccttaatttgatgaatctttgatgttatctgaacaggcaacattacatacagtgccctccaggcgtgctgg

SEQ ID NO: 103898 - DNA, 706 bp, Mimulus guttatus
  Intron number 2 from transcript mgv1a010571m (locus mgv1a0 10571m.g) derived from phytozome v7.0 (chr-ID scaffold_128 ; pos 242123 to 242828)
tgatttgcctcgaatttcccgatagaagcggtgaggtaacgcaaatgatttgataattttgagctgaatatgtcggatacgcagttttggatcgtttattatgtgattgatttgatgattttgctgtagaacaatttttactgtttcttctgttattatgtggttggatggcatttttgcaaaaaaaaaaatgatcagaactcttgaaatgctcttcgtaaacgctgatgtttcaacttaagttgacctaaaatgggtttgctttcagcagaaaattgattgaaaggaatggttaattgtgcgttgctttttgcaagattggttgctttcagcaatttgtatggtttgttgaataacggtgtggatctggattggaattacgcttataataattatgctatgaacttatagaatggcactgaaattactctctgggtcacgattttcagaaattttcgttgttcttcaatgatacagccagtttccataaacaagcttcttattgtttttttagtaatagaagtgcaaataaaaattctactgctggagttgcaaactagtttgataatgatcatggttgaaatatctgtaggtgtttgttattccatgttcatacagggtgagggccctatttcattgaagtcaaatagaggattaatctatttatgcctttgatttagtatcctgtatttgatatgtgcaggtc

SEQ ID NO: 103899 - DNA, 694 bp, Mimulus guttatus
  Intron number 2 from transcript mgv1a016213m (locus mgv1a0 16213m.g) derived from phytozome v7.0 (chr-ID scaffold_66; pos 212415 to 213108 reverse strand)
tttcttcgttgtctcaccttcttgctgaaaaaaaggtttttattatttttatttttatattttgtagaatacctttgtttatagtggagattatcaagcttaagtttaatttaatgcgattatatttctgaaattagttgaaattttgttagtattactgcaaattgcagtggattaagaactgaaaacccccttgtattaacgagaggtcgatttcgtatttgaaaagttaaaagaggctaaatagaaaatataattcaagggcgatttcgtatatggagaagttaaaggaggctaaatagaaaatataattcaagggcgtaatcggaagataaatttggaagttgtgtcgagctccgttcttttgtgtttgtttttttcctacttttgcaggcgtgttagctgataataggcttctagctgtttcaaatgtgatgctctaatggagttaatttcttcgcgtgtgtgtgtgtttgtgtgattttcgattttagggaatatgtgcattcgttcaatccttcaaccgatataatttgcgaatcaagactatttatcatctaaacatagtgtgtcaaagtgaaaatgtattctacacttttttgttggtaagaccgtttgttgatttctccgcgctatttaacttgatttatcaaattcaggaagtttccgaacccgcagcagaagccctcgtaaa

SEQ ID NO: 103900 - DNA, 873 bp, Mimulus guttatus
  Intron number 2 from transcript mgv11b019432m (locus mgv11 b019432m.g) derived from phytozome v7.0 (chr-ID scaffold_3 ; pos 3911658 to 3912530)
ttcgttaagttagtttgttagtacttgtcttgggcggcgttggttgtcgttttagcgtgtgcatttgcatttgaccattatgaatctgtttttttgctgtcgaggatctatcttgcgtttgctaaaagtagttaagtagtcaactatctagacacgtgtcgattttcgttgatggaactttttaaatatgatattggctgtcgtatgtatgtgtgtgtgtgttgtgacaataagaagaagaatctgttttcggttgtcggtattagagaatctatcttccttgtgacagagcatttaaatagttcgtcaatcttggcggcgttttttatttattaggtatgattagcctttaagcatttctctgccattgcacaacttgtaacactaattatgtggttactgcagattgagattatatacaacttcgggcgggaggacaatgactaagtagggtcatcatcactgaaaaataacaagaggtcagtaacttggaattttacaactcttttcattgttttcgtctttgaaaggactcaaaaatgatataatattaaacttgaattccaacgtaatagtcttggaaatttaaatggatcaacattgttatgtgtttgttgggtgattatgcttcttgagatatagaataatgtgcaaatcttgttcattaattttttttttctagataaagaagggactatgcttgtgtgtgtatttatttttcacttatggtacttagtttcataaatattttccaaataaatttgcaggtgagaataagagcataacaattttaggcgagaactaagagaattttaactagggaaggttgttgcataagcacttaacgagcgtacagaattgtcggtgggtgaa

SEQ ID NO: 103901 - DNA, 913 bp, Mimulus guttatus
  Intron number 5 from transcript mgv1a022597m (locus mgv1a0 22597m.g) derived from phytozome v7.0 (chr-ID scaffold_3; pos 4349430 to 4350342 reverse strand)
ctggtaaaactttatatacatacataaaaacagtatatatatatatatatatatatatatatatatatatgttatcatgtgttgatgtttgagatttaaatgtatcaccacttgtctttggtggaatatatctcctctttcattttatttgagttgacaagtgtcctacgaatgttatggactcacagtatatagatgcctgcacattacgaatgctgaagaatatatgttttgtgtcgtcctgatcatataactgccaacttctttctgttcaacaaattgcagcaatcattgttgatttgtttgcagagggaaaggttttaccacagttagaacaggtactaagtttctaagtattgggcttaatagttgttgttttacttggtattcgtggtcctcacagaccatcgtgatatgacagttgtagttctgcatttggggttcctttctacaactcttttcgtagattcgtgaactctcatatataagtttcttaggagatctatctctttcaatttcaacaaattctatttggtgctacgctacaacttttgagcttttcaattttatatctcaagatgttggaaatatctaagttatgatgatcagatttatttgacaaatgatatatgtcgtgatagatcaaaaatgattttagctttttgttttttctattcagatggtacaaaatccgaactatagtgtcattgaataatgagtaaaaagcagtttgccccctaaattaagggccgttttgcactttgccccctaaacaaaaaaaatttgcacgtttttacctgaactcgtttattcgttgcacgattccccctgaactagattttccggtaattttgaccggaattctaaaacatgtgcagtgcacgtgagatttgcggggataaatttgtccatt

SEQ ID NO: 103902 - DNA, 1058 bp, Mimulus guttatus
  Intron number 2 from transcript mgv1a000283m (locus mgv1a0 00284m.g) derived from phytozome v7.0 (chr-ID scaffold_325 ; pos 148059 to 149116)
tttaagcggccatttacttcttcgtctcgggaatcgtaagctgtttttttattttatgagtttttatacatctgtaattggtttgattttatgtgatgtggaactgtgattttattttatttttgcctttttcggtgtgtgtttgatgtgaattgagagtgattttgtggtgtgactggatttgattgaaaattcgtttgatcagaatgattttagactcaatttcatcatgcatcaagagtctgaataggttgcctccgtagcagcggctgcggaaattggaatgaaaatggagtgaatcagattgttattgctttgactagggtttctgggatagtaattgaagaaattttggatctttatttgccgactgctttatttgtttggttttatcgatttctctctctctctctctctctctctctctctctctctctctctctctctctctctctctcacacacacacacacacacacacacatatacacacactctctctctctctctctctctctcacacacacatacacatgcacatgcacatacacatacacatacacatacacatacacatacacatacacatacacatacacatacacataaacacactctctctctttcacacacacacatacacatacacatacacacattctctctctctctctctctctcagggcttaggtggatggcggatgacaaatagagtttggaagacaactgatccaattaattttgtcaattcttttttttgttttccctcgttttttacggcatttatgttgagcaatattttgcggttgtaggtggtagcgtcatattaaatgtgtgaacaaacttagaaggtaagggtttgaagtatgaatatgttcgaattttgagaaaaaagatattctctaatattgtaaggtcggcaaccaaaacaatcaaaactttctgcatgtgatttggaactgttgtcgctgttatttgaattgttcggtggtgattttgagcttaaattgaatgtctcttttcttatttgactaaggtttgggccctcacaagctccta

SEQ ID NO: 103903 - DNA, 852 bp, Mimulus guttatus
  Intron number 3 from transcript mgv1a008849m (locus mgv1a0 08849m.g) derived from phytozome v7.0 (chr-ID scaffold_98; pos 203489 to 204340 reverse strand)
gctgtttgtttaaggtaattcatttcttatttcatgatatatcaaaattttataataaacaactaaaaatatggtttaaataaaataattatatttatcggcaaataaagtaaatggaaatggggatagaatttgcaacatttgtctattactttatctaatgataattaattactaatttataatgcaaaaagctctttatgcttttaagttttattaagttcatgaatccctactttaattatgttttttttttttaatatttattaatttcgagttgcgagaaatttgctatgcttcgtaagcataaattgacccccacgaccactttaattagctcaaaacatttcgagttactatttgatttttcagttccgatttcattgccaacactttatagatcaaactcatcgtacatgcatggttggccgaagaaaaaaacttcaaaattgaaaataataatcaatattttttgtattttgtattaaaatttgaattcctcaaaggagcatgtgtcaattggccgatgttcgaattccattgtcacaatcgctatgtggaacttgttacaaatgattatcttactattgcttacgtctctcttaaggtttgcaagctattacacgagagtgtagcagtgcacctaattggctgcagattttttcattataaaaaattaaaaattaataatcaatattgcataaatctcccatgtgttaactatttaagtagcaccaaataagaatgcatcttcaatatatatagactatgaataattgattaatgatatttattaataaaataataataaatatatatataggattgaaaacttaggcataagaaagtggc

SEQ ID NO: 103904 - DNA, 892 bp, Mimulus guttatus
  Intron number 1 from transcript mgv1a000203m (locus mgv1a0 00203m.g) derived from phytozome v7.0 (chr-ID scaffold_8; pos 103669 to 104560)
tctggtgcttcccttgagctcgtctgccattacaggtttccattttttatgtttaaattgtaacattttttttcgagttatgcttattgttttcttatttggactttgatattttgaattaatgtaagtgggaaaatgcagctattctgattgatgcagctcgagaagcattctctcttttttttttttacatgaaaattattgtacctgttcggtataaaagttttgattgtttagcctgcgtttataaaagaactgctatttacttgctggggaaaggcatggtaagttgtcccatgttatttagagtatctaaagactaaggtaaccaacttcatttgcggtcttccacgtcaaatttggtgattctgaaagcttttaattcatccaaaatttgaggaaatgggaaagagatgaataaaggaaaaacttactctggatttgtgtaacaattccatacgatctttcacacacacacacacacacacacacacacacacaccgaacacagagttcataagagttaacaggaagagctgagtgcatcggtcgagtcattatacattgctcattcagcaagcttcattaattttgttttatttctgaagtaaactctatttacgaattgtatggtctgcaaggattgaatatttctactttaatccatagttttagtggggggctatgattcactcaatgattttccataaatttcttcagactgtttttttttgtcatcgtttcaattagaaaaatctggtgtacttggattgtcttacgagttttgaaaacttcttaaatcttttgacagttgatagaataattgtttttttgtgaaactatttatgtactctcctagttttgttgattttggtaatgtggtgtaggttgc

SEQ ID NO: 103905 - DNA, 719 bp, Mimulus guttatus
  Intron number 3 from transcript mgv1a017238m (locus mgv1a0 17238m.g) derived from phytozome v7.0 (chr-ID scaffold_17; pos 1499008 to 1499726)
aaccatccgcctccaaaaccggcaccgccgattcagtaagtcaactattttttacctgcagatttttgaattatttttgttagggttagatatgtatttagatttagggaatggaatcggaaaattgtcgagagatatttcacggtctcgaatcgagatagtctatatgcttaatgtatttacattttccaaaacaataatgtgtttctgcgaagcagaaagtttcgaattggcttatcaaaacattggtagtgtctgctgtttcttaagaatgatgcacataaatcaaacacacaatttaggcggtgcttgaattcgtaatagattagtcgaaacgtttgttgttctgttttaagttttaacaaatgaataaatgcacgcagtttctgattttgtttctttaatacaactccgtaaccaaatttgtcagaattctttagagctaaaagcatataggtaatattggcatcaccataactttagatgcacgctcgtgcattccattttttcatgttcattgcacttttaattctcatcttttgggctttgaaatcttctttacttgaaggtgattacatcaattaaccccttcagtatagatgccaaaacacatgattaaatttagattaagtcgaattcttcagtttcacctaatcttggaaaatgtttattaaattcggaaaatcggtgtatcaaaaaggttgcaggtatacagaacc

SEQ ID NO: 103906 - DNA, 613 bp, Mimulus guttatus
  Intron number 1 from transcript mgv1a011208m (locus mgv1a0 11208m.g) derived from phytozome v7.0 (chr-ID scaffold_75; pos 305355 to 305967 reverse strand)
atcattccttgttcaaatactgaatagattcactggtaattgttatttacttgcattttgttttattcttagcttttattctgctttgttgttgagttttatttgtttcttcccaaattatttgatgtatatattaggaatagatggagatatttgtatcaaattttgcttataattctgtggttaattgtgtgttagacaagctttgattttattattgttctgaaaatcatgagtattgtatccctaattcatgtatcagtaaagcactgtgtgtttctgcgcataaacacacacacacacacacacacatgtttgtgaaaggagttgttttgcattgttattgcgtttattgcgcatgaatttcgtctggttatcgttttcgtttcttcgtttcggtattgtatattgaaagatttgaaacattccgtttttattcgacattagaaacgagattttcgaccttcatgttaattaggagcttatatatgactggttttgatttcaaattaatctgtttaatgcgcaaagttaatgtagtgtgttcgaaatggtgtctgactatatatctatctctgcaaggttaatttaatttcgtcgttgctctaaggct

SEQ ID NO: 103907 - DNA, 540 bp, Mimulus guttatus
  Intron number 1 from transcript mgv1a002832m (locus mgv1a0 02832m.g) derived from phytozome v7.0 (chr-ID scaffold_18; pos 1414452 to 1414991 reverse strand)
ccctcgcgctgtctggtttcaaagatatacatatcgtgagtggaatttcttcttccttttcatcgtttatttttttgtttcatgctctatttccagttatttggcggccgtggatttttagggtttacaattagggctttagaaagtgcttgggttttggataattagggttcatatttcgatgagttgaaacataatatgaatatttgagttgaaagcagtttagttttagttcgaattgatttgtttattagattttgtaaattatttggaacggaggccttttagaaagtgataagtgttttaggaaggcactaagtgctgcagggtcagttaagggagtaatgaaatttccatttaattgcaatctgtgccgagggggaaggagttattagatacagattattacttacagcatctgaaatctcatatttttcttctgaaagttatttgagaagctaggctctttattttcaaatacataatcccatgtagaatgatatagttatttttccattgcttgcctcaaatcagattgac

SEQ ID NO: 103908 - DNA, 1004 bp, Mimulus guttatus
  Intron number 2 from transcript mgv1a011263m (locus mgv1a0 11263m.g) derived from phytozome v7.0 (chr-ID scaffold_13; pos 889608 to 890611 reverse strand)
gaaggtaataatcagaatgtctctctgtttttaccgttttgctctgccttttgtttcttcttgaatacttaatttatgtctcatccacatgatcatgcgtcattcattatcaatggttgaagtctgtaaatttttactactcgctttgatcaatggtgtaatattaatttttattgccgtctaccttcctcctctgctttgccatataattttgatacatccccgtcttcaccgtgaccacggtttatgggtgtaactgagcctctcttatttacggagtgtaaggctgtttgttccatagttacttcttaaaatatttgctgatatccctttttggtactttggcacgtgggactaggaaggtgatatgcgttttaaaagagtagtctctagtctaaaatttatatagtgatagattccatacccttcggtcacagaaagaaagctttggcctctatggttttattaattttttggttgataccggtagaccatgattagcgattttaaactttataaaatttgctgggcattgtaacaatttccataacatggttctacgtcaaagatctgtcagtgttaccaaattcgaaccttagtaagaaaatagttgctttccaggcatggtctttcgtgggcatctttgcaactttatatgtgaaggaacaatatgccctaggtatcgtttgagtttgactttaatggttctattgaaggtttctgagcctttcctgacctggtggtcaatggtgggagggtggagtttccctgtctctgttggtggtccatggtgagaggggtggactcggtggaatatcttgccgattcttagaagcctttgacgattttctgtcttgtgtttacattttttatggatttgcaacaaatcaaaaactggtgtttagttcttcgtctcttggtggcaccaagtttcatgcactgcagtacataactagttttgatggccttactgtttcctggaaaacatttccgcagagtacgcg

SEQ ID NO: 103909 - DNA, 671 bp, Mimulus guttatus
  Intron number 1 from transcript mgv1a007313m (locus mgv1a0 07313m.g) derived from phytozome v7.0 (chr-ID scaffold_8; pos 3056028 to 3056698)
tcttcttggttgtcgtcaagattttcgatcaccaggttagcaagattcaatttttatattattttcttcatgtaatttgttttgcatttagttctgttaaatcggatcagacatctccaaatttacttggttaaaaggtatctcctaaatttattctgaatgtcaaaagtttaagaaaccatagaatagattgttttgaccataatggtggcaagaattattttagatgaaccgagaatcaataattttaccttgtctcaaaagcaaaagacctgcctttttttcgtcagcgtaatttagattagtaatagtagatgcaaacaagcttcagattagagtgaggactttgtttcataagcaaatatatgaatcagaaaagaaataaaatatgtgactttatgtgtatgcaaaagagaagtcggctttagttcagctgctattgtattaggtttttctgtttgaatacaccatgcttgtcctacgactgtttgaatcttaattttatgggatatctaagaggaattataacattggttatgtccggacttgtatacactcccatttttcgtgtttcttaagcataatttgtaacaagtttttccatcacctatgtgctgatcttgtaataaaatacagggcccgcttacatcgacgtttccgattgagaacag

SEQ ID NO: 103910 - DNA, 901 bp, Mimulus guttatus
  Intron number 3 from transcript mgv1a014328m (locus mgv1a0 14328m.g) derived from phytozome v7.0 (chr-ID scaffold_12; pos 1106500 to 1107400 reverse strand)
gagttgaagaaaggcttcaatcaattgagaaagctgtaagcatttcctaatattttaagctctctaccattgcttcttgcaacacacaaaaaccatgaaattcttggagccagtagatgaataagatttggaaatcagctatttcaaactcatctttttattattcccttgtcactataacattaaattgtttgtttattattatcgggattcaacaaaatatttagtatttggtctagaaagaactgttagctaccccactatgtaattatagattatattttacatatacaatctacttccagtgtaacggccatgacctaatcctcaatgtctttcatacgactacttaaacatagaccctaccaaataataagcttcgttttcccctctcgcctcctctcaattccaatcttgaattatttatacatgtgtttgtttaaaccttgatcttcaatatacttggattaagaattttgtaattgacttggttttatgcatcattaagagatgcagtagatgacggattggggattgtggttatttttataaggttttgtgtaatctttgcatacaaaatatggtgtttaagtttagagacgaccggacgtgttttaagtatacataatgtaggctgtttacacgaaataaagcggaccactgctccgatatatcaactaataatttcttaagtgactattgactttaattcaacattattctggcgctatgctgcttgaccatgatgttcattcagtttatcagttcatatattgtatagttttcggtatcggcaatttaatgtagctttgttttccactttctaagtcagtttcgttgctttgcctttcctctatcctttaaaaaaaattcaatttgagtatgatatttattatggcag

SEQ ID NO: 103911 - DNA, 680 bp, Mimulus guttatus
  Intron number 1 from transcript mgv1a010023m (locus mgv1a0 10023m.g) derived from phytozome v7.0 (chr-ID scaffold_106 ; pos 634452 to 635131)
ctcagtcaattcacttgatcaagaaacgtcttcgagtacgttttcctgattcgaatatcttaccctgtgtgatcggatttaattgatgtttcgtagatttttagtttcacaaaatgttatggatcataattgttattggttttgtatatatgcgtgtacgatatttgccgaaatgccccgtctgtctttgttgacgattgaaagtttgattatttgggaatgtgtaagttgttgcagtgcttttgtggttttttgattagtggagtttaattttcttggaatgccaagctgttgtcgtgttcttcctctcttaataaaaaaagtacgatttgctttatatacatctatagaattttctaatagtacgtaattatgaatgaatgaatgtatgcaatggaagagtagggtataagagctttacggctccgaaatagatgtagatttgaaatttcaccgtgttatggcagaaacttctgctttgcttgttagagtggcgtggcggaaaatgaaacactaaagatatttaagtagtttaagtatttgacattggctttatgtgtggttttgtactgatctaagttaatgttatcagttaagtataggttcttaatgacaattgattttctctttattttttgggtgcagtggaaaaagttgattcctaagctggagatattatc

SEQ ID NO: 103912 - DNA, 802 bp, Mimulus guttatus
  Intron number 1 from transcript mgv1a013731m (locus mgv1a0 13731m.g) derived from phytozome v7.0 (chr-ID scaffold_334 ; pos 63185 to 63986 reverse strand)
cgtctacgacggcgtttgccacctctgccacaccggtaatttaatttttttttctcctctttaatgtcggtggctctgtgatttcattttgttagagtttcttagggcttaggttctgttgccattttttattatcatcaacgaaaaactgaattcagaaattggcgccctaacttggcagcaaaggagagagaatcagattgttgctgaatgacaatataatgaattaataagaaatcatgactctgtaattgaatttatggaaatgaaagtatgaaacagccaaatagcagaacatgattcctgagatgtggatgaacatgttgtttagttgcacctggcattacgaatttccttccggccaatgaattatgaagcgtttaataatgcaacgggataaaaaccgttgacaccatgtaattttttggtaatatgaagtttatttttgcatttatgctcatacaatatctttaatgtagccatttgtagatagatacagattagcctatatattgcactcttgcttgatagagatcctgtctgtaatcattgcaaagcatctactgttttggccgtgcttatgaacctctactttggtatcattttcttgtagtgtatagatcgttgcacaagaatttgatctatgttggaataccttctcgtacttcacttgaaaaatgtggacatacagagaaactttcttgattaagatgcttctagttatgtgttattgttgctttcatcttgcttttgggcatatcagattaaaacgccaaaggttcttccgacatgtaggagtaaa

SEQ ID NO: 103913 - DNA, 725 bp, Mimulus guttatus
  Intron number 1 from transcript mgv1a026474m (locus mgv1a0 26474m.g) derived from phytozome v7.0 (chr-ID scaffold_27; pos 1110124 to 1110848)
gaagctcctcctcccactttcgacgagggtcagcagtaaggaattcgcccctctttctctctctataattttgcatgttttcttcgtattaagtattgttgttatatgtgataattgcaattgtgtttgattttttcaatttctgagctcgttttttggtggaattagtgtgatgtttgcgattttatgtacaatggtatgtttttcgacttgatattttcgtgtacatatgaagagtaggtgcctgtgcttcttttgaaagatgtcgttcgatttacactgcggtatgtatttacgtgtggttcggatgcgtgcattgctgttttattcgttgtgattttccaaagttttactcgagctactgcaatggattgggaatgttctgcaacctgttgtttcctaataataccatatttctgaaattacataaatttgggattggaaataacttaagaagtatttgtaatgaagatgtcatcacatattcgtctggaaaaaaaatacacaatctatcaggattggatatcgtacgttattattttaaatttctcatcttttatgacttgatcgtttgagatagataataagcatatgaccgctctcttttttggtttcgattttttgaaatgatctgctctatacctataataactgcatgaggatgaccagagttattttgatgtattgtttcagcccgttgtttgtgacttggaagaacgccgtca

SEQ ID NO: 103914 - DNA, 899 bp, Mimulus guttatus
  Intron number 1 from transcript mgv1a025454m (locus mgv1a0 25454m.g) derived from phytozome v7.0 (chr-ID scaffold_120 6; pos 5688 to 6586)
gaactacctcattttccgtcaccttaacgaatccggtatccctctttctttctctacattttgcattctattttactgttggtatgaattcttttgcagaagttttaattttgcgattaggatttatgaacgaaacttgaatttctaggtttaaattttaaaagagggcttttttatttaattgtacttttggagttctcattttagattatatctgactattaattcaattttaagatcgtctttatgattttggcagtgagtagcggaattcatcttctccaatttcaattaacatgttttatttatttatttaaaaaaaattggtattttgatgatttttctaggaattttctgcttgatcatttcttcaatgccagaaggtggtgtgacacagacacacagttattgttgcatttaaaaccttgaaatttatgaacacttatttttacttagcaattttaagagtctggtgaatgttctatcggttatcgtgtgcactttgagaatcattttattccttatgtgagtgagattcaaattaaatggccaattagtttttagttattcttggatatgagattaattagctgtaaagatatcagttattagagttctgtattatgcaacctatttcgcgggccgactaatcgatattttaatgcaattatctgaaagatttgaaaattcatgcacgtgccgacaaaacctttttcgtgtttgaattcccgggctatttaatgctgtagagtgcagtaaagtaaaattctatttgtgtcggtttgtcgtaacgatgggatagagttcctttgttattggtgtggtgtggtgtctgtgcccttaatttctataaatggttttcagggtacacacattcagctttcgctttcgaatacgag

SEQ ID NO: 103915 - DNA, 1000 bp, Mimulus guttatus
  Intron number 1 from transcript mgv1a008157m (locus mgv1a0 08157m.g) derived from phytozome v7.0 (chr-ID scaffold_247 ; pos 119761 to 120760)
tcgtctcagtttgccggatcttcgcttctagagttgtaagctttctacagatccttttattttttgttaattatatttttgaacggtggattttgagtttttcttttttaattaattaattcggcgagaatgtgcatttttttgaaggttttcgagatttttcgtgtgccttgtttcatgtaatttttcctttttgtgctaatttttatggattaatgttcttcattaggttgaattgttgaaagttaattggctggttaaatatttctaattatatgtggtgaattaagatataagtaataaattgtgtagtttgaagaaaaaattcaatgggtgaatctgattctaattagggctgggaagttttaaattctgaagattattgcttggaatctaaattattataacggaatttaattcagccgcacaacattgtgccgtagatgctgtaatcggagtgcgtcgtttttttcggttgctacatatacaactttataggtgctcgacgcgccttgtaaagggggttttcgactttcgacacataaccaattacgtagtgttcgattaattttggtgaagttttgttgcgcacgtaattgcttttgtcttcgcctttttttttcttcgctggcctctttctaaattaaaagattgtcggttgtcattctctatgttatgttgccatgagaaatgcatgttgatttaccacgtgtcgaacaaataggaaatattgcggccagaatttgcgttacgagagataaaaatattattagatagtccagatttccggcatgtttgtatgtttccatatgtgtgtctgcggtttggttaagtttaacaggacacgaggcttaatctagcatatgtaattattgaatggaattgtttggctcttatacgcatctcactcagataaatttgtaaatacgtacaaacactgaaatacacacgtgttattattgcaggggttagcttctgaggaatccgatacttgataggg

SEQ ID NO: 103916 - DNA, 490 bp, Mimulus guttatus
  Intron number 1 from transcript mgv1a009885m (locus mgv1a0 09885m.g) derived from phytozome v7.0 (chr-ID scaffold_13; pos 914314 to 914803)
tcacggcgccgtctactgcgtcaccaccctctccggtaaacaaacccccaccaagatcgttggtttttttttttttaattgtctgattgtttaatttgatttcttcttcggacaaccctgttaattaatgggaaattgcagttttcacccctcaaatttgcatagatttcacacttggtccccatgttcacgaaaaacacatttggtccctcgtatttcaatagtttgacacttttggttattttcgtcaagttactgttagtccgtcagttaaggcactgttggtcacatgtttgattttgttattactaacagaaaattgacggaaatgagtaaaagtgttgaatttttaaataatgggggcccaaatgtattttctgtgaacatggatgaccaaatgtgaaatcggttcgaactcgagtgccgttaattaatccagttagtcaaactaatctttattaataacatgataattaatttctacttatag

SEQ ID NO: 103917 - DNA, 924 bp, Mimulus guttatus
  Intron number 2 from transcript mgv1a008617m (locus mgv1a0 08617m.g) derived from phytozome v7.0 (chr-ID scaffold_212 ; pos 68081 to 69004)
gccgaagcaactggtgtatctgacacttcacaagggtactttttttttttttatatcaattgaacccaaccggaatagaaccctgcagcaaaactgcggagccaaaattttaagtttgtggggggcgaatgcatcaaaaaaattatgagaggcccgataatgctaattatgcatgatttttctttttcttttttttttccgaattttttacataaaaaataggaggttttttgcaaatagtaaccctctgaaatctcgaaacgctcaaaaaacccccctatgaacattagtcaaaggcacttcccccctagaaagatgatgaagaccatgctttttttttttccttttctttttaattgatttatttatatataatattttttatttaatagcaaaagaacccggggtatttctgtcttttcccgtgtggtcaaaggctagtttgcaaatgggtcaaatgtgttatataaaaaagtttgtagggggtttcagttattttttgtaacatatggggtttttgagtccgtttgagatttcacaggggttctatttgcaaaaaaactctaaaaaatagggatttgagaattgttgtgggagtgggccatggccccttctggccctatcctggctccgccacttccctgcacaatatatatatatatgcgtgtgtgtatatattatatatatatgagagagagagagagagagagagagagagagagagagagagagattaaaaaaaattctcgaatacaaatcaagttcaatgaatttgttattatgaattcgaaaaccttcgatgctgatcaaatgttctcagccaaatgcaaccttatattaataaataattaattaaattacgtttttcaaatttaatttatatatataggtaccgagatacacctgggatttggacaaaagagc

SEQ ID NO: 103918 - DNA, 657 bp, Mimulus guttatus
  Intron number 1 from transcript mgv1a006036m (locus mgv1a0 06036m.g) derived from phytozome v7.0 (chr-ID scaffold_106 ; pos 497798 to 498454 reverse strand)
tggttctttcctattgtggaacctctcctaaatttgtaaattctctctctctctctctctgtttttttttaatgaatttgaaattattttaatgttgtttctttgagagggtaattgagactgaaaatgaatttttatagcattggaaattaaccatccatttggtttttatttcttcactaatttagttagggagaaaattgacaaagttgctataaatatttttgcccttttgcatgtcttcagaaaattagttctgaacctaggttggcatgtggttttattgggtttgcctcattgtagatcaccgtcgtgcattattccatattttttgtgagaaaaaaataaagttaaaatagttaatagttaatacatgtttcaattgatcaatgtattaatttcaaaaattgattgacgaaccaagtgcgtgaaaagagggactaataagtttttttggaactacttattctgtccaagactgactaatttcaaaaaataaataccagctgaaaaattgtaaatttagtagttcaagattgaagagtgccttcaattcgtccactaactgtacaactagataattagatgtaacgaacttcttaaatatctttattgcatctaggttgggaaggtgttacggatacaaaaagtttcaaa

SEQ ID NO: 103919 - DNA, 929 bp, Mimulus guttatus
  Intron number 1 from transcript mgv1a005952m (locus mgv1a0 05952m.g) derived from phytozome v7.0 (chr-ID scaffold_26; pos 816511 to 817439)
tctaggaaggctcagcttgtacaagaggtttttcaattttatcccactttttacatactcagaaataaaaatggcgattgtgttcgtaatcataatttcctccatgatatttatatgcaatttgacagtctttgatctagaagggagtgatggttgcaaattcgaactccatattgctgtttatgatgttcttcagtatacttaactgattgttgatagttgtcttgattcatattctttgtgttgtgaatgcactcactaagggttacactaaccatgcatataggtaaaaaaaccgtaaatctacctatacaatttaaagcacggatctgtcattgcagtaggattcattcaatgtgcaatgcatagggaaacctcatcaattaaaggcatgtgtgtgtgttcgggggggttgaaaattagcagtcatctttctgatggtaatatcaaatatgttttgataacatgaaataactattctgcggaatcattcagcttaaatcaacagacttatgttcaaggagagggtcttttctctgtttgaagtacatggatactaggattaccacagatgaacttcttgccccggtctgatgtaaatgattatactcttattatagtattaatatctgatgtaaatggattgggtcttcttatctctgaaaacatacacgcacaaggaaagtggaacctcatatgataaagcaggggatattggcctcccaggtccaggtacaggagattatgcaccgagtacagcggtgaaccattaaagatacaccatgtgtctggatcttttttttttggtgtgcattttttttcgtaccccttcctgtgagttttctagttgatcttttgagttaattcaataatttgcatctctttccttttttttaaatgtaccttagctgtcaaggaaattcataaat

SEQ ID NO: 103920 - DNA, 867 bp, Mimulus guttatus
  Intron number 1 from transcript mgv1a010980m (locus mgv1a0 10980m.g) derived from phytozome v7.0 (chr-ID scaffold_107 ; pos 144578 to 145444 reverse strand)
tcgccgatctttctcatcctcataaacccgctctggtatttttccttttttttttttttttttttttttttgaatttgaatttcaggataattggatttttgcattgtgtgtaggactgaattgtgtattggtagctctttctatctgatacggattcattcgtcaaattggattagaattgcaaaattagaattttgaattttaatataattgatacggaacgtcaaattggattagaatttcgaattttaataaaattgatactgagcgtcaaatcggattagaattgctaaataactttttaattcggagaagaatttcgaattttgataaaatctttagcgttttccctattttctggtggattccgaatgttcttttgttctatatgaaattaaatcctctttcacatatttttattttatttttaatttaaattacttatggaatttgaatttacttgggtaaattatgtattggaacgaaaacgaattgctctctccttcaagactggtggtggtagataattaaattattgtaaataatagattgctggaccacttcgagagagatatatatgatggtgcagaatcacaaaggtgatagatagtacaatttcgtgctttattttcgtaaccttttcgtttcctttgacaatagaaaattaaatcaatctactgttacccaaaaataaagcacttcagttttggatttacagtggggcagacgattcgaacttttcacaactcacgattaataagaatttaaacatttgttatattgcgtggttggatttttgtattacccactgatgtaatattcttgatacagttggttgacccggtggataagaccgtggataggga

SEQ ID NO: 103921 - DNA, 437 bp, Mimulus guttatus
  Intron number 2 from transcript mgv1a021872m (locus mgv1a0 21872m.g) derived from phytozome v7.0 (chr-ID scaffold_64; pos 1128566 to 1129002)
gaggtgactgagaagcatactaattatattttactttacactcaatttgaatgaatttttcttcttctaacttataggtttcgatttaactaaaaaatgattatggatcataataatcaaaaaccgaaatctagacgaagtggtcctttcggtcggttgaataatgtagttcttattcaaggggaggatctatttcaaccttctacgattatttctttcgacggagttattgaagccgaagaaaagaagattgtgagttgttctttatccctggcttcccccatctttcgtaatgtgatagttctgtgtgtgtgtgtgtgtgtgtgtattttactgatagttattcataccggacgataatatcgactctttcaggtcggttcattttaatgggttgattaggcgttgtattcaaaggagacatttcgaaagtttcc

SEQ ID NO: 103922 - DNA, 670 bp, Mimulus guttatus
  Intron number 1 from transcript mgv1a023093m (locus mgv1a0 23093m.g) derived from phytozome v7.0 (chr-ID scaffold_214 ; pos 435157 to 435826 reverse strand)
cacttttgcgcatgtttttttacttgacgtttgtgcatgtccatttgagcgagtgtgtttgtgcgtatttgttgatttgtattaatgtcctaggattgtagtttgtgttttcatgaacctttttgccaatgcacttttgcgtgagtacttttgtgcatgattttgtactcttacttatgtgcgtatcttttgtagcgagtgtttttgtgcacgtttcttgatgcgcattcgtgtcctcgaactgtagcgggtattttcatgatcgcttttggaatccaattttgaccatgttcgagtccgaatttggaaatttgacattagacaggaattgtagccagctgaaatagctttctaatgccgccggaaccagttgatttggagtccggatgagaaagttatgctcgacttcgtggacactaccgaagatgttgagggatcctctcttttaatttgattttattttcctaattgcaactcttttcttgctctttgatcatttttccttcatggacacctcatttacaatttgtacctatagaatactaaatccaccaattaaaacagaaatataaattaatccataaaaaaatccacgtatacgtaaacattgagtgttatttctacactccactgtatcttttgtatctagtgttctagctgttgtttggtt

SEQ ID NO: 103923 - DNA, 945 bp, Mimulus guttatus
  Intron number 4 from transcript mgv1a001461m (locus mgv1a0 01461m.g) derived from phytozome v7.0 (chr-ID scaffold_13; pos 1202705 to 1203649 reverse strand)
actcctggtggtgaccagaaacaggtgagttacttcccctattttggaacaacaacacgaggccaccaggaatcaccttcctgccgctttttctttattttttgcagttttgatgtgatttccggattttttttcctgaactaccgatattatttgacaactttgagaagattagcatgatttatgtgttcacgtattgcaaaaagataccagctcactgccccatacattagccatgtatgtccaatgaacaagacttaggtgaggactagcgttatagaagaatgtgctatctaccagtcattcataatagatgcccgttatacgaattttgatgtatatttaacctataaccatcatttctaagtatcattgttcatgatataacatgaaacagaattaacagttatcctttgagaaatcgtttgagtcttaggtatgatttcattgagttaatttttgcagtttgaaagaccgtctgttccttttttcccctctagtttttttcccttcaacctacgatgcttgtatgagtttcacttagtgttttgcgctcccacattctagacagacaattaataaggtataaagtcatttgcaagaaaaaagaaaatatgaaattggtaatgggttagaaagatgttgtatgtctcctgtcttattaatgtgattggggctgggaattttcgtcatgcttctgtttccaacttgctgcttgcttatgaggcttgtccccacggggcctttttcttttctttttatgttgctattttgatggtaagaagaaattgttttgaagttcctttttctgctgatggtttcctcatcccatgatgcatgttccatgtttgatatttgtgataattcctgtcgtattatatggttaatgtattctgtatttttattccagataagttttcaagaattcaagaacaagctacttga

SEQ ID NO: 103924 - DNA, 475 bp, Mimulus guttatus
  Intron number 2 from transcript mgv1a005818m (locus mgv1a0 05818m.g) derived from phytozome v7.0 (chr-ID scaffold_5; pos 839958 to 840432)
acttgagccgcgacgagttaaagcatttgtttttggtgagtattatttcacccatgcatttacaatataattttaatacaaactacgcgacacaatgaaacaaaaaaaccaatagtgacaccccaatggttacaatatatatatatatatataagaaattgtcattaatacttacattaacaacatcttgtattttatcatttataggcaatgtttgaattatttttgggagttatggtatagtttcttgttgttgccactaaattggttttcagtgtcaccatgtagaattagtgagacaccaatagtgacaacatagtaatagtattttcttcttgagaatataaaaataggtgttagtcacacaaataatattttatgtcatcataaaagggaaatacatctcatactaaatataaattaattgtattttatttcaggtcttaattgttggtggagcagatacgagcacaga

SEQ ID NO: 103925 - DNA, 608 bp, Mimulus guttatus
  Intron number 2 from transcript mgv1a019982m (locus mgv1a0 19982m.g) derived from phytozome v7.0 (chr-ID scaffold_160 ; pos 477859 to 478466 reverse strand)
gactgaagaagaacatcagtacgtatatatttttcctcaatcattcaaattctttactttttcttttaatcaagatttatggaaaattccatttaaataaatatttgatcgacaccaatttatctataattgcttatttaatttgagtcatatgatagtacggaagtgttgagtcatttattaaaattttaacccattaagatcgataaagcaagcctaggtagatgagatgcatgtccttataaaaaatttatgcataactaaaattatgcataatctttaatttatgatactagtaaaattgaaacaattagaaattaataacatgaacacaatgcatatattagtccatagacccatttgttaaaaaaaaaacaacttttgcattcttttttagatattatatatttttttcatttatttttggtaaagaaatataataatttgtttaactgcctttactctatttgatttcacctttcattttttcttcatgtagttaattcaccttcaaatcataattctgattttggtataaaaaaatgtattttagaatgtcttcacaataatggaacaccgttttatcttgcacgcatagattatttctc

SEQ ID NO: 103926 - DNA, 703 bp, Mimulus guttatus
  Intron number 2 from transcript mgv1a015519m (locus mgv1a0 15519m.g) derived from phytozome v7.0 (chr-ID scaffold_8; pos 1087837 to 1088539 reverse strand)
agaagatagtggtgagtatttcatgcttggataattttaaagtacactgcatggttgcacgatattctcctcagtgtagctttgtttactcttaaaacgaaattaaattatatcctatgcatgtttctcatttcttagccaaagcttcttttactctttcattatgtgattcgtatggccggatcggtatgtgttgccttttgctttttacacatgaagaagagtgtcgatgcactctatacatttacagtctaagcatagtatgtgaactgctttacttttcatgttcccaaatgtctacgggagtttagttgggtgatcgagaagtcgacttgatgttcaagttatttaatttaattatgcacgtttttattttaggatttattacatttctattattttagagctctcaatggttaggattggctccatagcatagtgtcgatgcactctgtacatttacattctaagcatagcatgtaatgtgaactgctttaccttgaatgtttaatatatcagtgtcaagttgacttttacatgagtttgtcgtcgtatttgattgtgatctgagggttatatctgtttggttattgttttcttatgtatggaactagcagctagtaagaaaccatatgaaaataactcattggcaaaacgaatgtgtgcagatttccatcaatcaagctgctcgaaactggggctt

SEQ ID NO: 103927 - DNA, 774 bp, Mimulus guttatus
  Intron number 1 from transcript mgv1a022272m (locus mgv1a0 22272m.g) derived from phytozome v7.0 (chr-ID scaffold_108 ; pos 180062 to 180835)
agtttctcaaattaaatttagcatattataagaaggttatgcatcatctcaattgtgcatgcattttctttactgatggtatttagtaagtgtgatcttattatagcgtctcaattgttgccgtgcattttatttgcagaccgtggattctaaattctctttgtggaccacgagtaattttcgtaacttaacgaaacttgaattgactgctcattgccgttttctttccgagttcctcgcaaatgctgataatcttgaaatccttattttccaggaggtttgaaattttgatgatgcaatatgcaaagttcttagttgtcctgttttacgtcttcttttctcttctcttgacataatcgagatccctttctttttgttgttgttgttgttgttgtcatcagttctataaagaaggaggctggatcgaaccaccgcaacgaatggcgacatgcatattatcacatcttagagtaataaagctcgtcaacgtcaaaggtaaaacgcaggactttgaaattataagatatcttttgaagaatgctaaactgttggagaggatcgaaatatcacatcccgtataccgtgataccaagaaaagggctcgtttggttggtagaattggactgtttgaacgaggatccaaggcatatgaaattgcctttgtgcctattaatcgcgacggggctgcatcgtcacaaattctgaagtatagacgtctaaattgaactaacaaacttgttgcagaattgctttagtcatctttacttccaattt

SEQ ID NO: 103928 - DNA, 644 bp, Mimulus guttatus
  Intron number 2 from transcript mgv1a024101m (locus mgv1a0 24101m.g) derived from phytozome v7.0 (chr-ID scaffold_209 ; pos 224760 to 225403)
gcggtcaattttttttcgaagagacacaaagctagcttcttctaaactctgaacaaattacaaatggttttcacagtagtagcttttgagtatacggaatttaattaatttcgttgtagtttaacttttatgtttatatcgtaatatctattacagaagttacagttaaacaaaaattaaggattatatgtttgaattttttttgaagtttgtatcattttctaacgaggattaatcaattgaagttggtaacagtacctcttggtacctcttgtgtttcattatttcttgcatttgaagttggtaacagtacctcttggtacctcttgtgtttcattatttcttgcatgaaatcttattttccgttaataatataattaagtcgaatatatttatttaattaacaatatatatatatatatatatatatatatatatatatatatatatatatatgaaaaataaaacattaatgctagatgtgaaagttgaaacgaattttcattttatgttggttacacgtcgaaagaattgttaaattaatttatatccggatacatttttttccaaaaccaaaatgtggaaactttcatttattttgcaattaaggggggggtgactatccctactcaccctactcagat

SEQ ID NO: 103929 - DNA, 943 bp, Mimulus guttatus
  Intron number 1 from transcript mgv1a015218m (locus mgv1a0 15218m.g) derived from phytozome v7.0 (chr-ID scaffold_151 ; pos 21551 to 22493 reverse strand)
ggacaacttcttgacaagtttcaaggtatctatttttattcttattcaattcacctaatcaatctattatggggtaattatcatgctttctctgtgtgtgtgtgtgtgtgtgtgtgtgtgtgtgtgtgttttcttcactgtattccatgggcttgaatcaaatcatcaatctgcgttatatccgattcctttggttgtgtaattgaattttgtttgatgtgaatttacctttcaatccaatccataaggttttaatttcaccgctgtaaaactcagatctttttttatgtttgcatctgggttttttttctgtatgcttgtatctgtgttgatttaggcctcgtttggcttgggagattagttattattgagtttttattagattatctaatcttatctcggcaaccaaccgaataaggaatttaatatttatgctttatgggtaatttttgggaaattataaaagtagtttttgggaaattatatcgagttatatttatcgaagagaagaactgaataaattagagtgttcgtaaatcgtggccgtgtagctcagttgccgaaaacatgtcaactggctttagtttgcgtaatccgttgaattttgaaaatatttgttttgtttagtatcaatcaatcatgctaaattttataatcaatgatgtattcgctaaattaaacgaggcaaaatcgtgttgaatctacctctgtttctaaggttgtttgtgccacctgtacctctgtttctaaggtattatttccgtgcatacttttttattaactgaatatcgtatcgttcgattcttgtgcttgacgacattagtttcaacaagacccgtctttattattattccttaatcttcatcgatgaaatttaaatcattgtgcacgatatacatggtattatttaatccagaaaagctttcgtctgtgcaggaaagga

SEQ ID NO: 103930 - DNA, 973 bp, Mimulus guttatus
  Intron number 1 from transcript mgv1a009479m (locus mgv1a0 09479m.g) derived from phytozome v7.0 (chr-ID scaffold_1; pos 3424530 to 3425502)
cctcctaacctcccctcacctcatccgtgccgtatgtctttcttcttctttctctctctcttctctcctttctttgtgttttcatcctttcattttaatccctttgcatttttggtttataatcacagattagggtttttttaatgggcgcattaagctgtacgaactagtgttttgcatgtaatcctgaagtgttcttgcgcttattgctaattaattagagttagtgacttagttgatccaccgacagtctcgtgattttgaaaaaaaaaaaggacgaaaaatgggtcatcaattatgaaatggttgttttgattttgagggttttgtttgtattgagttatcttgtgagtctgttagttcagaattttgcagcgtgtcgaattgattgttttaaggtgtggaccaccatgtgtgaaatcatccatgtttatctcttgtattgtaccgaaccattatggtggggcatcactactgaggactgtcagtatgatacatcatacatggaattaagatgaaaaccttgacaactcggaatttggtttattcgttaggaacttatcctcaaaccaattttagaaaaaaattgaatccttgttaggaatcagtgcataaagttatagttagcacttgtttgtgttgttaacaaatcttatgcttgaagttcaaatctcatggaaatttatagcattagtaatcacctacaagcaccaagggaatcgaatactactgcttgatatgattttgtttcatgggattagactttgaggcctgattgcattataacttgagtatgttgactgtaagcttcttgtgctgctgagtgtggtattgtttttcttggtgaaattacaatgcttacgaaattaaaaatcaaaagatagagatccagacgatttttttgttggtaatgctcatggtctatttttatagagcaggtacaccttgattaccttgaagccggtgcagacat

SEQ ID NO: 103931 - DNA, 709 bp, Mimulus guttatus
  Intron number 1 from transcript mgv1a015634m (locus mgv1a0 15634m.g) derived from phytozome v7.0 (chr-ID scaffold_255 0; pos 83 to 791)
gtttgttcttcattttccttttattaaggcaacaggtgatgagttttttttccttgtgtttttgatttcttgttcttgataaaagacggacctttggatcaactttcgaccctttttagatcagggctagatcttgctattctgtgttctgggttttctttttctttaaaaaataataatatttatgtttgcttcttgattcttccttttctaatgtttctttttattacatgacctctgattttaaggtggctgatgctttggttttagtttgtctgaaatctgaaataattgttgcagaaatatattatgccgtccttgtcttgtactttttatttgagatccatttgctatttccctgcatatgatgaagttgattaagattggttgcttagcagaatcttgaatctttgggggtatttttgtcttttttatttgcgattgtatttttgttgttttttctttctaatggagcttcgagtgaagggcaattttgcttgcacttctcataatgctccgaatatttattcgcttcgttgctatttaaatcgatggccattgtgtttccatcattgtggccatttgcagcatgcagcacatatatttatatatatatatcacatgtaatgctgtttttatagttacaccaccgaattaagcacgaaagtaacattagtcttcttttctattttttatataggagaagaaa

SEQ ID NO: 103932 - DNA, 668 bp, Mimulus guttatus
  Intron number 3 from transcript mgv1a016866m (locus mgv1a0 16866m.g) derived from phytozome v7.0 (chr-ID scaffold_120 0; pos 3140 to 3807)
cgaagctcgacggtcaagtgaaggtctaccgtgatgtaagtattaccgtcatgcccttgtggagatagttgagatagacgacaattttcgatgctgtctgtttcgttaatttacttcgtatgtttagtatgtagttatattcttctgtgtgtggcagctcgtcgttactatgttgatttgattctagtccattgaaatataacgtggttcgtaaacagagttgctagcaccattatgctaaatttacgagtgtgccatcggattttctgtccttgtgtctattcgaactaacaaataatatacgaagtacgtttttgttttgtcaactaaacgagcttgcttaccaccagttagagtaacttaaagaagataacgcatcagttaaaatccagtactcaattcaaataagagatatatggcttctaatctagcaaacgaacaaatatttctgtgataaccaatataatttgatggagttgttcgagtagtcagaacttcgatgattaaggttattggatacaatatagaattttccgactggcatcaaccatttgccgtaaactcgtctttgtttctaaagaatcttgtaattcttacttgtcattcagtttatgttttctttattcaatgcaggagctctcacagcttaaacaatcacttactactga

SEQ ID NO: 103933 - DNA, 649 bp, Mimulus guttatus
  Intron number 1 from transcript mgv1a007935m (locus mgv1a0 07935m.g) derived from phytozome v7.0 (chr-ID scaffold_32; pos 362582 to 363230)
taacgccttcggtaccatcgcaatttttatccaaggtttctttctggatttatttattgatgtggcagttgatttataaccgatgatgaatattttggggaaaaccctagtctgtgaatttcagtattttatggagttatttgtttttgattttaggcgtagttaaagctattttctagagttattaggtattaagtttctgctttgccttttttaataaaattgttttaatgttttcttttttgtctgaatacttgtttgaagtggtttatactcgataaagaagatcaaacatttggaggttttatgcaagtaatggcatagaattttcaactttgtggtaaatatttggtttgtgatatttgtgagaacttccatggaggttttatgtacatgtgtttgttggctaaattatatgggatttttctagtgtaacaatgtatagagagaatgttttgataagctattcaatttcttttgagcatgaaacagttacttgtatgttttgtattagaatacgcactttcagatgttaattattttgctaccagcctgttgaaaatctgaaaatatatgaatttcattcatagttctcttattatttttttcttactcaaatcatattttaatcattggataaatgttccag

SEQ ID NO: 103934 - DNA, 765 bp, Mimulus guttatus
  Intron number 1 from transcript mgv1a025142m (locus mgv1a0 25142m.g) derived from phytozome v7.0 (chr-ID scaffold_55; pos 171318 to 172082)
ctacgcctacgtcaatttcactactcccaccgacggtcattcttcttcctccgatcacttttttttttcttctgtttttaatttcccattttttactgccacgtgtatgtatattatatatatatatactgttgttgcatgcatgtgagatttaaatggatttatctcacatttatgctctcattaccttaaaccatcacagatctatacacacacacacacacacacacacacacacacatatgaaagatccaaaggaaaaaaaattagatctaagggtgctctggaatttctgtattttttttttttttttttttgtggtttattttattcattataattactaatttgagtgttggaaattttatatgtatgttgaatccatacatgtattatgtgtatatatatatatatatatatatatacgtatatatgtatatattcactagtagaaaaatggtttttttactacgaccattaatggtagtaaaagggtaccgaatttgtagtgaaaagacttttgctacgaatttgtgcgccgtagcatatacgcgcgtggtaaaaactttgctacggtaaatggtcgtagcaaatacatttttgatacggtaaatcctagcgttttttatcgtcccgtagtaaaaggtaccttctattaaggctttttaccgtagcaaaaaatgttagtatactgatcgatgaactgatttttcatatggatatattgcagctgcaaacgcgaggaatagattgaatttcgctgag

SEQ ID NO: 103935 - DNA, 921 bp, Mimulus guttatus
  Intron number 1 from transcript mgv1a009474m (locus mgv1a0 09474m.g) derived from phytozome v7.0 (chr-ID scaffold_2; pos 2577249 to 2578169 reverse strand)
agctttttgcagcccaaatttgaacgcctagctaggtatttaatttttttaattttactttcatattttcatgctaattatcacaaatctgggattgaatcaaacaaaattatgatggttgggtgattctcaaaccgaatttgggggtttaggtatatatgagtatgaatttctctgttttttgctggatccatgagtcgtgattttttcagatgaaaagtgtttatttattttttattttttttagtatttcattatttttctattttgtagacaactggtacaagagggggggagttgtatattagtagtgagggaatacaatttcttgagatttgcaatttaaaaaaaaaaaaaattatgaatattctcctgggaatatgctttatgtggtgtggccaacacaagaacagaacagttcgtatgtgacaaacttcacaaatattttagtggtttaaaacgatgtgtaacaaagaaatttcagcagttaatttatgtgttccttgtcactttcaatcgtgtcttttagggctcagtgtacttgtttacgtctttgttttgattatttaatttaggtgagagttgagtttatcactgttgaatccgtcttgacaattctgactatcaaatttttgagatgtaaatagtttccgattgttaattcaactatttttggtctgcgtttgtgccaaaggatttctacaggtcgtttgaccttcgctttcggcatgttttgacctgaattggtcttcaaaggggagatagatacactgtaatataattattcttattcccatagaatattcctagctttaacgactgtttagacttttgcagtcgagccgttacttagcaatcgtcggttgctaatattatgtatttgcaggaataagggaattttgtttgttgctattgatcaaa

SEQ ID NO: 103936 - DNA, 831 bp, Mimulus guttatus
  Intron number 2 from transcript mgv1a017009m (locus mgv1a0 17018m.g) derived from phytozome v7.0 (chr-ID scaffold_2; pos 4545321 to 4546151 reverse strand)
aggaaattgtcagggtatgttatcactgcatgaaattctccattgttacttctacattcttgtaatattatctgcaagcatgtcagaaaattgcccttagatgttactgttttgttgtctcagatgacttcagattttaagcagtaaacaacatctcctactagaagttttagatctatccaactattgaaatatatgacatcataactcttgatgtacaccaaatctgccttaatcaaaacaccttatattttccagagaaatactttgatattttgttggtcatttaggatgtgaactctactgggctgtctgatatttcaagaaaagtcaaagtttcattttattgaacaattctaaggttctactggaaccaacttgaacttggtttgctactagtttatgtttaggtcgaaagttgttaaccgaaatttggttttttctcttcttcatccgtcataagtttagagttatatatggcaagtgctggagttctaagaatactagctgtgggataatttttcgaaattgaaagtaaacggtcgtaacatgcttatgtttgaaatttatgctagtctcaagtaggcaggcatacccgtgaagagaacactacccaaaacattctgctaatatgacttacttaatgttctgcagtgaccaaataaaaaaaattcttcagttattgacttggagaagctagtttattatgttatctgctattttcacaagtgtcattatttaggttctcacttttcaatcttgttccaaatttttgggataattgttacctttgcagactacaaaacgcacagttccgtttctatttgtcag

SEQ ID NO: 103937 - DNA, 957 bp, Mimulus guttatus
  Intron number 1 from transcript mgv1a015165m (locus mgv1a0 15165m.g) derived from phytozome v7.0 (chr-ID scaffold_8; pos 400650 to 401606 reverse strand)
tttttttcgcatcagctcgtcggccggcaatcgtagtacgatctctgatctctctctctctctctctacacttaatttggggtttttttaattaataattaggtcatcgtgttgcaatgattcttctttctcctgtaaaaatttcgatatgcaattcagttttgggaaaaagaattaaaaataaaaacgtgcttaaaaaaattagggagtgatagatccatatgccctaatttttatctattgataagtcgatctatttttttagtgttcttgttcgaaccattggtcatagctgcagtattctgagtcattagcatcaaagcttcttattttgatgatgttggtttgtgtgagttaatgataatgggatttatatcattttcttgtaagagaatctatctagttcattcattaatctgagaagtcggtttgatttcttacaagtaaatgtagaattgcgatacaacatggtgcgcgatttatttgccagcaaggctagttgttttttcatgtttcgttaagtatcggtgcaatctgagtttttcgatatgaagcagcataaaaatgtgaactctttcgggtaatttcgatatgatcaggattacccaattcagattcttcgaatgagccatataatcaagaatcaaatttttctcttttggggtttttatcttttgattactgttatgttttagtatttcgattcgcattctattggataatatagcatttgaaatttgaatgcttcttgagctgaaattatgaatgccgcgaaatggagaatttgcaattgctgtaggtgaaacggagaattctcgtgataattttagtttttcttttttcttggaaagttttcatataagtgaaataaaataataaatacaattgcctctattgctatatatcatcccattggcacaattctcgtatatttgaatgttttgtgggggtcccagg

SEQ ID NO: 103938 - DNA, 304 bp, Mimulus guttatus
  Intron number 1 from transcript mgv1a008717m (locus mgv1a0 08717m.g) derived from phytozome v7.0 (chr-ID scaffold_18; pos 881550 to 881853)
ttgttgctgttaagtacatcgagaggggtgagaaggtaagctactacttgttgatttggttttctatttgtggtcgtactccaagtgttcgatctaatgcctccgaaaaaattatggaatttgtttttcttttttttccgctgtgactctgttctttatatttgtgtatctagattttgctataactctgtttttcttcgtttgattgttttttacttccaaattaatattatgcaattaacgcgctacgtaataatatcggtgttgtttttaactctttgttcttatatacaccgatagattg

SEQ ID NO: 103939 - DNA, 852 bp, Mimulus guttatus
  Intron number 2 from transcript mgv1a006218m (locus mgv1a0 06218m.g) derived from phytozome v7.0 (chr-ID scaffold_123 ; pos 563598 to 564449)
cacaagaataatgtgagattcttcttcttcttcttcttcttcttcttctttattatgtatttattgcagtaattttttttttatattggggttttatttatttagcacctattataatttactccaattgttcaaacaaagaacaaagagaaaccctaacttataaaccctaatgtattgagggttaatattaaaggttgcatttgattcaataattgggaattttacaaatggtacttcgaaaactgaacgaggatgaagaaactaacgatgattctttatctttcttaattgctaagaaaaatagtagaaggattttctttcttttttttttttttttttgtgaaagtatggagtctttatatttaggcgaaatcgaggttctatgtttaaatggtgttccgattcttatcttaatatcgataatacgaaacacgaaacacacatgtttgaagtgatgtagtaaattgtgtagttgatttcgttgattgacgttattcaaatatgagatgtaatgtggtttgagatgtaggatattcttgtttgtattcgaagttgaaactcagtgatgtcgtattgaatcttgtgcttctgtatcgcagctgaatttttatgtttaaactattaatcgttggaatcaaacccataaacgtgtaattaaatttccatttgatcttgagatgaaaataatagtctctcgtatgtgatatgcgtgttctaccagtggatcctttgttcacattcgtttctattcaatttattttccaataagatagtttgcttcatttcgcacttacaatttttattttattttatttttttatattgattgagcagagtgattctgtaagc

SEQ ID NO: 103940 - DNA, 1041 bp, Mimulus guttatus
  Intron number 1 from transcript mgv1a012043m (locus mgv1a0 12043m.g) derived from phytozome v7.0 (chr-ID scaffold_13; pos 2118583 to 2119623)
cgccgtcttcttcttcttcatccaccagcaaagtcagtcgatttctgaacctctgttgtttgttgatttgcgttaccgaatgatgtgaaagcatgttttttttttccttcgttcgttggtttggaacgtctcttctgaggggaattgatgtttggatcgtgctttctggatatactgcttgattttgttttccttcggccgtgaaattaactgattattctcttttcgttttacatgagattcattttgtggttttctgaaaatgtatttttttttaataaaaatttgaaacttgtttataattcatgtaatacagtaatagatcaacagcgtgttaagaaattcatgtattttatggtgatcatgttctggataatccttccttggcaattagggttagagaaaataacattccgattggagatgagaaccttcggaaatgcaaatttgctgtcacgtttttatttttatttttatgttaatcttacaaactgaaaatctttgtaaaaagttaaatgcatccttccttggcaattggggttagagaaaataacattctcgaataaagaagagaactatctcaattatgtctgtaagtgtagtaaaaacaattagggtttgttaaatgtgtacggtggtcagttttggtttttattgggaattaatgttcatagaagttctgaatttccaaactagtgttgattgatttcaggctttggttcgtgtttagccgtagcataatcacactaatagttttgaactaaaatgattgaagatttgattggccttctatcaagatgcaatatggagatcttcgacaatattttgtattgtgatgcagtggatgtgtattagttctctattttttttcttactggtggtgatagtataatattgtcagatatggattgtttcattgtgatttcgtatgtacttgacagatgcaacttttatttctaagtcattttctgaatgaatctaattttctgttatgtaatgaaaacaggctagaggtttgaagaaacacttgaagaggctcaa

SEQ ID NO: 103941 - DNA, 960 bp, Mimulus guttatus
  Intron number 2 from transcript mgv1a016939m (locus mgv1a0 16948m.g) derived from phytozome v7.0 (chr-ID scaffold_16; pos 1919718 to 1920677 reverse strand)
acactctctatctcaacagcgtccaccaccacaaggtttagtgtcaatttttatttattttattttatttttaatgctgtgattatgttctgcaaggctgcgattgatcatatctaaaccctagttcctatttctttttatttttccaaaaaaagaaacaaaaaatagaaagaaagaaaaatcaaatcttggaagtcgaattgcgctttattactggttcagtgtttgctgctgaacattttgttcttccgaaatgacttacatatctctttatgtattgatggcaaatgcaatgagatgattgaatattgattagcggtggaaatcgaaatcggaatttccgatttccgccaattccgatccgcaaaatatccgaatttgaaactatttttttctttctgatttccgatttttttccaaatttatttggaacggaatcggaatggtgtataaaattaccggaaatttcgattttagttttgattgcttctcgaggcattccgaaatcggaatgaacttttgtgttacgatttttttggaacgaaaattggaacccatttttatacgttcgaaaataattagaaattttccaaaaaaagctatttccgatccattccatccgatttccatcccttgtgcatatgtttatcaattgtagcagtttaaaatatgtctgtttttaattcattcgccattgtttaagatgtgatttgcatattaatggcttaagatgcgattgtgtgtgtgtgtgtgtgtgtgtttccgtattttttttgaaagaagaaatagctacaccgcaccgtaatgagccccagttctctagtattagtacacgtgtgctcggcttctcgttaatgttgaaattatttagaataatgaagtcaataaatttgtcgtaactattacattatggtttgagatgcaggagttgcttttttcgtataatatagcggtggatag

SEQ ID NO: 103942 - DNA, 957 bp, Mimulus guttatus
  Intron number 3 from transcript mgv1a012779m (locus mgv1a0 12779m.g) derived from phytozome v7.0 (chr-ID scaffold_124 ; pos 649558 to 650514)
cgaacaagtattgggtcgaaagctcacataaacgggtgagtcaaatgttaattgcttcgatgaatttcaactcgttccacattaattaactctgtcgtatgctttcttccatagtttaaactacattatcatcacagaacacgtgatggtaatataataagtaagtgaagttactaaagctattttacaccattttgtagaatcttcctgctattgatagaccttcgagcatatattctgaccatttttcgacatttctcactgtttaaatgtgattgtgtgttcactgccgaagatgtttttaagattgatgcagtaaagaaaagcttaatacatgctaataatgtactcgtttgctttggttgatttgtccgtatggtttcttacaaaaacagaaacgagagtcattagagttcattaaaaatctcacacaatttattttctagatgatcatgaaactcaaatgaaatcaagtttagctacatgatcctgctaattgctcacaagcgtcaataaacaatctataggaaaaagtgaaattggattgtaaataaaacacgagtttttcatagtattttgtttataactgacagataatttttgatatcctaatcctcaaaacctgcatagtcacaatgtagaaaaaatcctaaacgatccatggggtctcttcatatttgaataaagtgccattcttggagatttttctgcaacgtggctgttaaacaaacaattgttacatcatgtgcaaccgacattttcaaaatttggtttttattgtgaaatttcattcttacttgcatttttccttgctgcttaggcatatatgtcagttcttgaattttcaatgaaattgacttcttggctttatttatggttaattggtaacttttggcttgtgatattcatacaagttgtgttttactttttgacagtacgtacctagtgttggggaca

SEQ ID NO: 103943 - DNA, 734 bp, Mimulus guttatus
  Intron number 1 from transcript mgv1a016689m (locus mgv1a0 16689m.g) derived from phytozome v7.0 (chr-ID scaffold_262 ; pos 22955 to 23688)
tttggtccccttcacagcagaacctatactcaaaggtaaaccatctctctctctcttcatttttttttgtttattgtttgttggtatttttattttattttatttactttttatttttttattttatttttattattattttgtgaatgttcatgttcttgtggaaaattttgtggttttctggggtttgagatgttagtggcggcaattgaatattaattaattactgggttttttggttttagattagttttgtttcggttctccgtttgaaggaaatgtgatctgattttggttgtaatttaatttttaatttggttgaatgcaaatgcttattatgttttaggattgtaatattgagataaattagatttgtcctggtcctactaattaggatatgataattaatggtttagatcttgaccataatcttgaatatcgaaatttctccgtttattctatgcatctctctttcgtctaatatccgaacatttgaatcattactttacgccggtttaaactttttgtgcggcgatgcgacggaataaatagacgaatgtaataattacttttgtgaactctaggggtggaagttgattagtcgaacttatgttaggatttctttaacattttcctcgttccattttgattccattgataacgattcctctcgtttcttctcaatcttgttgcttacaggtcctgccattggaggagtatttccgaaccccgag

SEQ ID NO: 103944 - DNA, 858 bp, Mimulus guttatus
  Intron number 5 from transcript mgv1a006792m (locus mgv1a0 06767m.g) derived from phytozome v7.0 (chr-ID scaffold_1; pos 4665494 to 4666351 reverse strand)
aggaatacgagaagtatttgacggatcctgtatgttcctacttcagttttagtattctgctttgtcatacataatcaacagcaacagtttggttcttttcgtacacttgatatcaatcaaactgcaagaatgtcttttctcattcaccgtcgacactttgagttggattgctgagcactaagattctatgagctttgccatgatatttgtgctgacctgtcacatctttatctggaccctcacttttccagtacttcttgtggtttatcttttgtgactgaattgtgtgaactgtattttctagtaagaacttcgagtagaaatttagaaggtttgcaatgagaggtactatagcctagtctagagggcataaattgctgtttgctatctcaatctagtttctcatgctccgatctcatttcaaatacattttaaatctgctaatttaatatccaataaatcctatttgaaatagatggaggacttcaactagtttcgaacggtaacatacttttagctccctgtcgttttttttttctctttttttgtgttcaaatcacaaaaaaatgtgtttagttggaatttatgtgtcacaccatatatttttgtagtctaaagcaatttctacaaacatagtcactcatgtgcctcagacagtgatttggcataaaacaagaataaccagactgactcacatagattctcaatcctaatcgtccagaagatataatttgagtgttcactgattcatatcgctaacattaattgatcttcaagttaatacagttcattgtgataagtacctaacggccaattttgaagcttatctcagttttattccgtattcttcctttaggc

SEQ ID NO: 103945 - DNA, 812 bp, Mimulus guttatus
  Intron number 1 from transcript mgv1a003889m (locus mgv1a0 03889m.g) derived from phytozome v7.0 (chr-ID scaffold_36; pos 1140620 to 1141431 reverse strand)
tcagccgtgagcttgatctacctttctctttatatgttgtactgcatttaaactcgattcgagcgactgaatctctctgtctctctgtctctctctctctctctctctctctctctgcacattgtgcgacgctgcattttccggttaatcgacgctacttgtgtttgtgttactgttttattttctactgtgattcggttctttgcatgtgtttttgtttgttctccgttagctctaattggttcatttcatcgtcggatcgataattttgtagaactctgcaaatagatggtaaaaaaaaaatgaattcaataacgaaaaagagatcgtagtcgtttataagcattcgctgccgccttcaactatcatgtaacgaatcaaagggcaattgtgttaatttacctaaatatatgaagtagcttgcaaaagttagaaaatgaatgtgcttgtcaattcccatgaattaaattttacatttattcatgttattgggatttttgccaggtaaccaaccaattgtccaattgctagacgatcatgttttagaattagcagcaatttccgtttagttataaattggaattttgcaatgttgtttttgtaattaactaattattatgtaacttccttcattttactcccgttttccgtgccttgattccttcatttaaatatgtgtatgattttactgttattatttttttttcccctataaatccattgatctatttgtgctaaagctaattgtaatttgtgatgatggtgatcgaacaatagcaaccacaaatcatactactcaaggaagggaccga

SEQ ID NO: 103946 - DNA, 399 bp, Mimulus guttatus
  Intron number 1 from transcript mgv1a004064m (locus mgv1a0 04064m.g) derived from phytozome v7.0 (chr-ID scaffold_393 ; pos 82459 to 82857)
tgccggctcaaccaattaccggtgccactcagcaggtttgtttgtgtctctatgcttcataacattattttctaatgttttctttgagtaacaattttactatctcattatataattcttcaacgattttgagttacagtagaatctcgataaattaataacttcgcgtaaataatactttcttctggtcccgacttggtaaaaacatattaagttattagttcgataaattaatatttcgctaaattaatagaattttgttggtcctgcctctattaatttatagaggtttaactgtatatcattcataatatgaatggttaatttcggccgtataatataatatgttaattcttatatataggtggaaattcaagtgaggaaactttattgtgtgga

SEQ ID NO: 103947 - DNA, 912 bp, Mimulus guttatus
  Intron number 1 from transcript mgv1a016097m (locus mgv1a0 16097m.g) derived from phytozome v7.0 (chr-ID scaffold_27; pos 616703 to 617614)
tcgtcatcggtgtaatcggcgtaattctataccaggtaactttcaatacatagagtatcaattagaactgttaatcagctgtgtgctaattttcatctattctacttcagccgaactagttcgtttcagtttatagatcttagcaagtaatttatattatttttttttcggattttgaagcaacgtaggctgtgggacttgggtttgatcaccaatttaactgttcttgaaaagaggcgacaatggaagataactgtttatgcactcaattcgtttgtaaaaatgtttctttgagagaaattaagagaaatgaagagtaatattactggcaactatgcatctttgtctttttctttttctttttttgaaaaaaacatgtaaaaggatttccctggtgaaattagtttagctcgtctttgcgcgtaaattgggcgtttatgtgtgttggctgtgccctagaagttttagtgtttgatgcattttttaaacaaggtgccatatcatttgtcgattatgatacgttaatgcgataagacgagagctgtttgaagtttcgttattcttctcttgaatgaaatcttgcctagcataaaaaggattaatgaataaatcgtagtgttttgatctgaacgatgagctggtatttgagtgcatacgctttagtgtaaggtgcttgttggacgaatgacaatgtaaaccataaatctaatgaactatcgttgcagttattatgtgatcaagtctatttaacatggcaagcttagagtgaaaaagcatcttatttattcttctttctctatcggttttcgggttttggggttttggatttcgaggttttcgggtttcggtttcggtttagattcattttatgttatgggaaaactgatgatgaaaattgttctgttgcagcta

SEQ ID NO: 103948 - DNA, 855 bp, Mimulus guttatus
  Intron number 2 from transcript mgv1a005435m (locus mgv1a0 05435m.g) derived from phytozome v7.0 (chr-ID scaffold_11; pos 563529 to 564383)
tggttttctcaattgcaattcgaattttactcgaggttagggtttcgtaattcttttccgattttgtttgcttctgatttatcgaattgcctctttttggatcgttatgtggtgtagatttagacgtgggttaatttgaaaagctgcgatctttgctgattttgtttgaaatttatggaatcctttttcgaaattgattggatttaactgaagttattgtagttctgcaaattgtttcagctaataacactgtcatgcttgtttggattctctcgtgatgaactttgccttagaaaatggctgatctaggaatcgatcaagtcaaatagcagtctcgattaaacctataactcatataagatagagatttgttcctattaaactcaattttatggcaattgtttgtttcttctctattgttatagttgttcagcaatatacgagatctcgtttaagattaattacaagaatgatgtatgtgtacggattgtaacttcttgtttttttttttttttaccatcatgtcatttggcaaatgagtaatcgtgcaaacagttcacatggtggttggatcatgtctgatctgagtttttcaaagggtaaatagtgacaaacatttttatttgcctgtcccttgtttattttgccgttatcgacgaattatgatttatggatctagattttcgttcgcttcatgtttctttaaagcaaattcaagttgtgcattcaacttttgccggtgaattcctggtattttcttgactgctaggaaattcatgtatgtttctctatttactagttttgtggtcaaattttgtcttcggctctgaattttatcttttgccaggatacaag

SEQ ID NO: 103949 - DNA, 759 bp, Mimulus guttatus
  Intron number 1 from transcript mgv11b018270m (locus mgv11 b018270m.g) derived from phytozome v7.0 (chr-ID scaffold_1 8; pos 95885 to 96643)
gtgtatgatttaacaaagaagacaaaagagaacaaaaaaatgatatatagatctataattagggtttacagtttatggaagaagatgaaagaaaagtcacttagatgtaagatttcttctcatttaatttgcaattaactttcaaatcattaattttataaccgaaattttggtacgccaacttttcataccgtttactgaattaaatatacgatttggtgcggtaaataaccgaattacataaattttgtgtaaaaatatttaaagaacatgtggctacataaattttatgtaaaaatatttaaagaacaagtgactgtaattacccaaacaataagagttttttcgtaatttagtcatacctcatcggtggccgtaatttgccgtgagaattataaaagtttaatatgaaaattattgaatttgctaaattaaagaatttttttatctctccaccgaattataatttttttaggaatattaaacacctttttatccgctactccaatctcattaggtgtcttttcatcataaaaacaataaaaataaaataggtatttgtattctataatataatgtttgttctaaatcaactcaacctcatattatatatatagtcctagttctaaaccaactcaaaacctcatattatatacacatgctatcaacacgtaaataatcattcattgtcaacaattatcgagttagagtaatttatatattcgtccacaaatattttctagggttttagtagaaaaa

SEQ ID NO: 103950 - DNA, 406 bp, Mimulus guttatus
  Intron number 1 from transcript mgv1a023251m (locus mgv1a0 23251m.g) derived from phytozome v7.0 (chr-ID scaffold_122 ; pos 720437 to 720842)
ggcttgaactcgtcagaaagatcgaactcaaaatttatcgagtcggctcagttcatgagcgccatgttgcaattccacctcaagaactttaagagatatccattatgataattttcttctttttttacccccttcatttctatgtcttattgtacttattatttctagttgagtttatgaacaatgcataattattatataacaatataatgttcttatgcctaataaaccaattcccaataatctaataaaccaattcccaaaaaaagaatatcataaaaaaaaaacttgatttaaatattaactcaaaactactatcatataaaattggcttcatgcatatctcctatatattaaagaacaaattaaagacattcttctatattcttctatcccctccaaaaaa

SEQ ID NO: 103951 - DNA, 904 bp, Mimulus guttatus
  Intron number 1 from transcript mgv1a004408m (locus mgv1a0 04408m.g) derived from phytozome v7.0 (chr-ID scaffold_242 ; pos 96886 to 97789)
ggagagaggtcgatactcctcgtaggtcagtaaatttttgtgtcagaacttttggaagaggattatttgttctggatttgataatgtggcagttttgaagaaggattatgtagagatcgaagtttatgagatagttggatttaggaatctttgtgttgcttcatgtgcttaaaagtttttagtttgatgctggattagtgggaatgcgatgaaataccactgcatttgatgttgattagatcttgccgagctgaatttttaggaattgatgaaccgaaacctctggctgtttaagtgattgaaaaatcgaaaaaagttttggaagctgaaagaacatgaaaggttataactcttaaaaaatgctgttactttgaccatcgagaaaaaccaaatgctatgaagcatgttggcctctgtggtataatcagacaacagtggtagcagatcaatttgagattatgttttctagtataataggattcaagaatgaattgttagtgagaagtcaaacgctgaaaaataggatataactattggaaatgatgaactgaaatttgatattgttagatcagcagtttctttgtgaagtgaatttggtgttgtttatttaactgtatgatcaactgtggtactgataacttgaaaggctatggtgattacgttgtgtgatttgggactcaataatacaaatacagcctttaggttttaatgcatattgaattttgtggatcactaatccttttgttaattgtttcatgagggctgccttcactatatgatttttgaactggctaggtacaattttgttttgctttattgtgataaaatgatactgatacttttatgtgcggatttacttatttttctagcctagcgaactcagaacagcaaattgagcagaata

SEQ ID NO: 103952 - DNA, 893 bp, Mimulus guttatus
  Intron number 3 from transcript mgv1a004063m (locus mgv1a0 04063m.g) derived from phytozome v7.0 (chr-ID scaffold_117 ; pos 204718 to 205610 reverse strand)
tgggatcagctccatagctttttcacgaaaacagggtaattaatccgctctctttaaattatatgcacatttaatttgcaggagtttgcccctcgttcagtaccgaaatgctgaaagaagccgctgttttgagggttttagaccttaagaaattatgccgttgttacaactctgtaccatgtctaaatctaatgaatgtaggagtccatagttagtaaatctggcatctgccatgtagcacggacacggaaacgacgatatggggaagcggatacggggaaacgggatgtcccgaaaatgaggatactggacttgggggaaacgtgtaaatattaaaaatataggggtatttttataaatatactacataaacatatataagtttttagttatatataaattctttttatatatttttatacaaacatattcaaaataagttttactatcaactatcaatttgcagttgatcattaaatcatgttgtaactaattagggaaaaaaattgaaaatttgctattcaaacatgtttctaactttgtagaaactgcaaaaatggcccataaggtgtcccgcaggtgtcctcgagtttccgacacgaaacgcggaaacgtttagaagctgaagtttccgtgctgcatggggcaactgcaataaccacgattgggtagatatgtggcgtttgttatataatttttgcgaacccattttttcaagcttctaatcttctcccccgccaattcactgttttatgattgcgcaaatatatggattttcttgtttcaccattaaaaaaaaatcggtgaaaaaagtagcatcggcttggaatacggtattgttagtagaactaacgtattgaattgctgcagagtgatattaacatttggactga

SEQ ID NO: 103953 - DNA, 507 bp, Mimulus guttatus
  Intron number 2 from transcript mgv1a010172m (locus mgv1a0 10172m.g) derived from phytozome v7.0 (chr-ID scaffold_2; pos 3659035 to 3659541)
ctttgcacttggtaatctctctctctctctctctcttacttttcacattttggatcgaaatttgagttgaatttctgatctgtagggtacactgtttttgtttgatgattagggtacactgttaacctgatctaatttgttgtagctaaggaacacttgtgtatttgttctataactagcgtagcagcctaggagttgttcattaagaaattagcgatcgatttcgatgtagatgatacagttattgcgacggataacataaagtttattgtactgtatgcggactattttatgaccttgttcttgttccatgggaaattcttcgttttctgagaattcggtattgaacaaacacttttgggtgtggtgggactaagctgatgcctatttcttatcagtcagtttttatacattaatcggaatattcatatcattggatattttgatcgtaacttctattttaatattgcagttggagattgctggaaggacagatattcccgtggc

SEQ ID NO: 103954 - DNA, 1035 bp, Mimulus guttatus
  Intron number 3 from transcript mgv1a014956m (locus mgv1a0 14956m.g) derived from phytozome v7.0 (chr-ID scaffold_8; pos 1883882 to 1884916)
ccggtgcacctgcagtttcacctgattgctgctaggtaattacgttactacatctctttcctttcgtttcttcatatacattgatgctccacatctatgattctgtgttctttatatgtagtgaagtttgtctcttttaaccgtcgtatatacatcgtcgagtccaacaatgtattcattctcttataacaatatgttctacctttgaaaatactattaggaatattagatacaattataagtatatgtatatcacctttgaactaagaattgcccttagatggttaagttttatcgtaaggtgtttagctgtttttagttggtcagctgaagaaaatattgtatctagacgacaagtttcgaaattaaacccgttggatgagttatcaaagatcaagtagaaaacccgtgtgacgagcaatgaagcctacaccaagcttttagactaatcaagaaccgcgtgtttttaccaaacattgcttgtacgaagttctgatgcacatgcagttttttacaatttgatttttgctgcattttttattttatttttaaagatgatttgtgttttataatgttatctggttccttccattgttcatatataatcctttttattaatagtacctaagattgaacatactgttaggaataatagatacaatatataaagctgtgttgaggacatgaacgaagaattgccattagatatggttaagttgttgaacgataattttgaacttgatacatatgttactttacttatatctcatgttgaactaaatatttcttagattttatttgattggtgcaatgacttctcgagttggtaattatgggaaaaaaaaacgagttttaatttttgcttatcgggggattgtgaattggtcgtcccctaggttgattatacgattagattctcataagatttactttgagtttgtgtcatcgtaattttgcgaataaactatcttgacctgaaaattttatgctcttaacaaccttttgttgtttgttttctggttgcaggcgatttct

SEQ ID NO: 103955 - DNA, 829 bp, Mimulus guttatus
  Intron number 1 from transcript mgv1a004005m (locus mgv1a0 04005m.g) derived from phytozome v7.0 (chr-ID scaffold_39; pos 272508 to 273336 reverse strand)
agagatccaagatctgtggaggttttgcatttccggtaagatgtcgtcacagtattcggagttttggttatgttcaaatgtttaatttgcctttgattttgattgatccgagtttagcaatgtgtatatctctaccgctttctgaaattaacgcggtttatttcgctagttttcttcagaattatgtgattaagcatgtaaactaatttagttcttcattttcgatatcttgaaattcagatgagctgacaagcgtgatacctaaatattttcaattttgtgaatatgaaatttcgaatacaccagtcacgctattataattttgaatagtagcataattactgtgaggagtatttcagtgatggggcagtttaatggaaatcgacattgataggtccgcaagtaatttgcttttgtaattattataattaatactggaagacgattaggaatgtcgaccaaaattttagctacaactgtcaaattatatggctcgaaggcagtcagcatgcagtaatgaacatgagaaggttgaggacattgacctagcaattagcatgatttcgtttcctgtcatcggcatagcatgatttttccctgtcatttgtttgtaatgaatcttctcattcccacacgtaattcttacttaaaactagttatcataatgcgtgtgtgagtcctatttatataatgtacatgtttgcgataaatttatgtactgaaatttgagaccttgaagtttggggacattgctgatggaacttcgaagagtcggtaatgtgaattaattatgttgatttatttgatttgcagatattattccagtgat

SEQ ID NO: 103956 - DNA, 633 bp, Mimulus guttatus
  Intron number 1 from transcript mgv1a020636m (locus mgv1a0 20636m.g) derived from phytozome v7.0 (chr-ID scaffold_235 ; pos 110175 to 110807 reverse strand)
aggtgagttcttgattctttattaattaggataaaatgcacttaattagtcccctataaatttctaattttcgcacatttcccactacaaattgaaaaaaaaatggactcttccccttcaaaattttgttccacttgcactttgcctcaaatcacggttcctgtcatttttctcatcgtaattgccatttatccgtccacttcaagggtatttgaggcattttattattttcatttaatagatgaaaaacacaatccatttcactaatttcaaaaaaataaatttgggttcttttttccctcccaacacgaattgtgcttattgcagtccaaaaattgtgagaatcttcaaattcttcttcattgatatgtccttgaaatgatgcaaatgtccttcaattgaatgtattcattgcaactccggtgaaaaatacgccgcaaattgtaatttggtgcagaatgcaattcgagcaaaattttgaaggggcgaatctctgttttgaattcgtaggggggcaaatgcaaaaattgaaaaattctagggggcgaagtgcacttaattcgtcctattaatgactaacaatctctattcaattttatatgtatcttcgttttttccatcttgtcgtagatt

SEQ ID NO: 103957 - DNA, 488 bp, Mimulus guttatus
  Intron number 1 from transcript mgv1a016382m (locus mgv1a0 15406m.g) derived from phytozome v7.0 (chr-ID scaffold_87; pos 556937 to 557424)
gaagaaaaaaagttgaagttttttttaccagcaaggtactgttcgtggactttgcttcagcattaattctgattttttgagtttcgattagattttgcaaaaaaaaattgaattaattgatgcggtttagggtttgagtaggtagatctggaaatcatttattcagagggttgaaactgtatattttttgggtcggattatcgataaatttcagttttttttgggtgatctgtggttaatcggtcttcgatttatcttctgattaaaaaattggtttaatttgctcttcgtttcagagttggatgattgaaatctgaaagggctttctattgataaatttcagtttttttggtgatctgtggttaatcggccctcgattaatcttctgattgaaaatttggtttaatttgctctttgtttcagatttggatgattaattttgtttttttgcgttttcagttgattttgatccgaacagcaatccgatc

SEQ ID NO: 103958 - DNA, 967 bp, Mimulus guttatus
  Intron number 1 from transcript mgv1a002602m (locus mgv1a0 02602m.g) derived from phytozome v7.0 (chr-ID scaffold_124 ; pos 621225 to 622191)
ttgagcaggctgagaactacgcatctgtgcttaaggtcagatgtttcatataatttgttttatgattgggcaattagtttgctgattgatttttttttcaattttttgacatattgtatgcgcttgcttatacagttgttgcatacaatttttgaattagaactgttcttcggccttgatttttttttcttctagttagttgtttgctaatatttaatcttatgtgtgtgtattcgtctgttcggaaggaggatttggatcactggtttggttttggtggctgcaaacgcatcgtactgaactctcgttaggttgcttttagatggaaggattcgagtgaagcattcacatcgataataataatcgattgaacttgtttggattgattcatttgacaatagatttcaaattattaagtgttgctgtttatgaaagaggttttgacttaatctgtgcagttgcttcttgcaacgggatatcacgttgtagtctgcagtgatattttatgtatggtagaataattcatttatcaatttttttatggcgtttgctttgtatgccttatgtgtttcgaattgatgataatttcatcagatgaactccgtttatagagtgcatcatgaacaaagtctggattcgaaactgttcaaaattttgaaaattgttctgaaaaagcagactgtgtacttgaagaacacggtggcctgtcaaattatatataaaaaactagatacgaaatacttgatttaaatattggttaaataatagacagatatcactgtgtagtgtgattgatttcgtcatatccgtgctttgacctattaaactgtgtgcgaatttaaattcattattttcccttaattttatgtggattaatgttcacaagtagtaagcagatctagacgaaagatagagtttgttagtcggatcatgactggttgctataatttgcagtttcaattagaag

SEQ ID NO: 103959 - DNA, 878 bp, Mimulus guttatus
  Intron number 1 from transcript mgv1a007496m (locus mgv1a0 07496m.g) derived from phytozome v7.0 (chr-ID scaffold_30; pos 1313041 to 1313918)
tattttctgggttttgtttcatttcgaatttgaaggtacttttttgtatggaagcgtgattgattgatttttttttttttttttcttgtttgtgctgagcgctgttgtgacgtgtttgtatacgtacgttttgatgatcatactcgaaattgatttttaatttttttaatcgattttgtggcgtagctttaattgggtgtttatgtttttctctgaccggaaatttctccgatcacttatgggtggcgtagctattgtagggacggtggtgggcccgaattggctgcttttcggcccggtttcttgttttcacggcccgcctctgtggaaattgaattgatttgtgattaaaattgatcttaagttaattcaaaaaaccaaaaaatgaaaggtgatctggtgtaaaaattctactgtaattttgccttgtttaaaaatgattttatggacaaaaaaaattagatgtgtgtgtgtgtgtgtgtgtgtgtgtgtgtgtgtgttttgtgggtatataatcttttgactgttaaatgtttggattgcacaattagaatccatgattgggaaacgaatttacgattctattcgggtttgattagttcttattagaatccacgattgggatacgaatttacgtttctattcgggttcgattagttcttactagaatgttcttggtgttggttgttggagagaggtttcttattacagaaaatataatgttgttgttgttgaacaaaactttaactatctctctcttctctctctctcttggtaatctgtaaaaaccagctcgtattctcgttcgtcttttcattgaaaacggttttctaagacacatgtgcaatttcttcgacagggattaattaattgggcta

SEQ ID NO: 103960 - DNA, 466 bp, Mimulus guttatus
  Intron number 2 from transcript mgv1a015028m (locus mgv1a0 15028m.g) derived from phytozome v7.0 (chr-ID scaffold_2; pos 496574 to 497039)
tgctggaagtatttcttcatcttattacatattctattaaaagataaatgatatattatctgatatattaagttgaaaattcacatgaaaaatattaaattcaactaaaaatttaattgtctttgattaaactaatgccaaattgtggttttgatccttccgattttgcatgatatttcgattcctaatcgccattgaagtatatcgaaccctaactaccgagttccgattcataatgtatcgacaattcaagaaaaaaaaaatagcaagttcaatgcgacattctttttttgtcgcttcaatgtgtcgataaattctctagtcgtgtttattaatttcgtgtgacgtgaattgtgagctatactcgttttttttcctgtgtcacaaaatctttgcatgaagtaaatttaaatattattcaaaaaattggtaattatattaattattggtgagcaggtggaacaaa

SEQ ID NO: 103961 - DNA, 1021 bp, Mimulus guttatus
  Intron number 2 from transcript mgv1a013583m (locus mgv1a0 13583m.g) derived from phytozome v7.0 (chr-ID scaffold_13; pos 998042 to 999062 reverse strand)
ttatctcatcaagcttctcttgatcggtgatagcggtgggtaatttttttctcaccattttttttcttctgaatttcccttttttttttttgagcttttctgtattttggatattaaatgtgcgaattggtttttgcaatttttactgtgttagctggatttgtggcgattttttttttttttgtttgtttcggcacctctcattttaattatttgtgattgtgctcttgatcatttgatggggtttttgtgtgaataaatattaaaaggtatatatgatttactggcaaaaatggtagcgctatttaaatatttttgcatatatgtgctgtcagataagtttatatctctgctttggtaatgtggtaggaaaaatggagcggtgtctcattctcatagttgttaatggataataagatttttatgcgttctagattcctacgtagtggagaatatcagttcagttggctcttcgttgtaattgttctgaatgaaatatgagaaatgttggagtcaagaaatgtaagatattcatgcatagttgaatgttatgcagtataagttaccgatgatccacatgacatcacatttgatattagtttgtgcatatgataatttctttcaaattgacttgatggagctactgactataatcttgtatgtatgattttgtggactcggaaatgagtgaacctgcctaatcggggatactggcccatataatactgcattggcataactggttgtcaattggacatttcatggtccttaggtggtagatatttgatccaagcagcagaatggtatttcacaagaaattgttggaactctataatgtgattatctttaattggttgggtattccttttgtcgatacattttacaaatactcggggcagttagtttagtcatcctgaatatactgtttgaaattgttatttgaaacggtttgggttttagtgttcattattttcatggtttttcaggtgtgggtaagagttgccttctcttacgtttttcc

SEQ ID NO: 103962 - DNA, 712 bp, Mimulus guttatus
  Intron number 2 from transcript mgv1a000259m (locus mgv1a0 00259m.g) derived from phytozome v7.0 (chr-ID scaffold_102 ; pos 563695 to 564406 reverse strand)
tggataaatctcacaggagcaaggttcttcaggaagtaagcattcgtaccaacaatttctgccaccgttgatttaatttttttttgggtaattcgaactgctgatctgattcatacgcccagtgtaattcctaaaatttgtgcaattgtagtttctgttattataatattagctggctgatttaagtagacggcgagtaaaaatatagtttattatctggtccttcccaaaatcgaacagtttgtatgattattttttatatctcctgcttaggcccgtgtttctaaatggcgcacttgcagagctgcaaatgcaggttctggcctcggtttactggctaccagggtacccatatttatacttaccggaaaagttccttaaaatccataatcataaacctattaaccttatcagtgactctatttaagtacgtaagtcttctttttcagtttacgagccgcttgtcaattagtggagcatctcataacaaagagtagattgaatgcaagtgttttaaaaatgatttattatatacacttttgtttatggggattctatagtagaggaatccacataattacaagaactcaaactgtcagccataaatatgtgagctacttccccctttgttattgatttatttctgagttattaatgtttttagttatattttggttacaggtgaggattcttcacaccctggaacactcta

SEQ ID NO: 103963 - DNA, 985 bp, Mimulus guttatus
  Intron number 1 from transcript mgv1a002958m (locus mgv1a0 02958m.g) derived from phytozome v7.0 (chr-ID scaffold_136 ; pos 373165 to 374149 reverse strand)
caggtaaaacgaaaatggaaatgttttatgtgttcttttttcttgttgatgtttgacctgtttgattttcaatattgtttactgtgggtttgaattttgtgttgtttcttcttgttgattatgtatactacactttgcagttaatttggtttccccttttagtttacattatttagagtggaagtgatgctttcatgtgtctaaatggcaaaaattattcgagagtcttgatggatgggcatatgtcatgaaagattataagcttttgtttgcggaagagtaatgcacaacgacaaattgaacatccgtacatagggcacgtacttgatgttatttgaacgaaatgacgacaaagaactaaataactagtgcaaaatatggtgtcgatcaccttcacatgatataattgctcattcatatgtgtctttaagtatgagatgtgatctctacaaagtatgcacttctgttgcacaagatcattcagattttcgggttaaataataatttaatatttaaggaattaacatatattggtcaattgttttgagtaaggttgtattcaagtgaaacgtatgatgcaaaaacaccattcggaattcttctgaaagaaaatccgtagaaaactgatttattcttggtagtaaaagaaaaaaaatacaggctaggagcttttagtgtggaaggtagtcaaaattgggattttaagttgaatcgaaagactaggaactgcgttattactgtggaagtagcacaagaacttgtatcattgttaacttataaactcaagtacctcaatcaatattttaatatattacctgtatttgaacacttatgcatctagtttactcccttataacatacaattgtattgatgatatttatcactttcagttcgacactacaaagtcaatcttgttattatatcgattcttttgggtttctcaaacttaaatttttattttgtaggaatttgagaacactctat

SEQ ID NO: 103964 - DNA, 1039 bp, Mimulus guttatus
  Intron number 2 from transcript mgv1a011044m (locus mgv1a0 11044m.g) derived from phytozome v7.0 (chr-ID scaffold_2; pos 4377835 to 4378873 reverse strand)
gggagcctagggctttcgtctatcataactttttggtgagtttcgattttaaatctgttctatttaatgcttttgttttgatcttgagtttgataattgtgtaattgagtttcatttggttatgtgttttgttcccttttgatttgtctggtattgcctaattcgattactttgtgttgaagtatgatgattgtttttaggaagtagaatgcatacaagagctcaaattgctcgagtatgtttacgcttttcgggtttttttgatgatgtggttaaccattatttgttttccattgatgtggtttgtcttggctcgttggtaatgaaaatccatttaacaccgtcactaattatgtcgtaacaccgttaaccaattgtttagggaaccaatatcttcaaagcttaacaaacaaatccatttatcttttcttctcccctttccacgatacctacaaaattatggcccttcatacatttgaagttcgaagatctaaattgtcattctagaggtaattagatataactttctgtgtcgacgtgaattgttacttttcattagaagaatattgaatgacagtttgctcatggagaaatggaattttaatacgatcttaatttttcaaacttataagccatttccatattttattcaattagccattgatagcacactgtgttttgaactccaaactcccttttgagcttgattccagataataattgaatgagagagaaaacagtcattgtgctccatgaaatggtgtagttaatcatcttggcggaatagtttactgcgatgcttgttccctaaaatttgtatgttatattcttgtataagaaatgtatgttattttggcttgaatttgtaccttataaattggattgagatcatttcttaaataacttgttggaaattgtcttattttaaactaaatggttcaagaatacattccgatgctactatcttctgcacatgttctggctgatttgacataaaacttttctgtaactaactattttattgacagtctaaggaaga

SEQ ID NO: 103965 - DNA, 1008 bp, Mimulus guttatus
  Intron number 1 from transcript mgv1a016965m (locus mgv1a0 16965m.g) derived from phytozome v7.0 (chr-ID scaffold_4; pos 31733 to 32740)
ttgtaggcgctgcaatcaccgagcagctccacaaggtaaaacctaaccacttgtttctccgacctattttttttttcagattcaagatgaattttgcttggcactattaatttgctctattgattttcttatgaattattgaaatcttttttatgctatgatcagatgattatgtttttttttcttttatatacatatatatatatatatatatatatatataactgcaagtattagattggtatgcctctagttctaggtcttttcgattgctacacttggtgaaatattcgggtaaaatagaacaaaacccgggttctgggcatcgaattgcaaaattgatttccttcgtttcgtgtttgctgattttgaattcgattcaaatctacgatactgattttgacgaagaacaagaacgtgttgtcgatgtgtctgtctctatgctctttgcattataacttcagttgcattatatatatatatatatatatatatatatatatatatatatatatatatatatatatatatatatatatatatatatatatatatatatatatatatatatatatatatatatatatatatatatatatatatatatatatatatatatatatatatatatatatatatatatatatatatatatatatatatatattctgaaatagttataattcgatattgtgttttgaaattgaattctgttgccaacattttagaagctcttactgtcagtctttcaacctacatggttaagtctgatatctgaatatgaatgcacgctacttaagatccatttcctgaatggtttctctactgtttaactgtattagaacaagcgtttgcctatttttaacacgtaattatcataatactggtactgaaaactaaaaaagattgcggatcaatggattcagaggcctgttcgactaatatttgttttgttgtattattgttttcttaggagaaatattgggaaacacaccctggggaatctgt

SEQ ID NO: 103966 - DNA, 446 bp, Mimulus guttatus
  Intron number 1 from transcript mgv11b024477m (locus mgv11 b024477m.g) derived from phytozome v7.0 (chr-ID scaffold_3 12; pos 139410 to 139855)
cacaaacgtacatgtaaaaaaacatgcgcaaaagtgcattcgcaacaacgttcttaaaaacacgaaatacaacactaggactttaatacacataaccaaacaacagaaagaacactagatacaaaagatacagcggagtgtagaaataacactcaacgtttacgtttacgtggatttttctatggattaaatttatatttctaatttaattggtggatttagtattctataggtacaaattgataatgaggtgtccatgaagcaaaaatgatcaaagagtaagaaaagatgcaattaggaaaataaaatcaaattagaagagaggatccatcaacatcttcggtagtgtccacgaagtcgagcataactttctcatccggactccaaatcaactggttccggcggcattagaaagctatttcagctggctacaactcctgtctcat

SEQ ID NO: 103967 - DNA, 935 bp, Mimulus guttatus
  Intron number 1 from transcript mgv1a026343m (locus mgv1a0 26343m.g) derived from phytozome v7.0 (chr-ID scaffold_228 ; pos 234980 to 235914)
gttcgagaatacgcagtgagtttttcttttttcctgtttcgtttttactaatctgtatagaatcgtctcgagctgtcggatgaaatgtgtttcaactttcaattggtgcttgattataggctttcttgatactgttcgtatacaaattaaaacttttttcagtcccaaattatagtcttagaaacaagaaatgattagttaactgtgcttcatattttcaatctgaatactttgaaattgtggaaatcggtgttgtttgtaataatatacactcgaagttttttgtgtccattgtagctggatctaacccaattatcagcgaccgtgaaactgtagtagtgttatttgattgaaagcgtcgaatctatgaatgatcatcgacttgtcctttatgtcgtaaggttttaagttaacggctgagagcagttaccgaattgcatctgattttaattggaagaaataaagttttcatccctcaactttgcatcgatttcacatttggtccctcatgttcacaaaacacacatttggtcccttatgtttcaaaaattttagtcttttccgtcaatatcccgttaaaactaacagaatcaggcgtgtgcccatcactgccttgactaacggactaacggtaaattgacggaaatgacctaaaatgttaaattatttgaacatgacggaccaaatgtgttttttgtgaacatggaggaccaaatgtgtaatcggtgcaaacttgagggattaaaactgtaaattttcccgattttaattgatatattaatttaaacagttgtacctccagttgcatagtaatgacacgcagtcgaaaatttgtcgtgtttcttacgatcatttctcatatgcgaaactgtacgagtaacgatattattccttatgcttgatacagataataccctaaaagaagtttccggaaa

SEQ ID NO: 103968 - DNA, 778 bp, Mimulus guttatus
  Intron number 1 from transcript mgv1a004732m (locus mgv1a0 04732m.g) derived from phytozome v7.0 (chr-ID scaffold_121 ; pos 247111 to 247888 reverse strand)
ggtggaatctatttaccgagattgtgtttatccaggtttgtacgtacgttgtgcttacgttttcggggtttcggattttgggtttttgagtttttgagttttcgttgtactctttcgggctcgaataaaatctgcattaataaatctaataataaaactttaactttatcgtttcagaattataattttacgaagaaaaaattaatttgaatttttatttcattggtagtgtaaacatttgaataattaaatcatgtgttatgttcattgcagccataatatatattcactgaattttcaattttatggtcaatatttcacttgctagaatctataatttgctgcatgcatgattccaaatttattgttattaatcattgaagataaatatataaatatataaagaaaaaataaaaacatttccatgaaattagaattttttttttataataaaattgaaatcttgaaaagaaatttgaaaacatattattgcatattcatctttatatatgtaattgttggaagggaattaattatatgagaagaaaaattgcatgtcattaaagtcaaagttttattatcggatttgataatggagggtgtaaagtgtacatttgatactttattgggtaattgttagaactcttatactttaaggatgcaaactgtatttcaccatttatattttaataattcatatattaactaaattttacaaaaaattaattaattttaatttgcagtaaactcagggaagagtttggtattgaagaaatat

SEQ ID NO: 103969 - DNA, 495 bp, Mimulus guttatus
  Intron number 3 from transcript mgv1a002001m (locus mgv1a0 02001m.g) derived from phytozome v7.0 (chr-ID scaffold_303 ; pos 55516 to 56010 reverse strand)
aagaattggcgcgaaaactgcaggtttctgctcgttacctaattcattaattttttagccagtcgtctcaaattttggttgaagtgctgacctttggcaatgtagttgaacatggtgtaaaacataatttagaatatgaattgttgtaaattgttgtaaaatagatgattatagaaatcacatagaaaatcttttcaactttattttgaattaggtagataagtttttgacaataatttcttgactcctttaacaaaaaaaaaatcaatattttcatatggtatttccagaggactctcctgtttttttttttttcttctcattggcggatcatttgttcctatactaactgtatgttcaatatatactgacagtaagtaatatcttgaagttgcattgtagtataagaagcaaagtaaatccattttgaaatggaaatttcgtaaaatattaacaaatatttttgcttttatttaggcagaagaagacgcatta

SEQ ID NO: 103970 - DNA, 401 bp, Mimulus guttatus
  Intron number 2 from transcript mgv1a002001m (locus mgv1a0 02001m.g) derived from phytozome v7.0 (chr-ID scaffold_303 ; pos 56143 to 56543 reverse strand)
tctctctaacctccgtccctcccgatcaacaaaaggtaatcttctttctttatgctggatcaatcaattacgaattggatttaatttgatcaattcacggtttttgtgtgttgtactctgtgctggtggagttgtaccctgcatttggtaatttcattaacaatcaccaataaggaattatattatgatgtaatttttcttataccacagcatcaattatgttagtatcataagcaatcatatgaatgggcatgacgtaattgctgtcgttcgtttttttttgcagtattaaattttactacgtggctcgttttgcgtatgtcggttttgcgagtaaacgcatgttgtgtttgatttaatggtgggattttgacttgtaatgcatcagatattgggagctg

SEQ ID NO: 103971 - DNA, 990 bp, Mimulus guttatus
  Intron number 1 from transcript mgv1a014130m (locus mgv1a0 14130m.g) derived from phytozome v7.0 (chr-ID scaffold_114 ; pos 447221 to 448210)
caattttagggtgagtttactattttattatattatcaaacaattgcatatgaaaatcttgaaagtgtcacaaataccatataatgcataaaagtattttcattcatctcaagtattcctaatattttgtgaaatttatgcatatatattcttcaattattattctttgaatttctattgtaatcaactcatgcttttgtttgcgagaaacccttttcatgaaattgtatacctgtcgagtggtgtttgcaaaatgttttgaaaatagattttgctgtttttatgtttttgcaaaataaacttttgttttcttcaaaataagttgttttaaactatatttaataagtacttatagacctgctttttctatttaagttgattttaccagtgaatttgtaaatacccttaacgtttagaaataaacacttgggtaatatttgcaaaaacttatttaaaagtaaaagttggtgattgattatttttaaaagttggaggtgtttacaaatgctttgaaaaacccacttaaataaaataaaataaaaatttgtttatatgtgcttttaagtctatagcttaatagcaacttatttttaagagaaacaaaagtaaaagttgattctgcaagcacctaaaagcagaaaaaaatattcaaaagctcttacaaacaccaccttaaaatcaacttaactcacatttactgacctatacttttaaataagctttggcaaacacttaaaaatcaattcctttgccaacaaatacttctttctaattgcacccaaagaacaaaaccttcagtctagtaaaataattactccatccatataaaattgcagaatttgtgttgataactaaatatatatataaatataaatataacaacatgacaaactaattaataactaaatcataataattccgataatcaccgtataaattaatccgaaaattgcaggtcgagaagagggggttcactgagaggactagaca

SEQ ID NO: 103972 - DNA, 466 bp, Mimulus guttatus
  Intron number 1 from transcript mgv1a017502m (locus mgv1a0 17506m.g) derived from phytozome v7.0 (chr-ID scaffold_4; pos 518290 to 518755 reverse strand)
agaatctgcttcaacagaggcccctctgcaaatctgtatgtttacaattcttatcatccttctcgaagtttcttcttataggtgtttgtggttattttggtcaactttttatcttgaatcgtatagctgccacaattcctgcattcggttttaatttgaacactcctttgagctaactatactgagtattcgattatgactaaaaagtgatttaccataactgatgacgaaaaagtgatttgccatgtttttgtaaagatgttctggtatgattttcaccacaagtagtgacgaaaaattgatttgcaatatttttgtaaagatgttcattgttctggtatatggtatcacttccaccgtttgataattttgaacttcatcgataatcaattgcatctccgaataatcaataatgatcttgtgcaatgcaggttacacctgacattgattattacagcgacggtgt

SEQ ID NO: 103973 - DNA, 723 bp, Mimulus guttatus
  Intron number 3 from transcript mgv1a016662m (locus mgv1a0 16662m.g) derived from phytozome v7.0 (chr-ID scaffold_140 ; pos 277746 to 278468 reverse strand)
aacggtaccatattattttttctgcactcgaattcgacttgtttttttttttttttttttttttaaatgaggagctgagggagatgaatgaggtagatttttttgcagtggtggtggtggtggtccaggttttttttcttgacaagtttgattttggccatagttagtggaattcctaggattccttttttgcaatagtaatatgggtaaattacaaccatggtcaaattatgaaaaaaaacctcttgtttgggtaattacagtcacccctccttttaaatatttttacataaaacttatgtaattcggttatttaccaaaccaaatcgtatattcaattcggttatttaccgacttaacatccatccctaaatttacctctgaaggggtattttcgtaagataatatatatttgaggagtaactgtaattacccaaacaaaaaggttttttttgtaatttgaccataactcaagggtggccgtgatttgcccaaataatagttgcccttttgttaagccaacacattttgactttgttacacatcttcaaagattctttttttcttctaaataataacaataattaaaagaaaaaaagaaaaggcaaaagcacactaggagagattgagagatgtttactcattactgtatatggaaagtataattgggtttgtattatttttgtaggagagactgaatctgtggtgattagtgttgtcgag

SEQ ID NO: 103974 - DNA, 749 bp, Mimulus guttatus
  Intron number 3 from transcript mgv1a002675m (locus mgv1a0 02675m.g) derived from phytozome v7.0 (chr-ID scaffold_18; pos 2089533 to 2090281 reverse strand)
tagaggaattgctcactggttgtactcagttggaagtaagggtttatctagttatcgactagtattactttagatttactgtggcgtaattctgttacattcattgtgtgtgtgtgtgtgtgtgtgtgtgtgtgtgtggaatgaggaattggacaggatatttattaaagaacgaggtatcttatgtttatcgtttcccatttatttggagtgctgtctgtagcgatattgggtcaataaatatgtcgtgttatatggttctcgtattaactacacgtagcacacatttccatatatgctctatctatctatgtctcaataacaaacacctttttttttgttggcatatcaaatgtacaccacttcaattcattgttattcctatgtagatttttggtgtgatttaggttcttgtgttagttattttctctttttgaactgtcgacgtagtaatgaaatgagaagagatcgagccaggatttggctaagtttctgagatttattcctagatatagctgccagatacgataataacttgaccggttatacccttctcgattttgaattatccttccgtatttgcagcgtggttcattagagacattaatgatattaattatgcttgtttacaacaaaatgtatgatgagttatatgcataatccttcttactgtttatttaaaagtaaattattcgtcgataacgtacatttgctgatcctgatgtattgttttgtagacactgatcctg

SEQ ID NO: 103975 - DNA, 980 bp, Mimulus guttatus
  Intron number 1 from transcript mgv1a018629m (locus mgv1a0 18629m.g) derived from phytozome v7.0 (chr-ID scaffold_215 ; pos 231415 to 232394)
tattccaacaatagtaagtcattttcaactataaacattaattacaatcacgccacttaaataacataagaacaattccatgagtgttgacatctttctttcataatcactattaaatttcgactctttatttgtgaacaatataagaaataaacagacaattagattttgattatgtggattgcactattgaagactgagacttagcttttgtggtcatttgcaataatattattgtttgggacagtaatatcatgaatattattttctcgaatagtaatactactaatattactgtcccaaacagtaatattattgcatgagacagtaatattacgatcggagacaataatattacagtagaagatagcaaaaatgcaggccatgacgatagaattaattcatacagtaatattactgtctcagacagttaaattactgttggaaacagtaatttagcagccaagaaagtaatattaattaaaatatttttttttaagaaaaaacaaaatttcaaaaaaaaaagtcaattaccagctaaattactgtctccgacaattaaataattgttggagacagtaatttagcaacgaagacggtaatattaattaaaatatttcttttaagaaaaaaataagtcaattaacagttaaattactgtctccgacagttaaataactgttggagacaataatttagcagccaagactgtcatattaattaaaatatttttttaagaaaacacaaaattaaaaaaaaatattaattttcgaattaattaaactattaatcaaattaattaaataaatcgaattaatcgcattaatcgaattaattaaactattagttcgatcggcatcattgtactcgttgtaataattacgctacatgatcaagaaacatggagaaattaaaataaaataatatatttgatgttactgacaggtgaaagcgcggaggtgacagctgacggcaaaggc

SEQ ID NO: 103976 - DNA, 838 bp, Mimulus guttatus
  Intron number 1 from transcript mgv1a003082m (locus mgv1a0 03082m.g) derived from phytozome v7.0 (chr-ID scaffold_66; pos 1238918 to 1239755)
caatacagaagagtctagcatcggcttacgcaacggtgagattcttccctttcctttttaatttttttttggtaatttttttatgtggtgtttatttgatcaatttttctcgagtttgtgtatgtataaactttcggatttatttgatctatttttgaattttacatcgctcgcaattattgtaacctacttttttattgggtttcctccaatgattctctgtaccagatatgtaattcgggttagggttatacttcagcttagttaatttgatgtgataccggaagatggctccgattgctatatgtcctggcattttcattgaatagttaggaatttgtcaattgagttttccttattaggaatgtctgcagtaaaagatcagattttatccttttttactgttacagcatgttgacttgtagtgttaccagttatgtgataaagatatttgtcataactttttgcattatcttggggttattcttcttcttcttcttgaggtgttggatataattgggctccgtatgtatttatcagaatttatctccatacatatgttattttactgcattacatatcatatatttaccatgagctagggatgcctcattttatggtggtgaaagttatttctaggtttctttaactgcatgtgaagtaggcatatttcgttgacattgagatcagttaaattgaaaatggattgttgtatgggtttcacttaacatgccttcaatcttttgcttgagatcgagtcattgtattgagctgatcacgtactgcattatatgacatggcagtgagatcattcggtacagaagggcggaaaaaggat

SEQ ID NO: 103977 - DNA, 588 bp, Mimulus guttatus
  Intron number 1 from transcript mgv1a002883m (locus mgv1a0 02883m.g) derived from phytozome v7.0 (chr-ID scaffold_12; pos 1172830 to 1173417)
tacactagtgggaggttgaaaagaccctcaaagtggttaagttaggaaaccacacatttcatactatttacaacaggaaaaaaattataattcttttttcaaaacaaaagtaaaatcaaaattgatttatggatcaaaattggtgaaattgaaattaaattaatttttattactatgaattggattaaataactgtgggtaattttatcataaatattatgatcttctttttttttacatattatgattatctttgtttgtaatacataatattaaagggacaagcatataaggtaatgggaaaatgaagaaaaacaccaaaatcaaaattaatatcccattaaaaacaattcaaatttttcattagaaaaaatggtgggattaaaattggcagcatacagcttccagaattttctgcaacgtcaccgcaaacgtgatcatacgcgccgaccgcgtagattagcctcctctatcaacgaccatgctaacttacgcttcccctttgtatatatattaacattcactttttatttctcttctaaccgcgaaccagcagtcttgggaaagaatcaaccgtcaaatccttga

SEQ ID NO: 103978 - DNA, 613 bp, Mimulus guttatus
  Intron number 2 from transcript mgv1a002883m (locus mgv1a0 02883m.g) derived from phytozome v7.0 (chr-ID scaffold_12; pos 1173385 to 1173997)
gtcttgggaaagaatcaaccgtcaaatccttgaatgtaagctggatccgcttgatttttttttatccaaattcgtttgctgattttattctattttacatgattaaggtgtgaaaatttgaccttgaattcttctttgtattattccgtggatgaagtttttggttaattcatctcttataaaagatcttcggattgctattccatttcagctgaatttatgatacaatttgaaatatgtaccatcaattgatgatttattttattttatttttaattatgtttttcaagctatgaattatctcttatttgattgaatttgttaatgctttgtttgggtctcataacttctgctagagcctagatgtatggattactatatgtatacgaattagggttacagtcagcatttgtcaattgatgtttcgcaaatcctgattgtggttgtggtggttgtcaaagatactcaaccttgtgttattttctttgttctaagtatttcttcagttacctgaaaaaagatagttttatatatatatatgtgtgtgtagtgtttgcctttgtaatacaagtatttgagcatctgcttctttgtttgtttatttaggcagatc

SEQ ID NO: 103979 - DNA, 347 bp, Mimulus guttatus
  Intron number 4 from transcript mgv1a023755m (locus mgv1a0 23755m.g) derived from phytozome v7.0 (chr-ID scaffold_76; pos 629386 to 629732)
aaagagtaacagtccacacaattttagaggttagatattttgcctatagaatgaaagttatacgtggaacgaatggagtatcacatgatttgttgatagggtgttttgtttgtgtctcgtgttttattttattttttgcttctttgatttccttattctgatttaatttagtgaattaaagagccctctaattattgaaccaaatgttttgcttttacagttgagctatgcttttcgcactcgagtatgagtctcttctcatagggggtattatttgaagttaattatattttttccttatttattttacagatatatactgttccagggttgaaaattgtgaaggt

SEQ ID NO: 103980 - DNA, 543 bp, Mimulus guttatus
  Intron number 1 from transcript mgv1a011583m (locus mgv1a0 11583m.g) derived from phytozome v7.0 (chr-ID scaffold_58; pos 1281147 to 1281689 reverse strand)
ttactcctatccactgtcgacactcctctgctcaggtacttgtgcgattcttcttcatttcctgattattatgcttttgattttcatttatatacatttgcatttcttttttggttacttcaattgtaacatatgaaataagaaccaagttaaatttcaatttcacacaacgcttctgttttttggccccttaatttttggagctgttgaaattgtcggctgatgatatgcgccgctgattacttcttcctctgttcttcataggtgatggtagcattggaggtttccgatgccttaattgcatatagtttttgccttattagtggataattgttgtttcattgtacagacatatttttgaattgattagattattgtactgttttccaatttttagagatatccttgtgaaagtgttagcaagcatgaagatatgccaaaattgtagcttggataaaagtactcatattgtttaatttaatttttattttttgttttgttactgcagcctttgatctttgtataaattagcagcactgttta

SEQ ID NO: 103981 - DNA, 635 bp, Mimulus guttatus
  Intron number 1 from transcript mgv11b015735m (locus mgv11 b015735m.g) derived from phytozome v7.0 (chr-ID scaffold_2 9; pos 385803 to 386437)
ttgggtatgatgatgcaccatcaaaccatatgcttcaaataagcacgtggccataaattgatgtagtgttttattgtatattgtacccccaaaatattgagatttatgataataaaaaaatgaaactaattgatttttatgtataatttcttgatttttaaaattaattgtttatatttgaacatggacattccattattttcattttttttatttatttttttaggtaatccgtgggaatggattgataaatgtagtagtattgcaaaatttataaatattataattattttgaaatcaaatgttttaaatgttggatcacaaaaaaataaaatttgcagtgatataagatcatgatttatgtatgttgttgatgagtttagtccttggaattacatatatatttcgtcttaattttctctccaattttcttttctctttttctttctcacatccgcctgtgaaatggggtcgttttactgtattcatccagttttcctttataaatatttccccctctccttttctttacgctctgcacgattggagacgaccatcctgtggggccacaacgctttttccttttcttttaccttttagtttccgaattctgcctattgaatatcgaacatcgt

SEQ ID NO: 103982 - DNA, 309 bp, Mimulus guttatus
  Intron number 2 from transcript mgv1a016059m (locus mgv1a0 16059m.g) derived from phytozome v7.0 (chr-ID scaffold_81; pos 224175 to 224483 reverse strand)
tccttttggaagaagcaattcatcgagttttggaggtaagtgctaaatcgtatcgttcttcatattttcgagtacacgtaattaattatgtataaaccactacttgtatacatacacttctctccttaatttgactagagataatgcctatgcatacttaatgattattttggcttaaaacccgaaagaaaaaagacatctaaaatatcacttgctctttttgaagttgcagtagtgtttattttgatttttcgtcggttattttgcactacaggattccagaccgcaaacacttctccgtttggatca

SEQ ID NO: 103983 - DNA, 563 bp, Mimulus guttatus
  Intron number 3 from transcript mgv1a004527m (locus mgv1a0 04527m.g) derived from phytozome v7.0 (chr-ID scaffold_1; pos 1164931 to 1165493)
tgaccaacaaaggtgatgctttattatgctaattgaataatgttcgatttttcagacaatatctacatggttttgtttttttggtgtgtgtgtgtttgtgtgtgtgggttctgaggagaaggtgactataattattgggttctgtatttgttacctatttatgttgttctttttgtgcaaaaggaaggaacaaatgctatagaaatttcttggttctctgtaataatgaaaagcagaactctgtgagtaagattatgtgtgagtgcgtgtaagatcgaccccatggagaaattcgtaactaaattcctgctgctcagttgttcgtttgatttggtttttgttgtgtgtagaagaagaacacggttacttatgtttgtgcatgattatttgctattgcttttgttgcagcatttgtgttggaaaatatgatagaactcaatagatggaaaaagcagagatatccggacgttgctaaatgctattgattctgtcttattttgattgtaatacattttcaattttttgcagagttgaaactgcagatagaggactatttgaataac

SEQ ID NO: 103984 - DNA, 571 bp, Mimulus guttatus
  Intron number 1 from transcript mgv1a007060m (locus mgv1a0 07060m.g) derived from phytozome v7.0 (chr-ID scaffold_4; pos 1191833 to 1192403)
tcccgcagtcgtagtcctgctcctccacggaaaaggtgaatttgtttttattctgttctgctgagttcgtaatcgtttcatgttattttgaataatgtgttcaaatgcttgacttaattcttgttaatctgttgctttttcaatagtatttgatgttcagattccataattatttagaaaagcttcattatgcgttttcttagggatgatagcattttttatatttttttgtgggtaataataattaattaattatcggcatgaaaattgtcaaattctgccgcccccgcccccaaaaaaagggaaatgaaaaattgcaacctagatgcttaaggcagttggtgctctgacccataagtgtgtttccaaattgtaatgatactggcggaatgtgacaactatttggaatacacacacacacacacacacacacacacacacacacacatccccatcagtttggtgtttggttgaaatgaaatggttaacttacctgtgctcttcttgttttcgttctctggattgcctgtgtatagttctgctgaaggaattaaacgaggtcgctcaccgc

SEQ ID NO: 103985 - DNA, 844 bp, Mimulus guttatus
  Intron number 1 from transcript mgv1a015106m (locus mgv1a0 15106m.g) derived from phytozome v7.0 (chr-ID scaffold_59; pos 193993 to 194836 reverse strand)
aatatttggagaagagcaaggctaacaaggtttgtttcattcattcatgcacgtacaatttcattctcttattattaattaataccaatgtttaagggtatgtttggccttataacttggtcttaaaacacacacacacatcgggattcgaacctacctctcaccaaataccactatgagcagtggcggagccaacctttgtcaagtggggctccagtccactttcgatttctaaaaaattctactaaatataattaacacatcaaagtaatttagtttagcccacccatcaaaaaaattatgtgttcttagttaaagtttataaaattttaattattttgcgctactttatatgaatgaatcaaaaaaaaatctcggggacaaaccccgtaaatattaagttcacgaattcctggctccgccagtgactatgagagagtcttctagtgcgactagactaaaagtcttagttggtttgtttcagaagttgatgtattatggaagaataatttgaaaacaaagtaatgcttgtttatattctgagcaaagccgtttaaaaatgaagtaatgtttgtctatattctgagcagcttaaaaatgaagtaataccatttgaaaatgaagtaatgtttatttatattttgagcaagagtcgctatttttattgtagcatcaatcaaaatcatgcacgataaccgtaaaatgaataacgattgaacgattaatttaaaaaaaaaatgccgtgatatgattgagaagttgtgtatatatataagattggtgaagaaacgttttgtggcggcatgcaggaattgaacgacaagaagaggctggcgactagcgg

SEQ ID NO: 103986 - DNA, 506 bp, Mimulus guttatus
  Intron number 1 from transcript mgv1a013457m (locus mgv1a0 13457m.g) derived from phytozome v7.0 (chr-ID scaffold_223 ; pos 208765 to 209270)
ccgccattgaactcggcaaagtcttggtactactttctcctctcttttcaacttattctttgcatgtggtcaaaatcaaatacccttctctctctctagctttctctctctagaagtttcaggcaaaacccatggagatgagatgataaagttttgatttttattacatctcttatcccacaagtcatgttactttcatctacagttctctctctctctctctctctctctaagtttttttgtgatgaattatttctcttctttaaatggataagaagataataatatgtgaatgtactgtcacaattcctctttccactgatttatttatctgcatttcatttgactactgtcccaattaaaaaaaaaaaaaaagtaaaaaaccaatctttttaatataatatttatatatgtatattaaaaattgtgtgtaatgatctgaagaacatagttttgttttattgtgtgaattgaatcaaaggtttcaaggaacattgatttggtct

SEQ ID NO: 103987 - DNA, 703 bp, Mimulus guttatus
  Intron number 3 from transcript mgv1a013457m (locus mgv1a0 13457m.g) derived from phytozome v7.0 (chr-ID scaffold_223 ; pos 209553 to 210255)
cctcaagaggtaatttttatttatttatttattattaatatattccttaaaaaaactattgcaatttctctaataattatgtttgtgttttttttttccttgcactttaatgatattttcttgaacaaaatgatggttctttgttctttgtaccatgtttggttcattgcaaaaccttatccacacagggggctaaattattgaattcagtacacaaattataattctgaattttggtgtaaaaatgtttgttctgatgtatttccttttctgtatcacacacacacacattactttgttctgtggtgactctgttatgggccttcattaattttcttgtatttttgtctactgccctttttctgtgattgacataatttttatttattatttatttatttaaatgctaatctgattgtagtatccaccacttgctctgaatcttgactttgaagatatttttttgcatcaaaaaaattcaatctttatttattttttattaaatacaaaatataccatcattacttgactgctgctgctgctgcaaaactgcacagtggactatataattaaattacacttttaattatccctttcctatttcagctttattatttattttaattaattaatttatatttatttattggtttgttttggtggtgcagttaactggacaaacagtaggggaagtgaaagcagt

SEQ ID NO: 103988 - DNA, 826 bp, Mimulus guttatus
  Intron number 2 from transcript mgv1a006503m (locus mgv1a0 06503m.g) derived from phytozome v7.0 (chr-ID scaffold_270 ; pos 233376 to 234201)
ttgggactaatcttcttaaattgggtcacgacgaggtacgcaatgttttccagttttcttcataatttcttcgtggtcaaagtgtctaaattcttactcactttctgaaaataaaactaatagtcagagaacttgtactcatttgtgcatttaaatattttcttcttccaatagttaaaataagaacttgtttgaagtaagcattactacaatacaggactgatgtaaaaagtgtgttcaatagtggtaagtctaccagctaggaagttatagccgtttagtttttgactggaaaagaaatttggctataccggtaaactagggatgatgaaacacatgtactcgtataataagttataagtaaagggatattaatggaccaagtacgcaaataaagaataactctgtaagctcgtcatggagctagctatttgtcggctggatgtccaaataaagctgtttcttttgaattgaccattcatagttggtatgaaattaaaacaagctgcaaacagacctgattggtggtgtttgattggatcattgagtcctttaggtgcaccattaagtatgcacaaaatcttcttgttgcagaagatttgtgtatatccttttttatattcacatatagtggcttaattttaacggttctctaccacttaattccttttgatatagaattgattattgacgggcatagatcaccttgctaactttttgagttgacgagcatagaccaccttgctaactttttgtgataggatttgatttaactagcttttgtgattgtataatttgcagagagagagacattctgtggttggca

SEQ ID NO: 103989 - DNA, 771 bp, Mimulus guttatus
  Intron number 1 from transcript mgv1a011029m (locus mgv1a0 10456m.g) derived from phytozome v7.0 (chr-ID scaffold_79; pos 879368 to 880138)
tgctatttctctctctctacatttcatcgatctctgtacgtacaacgcaatcgtttctcaagtttctctgctcattttttaagcattaatcacaatgcaagtgtatttactttgtcttctgtttgttttcggtttgcgcaccttttgattctgatgctagtacgtctttttttttttttttttttttttttttttttttttttttaatttggtgtttgattgattagttttatttgatttgattcactggtgatttaactggatgtaacagtgatttacggcactggattaattacaggatgcttttatttgtcgagttgcttttatttactctttatctctcagtttttcttttggtaaagagaatgtgtgttgattttgcctttttcccttccgattttatgctttacttgatgttttctgtgcttaatttttgcttgtgaagataatcattgtggaatctataatgcttcttttgctgttgtctggaaattgatctggatttctggattcggttgagcagtttgagctgaagaacttataaaataataatgcagttgattatcgagttgttgatgccaattttgtgatattttctatcagttcagttgattaaagtcgatcgttacagtttgtgattctgtgaaatatctatggaagtgtggtagttgttacagacgtttattttttgcgagcgtgtctgacattgttatttttatgttttccgttttcattgttcaaactggttggggaattaatcaccgtggacag

SEQ ID NO: 103990 - DNA, 676 bp, Mimulus guttatus
  Intron number 1 from transcript mgv1a011703m (locus mgv1a0 11703m.g) derived from phytozome v7.0 (chr-ID scaffold_179 ; pos 213766 to 214441 reverse strand)
ctgtcaccgcccatttcctcaagagagtcttggaggtacgtacattttctattcggattcacatggttaggcaaaacatattgtcaatatatttgtcactaatatatcgctagtcctatatagtgacaataaaaaaaggaagaagaattaattgacatcagcagatatcgaactattatattagtgataagataaaaaaatattgtcacataatgtaaaaatttagtgacaactttggttagtagagaaatgactttttactacaactattaactgtaacaaaatgtatcaaattcgtagtaaaaaggcttttgttacgtgtttgctacgaatttgcaccgtagcatatatgggcgtgacaaaaactttgctacggtaaatgaccgtagcaaatacttttttgttatggtaaatcctagcatttactacgactccaaaattgtcccgcagtaagatgtaccttttgttacggcattttaccgtagcaaagaaattcgtagtaaaaaacaatgtttccactagtgttttggtatctcatcgatcaccattgcagaatacgtcactaatgccgtcgttttcttcgaaatttctagttgatttgatatgagaattttgtaaactagttgtgctttcatgtggaatataggtgctcttcgttcacaagtttagtgggtcg

SEQ ID NO: 103991 - DNA, 624 bp, Mimulus guttatus
  Intron number 1 from transcript mgv1a017043m (locus mgv1a0 17043m.g) derived from phytozome v7.0 (chr-ID scaffold_69; pos 1093134 to 1093757)
ctttatatacccttcaaatttagccaacttgtatgtgagagaagattgcatgattaactgctcacctaaagttagttaaagctcataacaacttttgtcaactgcaaatttttcttgattcatctccaaccaagaactagtcgttggatcaattgctccaacacgttttaaatggtttctacataaaaatcaaatccaccacaattattcgaaaatgatttcaaataaaaatttagagtgtttattatagaataaagtttattatattcatcaaattaccaatcttacaattttatcatcatgaatttaaaattatttttattatcactttgccaactaaaccatccttgaccacactaatatttatataggaaaaaaagagctagtgcattttaataaatcagatgtagattatagatatttttttttcctaataatattatgaataaaatgatttcataaaaataaaataatgaaaagggccaatattatataaataaaataagatgggctgctcatactatatccaataggattaaatgggcccgttacacactaaatattgcaggccgggcccctacacaattaggcggcggttatcacccgctatctcggccgtaggga

SEQ ID NO: 103992 - DNA, 256 bp, Mimulus guttatus
  Intron number 1 from transcript mgv1a012082m (locus mgv1a0 12082m.g) derived from phytozome v7.0 (chr-ID scaffold_96; pos 882507 to 882762)
gcgatttctctctggcttatagtttactctcgcaggtatatggtttgaaagattaaaatacactttttttttggtgtagaagagaaaatgactggttgatgtattgattataagaataaagatttgctcttttttatgccattatctctggattgttacctagtttctgatacgaatgaagcaccgaatgtttgattcgacaatacacgttgtatttgcaggctgtagatctcaaaccatttggcggtctacatat

SEQ ID NO: 103993 - DNA, 343 bp, Mimulus guttatus
  Intron number 2 from transcript mgv1a012082m (locus mgv1a0 12082m.g) derived from phytozome v7.0 (chr-ID scaffold_96; pos 882743 to 883085)
ccatttggcggtctacatataatatacaaggacaggtttgtcgagatttcacttttatagtctctatgtgtgatgagttatgataaaatcagaatttcgaagtagcactgtcgtgattgttgctccaattaatgcgattcgcagtatcgttacttaatttgggaagttcgtttgctttttcttgtcgaataggtttttgctgatgaagccaccttcacgcagaaactcatttattcgacttgcaagcaatttttttttcttttttttattttgattgcattgtgatggtcatataaatgtcgttttatcaggtctgctgcgaggttggctgtgggagacgtaa

SEQ ID NO: 103994 - DNA, 709 bp, Mimulus guttatus
  Intron number 1 from transcript mgv1a016596m (locus mgv1a0 16596m.g) derived from phytozome v7.0 (chr-ID scaffold_37; pos 1138923 to 1139631)
ctcccctctgttagatctgatcaagcaaacaaaaggtaactggaaagaaaaaacacttaaattcacatgtttctctctctagggtttgcagttttatattcttgattatgctgtttgtttttgttgattaaaggtgtttaattgctggtttcatttgtgggctttgattgtgtgttgattttactattaatttttctgattatgattagtatttcatgatgagatgagatgttgttctcgggctttttgagttgattatcatatttaattttatgattgctaaataatattgatggttaatgcaccgtgttagggtaatataaagaactaagctttttgtccgattgttgtcgaattgcgcctttttttcggaaatttcgattggtttactcgtttttcgcgaagtgtatagatgtatgtgtaagttgcaaaagaagcttgctttcttgattttttttaaagttttcttgataatagtaattgcatgaattcatgcattaggagaaatttgtgttgcttggaaagttcgtcttagaactcatcacattccgatgtttggatagtcatttattcgaaaaacgggttacatgggattttagtcatttatctgaagatacaaaaaaagttggtcttgattagcttctgcttattacttcaatctgcttttctttaatagtctatattttccgatatttgaagagtaggagaa

SEQ ID NO: 103995 - DNA, 924 bp, Mimulus guttatus
  Intron number 1 from transcript mgv1a000966m (locus mgv1a0 00966m.g) derived from phytozome v7.0 (chr-ID scaffold_42; pos 1045281 to 1046204 reverse strand)
agagacgggctcaagcccgttcaccgcaggatactgtgagttgtgctgcaatttttgcaatatctgatttaatttgcgaatattagtacttataatgtggaaaaggaagaaactttgtatcattttgcattttaagatcagtgtttaatgtttctatggttgttttgggtgcttgaaacagcagtaagcttcaccgaatcgtttgcttgggaaaaaaatatgaagtattctcgtatgttatcatgggtggagaataagttaattaagcatgttttcttttgttcgcatcttaaatgtcttgtcatgttcacaccctccgttagtgaatttcattttcgacttttgaaaacacgttagttgtttctaagttagcatagaataattaatgaaaaaaaaatgaaaaaaagcagagataattcctgctgggcttaatatagtacataagtgtctgaaaagaggactactaagattgtactacgtacggatttatcttttcgatgacctattgtgagcccaataagccaatgttggacgtccttgttagcagctaaggatatccctattatatttctgagttttacattaagaataagctttgctggaaaacattttgttgaataattgcttttggcttccgcttctttgtttataccattgaaatctggctcacaatctacattatgagttatgttttcaagcttccttttttgaatttgtatgaacttattgttccataaattatatttgcttctacatgtatttcttgcttgtttgagattattttgcttttattataaagtttcatatctatgtcatctattagcacgtgcatttatgaactacaacttaattgattagtacaatttcatgctttgctttcatgaaacggtcttctgactggatctatattggttttaaacagat

SEQ ID NO: 103996 - DNA, 423 bp, Mimulus guttatus
  Intron number 4 from transcript mgv1a025096m (locus mgv1a0 25096m.g) derived from phytozome v7.0 (chr-ID scaffold_2; pos 3299150 to 3299572 reverse strand)
ataacattgatttgaatcgtgattttcccgaccaggtatatcatgctgcagtatgtaattcttagcactaacttcagtatactgcatagagttggataatgagtttcattttaaattgataaaagtttctaatcgtttaatgatgctttcttatttattaaatttctggcattataaaaataatcaaaactgattagctgctcataaaagagaacacgagtaatataacatttgctaaatataccttcaagtactcttaagaaaagatgcaatcttgcaatttgcaaatagtttttgtttttcctttttacttttttcgttttctaacagcatcatggctagtttggcttgcctcattgtattagaattgggaccacgcatcataaagagcattgattgacatgattgaaacagttctttcct

SEQ ID NO: 103997 - DNA, 508 bp, Mimulus guttatus
  Intron number 2 from transcript mgv1a005005m (locus mgv1a0 05005m.g) derived from phytozome v7.0 (chr-ID scaffold_482 ; pos 32077 to 32584 reverse strand)
gatttcgtttcctgttttcgagcaggttcgaatatttcttcttcttagttttttttttctgattgtgtttgaattgaaagtgatgaacatttgatatagatatcttccggcggatgattgttttcgcctcgtctatttatgcgtttgtttggcgttataattttcaaatttttgtgtttatatgctagataagtattgatcgatttttcttcgaagatatcgaatcatagttacgaaagccagctgaaacgacttcttgtaatgcgacttgtattgcattttcacttggtacattgccttttggaaaagttgctctgcatcgtaaagtttgatattcaagaaatcatttagctgaaaataaacatgtgcaaaatcagtgtcactattatgaggttttcgtagatttttttgtgacaggggttttcatatattttttgttggtaataataataaaacattactaattaggttcatttgatattctgttttcgatacactttcaggtgaa

SEQ ID NO: 103998 - DNA, 477 bp, Mimulus guttatus
  Intron number 1 from transcript mgv1a014618m (locus mgv1a0 14618m.g) derived from phytozome v7.0 (chr-ID scaffold_7; pos 2303686 to 2304162 reverse strand)
ttcgtcataattattttaaaaatcccactttttaggtacgttatttatttattgattttgatgattatttctatttataattcaacattatatattctctaatccttctaaacaccgatgacagcagccactgctttattattattattatatgattcttaatcttctgatttgatttgccccacatgttttttattctcattttcttaatatccaagaattgcattataactaagtcaagaaattttagataagtggtctatgcagtggagaagccagtgtagggtcggagggggtcatggccccctcattttaatttttttttactactatatatatgtatatataggttttttcgcctttgcaatgtaaaaatgttcacaccatctaaatgtgttggattcttgaaaaagaaattcagacaaaataatctgattggtttgtatttttgttttcgttgatgattttcagatttcc

SEQ ID NO: 103999 - DNA, 814 bp, Mimulus guttatus
  Intron number 1 from transcript mgv1a003436m (locus mgv1a0 03436m.g) derived from phytozome v7.0 (chr-ID scaffold_11; pos 1252307 to 1253120 reverse strand)
gcatttccggcaattggtattttttttttctttttttttttttgttgagaaattatattgtcccacttatttcattttatttgattatttcctttgttttaatatttttcattctgaatttctaaaattacgattttctcgattattttttgtggttcgtaattttggaatatatatgagattataatttccgatcggaacttttatttttacgaaaataattcgaaaataccggtattttaattaggtgaccaagaaattggaattttctgaatttcgtcgattacgagtcgaaaattttcgaatttcaaacagttctcgaaattccggtttctgaatttttcacaattttgttatcgaaaggaattgaaattagtttttcaattcggaaaaaaaaaacccggaaatcttccgaaagtgctaattctaatccgatccgtccgatttccacccgattctgtcagtctgtagtgtaaactttatattcagttctactggagttgcttgtgatgtgaaaatgaaaataaaaataaaaataaaaataaaatgaataattcaaagacttttgcttttcggtgcagttgtagtacgaatacctgtcgaattcccaattatcgggatatcttgagctcgttttttttagataaaatatttggtggataaaatttttgatccattttggaaggcacgcacactcacacgtcccgtttggctattctatgtatttttaatttcttgaaaaaaaataaaaaattatgacgagatttgatttaccacaggtacgtgaagttcgatactttcacccctgcagcag

SEQ ID NO: 104000 - DNA, 942 bp, Mimulus guttatus
  Intron number 1 from transcript mgv1a025888m (locus mgv1a0 25888m.g) derived from phytozome v7.0 (chr-ID scaffold_519 ; pos 33720 to 34661 reverse strand)
gatccactacctttcgttccgctacttttggtgagccttctttttctctttaatcaaaatatatcggttctttggatttactgttctttttcaaacagaaagcatcagtggcggagtcagtatagcgccatttgaaagcctaatatattaattaatttatatgaaaattaatatatatatatataatgcttccattttctgtgtgcatgcagttagttagaggataaggatttatcattaagttaattatataatagaatttgttgaatatgttaatccttaatttaacaatatgcatgtataacataaaagagacacttagtttgtcaaattgtttaggtactttagactacttaagtttacataaaagtcagttgtcaaactgtttaggttagacttaagtacacatttcgccatctaaagccctatgttcacatcatcatcatcatgtcaagttccaattaaaaaatacatcaaattatatatatatatatatatatatatatatatatatatatatatatatatatatatatatatatgccaaactacttacatgtcttaaacgtcgtactcttaataaattaaagtgaacattaattatatctatattgtcaaaatgcatcaatcttttatcttatctttcttatatctaacttgaacttatcctcttttcaattatgtatagtagtatgtcaatgtcaattcattaagagtttgattgccccaataagattggtgaagataaaatatttacaatattatcttagttcaattatataggtgcactggatgagtctaattaattcaatacagttctctaaattttggatcgggcgactatatgctgacctattaaattattggactaactaaacattaaattaaataattctttacatacttgcagctgttaccggtgacgggttcatagcaagggac

SEQ ID NO: 104001 - DNA, 683 bp, Mimulus guttatus
  Intron number 1 from transcript mgv1a000733m (locus mgv1a0 00733m.g) derived from phytozome v7.0 (chr-ID scaffold_26; pos 709257 to 709939)
ttctggccggagatctccacctccgtccccatcatgtacgcacgctctttaattatgtgaattagggtttgtttttagttcgatttttgttgtttttgattggcttgttttctgtagtgaggaatttagggttttttttttttgtcggtgtgggatttttgttggagaatcgggagtttatgaaattgtattgctgaaagttcagtgttctattgggtgttgggtttaattgttctgttcagatttttgtttcttcgtttgcggatgagtttttatttttagtttgttgagtttgtactttccattgttggtagtagtaatgggtaggcttgggaaccgtttcacatttggattgtttgcaatattagaaataaggtgaactggaggaaaaattgtgaagagatctacatcttgagattgttcgagtatttaaccttgattgttgtagtgcttaatttctacttgcagacagtttcaggtcgttagcgtagtctggagctatgttgctctatgttgctagaggtgtttaataatgtcattgcttcagctttttgcatcttttcggctcttggtcacttagagagatctttattcactatccttggtctgctcttctttacgagatgctttgtaaagaatgtataataatctattcccttattctgaatgcagagaaagtttat

SEQ ID NO: 104002 - DNA, 627 bp, Mimulus guttatus
  Intron number 2 from transcript mgv1a000733m (locus mgv1a0 00733m.g) derived from phytozome v7.0 (chr-ID scaffold_26; pos 709958 to 710584)
aacagaggcaactcgctgcattgcttgtctcaaaggtagtatttgttttttttttttcttctttttcattatcacattagtgctataagctacatttgtgtgtgtttggttttagttgctagagttttcatccgattgccgttgtctttagtccatcaaatgatcaattttctggtgttttcattttgagttttctgttcctaacatgaataataccaatttacctagggcattttttttgctagcatgcgtgtatagaagtcttcatatgcttttgatcacattaactaagacacatagaacgtactgagtactccttttgtctcatgtatgaaaaaatgtacaaaattgtgaaatataagaatccatagaaactatatgtttgaaactttttaacattattaaaacctcataaaagttgaggagttgtttgacgatattcatttgcaatgttactcttcatatagtagttctagtcagacgtggaacatccaaagaaaatttatgagagaataattttggaatttttgctggttaagaaaattctccctctctctctctctcattattcatcaacaaagtataatgtattctctcattaggtattctattatctgggtgaactca

SEQ ID NO: 104003 - DNA, 637 bp, Mimulus guttatus
  Intron number 3 from transcript mgv1a023088m (locus mgv1a0 23088m.g) derived from phytozome v7.0 (chr-ID scaffold_63; pos 224646 to 225282 reverse strand)
atcttgtcacacttgttggtaataaattgaaacttcaaactttttaaaagagatactcgtgtttaggggtggaaatcgggtcggatcggaattagcactttagaattttttattctttttgtagaagtgttaaactcatcccaatctgcaaaccaaaaaaaaaaaataaaaaaaaaatcgtaaagttggagttcagaaattggaacaaaaaaacttgttcccaaatcagaaactttcggatcaaatttaattagtgtaattcagaactttaaattttttagtcatctataatataaaatatacactagtattaatattagaaatgtaatttgttattttttctaaattttcaaaaatattttcagaaactaaatcaaatcggaaattgaaatctaatatatattctaatccttttcttaaaatatcatgaaaatcgggattcagaatgaaaaatattcttcaagattcagaatcgttcgtaatgaaattagcataattcgaaaattccgttacaatctccatccctacttatgttatacacacacacacacgtatatacacacatgtgtatgacaacttacatgtatattatgatcatataggagcacacagcatagggcaaacagattgccttttc

SEQ ID NO: 104004 - DNA, 899 bp, Mimulus guttatus
  Intron number 1 from transcript mgv1a002734m (locus mgv1a0 02734m.g) derived from phytozome v7.0 (chr-ID scaffold_69; pos 655894 to 656792)
atctcccaggtgttgcccccgaagacttccaaaaggttctaattactctctctagaaatccaattttttttttatttttttttgtcaattatacatcgttttctgatttaggtttttttttttttttttcacgatccgatgtccaatgtgaaacgtttgtgtattttctttgttcctggttacatttgaagatctgatctcaattctgtgtctgcttgtgtgtattgttggttaatttcggaatagtcctttgtgtttcagatgtttgcatctgatgagattgttttagttagagattgctgtatattagattttgtattgataccctgttgctcaaatgtttgttcctgctgtcttgatagagaaaatgaaatttgggggataatgtgtataatgtatactattaattccatcttacacaattttttagttgaatttctaccgatcaatttggagctttgtcgttgagcttaatttgcacgatttttgaattatagtgtaattaatagaagattttatagcccacttgaggtaagatatgctcgtttatatttaatcgagaccgtatatgggaaatttggcgtaagcaactaagatttgttctctagtcctatcttttttgtagacgattttgattgcatacgaaacccctttacaaactatctcgttgaacacttcttttctcggtattttttttataatgttgaatatgtatccctttattagcccttgaaactgtatttaactaatacgatctgaaattcgaactgttggttttggctaaatcgttattattcttatttatctcgtgtatggtctatttgtaaatatgattgcgactcgacttacatttatccaactttatttatttgtctgtttttcaaattgggtgcagggag

SEQ ID NO: 104005 - DNA, 738 bp, Mimulus guttatus
  Intron number 1 from transcript mgv1a019569m (locus mgv1a0 19569m.g) derived from phytozome v7.0 (chr-ID scaffold_207 9; pos 2999 to 3736)
aggtacattagtgcatgtttcttgtgattttttttttacttctgtcaacttttgttgccatcttcaattcctgcaaacctttatcctctctagcatattcatctccatttcgccaatttacaagctcaggatgttgagctgtactatgttgattgctcctctttctcctagagtgttctttttcgccttctcggtctactcgattatgccctatatagtgtatatacttagcctgtaactgctgaaggtgagcagttctagcagacatttcatttgaaacttccaagtttgtagttcggaagtttctgaaagtacgaggcaattctatctcagagatttcagaaagccgattatgaggttgaccagccaaatgttattgaaagatcttccaaaatgtaaataggtgaagggcaaagctgcagaactttcaacattatgacataggatagcaagttccaaagtttctcaaattaagcaaatatagttgaaaatattatgttcttttgcaagtaatagtagacactgctgtaaattgggatggctgctggtgaggttgtgtttctttgctatgatcgttgagcttcatttccatgcagttaatagctaatcatctacaaccgtacatgattgtttgctgtcttcgctttctttacgctctgttttttttttttttttttttctgctttgatgtgaatcttttcctctctgtagatttgtgtttggtgttggcatcatatt

SEQ ID NO: 104006 - DNA, 789 bp, Mimulus guttatus
  Intron number 1 from transcript mgv1a003717m (locus mgv1a0 03717m.g) derived from phytozome v7.0 (chr-ID scaffold_16; pos 375478 to 376266)
ctctctgccttcaccacttccacagtggccaaaaggtatttcctttacttttttttttttgttaaagatttaacctttttttccttaaaaaatgaaaaataaatttgatttcttgattttattgtaatcttgttctgttacctgtgtgatctgctatgtgtatgctttaccgtataaagataagtgagctggttctaagtttcattaattcactccataatacaattttgaagaagaaaaaaagaaggggtaaattaccgtcatcctctgactctgaggtaaaatcaaattacaaaaaacccagtactctttgggtaattacaactaaatattcagctgtgaatcttcttaatcgtccactcttatggtgtcaaatttaacataatcttctagatttcgtggaatgttgtccagtttatattcgttttgtgcaaaaatgcagattctgataaaccataatctaatatttacaagccaagagacacgtcttattatcatcttgttttaaaatgtggagctcgaatggggtaaaagggctacaaactagagaatattgcatataatctaagaagattcaactcaatttgacacctgaacgtgtaagaagattcatagttgacgagatggttgttattacctaaataagagggtttttcgtaatttgaccttaccagaggtggggtggccgtaatttaccctttcatgtatagttttcattttttcatacatttctaaactcctttttcatgtgacttccatcataggtcaagattttggtactggcaaaat

SEQ ID NO: 104007 - DNA, 626 bp, Mimulus guttatus
  Intron number 2 from transcript mgv1a006443m (locus mgv1a0 06443m.g) derived from phytozome v7.0 (chr-ID scaffold_31; pos 169268 to 169893 reverse strand)
ccactgctcgtattcgggtaccctttttacttacattattacctcttctcaatttgatttatttattattgtttggagaattgattttgtaattcaaacccttgaattagggctttaattgacgtttcaagagtcgaatttgccctgcttaggttaattatacataaaaaaagaaaaatctaggattggctacaaatttagggtttcgaaaaaaaaatgagtaggaaattttctgtataaatattaaaatgacagtcttcgttattaagtaataactcaatctccatttgttgtgttgtcattattagttttgagtttgatcatctattcgtattcgtctgaggttggatgtacatttcttacggaatggacccaagtttcgttttttctctctcgagactcgaaaaggaacttaagggttaagtttcatagcatagcagttgaaaagttaagtgttggccggcccgaaaagtttatgcactaacccgaaaatcaaataagacctcattatttagtaaatcatgacttatctaacaaaccaaatgaatatttatgttaaactgtatgcgcgttaccaaagcatcgtgcttacgttatgctttcatggatggtggtgtaggttgaac

SEQ ID NO: 104008 - DNA, 327 bp, Mimulus guttatus
  Intron number 2 from transcript mgv1a008911m (locus mgv1a0 08911m.g) derived from phytozome v7.0 (chr-ID scaffold_39; pos 305942 to 306268)
ggagtgaacggtaattttactcttattgtagttgatatttggaatatttcaatagttcttcatttcatgagatttttcattgttgattttactggtttctagggttactgtttgtgccttttaagtgtttgttgaattgtcgattactgtgaagttgaatatatgttgattgttcagctaaatttgtgttctagctttggtttctagaattaattagttactctataaccataatttctgattaacaaacgaaaaagcagttttaagatataaattttttgattttttaattgacgatgatcattcaaatgaacagagtttgctgac

SEQ ID NO: 104009 - DNA, 698 bp, Mimulus guttatus
  Intron number 3 from transcript mgv1a008911m (locus mgv1a0 08911m.g) derived from phytozome v7.0 (chr-ID scaffold_39; pos 306339 to 307036)
atcacaagctcacagacgtcattcttccggaatcggtaattgcatctgtttttattcagtgttttagtttttggtgtttgctgtattattattattatgttttgttagtatttatttcatgcaatacataattcatgtttcggaagattcagatgttatgtaaatgatatggtagtaattctttaattcaaatatgttctaatggttttaagagaaaagcttccttcaccaatgttacggttttttctttgtcagttagatagagctttgtgataaatggaactgctataatactacaaactcttttttccatttattagtaaaattggatttgcagtttaatggtcaattagaattcatttggatcgttttgaaattaatgatttgtaatctatcgtaacaaatccagtgaactcgttcaaatcttctcaactcatattttgagctaatttgactaattatgatacatggagtcatttgaaatcttttcccaaaatcttcctcgtaaatccaaatacaacccaaatgaacacttaactatgtgattagtatgacaatatatgaagcttttgtgagtcgtataatccagaatttgaggatgcaactagtcaaatttttgattttaaatactcgtatttttgacttggttgtgatggattgcagaaagactggagggtaaccggcatagttagccccat

SEQ ID NO: 104010 - DNA, 428 bp, Mimulus guttatus
  Intron number 1 from transcript mgv1a013788m (locus mgv1a0 13788m.g) derived from phytozome v7.0 (chr-ID scaffold_113 ; pos 754562 to 754989)
gccaactcccgtaagccaacttttttcacacaacactcaattttgtgtcaattgacacgattttgtttctctctctagaaatgaatcactgtttgtcttcaatagctcgataacaagctgcctacagccatctctgattttgttgttttaaatcatgctccttaataattctaagtatgaatttcctgcgttttgtatttgaatatgtttgtttttatctgcttcattgatggaaattcttttctgtatttcctttgtttaagcaatcaaattaccgaattcatcgattgcgattgtgattgtgatttaatcatatgaaatgagatgcaataattttaggtttggaatactgtaggaagatattttagtgatataaatctcgatgaattttgtcgatgcaggtcaaaatataaggaagctggtgaaag

SEQ ID NO: 104011 - DNA, 830 bp, Mimulus guttatus
  Intron number 1 from transcript mgv1a003489m (locus mgv1a0 03489m.g) derived from phytozome v7.0 (chr-ID scaffold_122 ; pos 551702 to 552531)
tcagggcgctgtaaccctagattttcttcaatcaggtatttttttttcaaagttttaatttttctctgggtaaatttgaatttggtgcgataattcgtgtcgaaaatgggaataattttgtattttgccctcctctcaaaaggtgatggtggaatagagaattacatttgtgaatcggctattttgagtttaattggaagtgattctgattctaattttgattccaattgttaaattctgcggatgaagatattaattactatgatatgctgattccattttcatccctaagtcgttttgttcccgagttcattcgttcggcattgatttttgtttatttggcgaatgagcggatcctattgtcttggctaattatattgttgtttgaaacctttgattctcttgctagaggctttgctgtatcagaaagcattgtagacttgtagtactctccgtttaaattgtccttttcttgttgtgtatagcttgttctatgaagttgacaatgaatagtcgatttacgagtttcttatattcattattttacaatttcgatgtcataagactttcagatcctattggttgttgaatactgttcaaatacttaaacaaattgacgaaaattttaagtcgtcactggaaaaaaatagcgaaaaatcgacttatatatagtaaacgaagaacgcgcacttgcaggtagaagcgcaatgaatgtagtgataatatttaataattaatttgatagaatttgataaggtctcgttggagattttcgtctagcagtgatattttttttactgaatgcaggtgccagtcatctacgagtaccg

SEQ ID NO: 104012 - DNA, 641 bp, Mimulus guttatus
  Intron number 2 from transcript mgv1a007394m (locus mgv1a0 07394m.g) derived from phytozome v7.0 (chr-ID scaffold_24; pos 1031562 to 1032202)
tgacatttaacttgacaccagaaatcattcatcaggtctgtttacttattccttccagtttgttttcctcctttatggtctgtgaacttatgcttgatatggataatttttgcaatcggataagtaactttcttaacatgagcagaaatcaaagcatctttaccaaatattcaaaggatcaatattcatcgacattgttctgaagaacagacaaattagtattattactattatttttatcatattttaccatttttctttgaaatattatcacttcactcaacattaccccataaataatccattcattaaattgtgtatttgaaattgtagttattttcttccagccattttctgaatttttgtcatgtaaataacctcgtaaatgatcgtgctgtctcaatagctctttaactgagtaaatttcgaaattataggtgaatattagaaacaaatcgctgattgatgtctagcggtgcataaagtaaaaactatctttattttctgactgtaacttttcttgcttaatgcttctactatgtttctattgtgcagtttgcccagccttaacggcactctttcttacgaataatttgttttttacagatattttccgaaaaaccagcagttcgccaagcata

SEQ ID NO: 104013 - DNA, 432 bp, Mimulus guttatus
  Intron number 3 from transcript mgv1a006143m (locus mgv1a0 06143m.g) derived from phytozome v7.0 (chr-ID scaffold_11; pos 2919021 to 2919452 reverse strand)
ggtggtgccatctgtttttcctctacagaatccaggtaaaaattgaatcttttggcaatttgagatttgggttttgtctcatgttactttgtctgtatctaatcttggagtttagttgttttttttattttttgtctcttattacagtataaaaccttaaacttgctgatctgggatttttaatgttcaagagctatacatatttaaacgaacacatgcttcaatagaaacaaaaattttaaaaatgcaatctttatttaatttattgtaaagcaaaagaagcattgagatccaaaagctgaaagaagaaaagggaacactataatttatcattcttttcgactttcttcgaaaaagtttcttttttgatcacttcttgatgttgtacatttcgcagagattctcgagagtacgactcggttattagaagat

SEQ ID NO: 104014 - DNA, 999 bp, Mimulus guttatus
  Intron number 1 from transcript mgv1a017057m (locus mgv1a0 17057m.g) derived from phytozome v7.0 (chr-ID scaffold_12; pos 595028 to 596026 reverse strand)
atttcagaatctcaaacttgtgaaatagccaacaggtaatttttttcttctcagttgatttctggttttgttaagtactagatgtgaagacgaaccaaaatgatgcgatttgtcatggctaatgacagtattttgtttaattttattgaaacaatggatgcattcgtcttgttcgatgaaatgtctcagtcaatttgttttttttgttttttttttttttttgtgcggaagtttatttcgtttttcgtttttgaattttgttaatatttttgttctcttgatcttttcggtttaccgaatccgttattaccgaatatatttcggtaatttcgaatcgaactgtacaatttcggtgtggtaatcggttccacaaaatggcataccgaattttcggtaccatttcagttagtatgtttctgtttagaaagtatatcttggtttgaaattctctttcgtaaaaataaaaaaaattagttacttgaggacacaactgaaaaatgcttagagtgtgttaaattttgtctagctggaatggcgtaaatgtgcgaataccatccctgtatttaaccccgttaaagatgttttcttgatttctagaatacgattttgatctcatataaccaacaagcttttaataggttattcttcatagtgcatagtttgtttagacatatttttaaagataaatgcttgcttgaatgaagaaatattagttgtacttcaaatttcgaaattttcgttccctcaaaatagctatcttgcatctcagaactagatctctggctctatcccaactgcaattggtggggttatgtcgaacttcgaagaaatttgaattatcattttgctgctgaaattggattcaaatatttttttgtttttgttgttgtgtgagcgcgttctactgtcataatcctttgtgtttaatttgactgtataattttcttgttccatggttggatcgcaccataatcctgattaatagactggttttctctg

SEQ ID NO: 104015 - DNA, 590 bp, Mimulus guttatus
  Intron number 1 from transcript mgv1a017123m (locus mgv1a0 17131m.g) derived from phytozome v7.0 (chr-ID scaffold_126 ; pos 517030 to 517619)
cgttcctcctctgaaatcgaagctccgctccagtattctctctcttccttaatctctctctctctctctctctctctctctcgcacgcacaaacacacattctgaagcataagctgttactctgtgattgaaaatgctgtttggtagtgacgtcattatttaattttgtatttattcgatgcgataaagatatttgatttttcttttaatattggttgatagtttgttaaatttcgacatctctcaattccagatgcatattttgtttttgccagaaatgatttttttgatatgaatcattaattaattaattaatttggttaattgcctttggaaatgctgcatctgtgaactaatggtggtgaatgaattacttcatataaattcattattttttttttgaaacaattattgaattcaatgtgtagcaactaactagccagtgcttttttttaattgaaaattacaactcataatttaaagatcttgttatccagctgttcattttcttggtttattgctgtataatcatagcattttatttgatttgtgtaggctaaaagaacgaagaaggtcgggattgttgggaa

SEQ ID NO: 104016 - DNA, 699 bp, Mimulus guttatus
  Intron number 1 from transcript mgv1a008119m (locus mgv1a0 08119m.g) derived from phytozome v7.0 (chr-ID scaffold_211 ; pos 81372 to 82070)
aaaataggtctatatcgttgaacttttttgctttttaattctatttttttctgcaatgctaatagaacagtagcacatacttttagctatgacttaaggtatttattctgattgatctattagttactagatttattcagtctgcgccccgtaaatgaaaaccgagaactgtctgaaagaatgtgggatctgaaagtattaagggtctacatttcaagtgattgtaaaatgatacatgactgtagatgtgaatatatgcttgaattaatctgcggacttaatcaaatcgagttattctaagattttgatcgaaagagatttttccgcaacaatttcatgtttggtggtgtaaatcgagagtctcacttgtagattgttagttatttgattatctctaaatcggaggatgtagatttgttttggtggtggtaatcttgctgcgattctgaaaatctaaaaccactagtgcgatgagttttactaatcgtttatttgcattataaagttgaacaagagtgcattcatatcccacctttcgatgtttgtgttatagaatagagacacgagcaagcagagcagaatacgaatgccgttttttttttcttctcgtacttctgaactagtgagttttataatgatgtcaataacttggtggttttttttggcagtgtgactaaacatctggagtctgcaaatact

SEQ ID NO: 104017 - DNA, 932 bp, Mimulus guttatus
  Intron number 1 from transcript mgv1a010651m (locus mgv1a0 10651m.g) derived from phytozome v7.0 (chr-ID scaffold_163 ; pos 392080 to 393011)
ggttgattgctaatttcaaggttatttttctttcttggattcctgctgaaaatccctcttctgggtttttttttttggtttctgtgctctaatttcttgtttaaagtttcgatttttatttttaaaattgatttttttttgaattttgatttatttatgcaaataatggtgagtgaagtttgtggttatgtgaaaaacctgatcttgctagtttgaattactgattttgattcttcttcttctgttggagtttgtgggagcactggttttttaggtttgattttgttgctggttattgtatgagcaatgtaattcagttttggggtttttggtaatttttgttaattgtagctccttattttggaagatctttacatctgaaatgttgcattatctaaaggcctttttgagataagattctttactggaaagaaatgtgattgtagctttatctcattttgcataataaataggcaatgttttttatttagtatttcgattttcgaccctttgttatcactaagtgtgcctctgttagtggtgcttttgttccatagtttctaattgagttgtgttttttttctcgctaggatttatttcttaagcggtcgtaaattatctgttatcgaactattcatcaaattaaccggtagcaagtgaaaaggaaaaaaaaatagaagaaaaaaaaacgttcgtcgtcttcttgaaaacagaaggtagtgtttcttggctacgcgaaatgtaaagattaaagaactctattcgtgtcaatttgctgtcagacgtttgaatatttaacattctcgtaaggaagcagcgtttattctaaattatgtatgtagtagttagaagtttctagacgaactgaacttgacttttcattggttacttcgacaggaattaataaacctcaatttggaaattaaaaaaaa

SEQ ID NO: 104018 - DNA, 412 bp, Mimulus guttatus
  Intron number 1 from transcript mgv1a019359m (locus mgv1a0 19359m.g) derived from phytozome v7.0 (chr-ID scaffold_22; pos 1067290 to 1067701 reverse strand)
tttgtggtcaggtttgtatctctctctctctctctagaatttattaattgttttttgtggttttttttttaattatttatttaatttttttgttgtttttagcagaatgttgattgttttatgatttgtgcttcagttaattttcaaaattagtgcttcttctttgttggtgatcttcattatacagttagtgtgtatgtatatgtgtatgtatatatcctagggaagaagatatgttattgtaaaatcttaaaacaatgtcgaaaaagtgtgatgaattttctcaatgagaagaacaattagttttaacttttaaacactggttttgaattaaattttcttaatgaaactaatttttttttgtttttgttgttttaatatgcagcaatcttcaccgtcgtcgatcctaagc

SEQ ID NO: 104019 - DNA, 344 bp, Mimulus guttatus
  Intron number 2 from transcript mgv1a011800m (locus mgv1a0 11800m.g) derived from phytozome v7.0 (chr-ID scaffold_8; pos 3404622 to 3404965)
gctggattttgcgattgggaaaagctcatattacggtgagtttgctaacgaaacattttctcgattttgtgtattggccttaattcgttttctcgtgacaaaatagtgaattcatcaagaagaagaatgccttagcatcttgaatataattatgctatacacggtcgactttctagtatacatatcaactgtttttcgttaaacgatacgagtccgttttttaagcaatattgtcgatgaaaagggattttttttttaaacgaacttaatttgttcgattgtatctatgtttgactttgagtattgcaggtcaacggaagatcacggaaagactgcaaaagagt

SEQ ID NO: 104020 - DNA, 967 bp, Mimulus guttatus
  Intron number 2 from transcript mgv1a016655m (locus mgv1a0 16655m.g) derived from phytozome v7.0 (chr-ID scaffold_4; pos 3132547 to 3133513)
ctcatcgccgccgtgcttttcgtgcttcttagcaggtattatggatctcgatttttttaattcctttttcaattattttaattaaatatgtgtagcttagggtttagtttgggatttctgttagcttataatttctactgttttattttgaagcagtagcttcatggagcttatatcaaattgccagaaacacattcaataattaagttgattttcatgccaattttgaagttgggatttttttgcgtggtctaacgaaaacacgatgtgttacaagtctagtttcgttctatatgttcgtcaccgacttaagaatttacgcagttacgaatgtattactttgttgccgtttattagtttctttgaacattctgccaacctggagtaaacgaaatcgattctccccttcgttcctcactaactcgaaccacgggtttgcgccggcggcagaattcaccggaggataacaatactccggttatttttccctgattccggtcgaagaggttgggtgggttgtggtggtggtttggtatatttaattttctgtgtgcgtggtaaaatggatacgttatccgaggctgtgtcttatgttgtaaaaaccctcgattgatcagctactcacacttcgtctacatgctcgtctcatgatttaaagtattttaagtacatacttggcagctgaaagaaaagaaccgtaattaaactaaatatatcaagatttatggatggtcgactaagacagagaacaattcgacttttcttgcctttgcgatgtttataataatcatcagtctgtggttctcgataactcctttgtattggtgttcaatatattttcttgagaaaaaagaagactatttaatgtcttatattgcgatttgattgttcatgctcgtgtcgtaacattatcattttctattattatgtagcttcctagcggaaacgggccttgtatcggtcgaac

SEQ ID NO: 104021 - DNA, 598 bp, Mimulus guttatus; identical to SEQ ID NO: 103719
  Intron number 1 from transcript mgv1a016618m (locus mgv1a0 16618m.g) derived from phytozome v7.0 (chr-ID scaffold_129 ; pos 238483 to 239080 reverse strand)

SEQ ID NO: 104022 - DNA, 799 bp, Mimulus guttatus
  Intron number 1 from transcript mgv1a006480m (locus mgv1a0 06480m.g) derived from phytozome v7.0 (chr-ID scaffold_76; pos 421578 to 422376)
ccctaaggccaacgaagttctgatcaaaaccaagggtaattaattagggttgtgtttttttatcctcaatttacttgttgtacattatgctgcaaagcttgttcttttttttttttttttttgggaatgtactaattgcagatgagagagagggaagtaattggagaagaaaagtcatttttgcttttatgtttgtaggctgctgaatcttacattgtttataggtgtaattacagttaacccctctggactataggctccgactcaaaatgccctctgaactacaaacatggagggtttgtaccctttccgtaactcagtcaacgttaataactgccaaaaatatttacagtcttagtaaaaaaagcagttcaagaaatcactcataaaaattcaatcttgaatcagtcacagaaaagagttcaagtgccgggggaaagatttcgataatttggaaaaaggagaagtcctgacacgggcaaaacagcaatgaaagatggattcaaatttgaatttgggggttttaaataagattaaggattttcattgaaatagagttttaatttgaatttgggggttttaaatcgaatcagggtaataaagcaaaagtcaaacctccacctcagcgtttgcagacggcacattaacgaaggggtactaattgtcccaatttatagttgaggggtcattttgggttgaagcctatagtccagggggttaactgtacttttaacttgaataatttgttgaatgtgtttgaatatttccgcagcctgtggggtttgccactccgatttgc

SEQ ID NO: 104023 - DNA, 877 bp, Mimulus guttatus
  Intron number 3 from transcript mgv1a008009m (locus mgv1a0 08009m.g) derived from phytozome v7.0 (chr-ID scaffold_85; pos 617184 to 618060)
cagttccgtgcgaacagtttgacacggcttttgaagtcagtaatgaaatatcattcttggaatttcgaattaaccatattttgcataaatctttccggatgtagttgatttatatgaccgctctatgcggccaagccataaaaatcttgtcgtatttcattacggatatgaatgacaaaaacatcgaatttgtaaaactttagcggttccattttttgcatgaaataatcatggtttcggtgagtgctgtgctgagagagctccattgttccaaatccaattttgtttttagtagacctacgtcttctgttaaaaaagatttcaattaccaattttcttaatctctattcctgaataaatttgtgcatgggttaggttaaaccagagaggggggggggggggggggtgttggggggattgtgttggttgggcgtctttcggctaatatcttcatttgacttatgcataagtccaaaaaattatcttctgcttactttatttaagactgattgaatgtggtccatgacatagttatgttgtggataacttgcatatcggacgtatctcgtctaaatgtttaaatattagtgacatataaattattacttgaatgctatgagaatattcaagtaaattagtattctatagtattcgtcagttatttctgttagccaaatattaaaattttattttgagttgaacctttttgctagttacttctataatcagatccgtaataattgataaacattgcaatgtcaaacagataaccatggagcagctatatcagtatattacctaacctctctgttttctgttatatttggttccatgttttacaggctgttgaaaggtggcttgtcgatagagcggtttt

SEQ ID NO: 104024 - DNA, 966 bp, Mimulus guttatus
  Intron number 3 from transcript mgv1a011278m (locus mgv1a0 11278m.g) derived from phytozome v7.0 (chr-ID scaffold_129 ; pos 552420 to 553385)
gctttcttcaggtaaattggtatacatggtcgataattcataatcgcacaagtccttgaacagagacgaatatcgtggtagtttttatttaagaaactacacaaatatcgtgctatgttttatatttattgggtaaattacaaccacctccctgaagtaaagtgttgttacaaaaacaaccccttcgttcttagaaattacatccagcaccctgcagtttgtaaatttcttacatccatccccctactaaagggcgttaatgtaagaaatctacatattgtaaggggatggatgtaattatgaaaaaataagggtttcttcgtaaattgaccttatctcagggaggtggttgtaatttactctttatatatttgaagcaatgcaaattgttggttgtagaaattggttcgttttcagcattgggtgcttgtaatttccaaaaaggcacatgcgttgctgcaatgtggcgtgataaaatatctcgattcagtcttgagtggtgaactacaaaaactatccttcaggttggcctaattacgaggaaacctagttagctttcggaattacaaaatcctgttgaaaaataaaaacatatgtcaagaggggtatatatataattaataatatagttaggtttttctgcaaataggtcaaatctgaagggtagttcatgtaatttatccatcttttcttttactctttcgatatgacacgtttgattcgtatgcttgttacggtctattttttgtcaaagcatagaggtatgcgtggtttttgtttactcaaccctagacattattttgtgttatttgtgtgcatggattgatacataatatcgaaacgacgattctaattttatatttatttgacacttgatacatttaggaatgtaactataaaattgctaattttgaattttaatctggtacagctagggcgtgcttagagcagtgtgcgggtcagaaa

SEQ ID NO: 104025 - DNA, 558 bp, Mimulus guttatus
  Intron number 3 from transcript mgv1a007592m (locus mgv1a0 07592m.g) derived from phytozome v7.0 (chr-ID scaffold_516 ; pos 30172 to 30729 reverse strand)
agaagaagaagaagccttccaaacagcatcacaaggtctcactacattttctcttttgtgtttcatatatatagttctcgctttctttaattgaatcgaaccatttcatttctttgttgaagttccttcgtaatcataattcgcatccaaactggatagtatttgttattattttttctacacaccgatatattcagtgtatttcattgatttgtgtgccaagaattttttgattgaactttttatccaagttagaattgaaaggtctacacttttatcgacagctcccgctcccttgatggagaaaaagcatgtcattctatacagaattctagaaatataacatgccttcaaatggtgcagcttttgtaaagttttattgctgttaaattcatttacatcacatttcttcgtgcatccactttgttatgtttgaggaagtaattgaaattgttatttcttgattgagcataattccgcgttattatcgaaatttaaacttgtcgtaacgatttctgtgcaggtgattaaggataactggaacaattacaagcgccc

SEQ ID NO: 104026 - DNA, 399 bp, Mimulus guttatus
  Intron number 1 from transcript mgv1a007592m (locus mgv1a0 07592m.g) derived from phytozome v7.0 (chr-ID scaffold_516 ; pos 31166 to 31564 reverse strand)
ttagggaagaacaacctagatccagttgggcgcaggttggttagccttagctaccgatcttattttctcttatttatttatttatttatttatttatttatttatgatataattgataatatagaattagaattagaattagaatgaatcaaacgtatgatgatgtgctataaaattgaacaggtggtgtctggtgaggatgatgaaaaccatggcgcctccaattccaacacctgcaattctaacactaacacacaggtctttttttttttttttactcttctttcaattgtttgttacatgagttttctgttcacaagctttatgtatgtgtgtgtgtgtgtgtgtgtgtgtgtgtgtgtgtgtttaatgtattacaggaagaacgttacggaagaa

SEQ ID NO: 104027 - DNA, 456 bp, Mimulus guttatus
  Intron number 3 from transcript mgv1a011516m (locus mgv1a0 11516m.g) derived from phytozome v7.0 (chr-ID scaffold_1; pos 4886068 to 4886523)
gtcgaggaccccaatatgtatctatcatatactccttgttttttgcttttcatgtttttgtccaacttaacatctcagtgtcttgatatgcgttatacagatagaatgctttgttgtttcaatatttctgacataagtattgagtctaactctttctactgtaagcatttgagctgattttattgaatgagttccatttgtagagcattttgtgttatattttgaagtttgttctgaaatattaattaaaagacagcaagaaaattcaaattccatgtccctttttgttttggaaacaattattagagaagctttagtgactttaatatatatgaaaagaacaatgtgtagtatcaaggagatatatagttttcagttaaaaatgctaaactgtatagtttcttgtgaattagcccgtctttaattttttctcaattttgatgggcaggttgagat

SEQ ID NO: 104028 - DNA, 561 bp, Mimulus guttatus
  Intron number 1 from transcript mgv1a000815m (locus mgv1a0 00815m.g) derived from phytozome v7.0 (chr-ID scaffold_7; pos 1480844 to 1481404 reverse strand)
ttcaggtaatgaacaatttgttagcacataatttgtttattgtatttaggttttgcttgcattcggcttgtttatgcggcatttgtgtacatcggtaggtttcgattttgtttcgttggctattattttttttaatttttctgtttgatggtagttcttattaagaaagaggtaagtgataatgattgctactgtctccaatttgtactgtatagatagatatacaacgagcggtgatttggagaattgacactttgaatattgcattttagactatgtaatataagtgattaaaggatttttcgtgtaggaagtagttgctctatatgatgtaccttggaaacttgcatcgagtccttattcgtcggttattgctatttacgttaagtttgcacgatttggtgtgtgatcgagtatcttgtggtggggtctattaactatcaagaacttcatgccgaatacgcagaagattgaatggaaatgtataaagagtgaacgggatgttttgcttgaatttgaatcgaacttgtttgttttgccctgcagattcttggaactggt

SEQ ID NO: 104029 - DNA, 628 bp, Mimulus guttatus
  Intron number 1 from transcript mgv1a006280m (locus mgv1a0 06280m.g) derived from phytozome v7.0 (chr-ID scaffold_85; pos 522923 to 523550 reverse strand)
tcgttctctttctctctctaacatctgcctacaaggttagatccattacgattttcttcttcgatctgtttattgtttttgaatccgttttgcaaaacagaagtatgcttttttgtttctcaaattggatcggattttgcttagatttttgttcaattttcgatgccgatgtctttaatttgtagatcttattatggcttgttcagatttgtgatttaatgcttttttttatccatatccggtcatgtatataaatttctcttgtttaatcgttcatgcaatcgactttattaatttcgttgatttagaaagaaatgaattttgatctgtgtttatgtcatctgcctaagagattggtttgcttttattgataatccatttatgtaaagattttgaataggttaatatgtataaattttgtagatctgtgttatttgtgtttaccgtgtttgtaattgctttgagggatatatgcatgcacagatgaattattataatcagctctttgtcgaaaaatatgtatcttctcgattcaaacagtatgctggttcagctgatgtagatagttttgttgtttgaaggctaatttagtgttttgattgaaagttgcagtttgtagccattcgct

SEQ ID NO: 104030 - DNA, 527 bp, Mimulus guttatus
  Intron number 2 from transcript mgv1a016177m (locus mgv1a0 16177m.g) derived from phytozome v7.0 (chr-ID scaffold_264 ; pos 110832 to 111358 reverse strand)
tgtgaagcagttattgtgtatcatcatcctctaaggtacgattctccgaagtcagttacatatgtttttcgattttggatctacgttgttgtgtgacttgtggaacccattgttttctttccccttcttgtgtgtgttatacttgtaatggtgttgtattgttttgtctctttttctggttttactcatgtcaattttcagtccatttttttcagttttgttaatgatgttaattagtttttgtttccaatgtgaacgcaatctggtttaatgtcgaatgtagaataactaattcaatcttctaagtatgtgtttactgccatttaattacagatttgaatttgatttttttgacaacaacaataattgggttgtttggtttctctgattttttggcactatgtgaatttttgttttttttcccagtaggtatcaattatttacagtacatagtcttctgttttcttgtaaagataacatttcaatattttttaaaacaaattcaaacttacagctttccaatcttt

SEQ ID NO: 104031 - DNA, 629 bp, Mimulus guttatus
  Intron number 1 from transcript mgv1a008306m (locus mgv1a0 08306m.g) derived from phytozome v7.0 (chr-ID scaffold_107 ; pos 887048 to 887676 reverse strand)
aaaaagaaaaaaaagaagaagaagaagacgaaggggtgagattttatttatttatttatttacttttttttttttaaattaaatattgcatttgttagtttacactggtttcgttgtctgtgttcgttctgctacttgaatttgaaaataaataattggtaataaagaaacccctttgttgtatatcttcttacacagtggttagggttttcttttttcgctttctttttttgtgtgtgtctgaagaatgatggaatctaggcttctctttcaatttgaatctctatttgcagatccaactcatttcactttttttttttcttttttttttctttttataatttaattaggagaatgtcctaaaaaaaacagggcgatctgcatatatttgtcactttgtttattttgatctgaatgattgcatataactaagttcttatttataaaataataattgattaatgatgccaagactttaaaaaaaaaagtcatcatcaataactatatttagctttctatgtagtatttgattttacgaggcagttcgaagcctatgccccggtgctaaacgcatttcgtattttctttgtgcagatcaaattgctgggagatctcatatttagtttttt

SEQ ID NO: 104032 - DNA, 901 bp, Mimulus guttatus
  Intron number 1 from transcript mgv1a011628m (locus mgv1a0 11628m.g) derived from phytozome v7.0 (chr-ID scaffold_195 ; pos 241421 to 242321)
tttccgtacgtctctctatctaaattttcatcacaagattcaatttttaatttgggtaaattttaattccgttgtctcttcaatttgtaatctttgctttaggtcgattttacttaatttacagcttttgccactcaatttgattttttcccgatgcattctcttagttaaaatgacgcagaaattagcccttttcttcttactatattgatattgcttcagtactactgctagaaccatgagatgcagaattctaataaaattaattttcaatttattatgtatgatgtcagaggctgaattctgttttttatttttatttatttttattttatttattattattttttttttacttttttatgatcaaatacaatagaagctcgataaattaataacctcgattaaataatagtttctctcggtcccaactcggtgaaaacgtgttaaattattaactcgataatttaataattcgataagtaatagaatttccctagtcccgactgtattaatttatagaggtttaactgtaatgattgccttttgagtataatgcttgcataattctgtgtgtatctggacctgttcgaatttggggatatgtttttttaatttttcttcgaaatacttagaaagaaattagggtttgtaaatgagttcgacgtgtattttgtagttgttcaatttcatctctaaggtttgaaacaactacattttttatgtagtagacgctaaactcgaagtgctttcaaggccttatttttacctattttttcgttaaatatggtgatttgatactcgatctagtctataagaataaatctggatttaatttttaatgagtttaatgcttaatcgataatgctgcagataaattttgctataactgcatcataag

SEQ ID NO: 104033 - DNA, 470 bp, Mimulus guttatus
  Intron number 1 from transcript mgv1a026709m (locus mgv1a0 26709m.g) derived from phytozome v7.0 (chr-ID scaffold_452 ; pos 30848 to 31317 reverse strand)
ccaccctattctcgtcgtcggctgcggcaactctggtgcgtctccttttttatacccattttgactttcagctcttcttttgctatttcttttaatcttccatctctttttgtcttgattctaagtgcattatcattgatttgtttcttattttgaagatttattctccaatcatcgtgattgatttgtttcttattttgtttcttattatttttttttttttttttttttgtgttgtagacctagagcattgggattattcgctgtttacctgctaaaaaattctctctcattatgtttgtacattgtatgtctgttttgctattcactacactagagcaagtaggaaaccttttttttttctttttcttatttgtcataatatatttttcttgagtcgaaaaaacaatcactgataacaaccaactcaaagtactgcattgtttgtttctgcagcctttagtgaaggc

SEQ ID NO: 104034 - DNA, 602 bp, Mimulus guttatus
  Intron number 2 from transcript mgv1a009985m (locus mgv1a0 09985m.g) derived from phytozome v7.0 (chr-ID scaffold_27; pos 737879 to 738480)
atactgttggtaatcatctttttcagttttcagtccctctattatggagtttttttcaatttagtactctatgttatatctaattgctaaaaaatccttttattacaaatattagtcaagaaaacacctaaatagtgagtttttactttttagtatgcgtgtaaattggaatgaaattttcaaatcagccgattttgatcctaattttttttttagattttggaacgagttttttgaactagttttttcgttccaattttcgaaattccaatttctattttttagaactgtagtttcattctatcttttaaattcattttttttttcaaaagtgttaatttcgatcctatcgttcgatattcgcccctagtttttagggtaatttgctaaaaggattgcatcctttttagctaatatttatgatacggatagtttttagcaattagactaaataaagtggtgctggatgcaattaattaactcttctaccatgtcttgaaatattctttttgttcatctttctttctgatatgtatctattttcatgttactaattttgttttattctgttttgattcttttttaggcgattcgaggaattc

SEQ ID NO: 104035 - DNA, 684 bp, Mimulus guttatus
  Intron number 1 from transcript mgv11b020008m (locus mgv11 b020008m.g) derived from phytozome v7.0 (chr-ID scaffold_5 6; pos 1038 to 1721 reverse strand)
tccatttgagcgagtgtgtttgtgcatgtttgttgatttgtattcatgtcctaggattgtagtttgtgttttcatgatcctttttgcgtatgcagttttgcgtgagtaattttgtgcatgattttgtacttttacttatgtgcgtatcttttgtagcgagttttttccttcacgtttcttgatgcgcattcatgtcctcgaactgtagcgggtattttcatgatcgctgttggaaaccaattttgaccatgttcgagtccgaatttggaaatttgacataagacaggaattgtagccagctgaaatagctttctaatgccgccggaaccagtcgatttggagtccggatgagaaagttatgctcgacttcgtggacactaccgaagatgttgagggatcctctcttctatttggattttattttcctaattgcaactctttttttactctttgatcattttttcttcatgacacctaattatcaatttctacctatacaatactaaatccaccaattaaaacagaaatataaattaatccataaaaaaatccacgtaaacgtaaacgttgagtgttatttctacactccactgtatcttttgtatgttgtgtttttgctgttgtttggttatgcgcattaaagtcctagtgttgtacttcgtgttttgaagaacgttgttgcga

SEQ ID NO: 104036 - DNA, 488 bp, Mimulus guttatus
  Intron number 1 from transcript mgv1a009952m (locus mgv1a0 09952m.g) derived from phytozome v7.0 (chr-ID scaffold_109 ; pos 265681 to 266168)
gtgtgtttgtaaagcgttcaaacactatattcgaggttagtcttctaccaagtctctttttttttttccctcacttcgagtctctccttgtaggttggattctttatcttttttaaatgtagattgttgaattgttcaattttgaggggatttttttgttgtgaagttgcttattgtacatatgatagtttatctagtgaatttattagccaaccgatggcaagcaccaaagcccttttttgtggtataatttataaaaaaaataacaaagatgcgtagctatcatgccttgtcctgttccatggtttcctttagctagtgcttttttggaaaaaaaacacttaattacagaatatgccaccatgaaatgttgtatctgtacatctgtgtcattcatgccctatgttattcaataacatgcttgtattcgagtttcttgtggataaataatagattaattttttttcgttttgtttttctatattcag

SEQ ID NO: 104037 - DNA, 705 bp, Mimulus guttatus
  Intron number 2 from transcript mgv1a008543m (locus mgv1a0 08543m.g) derived from phytozome v7.0 (chr-ID scaffold_228 ; pos 308112 to 308816)
ggcagagggttttcgttcgaccttttaatcgacctgtaaatcatcttctcactcactgactcgctcacttttttttttctttgtttttttttttaattttttatttttcttcgtgcgcgactctgtttttatactgaagaataggtgttgggtcaccgtgggtggttctaatttgccaattaatttaccaattttgtgtttatttattttgattgatttttagtgtggaataaaatttagaaattggagtcgtttgatgaatctgactggacataactcaaaaatatgtattgttcgagatcacttaggttgttcgtgaatttccactattttggcacttagttcaacattaaattgtgtaattgatgtgcctcatagccctgccctaatctaattgggttgtttttttttttttttttttttttttttttttttgggtcttactggggattggatggattgggagttcattgttttagtatttcgagtaatgctaatgtgtcgatgtgtgtctaattgggaagaggcaaaaagtgcgtggaagcaatttgaacgagtacctataaatgagattttaatctggttcgagagtcgtttaactcttaattagttgaatttcgttgttctactttttgctgacagttctgttgcttaatattgatcttcacagtgggcatctcataacggatatcgcttcagaagctt

SEQ ID NO: 104038 - DNA, 708 bp, Mimulus guttatus
  Intron number 1 from transcript mgv1a008139m (locus mgv1a0 08139m.g) derived from phytozome v7.0 (chr-ID scaffold_155 ; pos 37619 to 38326)
gctccatccaccgcgccgtcaagcattcctccattgttagtacttactactcttactgctcatattttcttctcttaattactactattactttcattaataaaatttttgactctgtttttgtctttttgattgatcttgctactaattagttcaaccgtggctcgtttggttggggagactattcattattaactaacttgtcgcgtcgacatgtaaatattatgttattacggttaatcttgtcttttaaagagtttttgtttgacgtcccgaataatttaattttcattagattgactaaataatcggagctgctaaaaagttgggcaaatttgaaatcaacaattgaaattaaaaaaccagagcatgtacattttgttgatgaactatggaaccacaataaatcactaattagttcaactggacctcgtttggttggaaagattagtcattattaattaaataaatggattttgtttgatgcttggtatcccaataaattgccggatcgacccacaaatattatgttatcaaggcttatccatctagtctaatcttattttttaaggagttctttttgttggatgtctcagagtccgataaaataattgtattttcattagattatttaatattatcttggttaatcttattttaattttgttaataggaagcctcaacagcgaaatacatagtcacgcaata

SEQ ID NO: 104039 - DNA, 700 bp, Mimulus guttatus
  Intron number 1 from transcript mgv11b015450m (locus mgv11 b015450m.g) derived from phytozome v7.0 (chr-ID scaffold_6 1; pos 986329 to 987028)
tacgtttgtgcatgtcaattttagcgagtgtgtttgtgcatgtttgttgatttatattaatgtcctaggattgtagtttgtgttttcatgaacctttttgctaatgcacttttgcgtgagtacttttgtgcatgattttgtacttttacttatgtgtgtatcttttgtagcgagtgtttttgtgcacttttcttgatgcgcattcgtgtcctcgaactgtagcgggtattttcatgatcgcttttgaaatcaaattttgactatgttcgagtccgaatttggaaatttgacattagacaggaattgtagccaagctgaaatagctttgtaatgccgccggatctagttgatttggagtctggatgagaaagttatgctcgacttcttggacactactgaagatgttgagggatcctctcttctaatatgattttattttcctaattgcaactcttttcttactctttgatcatttttgcttcatggaaacctcattataaatttgtacctatagaatactaaatccaccaattaaaacagaaatataaattaatccataaaaaaatccacgtaaatgtagacgttgagtgttatttctacactccactgtatcttttgtatctagtgttcttgcaattgtttggttatgcgtattaaagtcctagtgttgtatttcgtgtttttaagaacgttgttgcga

SEQ ID NO: 104040 - DNA, 868 bp, Mimulus guttatus
  Intron number 2 from transcript mgv1a016657m (locus mgv1a0 16657m.g) derived from phytozome v7.0 (chr-ID scaffold_164 ; pos 375754 to 376621)
ggcaaagttattaaaggtactacttgtactcatatttgaaaattaaattgttgattgtttcttatttgtggctgattttagagaatttatcatttcaaactgactacgaattcgtcagtgttcgaattgttgaacttgcttctggtaacttctagggtattgtgtttggtgagatatggaaaaattgcaaagttgtgcttgaaaaaaaaatgggtaaaagggggttttcaagagaaaagatgaaatggaattccgtgattttctcggttttgtattgggaaacgccggatttttacgtaatatttatatgtattggtggcttgaaatattttggtttttaacgttggaacggtaaaagtacattgatgatgatttttgaactacttagactaaaaatatgggagatgatgctatccacttaggcctcgtttggttggggagattagacatgataaactaaatagttggactttgtttgatgtttggtataccctattaggctataaatcttcgtgtcgacccggatattatttgttatcatgagcttatgttgccttttaggaagcttttttattggatatttactcttatcttggttaatcgtatcttggcaatcaaatgaggccttaggaatataagctcaagaaaataaaaaaaggtagtaatgagatctcaagtgtactctgaattatcaagaaacgaaagttttcatttccatctaatgataatgaatgtgtagatattagatgtgcctctaacacgatcctgaaataaaagtatggttggttgttcgtattatgattttatattcgctaagtgcacaagttttcgtttcttaatctggattgcacatttcttctgttgcagg

SEQ ID NO: 104041 - DNA, 732 bp, Mimulus guttatus
  Intron number 1 from transcript mgv1a023015m (locus mgv1a0 23015m.g) derived from phytozome v7.0 (chr-ID scaffold_4; pos 2494369 to 2495100)
cttcagcaactagggcatccaagcaaatgtgaaggtttgagccatgaaaacctctttataatgctgtttttttattacacaatcccctaaaatttgagtttttaggggtaattagtttgcaaaaaaagaaaaagaattgaattacatggcttctatgaattagaaagtatacaatgctgttgaataagttgtattgtggcaaatgaagcacagtaattttgacctaaattatatgttaaactataataaagaacaaaggattaaaaagcccacacgtacgtatagcatcatcatttctcttttatggagtatgattcaagtaaaagaaaaaagaaccgtatgattgaaaatataacaataattacatgcacgttgactagcgaattgatatcctaatgagtaaattgcagttagtaccctgtacaatttcgatctttacatacagtccccacattataaaaactagcccaaaaactccttgcggtgtttctgtcagcctgtctttcgacaatcggtcgacggctaagttggaaagggtaaattggaaatggatcaagtgtgctatataaaaaaaaaacagttaattaaatagggtactaattgcaattcaccattaattatctatctcaaacttgaagataaacctgtttggtatgagttgtcaaagaattctactcatattcctgatactgagaaaccgtttagcctcgggtacttctgtgtgcagtaaca

SEQ ID NO: 104042 - DNA, 413 bp, Mimulus guttatus
  Intron number 2 from transcript mgv1a008948m (locus mgv1a0 08948m.g) derived from phytozome v7.0 (chr-ID scaffold_1; pos 1752873 to 1753285)
atcacaagtaagtggaatttttggtttgttttgtttttttctggagattgtgttgtttatcggcatgagatttgatttagctgtagtaattcattttctcgtttttgtaatcctggcacactagctagatattaattgcaattaactcgttaatttgcataatttagcaaatcaattaggaaggtgatggtttgattaatttgaagatgcccccttctgagatcttgttttttttataaatctactgtccgattctgtaatgttaacgtaatactcgtccaatttggattaattagccggaacccctatgatttttgtgattcgtaataatcgtattcaagtttcgatatcatttttttcttctttcatacgacgcagtgattatcggagaagttgcgaatttcgtggcgtat

SEQ ID NO: 104043 - DNA, 616 bp, Mimulus guttatus
  Intron number 1 from transcript mgv1a018866m (locus mgv1a0 18866m.g) derived from phytozome v7.0 (chr-ID scaffold_307 1; pos 3176 to 3791 reverse strand)
atccctctgaaagaaaacgaaaaaggtatttactttctgtagttaatttcttatagaagtagatgttttgattcatgtgaactgatttatatgttgctgaattttgccgcatttgattaggcctctttgattggcatggaaaactttttggtttcgatgttgctgagttatgtttgtgtactagattaagttctgaaagcatatcaaaatccgtgaaaattgactagtgagcaaatacaatcatttgctaagggataggtcttctgcagttcaggaaatgcggtaactatacgatgatattgtgaaagtgcagatgtgattttagctatcatgtatactaagaaaatttgtggctattaaatcttggattcgactgtcaaatgatgtatccaagaactgcatgtattgttaattccattctttttaatcttgtgtcgatatcgtattagaataatgatggcattgtgccattgcttgacgtaatttgcggtatcctttggaagtgttgtttttgtagtacttgacgggtgttgtgattgagtgggtttgattgattatatgaagatgcataattagattgaattatatggcatttctaggcaaataaggaataggg

SEQ ID NO: 104044 - DNA, 549 bp, Mimulus guttatus
  Intron number 2 from transcript mgv1a017667m (locus mgv1a0 17667m.g) derived from phytozome v7.0 (chr-ID scaffold_24; pos 1722075 to 1722623 reverse strand)
ctccggttcaagctgcttttgctgtctccgaaaaggttagatttttgaattcactaaattctcgtaaaattagccttttcggactatatgttgcgttcttaagttttcatctagttacatatcacagtatgtattattctagattatcattgtgcagctgagtaaaataatagtaatgcagataaaactggagatttttatctatacattataaaaagatgagattttaccaaaatacattataactatgtaaggtttaggctgaatgtgaataacaggtcgtggaacaagacgacaatgaatacagtgtcctattctatttttatcttattgcattaattgaggttcttgatttagtggtcctatcttatctctcaagtcaatgctaatgaaaacgagagcccttcaaattaattgaatcaaccctttactcaagtcttctcgtttatctgctgaaagttcaaagttcagagtattaggacaaattaatcgaatagttaaaaacaaaatctaacatacttgtcttgttttattcctcaattttacaga

SEQ ID NO: 104045 - DNA, 831 bp, Mimulus guttatus
  Intron number 3 from transcript mgv1a007864m (locus mgv1a0 07864m.g) derived from phytozome v7.0 (chr-ID scaffold_250 ; pos 173317 to 174147 reverse strand)
tgtggctaacgagagccttgacaagcttctcttcagtaagttctctcgtgttttatttagccatttatgccctttgttacagttcagtttctgttgatcatttattctcaagatctggattaagaaggtttctgtcaaccggtgaatacaaactcgagtgtatttgtggattttagttatccttttacagatcgactcaagtaagcgaacatgcaaagttatgtattatttgtataaagaaaccattgctatagaatagtgaagcttgaattgcaaatcgtatccatattgggctcgttgattgaatcactcgaatttggtcggacatgcagaatcagataagaataaagcactttgcatcttttaatcatgttaactcaaatgaacttttgacagaatcagatacttcgatagtctttgctcactcatcgatctcttgataatcagtcggcctcgtcattccattttcgtagattgattcataaggcagtagtggtgtttttaaataagcttcagtcatgcaatcgcctaacggcaaaaaactatcgaggttcttgcgagaacttaataatgctgcactctagtgtttcgacaagcgcgattggtctacacactttcaaaagttctgaagtaatgttttctgaaattaccgtgaaataacaaatttgctgaaatatactcgttatgcatgaaaagttttccggaagatgaacctaaagaaccctgttttgaaacttatgtggcatcaagattaggtaattttgacactttattttttttttgtttgttggtttagagtctgagaaacgagaagtgcttgattggaagaga

SEQ ID NO: 104046 - DNA, 178 bp, Mimulus guttatus
  Intron number 2 from transcript mgv1a001579m (locus mgv1a0 01579m.g) derived from phytozome v7.0 (chr-ID scaffold_115 ; pos 181973 to 182150 reverse strand)
gtcaaggtaaccttcttccaatccatgattttttttttctctctgtaattgcataatttacgtgtttctgcgaatcatgtattagaatttaatccaaatataaatagaataaatcatttgatctatgtgacattttctttcaggaggaacatttgctctttattcactactttgtcgg

SEQ ID NO: 104047 - DNA, 487 bp, Mimulus guttatus
  Intron number 2 from transcript mgv1a008336m (locus mgv1a0 08336m.g) derived from phytozome v7.0 (chr-ID scaffold_123 ; pos 55230 to 55716 reverse strand)
tcagtgaacaacagctcgtggattgtgatcacgaggtttgtttcttaaatcctcgttttttcatttatcctcttattgctgtttattattgacaaatatagactttgttaaaacaaattatgtaattggttgctttttcatgtcgtgttatcttgttactagatgtatgaaggaatttttaggtggttaatttacgatatgtgaatgtaacactggaagatattgatctaagttcaagttttacttggaatttcagatatgatctatactcgtaattactcaccagttacgaatcttgtgcgattgaaatgatttttttgctgcttgtttgtggtgttcagatacatgtgtgtgtatgacatggaaaagacccttaatcttaattatttatcgaatgtgacaatgtttgagtataatagaacatttgattgagttttcattttttattttgtgtgtgtgtgcagtgtgatccagaagaaaaggattc

SEQ ID NO: 104048 - DNA, 849 bp, Mimulus guttatus
  Intron number 1 from transcript mgv1a004070m (locus mgv1a0 04070m.g) derived from phytozome v7.0 (chr-ID scaffold_165 ; pos 119528 to 120376 reverse strand)
tatccaacgagtggcttttgctcctttgcttgacggtgctatttgttcgagacgattgaagcagtatctctatcatttgaggaacaatatacgcgttagttattttttcctctttcgccttaacaatttgcaattgccttttcatgtatgtttaggaagtttttaacatctgcttcgggtttttttttttttttcgtttctctcttcctaaggcatcgtttggtttgtcagattagccatgattgattaaataattcgattttgccgaatgtttcgttagtccaataatataattgggtttttcacaagattatctcggggttttttcacaagattatctcggataatcttatcttagaaaccaaacgagtttaaaaaataccttcggttttcctacaggacaacaacattgcctattggaagaaattcgtgtcggaatattacgcatcgggtgcaaagaaaaggtggtgtttctctaaatacgaaaacatcgagctgcatacaagcggcgttttctgccctgtatctacggttagtctcgatgaaactttgcagtttctttttttttttttttttttttttaacttttacggttttcatctaattttgaatgtttgttggattagtcccatctttatttcgttaacgtaaatattttcaattcttgtctaaagagagccgttatttattttcaggagacgtggtattgcgacatatgttgttctaaatcagggaagggactcggtaagcagaaattcacgcaatttttttttaaacaaattaaaatgtaacaaatattctcgtgatttggtagaggcgacatccgacatatttcctaagctgttcaag

SEQ ID NO: 104049 - DNA, 965 bp, Mimulus guttatus
  Intron number 6 from transcript mgv1a000343m (locus mgv1a0 00343m.g) derived from phytozome v7.0 (chr-ID scaffold_2; pos 459347 to 460311 reverse strand)
aaattgtgtttgacaacactgacaatcgcatcccggtatattatttttgatatatgctatgaaatgctgataagctctttctatatttggtaaagaagttggtatcatatagttcttttgtttcgtagttggaattatttctacaacttacctggcagtaaatgagtgtacagaagtactccataagcagtcctcatatatctattttcgcaacatggaagtataagttgatgcatattgtttatgtacagtaaatgacatggaacaggtttaagaagactattaaatggtaattggaaaatgatgtgaatagttgtagaataaacatattagttagatgcagaagcaggaaaacaacatcaatacatgtttgcctattagctaatgcatggaccaccacaatgtcaattttgaacttcttttcttgtctcagttatttttcttcataccattatagatatcgtattagaaattcaatagtccatcctaatgttaaaattggtgtcaataggttaacttcatactatttttaactacttataaaacctgattacttaacgtatccgatgaactatatgatgaataaacaaccatataattgggctaaaggtgatttcaattcattaaaatctgggttcgtctcgtcgttgacttgtttgggtcgttacaataagtaatagatgatgggattataactcatttccatttgatttccatgtgaaataaatcatggttattggatcaatagagaagtagccacaaatttatgtacttttacttaactacgtgttttctctataagattatctatagtattccgtgtgtactttcctgtaagtgtcataaactctccccaaattgcagtggcatcttctcaatattgttcttttttgtcttgcatgattaatttacttttttatccttctacaggttgataaagaggaagtgcggctgaggagaacaat

SEQ ID NO: 104050 - DNA, 495 bp, Mimulus guttatus
  Intron number 1 from transcript mgv1a000343m (locus mgv1a0 00343m.g) derived from phytozome v7.0 (chr-ID scaffold_2; pos 460947 to 461441 reverse strand)
tggagcttacgataatctccttcaaccgctgacgggtgagttcttctgtacatgttttagctttgtagaatttactaaaaaactagccccaattctgtatagaaccctagacttcagtttctgctcgatgtttttttttctccctttctcagtttatcatttgtgtcttatcttaattgtagtaatttttcaacctctgatatggtccttttgcctattttgttttaatttatttcgatttaggcatttatgggtacttctacctcgaatttttgactgatactttcagttatactggttaatccagaacaaaaagaccaggttctggaattttctctgaattaagtgttgtttaatatttgagtttttgtcctaaaatgaaactatttgagttttgtaagtagttattccaattatgggtcctgattgtaaccaatttgctactgttctcatgccaaattgcagaggagttgcaaatcatcgaggaattacatc

SEQ ID NO: 104051 - DNA, 689 bp, Mimulus guttatus
  Intron number 1 from transcript mgv1a008852m (locus mgv1a0 08852m.g) derived from phytozome v7.0 (chr-ID scaffold_2; pos 3216246 to 3216934 reverse strand)
tcttagattcctcacgatttggcgatctcaaaactgtacggctccattttactgtctgttttttctgtttgtgtggttttgtttgttagattttggtatgaaattagattaagaagaatgttagtgttcctaaggtttcttgaattaaattggataaaattagtggtggtacagattaagttgcaaaggttttgattttaattacagagtggtattaattacttgtgtgcagtaattaggtttttctttagggaacacaatggtgttgattgatggtgtttgtgattgtttcttgaaatcagacatggtgttattcatggttggatttggggaaatggtggtatggttgaatttgtcgttagtagttatatgtttgatgagtttctcgagaaaaaaaagagcattattggattttgggaaatggtggcacggttgaatttgtcgttagtagttatatgttcgatgagtttctcgggaaaaaaaaaaacgagcatttttggattcgttagtggaaagaatagatcagagaggaccgattcctctgtttttccgtatattttgctttgtgacttaacccttgatagctatgaattatttgacgggtcgattcactgtgaaaccgaaaaaattaagcaaacccttgttgttcttcaggtgcatacctgcttcacatttgcagcagataagaa

SEQ ID NO: 104052 - DNA, 349 bp, Mimulus guttatus
  Intron number 2 from transcript mgv1a008252m (locus mgv1a0 08252m.g) derived from phytozome v7.0 (chr-ID scaffold_109 ; pos 283815 to 284163 reverse strand)
tgtggcacaagcttgatcatcctaacgtaaccaaagtaatattactatttcattcgttttcttttctttcgaatgcaattttttcatcataattagtatgttacattctcgttggcattttatatttgtatacgatctacgattttttttgattgatctatactaattaggataaaaagaaaatgtagattccattttatgcgaaggataatatttttaataggatacacttcataaattgtttttcggattatgaagtcagaagattgcttaagcttgatttcatgtttcttggtgttgaatcgcctttgcagttcatcggtgcaacgactggtggaacagagctcaa

SEQ ID NO: 104053 - DNA, 641 bp, Mimulus guttatus
  Intron number 2 from transcript mgv1a010912m (locus mgv1a0 10912m.g) derived from phytozome v7.0 (chr-ID scaffold_48; pos 686260 to 686900 reverse strand)
gatcttttcctcggaaagaagctgaattggtagaggtataattttcatctacgcactttttattgctttatatataagccgacaagaacataaaaaaaatatccaagaatgtttagaccactactttgttttgcattaccaattcagcttagttatttaacactttttagccttcacgaaatcaaattagctagttggtaaaagaatgaaaatcacaaggttctctgtattgattcttttccctgcaaaataaagagaagactatctctaatgttatatctgcaaggaaaacaaacgtataatgatgtttttggctataagtaatacggtaatagggctactcaagtcacttaggaagaagaaaaatatcacttcattgtattatgttttggctacatccaattggggtctcggtttattttatgtgatgaagggttggtttgatttaccctcttatattaaattctgctatttctggtgttctccctggttttcgtgaatatcttttcctggatgcttttttgccattaatttttcgtatgtggaagattttgtttagcatagtatagctaatatacgccacttgtgactaatataatgatctttcatccaagtcctgaaattttttggttcagtttttc

SEQ ID NO: 104054 - DNA, 466 bp, Mimulus guttatus
  Intron number 1 from transcript mgv1a018672m (locus mgv1a0 18672m.g) derived from phytozome v7.0 (chr-ID scaffold_14; pos 2276717 to 2277182 reverse strand)
tgtaaatccgtcgtgttcaattaatgttatttatttgaattattttgtttaatttatagcaagtatttatttgaagtttttgatatattaataaagggctctttgaggaaacccccctcattactttttttaatggagagaggtccaaaatatttcactccatttgagaaaagcccatgcccaaatttgagctaatacgttttccatctttgccccgcccgccacatcatcactgggtcacgcgctcagcaattttttttttgtttttccgttttttccccttcttttctatactagttttcttaaccgactatggagcatagtcgattagccttaatcgactatgcttcatagttgattaaagaaattctttaatatttttttttttgtttttttaattttttgtctatatgagtatattattcaactatgatgaagcatagttgatcaagaagtctgctactaa

SEQ ID NO: 104055 - DNA, 895 bp, Mimulus guttatus
  Intron number 1 from transcript mgv1a007608m (locus mgv1a0 07608m.g) derived from phytozome v7.0 (chr-ID scaffold_48; pos 1152316 to 1153210)
tgcaggttgggcacctgataatccattttttgcaggtattaatttcacaattttttccccttcgattttctgatttttgatttttttttttttattatttctggattctgttgctgtttatgcttttggcggcattagatctgtttaacaattcgtatacgttgttctgagtttctgagttcccccaaatttttttatttttttgcgggaatcaattttcgtgaagtttcgaatcgtacgctgcaaatgtttattgagttagatctaattgatacgtatgattaccttccagtaaccatggtttaatttctggatttttttaaaattgttttatcgcagtagcagtggctaaatattgcatcttttcccgctcggaattgcgtttttcatttaattaatacatttttcttcattgttcaaaatttacctgatttgctcaaaaatggggggtataatgtagtaggtgttctttattttggtgggtgggtaggtgagctcgatggtcgaatatttgaaatcgtagtgtgaacgcgatctctcgtttcttggggttagtgggtagcttgtggtgctgtagtttggttggtaggtgagttcaacggttgcatctttgaaggcgtagtataaaaatgctgtctcgttttattggcgcgtctttcattttttatttattttctaattatgcatcaacatcaaggtagtcaccacttgacattaagttattacctccttccaaacttgggtgatttaatttatttaattcgctttacgtatgaattttattgatcgtattcaagtagatccccgtttctatttgcacgaattcggtagtccaaaacaatttttatatttgattttttttgttacttactacagacaattgtactgcaaagag

SEQ ID NO: 104056 - DNA, 887 bp, Mimulus guttatus
  Intron number 1 from transcript mgv1a002395m (locus mgv1a0 02395m.g) derived from phytozome v7.0 (chr-ID scaffold_64; pos 716770 to 717656)
ctccacttttttctatttctcgttgcagagtaaaggtaatgcgccgcccttgtttattgactgaacctctgggattttgagttaaagcttattttgtatgattttcagttttatctgagcatttgattaatttattattcacttcaagttaattgaatgggttgcagactatgtaatcagttgttaaaattgagtggtggattgctggcagtgatggaagtttttaaaactgatataatgtattttaacagataagttagtgcatctgtatgaattcctctcgtttcggttacagaaatctaagctttcttgacacaatttgtgaattgggtaatacaatgtgaaatcggggatgagatacgaacttcgtacggtagtaattgattcgtaaattgtgcaatgccttcttgagttggacaatgtggtgaacgaactatggataactttgctctcgaaggagctacgacattaattaagtgaagaacttaagctaaattgatcttgctaactcttccattctaaatcagctagttttcagaaatactaacagaagacgatacacaggtaagaagcttagcatgtatatactcgactcggtcccttagggttcacaaatttatcaacaggggcttatgtttttatatctggattatggattctaggccagttgtattttcatagtttcttccttctgtatcttactgtacgagtggattctcatctctggaattctatgggaaattaattcgaatttgactagggtatttttatatcaatgttccagtactagatctttcattgaccaactgtgttgtaagtgcttgactttgataattttactcgtcttcctttgccaggaggtgatataaacaggcaccaagttcaag

SEQ ID NO: 104057 - DNA, 788 bp, Mimulus guttatus
  Intron number 3 from transcript mgv1a009229m (locus mgv1a0 09229m.g) derived from phytozome v7.0 (chr-ID scaffold_247 ; pos 81189 to 81976 reverse strand)
gaggctcaggaaagaggcggacttctaccaccgttaatggtttttcagtattctttttttgaatttccaacttcttcaagctgcgtgcatctgtttcatgtctcaaaatttgccatgtattcattcatttaataagaaaaaattgcatttggcacttgctagttatagaagaacttgagggaacgccaagacatgggatgtgtaggaaagctaaataaaatttctgaaacgacttcttatttcacccatgaagaagatgcaatcaatgacgtttcgtactgcatgatgtgcctttatctttttatatttccctgctgaaccctttactctatatgattgctgaacaatagcatttatatcttggtttagaattgctgttgtccagcatctactgctgatgtttgtgttgagtgtatcttatatgcctataaacaatcgtcagcaatgaatgaagctcaatgctgattgatctgtcagttttaataactggattatttgtgtgtactttaaacaatttagttcactatattcggctgtttctgatttctcctatccacttgttgcatctaaattgttgggtgtgacttgtttgtggaactgtttaatgaacttgatatttcctaaataaaccgaccagctttctctaatatcttgtttcatatatttgagtatgttacatatgtatctgcatgtactgagataaatcagaataataagtgagtttcaatgctttactagactgatcattttcacaaattcatttgtctcttaactgtactttgcgcagt

SEQ ID NO: 104058 - DNA, 762 bp, Mimulus guttatus
  Intron number 1 from transcript mgv1a020158m (locus mgv1a0 20158m.g) derived from phytozome v7.0 (chr-ID scaffold_17; pos 1598134 to 1598895 reverse strand)
ccaccggagctacgtggacaacgcaacaacgttaggttaacattttccccccttcagcataaattccgattttcgatatatgccgcggtagaggctcccctctcccttctttagtagcaatgttcactactgccgctgttgcggagcacccgcccgtaggttttagtagacatcggtacgattgtaggatgttctaactcataaggcaatgatagggggagtactattaacaaccatctcgctcgctggtcttttcgaccgtattatcgaccacgatcgaatcccgcccgcattcgggatcgggcagaggccaacaatcagtagggcaatagcatagctattattgacctgacaaatattgcgatccatatcacgaatttcttcattcaatttttaaaaattggagagcttaattttgaagaatagaccaaacagagtattttgtgtgaaacagtgcccaattggtgtacatttgattgattttgctcattgttcatattatttatagcaaaggggaaatatttacctagtttctgtgatgatttgtgccctagtttgtcagcatactgtttatatagggtatatgtcttggcttcaataattggtgcagcttgcaaaaaataagcttgtatctcaattactaaattgtttattctccattgggattgttaaattggaagaaagaaaaatcgacaaaaaagaagtgacattcggtattaacttccagatcggaaaccgacattataaacgttgtggagcaaa

SEQ ID NO: 104059 - DNA, 723 bp, Mimulus guttatus
  Intron number 4 from transcript mgv1a016318m (locus mgv1a0 16318m.g) derived from phytozome v7.0 (chr-ID scaffold_88; pos 643320 to 644042)
gaaaggagtgatatcccaaacattgacaagaaaaagtaagtatatgccacaatattaatttctaccaaattgattacttgccgtaatgtgtcttattacaaatagtgctaattgatgtcaaaatagtgattctttttttttttttttttttttttttttaacataattgattggataagattattcaacagatgtgataaaccaattttgatatgttacgactatgtttcggccgtaccttatgttatgataaaattctctacttgcaaataaaactgagtaacacctctgattaatgtatttgatggttcttgtgtctacagtttggcagagtgttatttcttttaagtttcttcgtcactaatatagttcgtctatagctaaactaatcttaaatgaaatacatcaagattgataccatctttgactgtacgaatataaaaaatataggtaaacaatgcatcgagtgccaaatgttttgatgttcatagtgttattctctgatcatttgtcactttgtctatttttgcatctctcttttccgggttataatattatttatttcatatttggaaaagacttttctttcccgaagccttgtaaatgtttttttttcaaacgaaatctgtaaaccatttgaaatttggaagtcgagatttagttatcttaccgagataatcattcataggtatcttgtcccggcggatttgactgttggacagt

SEQ ID NO: 104060 - DNA, 809 bp, Mimulus guttatus
  Intron number 4 from transcript mgv1a012538m (locus mgv1a0 12538m.g) derived from phytozome v7.0 (chr-ID scaffold_224 ; pos 185399 to 186207 reverse strand)
aacttcagtggagaatcggtttgtactcgtcactatttcttgctttatttgctttggaatattacatacatggtagtgtttaataaagctatcacatgctaatgaaaaatatgttggagaagaaaaataaaaaaacttatctattttcttgttatgtttgtgacattcggtatggagattaataatctttgacgatccctaatatttagaactcttgtcgcaaatgccagattcttcaataagatttttttttctttttatctaagaagtatggtaatttagcaattcaattaaaattgcgacccagcagttattttaagaataactactcagatatagtacatcatataagtaatttagttattcgatcttgaattcaaacaaagtgtatgagcagggttagcttttgtctgaatcttctcagagtcgaaagattgttctttcgttgcctagtggtgtttctcttgctacaaaaacatacaaagaattcattaagtgaatggctctgtgattgcattaactgtctataatatgctcgacaaacacaatctgctatggcatccgtgatcaactcattattggtgaaaaatgctggaagttcgtgccacgcattcttcagatatttcgtgcctgttctaaaaaacgttaagcaaattatcatctcatgttcgtgtgtgtgattaaatataattttgatttaagattatctgtttcacaattcaaataatgttccatgttacatagcgttctttcgtctatctgctgtataaccaggttgggccgcttgctgcgtattatcaagtaccctt

SEQ ID NO: 104061 - DNA, 434 bp, Mimulus guttatus
  Intron number 1 from transcript mgv1a021609m (locus mgv1a0 21609m.g) derived from phytozome v7.0 (chr-ID scaffold_103 ; pos 231848 to 232281)
tctactctgccgtctctcttaatccctcccttgaggtgctaccttttttccccttttttttttctgttttttgagttttgagaaccgatttctttgttttcttgctgttgatttccatttattttcttgaatttttgttctacagaaaaggggagtttttttacttggtgaattgtaggttgattggttaaccaaagaaattgaatttgcttttctcatgaattttttttcttcccgattttatatgaattgtaacttataagcaagtgatatttgaggctgtggaattttgtgtcttagatatggtgtataatagcagataatacgatgagaaggaaataatttcgtaaacaaccatgggatacaatctttttcatttttccagcatatttttagtttttccgaatttatgttatggtggtaggaagctgtga

SEQ ID NO: 104062 - DNA, 471 bp, Mimulus guttatus
  Intron number 2 from transcript mgv1a015101m (locus mgv1a0 15101m.g) derived from phytozome v7.0 (chr-ID scaffold_166 ; pos 270927 to 271397)
ttggtttatcaagatctgctcacaggtaaattcaattttaatttttattttttttaattaggtcttgtttgaattagtgttaattttgttgttgtattttagatccctttacttcttgaggttaattatgattattcttttatctgtcgatatgggatcttctgtttgctgattaattcgtattatttggtaatttaagaatatttatttttcggtaggggattaaggattgttgttcttttttttggatcttaattataattatatatatttatttctctaccctcttaatcggtgattagttggtgattaggactgattactctatgattgatatgaacacaatccttttttcttgtttttttgttgtatgctgtaaattttgtatccaaccgaacttttaattgtgttcttaaatccaataaatatattgtaggtgacgaacttctatccgactcgttcccatacaag

SEQ ID NO: 104063 - DNA, 943 bp, Mimulus guttatus
  Intron number 1 from transcript mgv1a010906m (locus mgv1a0 10906m.g) derived from phytozome v7.0 (chr-ID scaffold_89; pos 338025 to 338967 reverse strand)
tgaacccgttgataaatacgtttttctcgagttttgtaagtccataatcccctgatcagttgtagtattgtgttttatttgacgttaaacaatggaatactgcttgttctgtgattctgttatcctttgggaacactgcttgtaattgtatgcttgcaataatgttgttatagtgatggggatttgcttactgttacgtcgtgaaaaaaatcgttgctgttttaccggagactcgaaaaaattgggttggaatttgaatttggtgtttgtgtttttgaaaatgtttgggttttatatttatcgaaactcgatgtgcgtttctctcggagcgaaattggtttaactttctgatagaggggtgattcgaattaaggtttcttctatatgtggaatctgtgaatggtaatttgtttcggttgttggacaccgatacgtgattatgctattctatgtagttttattgatttaaattgttaaataagacttaccaagactgtgaaaaagattcggggatagttgaatgtatcctatctcctggacagaagttaagccctattttctctacatattgcttaatcgaaaacaatgtagaaatttatatggtttaggttggatgattgagagttcttgatgccaaatggtatgatgaagtctagaagggatagggtatttattaagattatttgcaaataacttgttatcaatattttttttatattcaaatcctagtacaaacgggaaagtaggggagaggtaagatttggccctctgaccttgactctaacaatcaagggcagataccaactctgttaatgagggttgttaacttcgtctcgaattctagtcacctgtcgagttcaaagtagtgcttagtccatctgatgaatacttcatgaacaattttacagttgcgcaaggacccactcaacaaaaggattctggg

SEQ ID NO: 104064 - DNA, 791 bp, Mimulus guttatus
  Intron number 2 from transcript mgv1a001380m (locus mgv1a0 01380m.g) derived from phytozome v7.0 (chr-ID scaffold_114 ; pos 606812 to 607602)
cagagtcagctgctggtatgtattatgttttagttgatatcaggatttgcagaattatgatatattcttctttcatctcgcgagtaggagatatactgattaaagaagagtgtagaagtaattggaaagtatgtttcgtgatgttgtgattcaccttcatgtatacttgtgattttcttcttttgcaatttcagtttgacaccgttttaacttggttttcaatttgttttagtcgggggtttcaacaagataatatttttggtagtgcaccggtatgcggtttttaattagcggtaattagttgatatttgacttcctcgtcaaacttttactcttttgatctccactatctaaaaagttagttcccgaatgactacgaattgtagtttagtatgcatttcagacattttgtttgacgttgatgattcaagaatttttttcaatcgtttctttacgttgttatgtagtttgatggaatttgatcattttgtacgccacttggtttggaatgtccatgtcacaggcttctgtcttttgaattcgttttttggtctatttcaagttcaactgctttcttgttattactgaaatatgtttcattattacaatgcgtgattgaatataagtttgattgatgttcattataacgatttggtttcattcatgtactatcaccctgaattgatatgatcatatggttgtgatgaaagtttgtttcggagatcaaattggttagctttcattgtattcttctgataccggtacgggtcttgcagtttgctccccacagc

SEQ ID NO: 104065 - DNA, 949 bp, Mimulus guttatus
  Intron number 1 from transcript mgv1a005757m (locus mgv1a0 05757m.g) derived from phytozome v7.0 (chr-ID scaffold_46; pos 816612 to 817560 reverse strand)
tcagaaataaactgaatctgcccatcaagaacaaggtatatatacttctcatttcttttttcttctcttaaaaaaatgttgctgtaatttgagtttccccctcttcgatttcactctatttgtttctatttcacttctttgtagaggaattttgttattttcttcggcagtaaattaatccacaagcaattttgtgcttcagaattcccccattttgcttgatctgtggtttgctttgcttctttcaatttcaattttagtatgattctgtgttgaagaattaacctattgtttttttacgccttttgcatttcttaattccttaacctaggaacctgaaaccagatcttacatttttgtgtatttttatttttttgagatctatgagtacctcagatgttctatttgaatctagttgttttagctgtaaataatttatgttttttgggtaaacctcagtagataagaatggggggttttctgaatgtgggtataaaataataataataaaaataataatagtttggattggtttaaagggttatcttgttttatgcttttgttctgtggtgggaaatttgataacaattccaagttttgtctgtctgtctttctttgttttgccttcaaattcaaattttatattccaaaggttgtgctatggcagccatgaaatcattggaaacagttaaaaatatgcataagattccagtcaaaggacaaatggttaagacagccttgtaatactattattatattccccacttcacatgcttcatcttttaaattcagtttttgtttcaatctggagtttactttcatgcagctgcctgccatcttttttttttttgttatattcaattgctaaattaacaaattgaattgattaataatatcttccctactctttttagctggctcggttatcggttcgtgtcttcatcggcga

SEQ ID NO: 104066 - DNA, 710 bp, Mimulus guttatus
  Intron number 1 from transcript mgv1a006746m (locus mgv1a0 06746m.g) derived from phytozome v7.0 (chr-ID scaffold_27; pos 1442101 to 1442810)
caggattaccgtctttgctcgtgaagtggtcactggtaatgaaataatttaaatttgagaaattcgaattttcgctgtgctgtgtgtgtattcttcgttttacttgatttaggtttatgtttaaattttatagatttgatctgtttgtttagtgcttttgattttttgatcaagtgtatgcgattttttcgaacatatatgatgttggcttagattataacgctttgtttcaccttcactgttgctgaaaacgtacgaagaagctctccacaagggattaggaatttagccataaattaaagttaggtataaatttacttataaatcggttcttttcgttttctattgataatcgactcgtttgcaagatttgatgattgatttatctaaaatgaaactgcaatggggttcaattgtcgatcgtttttcttttctccattattatctgcaaaggctttccggttcaatgtataaacaagcaaattgaatttttacgcatttgctggactgtagtttaactggtgcatttgcttaaattctatactagttgctcatttacaatctcgctgaagtgcatgaacaagaaaacagatgtagaatcgtttaattcttctgattggtatttttttaattctaacctctattatttgtactgatgaaaaccatactttgcagctgggaaggaagaactgcacctaccttttttactc

SEQ ID NO: 104067 - DNA, 397 bp, Mimulus guttatus
  Intron number 3 from transcript mgv1a016427m (locus mgv1a0 16427m.g) derived from phytozome v7.0 (chr-ID scaffold_51; pos 290279 to 290675 reverse strand)
tcttatcaccaccaggaagtctccttgtggtgaaggtaagtattccgttacacttgttcgagattttcttagctgcattttttatttcgagcccgaaaattatatttctagacgatgtgctttatttttcgagcccgaaagtagcaagtgtgactattattatcatttgccctgttgagcttcggatcatgttgattattactaagttaatacatgttgagttttgtataatttctagtttcgtattgttgacagcagcatctttatatagctgttatattggaataattttaacgataatagtttctttgattttatatagctgttatattggaataattttaacgataatagtttctttgatttgttaggtacaaacacttttgataggtttgag

SEQ ID NO: 104068 - DNA, 877 bp, Mimulus guttatus
  Intron number 1 from transcript mgv1a008986m (locus mgv1a0 08986m.g) derived from phytozome v7.0 (chr-ID scaffold_3; pos 1807014 to 1807890)
gattccaccaagagcatcattgccgaatacatgtcggttttattttttttatttatttctttatttctcttcttttgcatgctctgtttcttgattattttacttgttttttattttactcttgtgtgtgtgtgtgtgtgtgtgtgtgtgtgtgtgtgtgtgtgtgtgtgtgtgttttaatgtttgttattaaaaaatctgttgttcttgtctgtgttttgttatggttaaggaatcaaggttcgaatctttcttacaatagatttgtgtgttctaaaggggtgtgtatgggggggtcatggcccccatcatttctaaaaagttctattatttaataacaaaacttgttatttttcaattagtcctgtagatatttatttctctaaaatatcctattttttcttggattcttttcattattggagtaaatatttgaagttctttactcaaaattttgtcttattaaaagcaaatagaaactttgggggccacagccccgttgaccttggtcaacgctatgctggctccgtcactgcccgtttttcttatcatgaattatggttcgatgtagttttataaaaactggatcgaaaacgtgtggattaaaatttaaaattgatgcttatattttcatctttatatattagatattatatatttggatgtaacttctaagcatgttgttgcttagcctcgccggttttttccgtttttccgttaaatacaacgaaccggtccaactgtcgtgtatttattgaagatttgtttcgtttgttttgtattctttattgagtaatttattaatcacaaagtacacatttgtgatttaaaattaattgcaggattggtggctccggtatcgatattcgcagcaaag

SEQ ID NO: 104069 - DNA, 975 bp, Mimulus guttatus
  Intron number 1 from transcript mgv1a009615m (locus mgv1a0 09615m.g) derived from phytozome v7.0 (chr-ID scaffold_82; pos 629240 to 630214 reverse strand)
gctcctctgtttcggaatttctccactttcaagaggttcgttttttgtgtaccgaatcggaaaataaccctaggtgttggattagattaactaacggtgttaattatttggagctataattagaatagttacgttaaaatataatgggattagggagctcgtacggagttgtttaattgatcggatcaattaattaagttacttgattaagaaaagttagattagttaaatgataacgatcaatttaagtaacttaattaaactgattaacatccaagctgggaggtaatgggtttgggagaatcaaagactcctgcagttaataacaaataaggcgcggcgagagctggttgtcgcgtgcttgtcaaaataacatgttgattgtttttaaattaaatgattttatttattttcacgcatggatgatatttgattttggtagttaagttattcagtgtcttctgcatttgttttttaataacattagcttttctattagctgtgtctcaaagaaggccattttgcagaaatgtatataatatattgtcaatatagccatgaatgaatctttgtgatatatatatacatatatatatttgggcaaattacggccacccccctcatgtttgggtaaatacagccaccccctcaattatgtattatcttacaaaaatacccctccagaggtatatttagggatgttaattcggtaaaaccgaaccgaaatttcggtacgccaacatttcataccatttaccgaactgaatataagatttggttcgataaataaccgaattacataaattttatgtaaaaatatttaaaatgaggggtagctgtaattacccaaacaagagggagtttttcgtaatttggccatacctcagggcgtggccgtaatttgccctgtatattttttttccgttttttgaaatgatatatatatatatatttttttttcaaaattcaggagct

SEQ ID NO: 104070 - DNA, 918 bp, Mimulus guttatus
  Intron number 4 from transcript mgv1a017397m (locus mgv1a0 17397m.g) derived from phytozome v7.0 (chr-ID scaffold_251 ; pos 42655 to 43572 reverse strand)
aatttcttgattttcttaacaaggcaccctggtaagtgatatattgaatttattttcctagtatctaatacccttattatggctctgtttggttctaattctgcatcaaggaaaaatgaaattatagaaatttaaaatccccaagtatgtttgattttaggaaaaaacggtggtgaaattgaagtttttatttatttttggaaaatcattttcttcagctttgtttagtagttatagttaaagattgaaactaaaatgataaacactgtacattaatttgtcttctatcaaaattgaaataagattgtttaccttataaaaatcgaattttcacccaaaacaagttagcatgtaaaaagtaaattttcaaataatttagaataacatcaaacgaaaaaggtgataacacgaaattcaaactacaattttccaaccacaacaacaaattctggcagagtttatgtaaatttcttgctaaagttgtctttattctccaaattttttagctaaagttcaaagctttagatacagttttttttttttttttttttttttttctgtatctatctggttatctattaatccctttaattttgaattcaattcaattcaattcaattattatttggcatagtttctgtatattatttattgcttgaataatacgatagaagtttcacctttttacttactattttctgcaaacgaattacagcttattgactttttgttcttatttgcagggcaaacttattagcagtctatgtatgttattattacaaaaactgaccgccctagtgtttctttcttttatatataataatgattttcatgtcttcaattatttcggcacttttgttcttatcagtatatatgttttgatgtgtataagtttgaatgcagggtattggacataaa

SEQ ID NO: 104071 - DNA, 829 bp, Mimulus guttatus
  Intron number 2 from transcript mgv1a005581m (locus mgv1a0 05581m.g) derived from phytozome v7.0 (chr-ID scaffold_12; pos 1461726 to 1462554)
aggttcgtattttgttggattcttaaagaatataatgtctttggtgttgtagttttggtttcatcttcgagtatttcgatattctttttgaaggatggcaaaattgataatttgcttttccttatctacgcaaaaattgatttaatgacaatccttcgatttttggaagtagttttgtgtaatagtagttatggaagtagttatgccgacatgatctcaagttaatgattccatgtttaattggtcagcttagaggagaattatgccaggtttgtctttgttgcttacgggaatggaatgctcctgtcgttcgaatctagaatttgttgcttgcatcttttttgagacctgagtttatgttgatcgtatccatattattgttccttaagtgttgtgggactgtgagtactggttcgggtgcatggatgtcatttagctaagaatattctttttgaaatcgtatttgtttattcgtacttctaaacgagtaaaggtgagatgtagtgatattttttttgtaattatgtgctcccttttataggatagccttaatcttaactttggtactggatcttgttttccttgatataaatttacctaatgaatatgctcttagattcattatcctctaggtgtacatctttattcagcataaaaattctagatctaggtctagcttgagattgatggttctacacgtttggatatttttagttgatggccccatatcccagtagtaaagtatgttcaatttacttttgcaccttaccttatatattttaacaaatagatgtgataatcttattctgcaggccaagttcctcaaagc

SEQ ID NO: 104072 - DNA, 749 bp, Mimulus guttatus
  Intron number 1 from transcript mgv1a020246m (locus mgv1a0 20246m.g) derived from phytozome v7.0 (chr-ID scaffold_232 ; pos 21755 to 22503)
gcccgtaagaagaaaacaaacggagggaactcaaagtaatttttgtcgaggttgtatggttttagttttcttttactatgatatgactttttatttatcctaggctctagacttttaaatctgtttttagtttttggaaaaattggcgaacttatttatgttggaatttttatttttgattaagtcttaagatggaattgaattatgttttgtttcttgaatttataatataaggatggtattttgttagcacgcatgtgaccgacacccgtacacacacatgtatttaagttgtattaataataaaatgatgcacctaaaacaattgattgcattcacaactcttcaatataatacagtagattaccctggtaattgatatagataactatcaccatatactactccatccctctacttaaaatcacttatgcatcattacgcatattggatgcacaacactgtatcacactcacactttctatacctataacattttccattacagcctttctccattttacattgtagtctattaaaatattacgaattaaattatttattatcggttcataatgaccaatctttaggactttaatatacattgatgatgatgatgatgatgaagatgaggccactgacagtaaccattctgatggtgtgaacaatgtcaattttgctgccggcacttgttctaatagagaatcttgtaagaagtctgcagattctagagaggcaggccagtttgc

SEQ ID NO: 104073 - DNA, 312 bp, Mimulus guttatus
  Intron number 2 from transcript mgv1a000591m (locus mgv1a0 00591m.g) derived from phytozome v7.0 (chr-ID scaffold_223 ; pos 56117 to 56428)
aaaaggtatggatggggcatcaattttattcaataatttttgttgtaaaaacaacaataatttgtattccgcgattgttgagaactgtgaggaatttgagttggaatcgtttctgtcttcattagaatttgaactgattttgctagaattgcagttccagtaacttttttgtaacaattgcacatatttttgtctgtgatattttatttttccttttcaatatgaactcttgctgctttgatgattgatccgttcctcttcttgaaatgtaacgtaggctagagagaaggagttgaagaaacaaaaggctgc

SEQ ID NO: 104074 - DNA, 720 bp, Mimulus guttatus
  Intron number 3 from transcript mgv1a007539m (locus mgv1a0 07539m.g) derived from phytozome v7.0 (chr-ID scaffold_87; pos 818074 to 818793 reverse strand)
caagataggtgagtttatacatacttgaaatatatctttatcctttttaagttgttaatcgggctttattttttagtaatatttttactttgaggtgtcgaaataaggttcgtacaggaacttgttctctctcttatctgcttcttcttacaatattgtgacttttgattaaaacctgcgtctatcataaatcatgttttcaccaaggcctcgtttggttgccaaaataggattagccaattgttttattggaccccggaaggtccaacgaaaaagctccctaaatataatatttccgggtcgacccgggcagttattgggtttaccaaacatcaaaaaaagtctccaattattaattaatcatggctaatctccccaaccaaatgtacaaagtgaagtttgacaacagttgtgaatttatccgaagaactcttgcttgagtgttgttagtttctcaattagaatacacatctaatgaaggataacaattgcattggtgtatacaaacgtaaaaaattataactatgcctcgaaaaaacacttatttaataaccatcataatccttataatttatttcttaggattatatatcatacgggattgaattactaataagcaatttttttgaagtttcaagttcgtgaatgtttgtttaacaggttgatattatggcgaatgtttcagagtattcaacaacccaaacgtgaccgtccacttca

SEQ ID NO: 104075 - DNA, 873 bp, Mimulus guttatus
  Intron number 1 from transcript mgv1a013247m (locus mgv1a0 13247m.g) derived from phytozome v7.0 (chr-ID scaffold_13; pos 2352796 to 2353668)
attcttgttgttcataattttattcatacgataaggtaaagatcctgtttttcttgcttttccctcacccaattttacatttattgatgtctatttaatactctattttttaccccttttttccccttgtgtttatgttttttgtgcgataaaatctgtttatacgcataatttggggaaagagttgggtaattggtacgtgttgactaatttattgaggaggttgtttcatctactagaacggatttatatccgtaatcgagttgactcagccttaatttcgatcatgtcctctgaatttggctgagtgaagatttttagttagggtattacaatttacataataaggaaaaccttttgtccttttctttttttccggcttccgattgttattattattatgggtcaactcctctttttttcttcagcgattcgatacaatcaattagtatgaatgagtattagtttgctagggttggtgctttcttatagactatgtattctggatcagttcattcgtaaaaaaaatggcaaatttaatcaaaggaagatacttgtggttaactataacttcgatattgtcttgtaatgtgttattgtatcgagctcgtatctaaagtaacacaacgaggtgatgttcaataggtttgaaacattggtgtaatgaaaattatctacgttctcgactgcgcaatatgacaactatctatgttctcaatttggttaaaatagtttagattccatctaactatgccatgggcgatttcgttgctttcttgaatatgtgattttcatgttctgatatctgctaggtgatatctatttcaatgtttttccttttgttaggctgataaactttacgttttttgcagc

SEQ ID NO: 104076 - DNA, 520 bp, Mimulus guttatus
  Intron number 2 from transcript mgv1a010272m (locus mgv1a0 10272m.g) derived from phytozome v7.0 (chr-ID scaffold_3; pos 2397628 to 2398147)
ttcttgtagttggcgccactccgataaggtaaaacctctaactttttttttttttttgctttctttttgttttgggtttatcagtgtgatgctgtattactttgtggaggtaacggtgtacatgctttggtttgtgctgtattaatgaatgatgcacaccatgtgtttgttaaaaggcttcaactaaaagagctttctattttctgtgcttttcattgaaagatttgaatattttgttggagttgggctttgaatgaatccagtacaaacacttttcagatgattgtatcttctaataattgattattgacattattagtattcgttgaattttgacttggattacgtttcggttggttcgctctgccgtaaatcttttggcgagaaccttgtagatccatcgtaagttagatattttttacaaattacggtattataatgaatacattaatatagttctttttcgtatacggtatttatttgggaacatcggctgaactattacatgttgcagggaaat

SEQ ID NO: 104077 - DNA, 1035 bp, Mimulus guttatus
  Intron number 1 from transcript mgv1a021996m (locus mgv1a0 21996m.g) derived from phytozome v7.0 (chr-ID scaffold_191 ; pos 415295 to 416329)
ggtttggggtctccttcccgtcgacccacttccaggtattcgtttgtttgttcacattacgttccggaagatttgcgttcttcagtggggaatttaaacaaacaccttgtatacctttagtaaggtgttcccattttttttttaaattccggcggcgaatatcaccaaccactatggcaacctaacctttgtgttctcgagggatttatgtcgatattgttgttcagatgactcgctaaaaaaaaaactttgcctctgcgtggagaaaaaaatgttgtatatgagtgacaaagtgcaaccgttactggaaaaaaaggaaaattttctttagcaagtttatcctagataagctttctactctagcttagacaagtgggatttggccaattggcccaaataattgtttttttcttgacataaaatgctttaattatgataatttttattctccattctgatacggatgatgggttatcggatttttttctctgcggattttttgtatccaatataactaaatattatgttgagtatttatcatcgaattttgaggaagtgaagaaaatcgacagtgaagttccttatagtacattttatctgttgcaaagagttcgcttgaatcgtctggcttgtttgtaaggatgagtgatctagcatttgattattatctccctagtttataggagtttcttcgattctgtagtcataacacttttctgatatggttacgtttatcgtaacttttactgctcgactagactctaccataatttgtccaattatgatggcaaattttacgaatgtactttttgaaatcatgaagtgttataatcccgtttctttattgccagagaccgattttcaatcatatgggcttacgtatcaattgtagttcgtatatgactatatgtcactttatctcattaatatgtgttttgtgctgcatattttcgattgaaggtattcgcatttcatgcttcaactattctgtatttttcaggtgaacttgaatattatatcttcagcaaaggaaca

SEQ ID NO: 104078 - DNA, 663 bp, Mimulus guttatus
  Intron number 1 from transcript mgv1a001985m (locus mgv1a0 01985m.g) derived from phytozome v7.0 (chr-ID scaffold_29; pos 1797205 to 1797867 reverse strand)
aacctcgaaattttcgagtccgctgcgattcacaggtaatcttctccggcgccattttttttttaattttaatcttttttttagattttgattttgattttgattttgattttgattttgagatattgctgcgatacttgagaattcaacttttgttggttgatgtttgctggaaatggtttttggtatgttgaaattggtatatttttcggtaattagttggataaatgtgaaaacttggtgtttcttctattttctggtaatggattagtactactagcagtggagttgatgatgtcaatggagttctgatttcatgttgaacagaagctactaaaaatgatttaatatcgaataaagtcggttttttttttttttttttttttttttcggttacttgttctaaaacataaagacgtatagttctagttgttaaggatcgagtatttcgtttaccgtttactcacgagtttaattaattttagtcattaatatattagagcaatttagttgtggttgaattcgaaaggtttaccaatgatcgtataatgcaaaaacgctacaaaaaaaaagacaacagacgatgatcgaatctaacaacttttgctacttacaatttttttttcagacaaaagaaattgagatcagaaagttttctcccgt

SEQ ID NO: 104079 - DNA, 185 bp, Mimulus guttatus
  Intron number 1 from transcript mgv1a022827m (locus mgv1a0 22827m.g) derived from phytozome v7.0 (chr-ID scaffold_48; pos 416886 to 417070)
ctatccctacaggttaattaattagcaatattttttttcttttctagattcaaatcatgtgacaaatgaaaacggtacgcagatagacatatataattaatacgactttctgactttggtttctaatgatgactggtgctggttctgtaggtaacattcaacgagctagtgagggtaaaatcgtc

SEQ ID NO: 104080 - DNA, 968 bp, Mimulus guttatus
  Intron number 1 from transcript mgv1a022011m (locus mgv1a0 22011m.g) derived from phytozome v7.0 (chr-ID scaffold_5; pos 1078661 to 1079628)
ttcatcaagggaaaccttctcaggccctccaagcggtaattttctttttccccttcctttatttttttatttgcaatttcaatttaattgctgttgatcagtttgatttctagtttttactgattctacaattttgggatttccggtagtttataaatttactgactaagttcttgaattagggcatcaatttttatctattaattttgtggttttgtgtatgagactttgttaaagtattgattgttgttgaaaggggcaaatgcaagctgtttcgtcccctctgcatatgttaactagctactttaattacgaaaaaagatcgactggaaattcgtttccttatgtagcattctcgacgtaaccaatcatgaaaagggtttaataattggacataaattaattattgtgaatttgataaattcttgtttatccgattatcttactaatttcaagaaaaccgtaaatgaggctccaatagtgttctttttaagagatatgatacatctgccataattagctacaaccccttctaatttcaaaacgacacgtgtaagaaagtcggaagtatttggtgcaacgtaagtagtatgcatggctccgaagaactactaaaaatatatacaagattgaacggaaaatttgctaagtagtatttgtttacttcttatctttgttagtttgttttacaagtttgttacaagtatcttcgtctctgtttaacagataaaatttccttacagtttatggttactcatagaaggggtattttggtaatttgagcttgtctaagattttcggggtttacagctcatgcaagataattgtttcagtatgtgtgtgtaatgagatttttgtttttgtcggtgctttcagggagtgtatttctttttttaaactctcgatttatcgtttatgtgttatattgttaaaacattttttgatttgtttattatttaaaggtggtg

SEQ ID NO: 104081 - DNA, 375 bp, Mimulus guttatus
  Intron number 3 from transcript mgv1a012838m (locus mgv1a0 12838m.g) derived from phytozome v7.0 (chr-ID scaffold_89; pos 66427 to 66801)
gcatttgccttctacttcaacttctccttgccaaggtacttttttctgtttttctttttacttttatggataagttaaacatggttaaattggttcgtgataagtcggcttcctagttaatatattttttgaatttggatcttcgccatagaaatcaatatatgaatgtacattgatttacaattgaggcaaatactaattcgtactttgatttacaataaataaagacaaaaaatgcatatgaatgtacgaggaagtcggaagtagaaatcacaaaaaatgaagacagggaatttctcttaaaagtgcaatgcctagagttttctgtgttagtcagagttcgattaacaggacaactttttatgtttacgacag

SEQ ID NO: 104082 - DNA, 378 bp, Mimulus guttatus
  Intron number 4 from transcript mgv1a012838m (locus mgv1a0 12838m.g) derived from phytozome v7.0 (chr-ID scaffold_89; pos 66854 to 67231)
gttattcctttctcagcaatcttcaacatgtatgtttattttccttacgaacttggttttccgttttcttttccttcccttcattttgcaattatttagtataagaaatagaatcaaatctctttcatggaagaagttctctgtttccttatttgcttcgttaattatccaacggtagtttatttatcgaccccttttagttagagtagattcgaaaagaggtacaatgggatacgatgcttgttttgagattgtaaaaacgtatgttttagttgttttttcttttgattcctggagcaattgtagctgatatgctaagattatactgttgatattggctcagttgctgcagaatcgaaaaagggattcctatcggtc

SEQ ID NO: 104083 - DNA, 1031 bp, Mimulus guttatus
  Intron number 2 from transcript mgv1a007382m (locus mgv1a0 07382m.g) derived from phytozome v7.0 (chr-ID scaffold_213 ; pos 269847 to 270877 reverse strand)
ctaggaatctcattatattttctgttctttctgaggtaaactacctccttcattatagttttttgatcgcctataaagtatcaagttacattaatctcatcattcaactatcagtatgttgtgaaagtattttggattgctgctacattcataacctagctgagttgatgcaaaaaaaccattttctccaagcatacttatagcgattgttgttacttaatcctggtcgatacatttggcaagtaacgtactatgttttcttttctttgcaaaaattgtatagtggtactgtgttttctaaatgtaactctcaggcctcattccatatgatttgttctgaagttttgctatctagtccctgtggtggtttttctccatgttcaaatccttatgatttgaaagatctttacgtactttgactgtttcaataattactgcatgtatctacatggtttctggggagaccataaattttcattatgcttatccataatcttcggtgctagagcgctctctgccaggaaattggaacggtaggggaaatgttttcggctgaagatgtgtggaaatcacgtgattttattgtgtatgcaccaaatgtttatggtctttgtcttttattgcagcaagacattataaacttttaataattagagttaagagaatatttatatggtgcatactaataaattgggatctctaattctatgttagaaatactgaaaatagagtagtaatcatttttagggcaggggagggatgtgttgatgtgcgaaggttgatggggttgagtgtggtgtggggaatgagattggggaatatatataataaattatacatatatgatgttatgtttttgtatatgcgcgcatgtatttgaatagatagatagaacatgtaaatcatacttcacagtttatattgataactaccggggctctattgtttccagttgcttgttgatttggtgaacccaagcattgcattttacttattattttttttatttcttcagataatcgcagtgggtt

SEQ ID NO: 104084 - DNA, 709 bp, Mimulus guttatus
  Intron number 1 from transcript mgv1a007382m (locus mgv1a0 07382m.g) derived from phytozome v7.0 (chr-ID scaffold_213 ; pos 271101 to 271809 reverse strand)
ccgttttcagcccctcggcgccttctcgggttaaggtacaccattgttattgctgttgtatcgtagggtttaccacgaaatgtgtgtaaatggtcgatcttgtcgttttttgtgtttgttctaattggtccggatttcgttgatttttgtggaattaaaaccgtacagttttacatgtttggtcgatctaggttttcgattttgttgttgattggaactgttgatgttttagatatcgattccattttttgagtttgtttcgtttcggatttggaatttgtgctgtaatgtttttgatttctttcttcctttccgatccatggacgatctccggttcttacgcattaagttttagccctggttggtacgaaaactatgccattcagccagtgtaagggatttgcacgcagcttaatctcatgagttgtaatgcttaatctttggtggaattttttctttgattcttcccttcaaaccggtccgattggaagcttggctaagttgaattcagcccgattttgagctcgagctcgaactaaaaaaaatattgctaatgctttccttagaaacacagtcagaaactgatttgtttgaggactcagaaaaccacaaaaattagcgttaactatatattaacttgaagcaatcctctttccaacttgacatgtaatatgtaggtaatttgctaacttggtgtaatatgcagaaa

SEQ ID NO: 104085 - DNA, 839 bp, Mimulus guttatus
  Intron number 1 from transcript mgv1a013374m (locus mgv1a0 13374m.g) derived from phytozome v7.0 (chr-ID scaffold_51; pos 46057 to 46895)
gctccggcggtgcgccgccgacgccagtgcggagagccctttgaacgtttcggagcatgccgccgccgcctccaccgcttcctccacccataccgctgccgccacctccaaatgaccgccgcatgttcttatctgtttattcaattatttgtgtcttattattatgtaacgggcacttgcttttatgtatcggccagttctgtacacttgtgacgctagtgctgctgcaattttatcatatacagatatactccatgagtttttttattttattttaataatgtttacgaattataatatcatgttatatttaaaataagccattttccagagaaaaaaaaaatagtaccctccaattttcgtaatggaaaaaagtattttgtagtaggcattatgtaataatataaaaaaatttaatagtcacaataataattattaatattattattatatatatatatatatatttttttaggttgatttttaagtattagttattttatttatttatttttgtagtattatattaaattatataaatgatttaaataataataccatcaaattctacgaccaaattaattttattttctatgtctgtttttacttttttttatatatatatttaatttcaaagataaaaaaaaaaaaagatgctcctttaataaaagtttaattatattttaaggcccaagagctaaaaaaaaataataatggtactaacggattgggccaggcccatgtggcagggttgtttttataacctccgaaaaccctagcatatttgattccactccacttcagttccattttcatatcggcggtgaacgcgcagcggc

SEQ ID NO: 104086 - DNA, 912 bp, Mimulus guttatus
  Intron number 3 from transcript mgv1a015742m (locus mgv1a0 15742m.g) derived from phytozome v7.0 (chr-ID scaffold_170 ; pos 383446 to 384357 reverse strand)
attttgtcggagaggccaagtgagtaattcttgttgattgtgtatgaaatgcaaggataaatgattagagcttgtttggatgaattatgcaaaacctttagttcttaataaattaatcaaactagttcttgaattattgtagtgaatttgaaattttttaggtccgatgatggtttggttgatagtgagatttagaaaatcggattattctaatcgaaagagggtcttaatatagattcatttgaaatctttcgatccatacgcatgtttaaagggtacgggggaaatgaattagtaaactaccgaagagtcgaagaaatgattttcgaagatgtaatagttaacaatgaagtttttctattcaaacaaaatggtttcataggttgttctcgggggaaaattacaggtttcaaccctcaagtttgcaccgattttacatttggtcccccatgttcacaaaaaacacatttagtccttcatgtttcaaacaatttaacacttttggtcatttccttcaatttacagttagttcgtcagttaagacagacatggacacatgcttgattctgttagtacttacggaaaattgacaggaaggactacaagtgttgaacttttgaaacataaagggccaaatgtattttgttgtgaacatggaggatcaattgtgaaatcggtgcaaaccagagggatgaaaactttatttttcccgttgttcttgtttctcttagaaaagttgtcacatgtatgcaaaatcggaaaatttgcgattttgattaggatattattgcaataccaaaaacacaagtagaaaatcactaatgacaaaaaactagaacaacacgtaaaatcattttcttgaaacaattatttgcagaattccactcgagccgttgtttctagaaggaagtg

SEQ ID NO: 104087 - DNA, 1039 bp, Mimulus guttatus
  Intron number 1 from transcript mgv1a001613m (locus mgv1a0 01613m.g) derived from phytozome v7.0 (chr-ID scaffold_428 ; pos 62102 to 63140)
gctgctgcccctgttggtacaattctctctctctctctctctctctctctctctctctcataactgtcaattgcatttctgaatgtttaatccaaaacgtcgtcgtttcaatgattttttgttaagagattattaacctatattgatttatgaattattccatctctgtatttgttatatgagtgttctttttgctcaattggaaatggttcgaaaaaaagcagaagctaattcatacattccattgtttgattgtggttttttcaatatgtgcaaaactcgagcgcgctgcattttatcgttcgtcgctaatctttaacggagttatacgaattttcagacgaatggttctagtttcctactgtgtatttggatcaacacggaaaattacaattgtatgataaggatcacaagagaacaagcataattggaatccattgttgtcttttcttgtaaaaattcgaccttttttttcttctgataatccgtatgaaagttattacaaactgaaaatcatgcaatgatctataactctcacgaccgaatataattgttgttctaaatcattacatagagttgattttatactttttctttgttaccatattttcagacatcttttatgttctctcaagattcattctttatgttctctaaagattcaattgttatgttctctgaagattcaatttttatgttctctaaagattcaatttttattttctctgaagattcaattttttttttctctaaagattcattttactatgttctctaaagactcatttttatgttctctaaagattcattctttatcttctcaaaaaaaaaaaaagattcattctttatgttctctaaagattcattttttatgttctctaaagactcatttttatgttctctaaagattcaatttttatgttctcccacaaacctatctttcgcccaaaaatccctcaacataattttctcattattccctctcgacttttttttttcgacagaggaaaaaagaacggtcccactaagagactaccgt

SEQ ID NO: 104088 - DNA, 738 bp, Mimulus guttatus
  Intron number 5 from transcript mgv1a021237m (locus mgv1a0 21237m.g) derived from phytozome v7.0 (chr-ID scaffold_2; pos 470421 to 471158 reverse strand)
aaattgtgttcgacaactccgacaatcgcatcccggtattttttttgatgatgatatatttccatgttcacggacatgccatgaaaaatgccgattagctatttttatttgttactgaagttgctgccatatggttatttttgatttatttctacaaattagctgatgcattgaccacctcgatattaattgtgaacttctttttcgtgtctcaattatttatttcttcatatattaaaattggcattagaaattcgatacttcatcctaatgttaaaattgatgttaatgggttagcccttatactatttttaaccacttgtattacttgatatcttggcgtctctggtgaactatatgatgaataaaccaccatataatcgagctaaatgtgatttcacttttgcaaaggttcggtttgtctttgagttgtttggaatttggatggttacgattagtaatagatgatgggatcatagttaatttccatttgattttccatggaaaatgaatcatgtttatcggatactcatagaagtagccataaatttctgtatatttacaaatctaaatgttttctctataagattccatgtgtactttcttgtaagattcataatctttccccaaattacagtggcatcttcggcaatatcgttcttatttatcttgcatgcctcatattcatttttttcttccacaggttgataaagaggaagtgaggttgaggagaacaat

SEQ ID NO: 104089 - DNA, 458 bp, Mimulus guttatus
  Intron number 2 from transcript mgv1a007974m (locus mgv1a0 07974m.g) derived from phytozome v7.0 (chr-ID scaffold_247 ; pos 36554 to 37011)
tcctcggaaaagggctgctcgtcatagaggaaaaggtctgtttttttgtttgttgttaatgttaggacaagttttacttgcatctattatttgtctgatatgcgtagtcgaatcaaacagtatacttctgtatctcaataaagttaaacatatacatatatattttcttaaatgctaagaaaaattagattacatatttgagaactagtagtgatttctttagttcagctaataagcaaggcatctactctttcggatattagattacatatttgaaatttgactttttactccctgcgtttgtactgatgatcaattattttcgtagttgttgatgatcttttttttgccgttttctattttgcttcatcatattatcagtgtgtgtgcttgtccaaagcgtttatcgtgatattttgttctgtgtttgatttatacagtgaaggctttcccaaaag

SEQ ID NO: 104090 - DNA, 795 bp, Mimulus guttatus
  Intron number 1 from transcript mgv1a000756m (locus mgv1a0 00756m.g) derived from phytozome v7.0 (chr-ID scaffold_16; pos 384452 to 385246 reverse strand)
ccaggtacactagattccgatcaatgctttttttgttcgagcccttaggacatatattccattatgtttaaaacttaaaagttcaaatattttgaaattttgcctaggactttctatcaaggcttttggaattccaaatccacatataatatatatcattatttggaatagcctaaagattgagagttaaagagatacaagtttatctttaggattccgtgatagttaaattgtacgacaatagttctcgtttctgttttgtactactctgtttgggaaatatgattgtttgtttcttacttatttatctttgtgatttagtctttatataatgccttattgtttgctctggcagaaatttaccggctttctttcttcaatttaatatcccgtttcagttgaattagaataagaattatagtttgtcatggcaactcagggccagaaaactggaaaacctgacagtctctgagttttatgaggacgaatatctgtgcccctggtagttgatgcctaaagttagacaatctgaatgccacaaatatgtgtttgtgaataatatgatttttgactcatgcatgtcttttctctttttgacattatttcaactttaagatttgtcctttcattcttgtttgctgtcttcatttgaaatgtctttcaggttgcgtgaccaagtttatagatgaagtatttgattcctatctgaactttagcattacctttcaattcaatttaattgtccatcctttttttccagctctaagaaaagacgtaaaaagaaaattcggagga

SEQ ID NO: 104091 - DNA, 498 bp, Mimulus guttatus
  Intron number 1 from transcript mgv1a008843m (locus mgv1a0 08843m.g) derived from phytozome v7.0 (chr-ID scaffold_598 ; pos 29613 to 30110 reverse strand)
tctggtcacctctctcctttccacttctccagaaggtaatttagttatttaattattaatattaattttcaatattctcatcaaaactctaaattattctaataataacactactaattttcttcttttgtttgtatatatatatttcttactctctttctttttaagtgtatctaattttccatactaattaacagcttataagtttttcaaaaaaatcttaaaagtttaaaaaataagttgttatacacctttttgtttaagattttaaaaacgctaaaaacaacttatcagctcattatcaaaatacttaaaaaaaattattttaaaaataagacctaacagcttatcaactcttaaaacaactcatcggatgtaacaaactcttaaaaaaaaaaagttaactcggtgaatgtgtttaaatattttcttttttgattattttgttttgtcataaaaaaatatgatgatgtaattgcagggcaactggggaagagg

SEQ ID NO: 104092 - DNA, 1051 bp, Mimulus guttatus
  Intron number 2 from transcript mgv1a027116m (locus mgv1a0 27116m.g) derived from phytozome v7.0 (chr-ID scaffold_81; pos 490608 to 491658 reverse strand)
aagcgagtcagttggaatcggtccctttccactaggtctgtgccctaatttcactgcttttttcttaatttgcaaatttgaaatttcatgtgggctgcttgtattcacattgtgtaaaatgcaattctatgctccggattatgcgtattgtacggctgacctgctgttttaattcttctacggttaataaatctcgtctgttagctttaatcgagagccctgtgctactgctggtttcatttgggggaaatctcgacaagtaataaagagtaattgtagtagtgtcgtatatgtgaggactgttgtcagcgagtaccgaaaattgcgccgtctctaatcgtatttgaaaaatgaagattgtgatggtgaatagaaacttagagaagttaactacacgagcaaaagaagatttaataattaatgaagaacttctgatgaattaaaatttaaaatctagaagcctaggattatactcactccaattactctgattttagtcgttaacaaaatcgaatttctatttaacatgtactttattcaacctttgaattattattatgaacaaattagtggccaagtaattgaaagcattaaaatcgacaacaaatactcaactagatcggataaatttgtgattaactggaaatgaaaatcagatcatcgcaatatttggttacatcactatcctagatccgggcgccacttcggcgttcttcctcacttgttggcttctgtttcatctatggtttcgtacatgacttgtttccggtcaacctcgatagataaatcaaactttgttacaaaactactcataaacaacacaaatgacgtgacgaaaggtgcccatttcattggccgatatctaccttaactgttttgaatattgtctttgtttatcattttattgttttacttgtggcatcagttttaggaccattttttatttattagttcatagacataaaagaatggatcatctcttgacagttttaagaacctcgtttccctactgacagaggaaggacaagcattgctgctactggatttgtgg

SEQ ID NO: 104093 - DNA, 999 bp, Mimulus guttatus; identical to SEQ ID NO: 103322
  Intron number 1 from transcript mgv1a008378m (locus mgv1a0 08373m.g) derived from phytozome v7.0 (chr-ID scaffold_198 ; pos 40958 to 41956 reverse strand)

SEQ ID NO: 104094 - DNA, 621 bp, Mimulus guttatus
  Intron number 4 from transcript mgv1a020834m (locus mgv1a0 20834m.g) derived from phytozome v7.0 (chr-ID scaffold_261 ; pos 75716 to 76336 reverse strand)
ctagccaaggccaagaatcatctctccggcagtgggtatgttattgttattattattagggtaaattacgatcacccctgaggtatggtcaaattacgaaaacccccctcctgtttggtaattacatccaccatcctcaactatataaatcttcttacacgttcacccttgcggtttcaaatttagtggaatcttcgagattatggagtattatcacttttgtacccgttttatcccatttgatctccactttttgaagaaaaatgatcataatatgtgttttttggcttatatatcagattgtggtgcatcagatactgtatttttacacaaaacgagtacaaactagatgattatgttgaatttgacaccataagggtggcggtgtaagaaaaaagtcatagttgaggggtagatgtaattatccaaacaagagggtttttttttgtaaattgaccatacctcagggctggttgtaatttacccttattattattattaataattttttttatattaaagttagaaattacatagacaaattctttttgactcggagaatattctaccatggtattaatttcaggcgttacctctaatcgaggcacttgcattacacga

SEQ ID NO: 104095 - DNA, 987 bp, Mimulus guttatus
  Intron number 1 from transcript mgv1a000727m (locus mgv1a0 00727m.g) derived from phytozome v7.0 (chr-ID scaffold_79; pos 968359 to 969345 reverse strand)
ttcgcaggggtttgctgaggatttctgctggacaggttataatctgctttttggagggtaaaaatgacaaaaaataaaatgaattggctgagcttttttatatgtgtgtttgattttcttaatgttcatattgcgattaactcctagatttcgatcattgatgaagaatttcgttttcttgtgagtgatttaggggattttaagctttaatgagtgaaaattggggaactttgtgatctgatcatcttaagatctagcattcatttcttttttgttttataactgtttcaatatttatttgagaattttgttgtctgtcccattgttttgttgtttatccattaatgtttagtttgcatttctggtaggaacatcaaattggattttgaagctagtgtattatttaatttcctgaaaaaacttaattttactagaaactgagaagttctactgaatacgggtgtggcatgtgtttcgtatacaaccgaaaaagccaaaaaaaaaatctctgtttctttctgtggagcttatcagattgttattcttaacttaaattgagttggaatccatggcaaattatctttctcttctgcgttttttattagaacgaaaaaatagatataaaaattttggttgctttttaacagcgacatatatgttaaatattcgcatgactgctgacttttcagatgtggactcttgttgccgtcttgttattgataaatgatatatataccttcaactctgtggaagacctgtcaatgttttaacattttattattgatctagaaatttcaaaaaattatgttacttaagtatgtatgctatttttgagttcgtctgataattttaacttgatggatgttatttacgtacaatcttgtgaaacctagggacataagcaatataggtactgaaataaagattcaatctaatttgcttggttgtgtaggttgggagaaggacagagttgacagttcttccact

SEQ ID NO: 104096 - DNA, 685 bp, Mimulus guttatus
  Intron number 2 from transcript mgv1a013736m (locus mgv1a0 13736m.g) derived from phytozome v7.0 (chr-ID scaffold_157 ; pos 513088 to 513772 reverse strand)
gcacggtcgaaaagcaagcattggacaattctacggtatgcttattatatttgccgttttgttctacatagggacttcaaatctagttagtgtatataagtgtgattgaaggcaattcttaatgtgctaaggccccgtttggttggcaagataaaccaagattaactaaatagttggacttaacttgatgtttggtatccccaataaattaccgggtcgacccgccaaaattatgtaatcatggcttatcttgccttatcttggcttatcttgccttctagtgtgttttttttggttctaccaaacagggcctaagtctaataaacgagcgatattttcatgaaaacaactgaactaatttctatcaagcacatttgattaggtttcatttcgttgccacaatcttattaggccgcaaaactatatagttttggactaacgcacaatttcccaataaaccaagaaaaatgctcgttctcccaaaaaaaaaaatattaggctgtaagagaatttgttattttggtttttacgattttttttcggctatcgtattaaacattattcggagtttttttatggaaacacgtgataagaaaaaaaacgttcgatacacgttttttttgctgaaaggggtttgtgaaacttgacaggtgtgatattaccgtctcttgagcacctatacgac

SEQ ID NO: 104097 - DNA, 726 bp, Mimulus guttatus
  Intron number 1 from transcript mgv1a003361m (locus mgv1a0 03361m.g) derived from phytozome v7.0 (chr-ID scaffold_130 ; pos 315024 to 315749)
gggcagccgccgccacggcggcggcggcggcgaaggtataccgtttgttttgaaccctttattatattattgcatgaaattgaactctagttttgagtttttatcctatatatatatggaagactattttatttcaatatttgaattgttaatgatctaaattattttatataatagtttttttttttttaataaatggccgttggattcgaatacaagattaaatatcatggctctaattaatttgaatggaactattgaattttatcgatctggattcgaaaattttgatacgtgaacaatatttttcattctgaatttttgacatttttaaatgtttttggtacaaaattagtatattttgttctaattttttatttgattttaatttttaaaaacttcattttttatttcgtttataatatcattattattatatatttctatatcatggatgatttagaaaggagaaatttccaaatctttcgattcgaaaatttctgattttgaaatcctattttttagtctaattttcaaattttgacttttttgaaacaaaaaattagagtaaaattggaattagtttttacttaaaaaatcaaaacaaattttttttttttttgaaattgttattttcgattaaatttgatttttatctatagttcttatatttgaatttcatttttataattcaaataggcaccgtagaaaaccaccaccgcgaag

SEQ ID NO: 104098 - DNA, 987 bp, Mimulus guttatus; identical to SEQ ID NO: 103307
  Intron number 1 from transcript mgv1a002698m (locus mgv1a0 02698m.g) derived from phytozome v7.0 (chr-ID scaffold_7; pos 14063 to 15049)

SEQ ID NO: 104099 - DNA, 452 bp, Mimulus guttatus
  Intron number 2 from transcript mgv1a012948m (locus mgv1a0 12948m.g) derived from phytozome v7.0 (chr-ID scaffold_32; pos 1296496 to 1296947 reverse strand)
gactcataatctaattgtgtaagtaatctatgtctatagttcttgaattttcttctgtttttactatttatggtgtttcatttgtgattctctctctctctctctctctctctctctctctctctctctctctctctctctctctctctcatcatggagaaagaactttactttccatttgtggaagtacttagtttatgtttggcatcctatgctcatttttaatgttgttggccttatttcttctcatgattcaattagtggatagtatctttgaacaaagcatataactttgtgtgattaggaaattacttttgattctctatccattttatacggttaagtaaattacttaatatgcggacttatttctataagaaatagtttaataagttctaatagcaaaacgattcttgattccgtttttttttttgaattttgttgcagatttt

SEQ ID NO: 104100 - DNA, 679 bp, Mimulus guttatus
  Intron number 1 from transcript mgv1a013855m (locus mgv1a0 13855m.g) derived from phytozome v7.0 (chr-ID scaffold_148 ; pos 300159 to 300837 reverse strand)
tagtttggattctttctcctcgttttccacgcacggtatttagtattccttgtcctttctttctcttttccatttttttttgtttcctgaagtttattaccagaaaacccaactgttttctctaaactgtttttgtctgtatcagttgacttgttttctaatcaaatgattgatatccattggtttctgtgtcatgaacgagttgggttttttttttttttttaaattgattatccatttgtcttgttttctagagaggtgttcttgattggattttgtatgtattaaatgggattttttctttttgtgtgttcctaatttcttgcttcaatgaaaggtggtaggttggtggggttgacttattgtttcttgaataaaatgttgaattttgggcgtatttattttttcgacgattttcgatatgtggtttgtccaattgagaagattggattggctagtttatgatttaaccgaaaatggaatttctcgaaataattaagtatgatcatggctgattcttggttcggaggaattactacattagccagtggttcgatttttcagaaagttgtgtcgaatgtatatatattgtatagatgattgtgttcgaaaaggccgtaatgtggtgattatctaactcatttttctgcccttttgatatagtttagtaagaagagtg

SEQ ID NO: 104101 - DNA, 922 bp, Mimulus guttatus
  Intron number 2 from transcript mgv1a025179m (locus mgv1a0 25179m.g) derived from phytozome v7.0 (chr-ID scaffold_142 ; pos 678024 to 678945)
ctttcgccattttccgacaattcccttataaacaggtgcatcattttcttatatttgataaaaaggttaaatgcacattgcctctttcagctatgtggtgtataacacttgctcctttaactatcaaatgtaatattaacctccttctatctattaaaattcttaatacaactaatagtaatatcaaaatgattttatacccgtaataaaaattgttaaatacatttaatcatggtatgtgcagtgcatgattaatatatttttctatttaattataattatattaatttcttcttaatatttttttaaattagaaattattatttaaatcatacccccaacaattttttttaattggtaatagaatttttttttatgaaatataatgcatatcttaaatatatatatatatatatatatatatatatatatatatatatatatatcagttcaatgtatcagaatttgttttcgttatttttaatattaattatctaatttaatatttatttctcaagataagaagttatcataattttcaaacacgattaaaataatgtaaaaaaaatcaaattctgattagatacaacaatataaaatttcaaacaaaattaaaataatatatttttcgatgatgtattgtacttacatattaaaaaatttatgtagtgtatttcataatttttattaatgttatttttttcttttttatatcattgtcaattattttaatcttttatttgatacttgaataaggtaaagtgttacaccccatattcagggggttaaatctaatgaaaaaacaacaacaacaacaacaataataataataataattggtgatgaaatcggagattattttaacgtgcgtgtgtgcgtgcacgcaggtgcctctatacatagtggcgcagttgttggggtc

SEQ ID NO: 104102 - DNA, 732 bp, Mimulus guttatus
  Intron number 1 from transcript mgv1a022320m (locus mgv1a0 22320m.g) derived from phytozome v7.0 (chr-ID scaffold_52; pos 1328955 to 1329686 reverse strand)
cagcgcttccgattatccgctcgtgactcaaggttagttttgcatttctttattatcgaaagaatgaatttttgactttgtagacaacattttgtaccttgtttaattggttgtatcgtatatgaattactattttacgagggataaggttatttttaagggtaaattacccctgaggtaaggtcaaattacgaataaactcttcctgtttgggtaattataaccacccctcaactatgaatcttcttacatgtccacttttacggtgtcaaattgaacataatctagaagattccgtggaatgttatcaagtttgtactcgttttgtgcaaaaatgcaatttctgatgcaccacaatatgatatttataagccaagagacacatcttatgatcatcttgtttcaaaatgtggagctcgaatgagatatagcgggtacaaacgggagaatattccacataatgtagaagattccataatgtaggatattccacataatgtagaagattccataatctaggatattccacataatctagaagattccattaaatttgtcaccgcattaaatttgacactgcaatgatggacttgtaagtagattcatagttgaggggtggttgtaattaaccaaacatgaggggttttttcgtaatttggactttacctcaggggtggccataatttactctatttctagtgagcaattttttttattgtgcagatttgctct

SEQ ID NO: 104103 - DNA, 485 bp, Mimulus guttatus
  Intron number 2 from transcript mgv1a004421m (locus mgv1a0 04421m.g) derived from phytozome v7.0 (chr-ID scaffold_83; pos 645086 to 645570)
ttattaccaacaagttcttcacccgtaatttgaaggttggttgcacccttttcttctcggaattcaagattcctcttgttttaatttcttgattactaatggaataatcatcttctcttttcttttcttgttaattttagtagaaaccgtttctctattttaaaaattcctgccctcttttttcttcttaaaatactggtaatgtaatttcgtctatgaaaatcaagaatgccagaggttgtatttaaaacataccttaaacaaattcttttagattaataagccatattaaatttttggacaagtgaagttgcagattcggtcctaattcagtcatattcatttgatttttatccttgtttcatttttctcctatcatattattatttctcggtcagtcccgatttcttgcatcttcataataacaatgatgctttggacattgcccagatacagtttggtgttccatttcctccatcatcatc

SEQ ID NO: 104104 - DNA, 325 bp, Mimulus guttatus
  Intron number 1 from transcript mgv1a007314m (locus mgv1a0 07314m.g) derived from phytozome v7.0 (chr-ID scaffold_127 ; pos 619551 to 619875)
ccgtacataccagattttatttattttaattaaatgagcttataaacaaatatatatactatatagagacttgtacttttgtttaaaatgatcagaagatataaaaaaaatgattatgtacgtagtggcgagaatttttttccaccatgttatacatatatttctatttagtgcacctaatttttattatttagtctagccaaaaatcaaattaatgaaaaaacttcctaaaaaaacttattttcttttgttttccttatttttgattaagtccaccttgtaaaaaaaacttcctgattcgtcacgtgcaggcaataattaaggc

SEQ ID NO: 104105 - DNA, 661 bp, Mimulus guttatus
  Intron number 1 from transcript mgv1a025351m (locus mgv1a0 25351m.g) derived from phytozome v7.0 (chr-ID scaffold_16; pos 2208727 to 2209387 reverse strand)
ctccctcctcaagaactcatcgacgatctctgcaggtatatacatacatacatacatacatacatacatacatacatatatataattgtatacgtacatacatacacgcgctgcatctctgagtatattattttctgttttatgaattcgcccaactcagttggaaactaatttgccccaatttttttttttcttgagtacgccattttaatgtgggtctgatttactgggtcgggtcggtaacaaatgcagaatgtgtgatttgggcgtaattttttcggtgggagtactgattctaattttaagggttttgaggagtactgattgagatttttatgtttgattttgacgattctagattaaaattccagcacacgatgttgtttttcttggggcaaagttgtaatattgacgggatcttgtgtcgatgaatccccttgaaatattattagtttcgatttatcgtttatgttgaggagatactgtaagaaaaatcaggggatttattatttagttttttcgatttttttgtcatttgctgcaatcttgatggaattttttgacgagccgtttttatccggtaatttttgttcttctaagatatttaccgatcattttgtttgcagccgtttggttgtgaatacgcctaaggaagatcagc

SEQ ID NO: 104106 - DNA, 451 bp, Mimulus guttatus
  Intron number 4 from transcript mgv1a007307m (locus mgv1a0 07307m.g) derived from phytozome v7.0 (chr-ID scaffold_121 ; pos 862729 to 863179)
gagaaagagtatttagagcttaaaaacgaggagcagtaagtaattcgactcccttctttatttgcgaagaacaattgcactatggtttattaccgaacataattttgtttttctgtacttctgcatttcaactttgagcaactataaatattggttgatggtcagtataggggcgtaatctttggattagtgttaatggtaacagtgtagagtggtttaccgggaaatacattatgattagcatttagagtcaatttggttcttgtgcggtttccgttcttctttacgtaaatagataatgtttatcatgaatgtagccaattaatcatccttaaattaaggttttatgtgtaaaggttttctctctcttggctatgttgcatcacgtgctaattcattcttgtgactaatgaatccagagatatttggaagaatctgaagcatcataagg

SEQ ID NO: 104107 - DNA, 480 bp, Mimulus guttatus
  Intron number 2 from transcript mgv1a017816m (locus mgv1a0 17816m.g) derived from phytozome v7.0 (chr-ID scaffold_101 ; pos 234947 to 235426 reverse strand)
gattccattccattgcaattcaggtatacttcgaagtcttaactgccagtgacttttgtttaatttgattatttcatttggatactgacatcgatttgcaagcacgtgcatccgaaattttagtctaggaaattttgaaatctcctaggttgatcgttgatgtagatgtgaagaaatttagtcacctttagcatctttgtataatgtttctataaattaattcttaaactgatccaataatatgcaaattgttctcttcaaatgcttcgatgtgcttctgttctgctatacattgggagccgaatctcatacagtagtatcggtctgaaaactagtgattagttgtttaagtttggacattcttctgagttttgtttctgttactgactgtgtcgtataatcgttcgtcccttttcctgtgaaaatgcattgccaaagtgcttaatctaaggtttccgctatttattttctgatcaaggc

SEQ ID NO: 104108 - DNA, 691 bp, Mimulus guttatus
  Intron number 1 from transcript mgv1a016545m (locus mgv1a0 16528m.g) derived from phytozome v7.0 (chr-ID scaffold_137 ; pos 465169 to 465859)
gtctgttagatttaaatctttgtggcgaatcgagtgttagtcttgatttttttatgatttagattcttcattttttggtttttttttttaaatctgtttattgcgtgtgattttatgtttattgaagcttgtgtttaatttagggtttatgttggaaaaatttgggtctttagtgggagttttgctaaagatctagacttgagatctagacttgagatgattataaagatctagacttgccgccacaatgatacgaattagaagctattgtttttctgcggtgctggtcaattgtaataggatttgagtttcgccgtggttttggctttctgattgcttcctttgttgttagagtttgaaatgatatcagtttcattctaatttgagaaaatgcctgctgactccttaatttcagatatttgaaaaaaaaaatgttttcttttaaaacagaattggatgcttgtaagattgtttacattgttgaacccagaaacaaaattagtctctgcagatagcattctaaaagcctctcattatttgaaataacaagcagatcaccagtgctgtatttgttggtattctgtggatgttgatgcattcattttggctatttcatatctagaaatgctattgtatgttttggttgttttctaatttctttaacttatacgcagaccactcgggtgcagac

SEQ ID NO: 104109 - DNA, 961 bp, Mimulus guttatus
  Intron number 1 from transcript mgv1a013632m (locus mgv1a0 13632m.g) derived from phytozome v7.0 (chr-ID scaffold_36; pos 144033 to 144993 reverse strand)
agtctgttcggcctcggcaggtaaatcttcccccaaaaatcaatcaaattatgattgtgatttcatctcgtctcattgatttacgtcacatcgatatatatattatttttgtttgtgtggcgcttcaatttaatttaatttaatttatttattttgttgttggaatttgttatgtgttgctttcttcattttggtcgtcaaaatcaaaacgtgccgattggttattaatgcaatttgttgagggaagaaaaattgaatatttatagttttttcttttagttgtttaaaaggtttaattgctttaatttggcctcttcacgaatacaaaaaagatctagcatcacgaactctgatcgatgatatatacatggaacgacatacatcccggtaccgattgtagctcgaatacaaggcctcgtttggttggggaaattagccatgattaactaaataaattggactttatttgatgttttgtatccccaataacttgcccgcaaatattatgtttggacgtccgggagtccgatagaataatttggttttcattagattatttaatcttatcttgtcaaccaaacgaggctcaaatatatgaaatttaagattaattgaatgaggggtgtattgaggatttacagattttttttcaaattatataaacttcgattttgttgttctggaatggaatacaagtttatccctcaaactgtctcgactatgtctttctgtcaactttaatcagggtggtgatactatctttttagatgtcggttatgtaacaagtcgattttccaccatacatcaaactgcatctgggattagttttattgtgtcaaatcggtttgtaattgcatctgatgatcggtatctcttataatgttaaacttgttatttataaattttcatttgttatttatgaacaggaaccaaagaacgttccgccccaaaaaaagtgcac

SEQ ID NO: 104110 - DNA, 739 bp, Mimulus guttatus
  Intron number 2 from transcript mgv1a009472m (locus mgv1a0 09472m.g) derived from phytozome v7.0 (chr-ID scaffold_20; pos 2138381 to 2139119 reverse strand)
tttggaactttacttattttctcaagtggaacaaggtacatacaaatccttgttttgttccttattcttgtgatagtgcagtttaattagtaatttagtcagttcatttttatcttctatcataaatggtgtacatgaatactatgtcccatttatgtgccaaacggtgcctcatttaagctattttttgaatttctttagcctattaccaataaataatattatggggagggatatgtttggcggtaagaagagttggtggcagagtttcaaatgctagattacttagtttttcattgttaggatacgtacaatatgcgtgactaagttttgggcattcacatggcaacgcccaaaactttgtcacgcatataaactaggatcttttctatgaatgtacatgtgaacgcaacaagatagatacaattttagttggaaatgtgtttatctaatgtctgaaattacaagtgaaaagctatttgctgtttgcatgataaccattggcaaaattgtcaaagctagtgctgagagttgagacattattgtaatttgggttttatgatcagctttttagacatttgaaatgttcgttggagcatatgggattattgagacatgagtcgcctacaaatcggcattttgggaaattgcaaatatgcatgtatcatgtgtaaatgtttactgtatttgttagagtcactctagctctataatcaactaatgtctgcaatctggtcag

SEQ ID NO: 104111 - DNA, 514 bp, Mimulus guttatus
  Intron number 1 from transcript mgv1a015241m (locus mgv1a0 15241m.g) derived from phytozome v7.0 (chr-ID scaffold_102 ; pos 670967 to 671480 reverse strand)
tttttctggaattcaattgacgtattacccattcagttaattctccgttcaattttatttggcgattgcatattttttcctgaatgtacaacgattttctgtgttcttgacggagttgtacttcccctctgcttgttaagcatgattattatctgaaaattagggtttattaattcgtgtgatagtattcttgtcacatttagatcatttgccactctgtgctttgctttttcttttggaattatttgggggttttagggttggggttagattttgtttgttcatctgttttaagtggtgatatgctagtatgttttatattgatctcgtttcatgttacaaagaacaggggttggattgcaatttataacgcaatttgagtttactcgtatgtttgtcggttttattaaaattggcatctgatgtttcttccgatcttgtaacataattcttacctcaattcgttgcttgctttataggagttcattggcttggcttaactagcgctgtggtt

SEQ ID NO: 104112 - DNA, 627 bp, Mimulus guttatus
  Intron number 1 from transcript mgv1a023152m (locus mgv1a0 23152m.g) derived from phytozome v7.0 (chr-ID scaffold_108 ; pos 876111 to 876737)
acggacatgtatgtttagttggagtcatttggtgttttcgtagtgcgagtacatatttttattctttactcgcggtagtcaaaatcgggatttttaagtaaaatcgaaaggggctgtaaaatcgtaatctttacatatcttcgtacatttaaattgcattccaaattatatgcatgaacataaataaaacatgtgcttattgtgattgatatttacttgatcagttcttgatcgtttttgttcattgtttgtcctagggttcagtcttcctcaaattttactaatattcctaaaatttagaattattattgttacttgaaatgggtcggctcgacctggtttcacttgttttgaagaaaaacaattaagtttggtcaacaaattgactcctaggacaattataaattcccaatttagaatctttaaaatcgaagttaaataatagatttaaacattttactcccgagcccgaatgattatgcttaaattagaattctacttggatttaacgaagccagggcagtgaaattgtcaaattgtaggattttaatcgggattttttagtttttgggagagtgattttttttgttgtatttgacttgttttctttgtgcagaattcattgac

SEQ ID NO: 104113 - DNA, 516 bp, Mimulus guttatus
  Intron number 1 from transcript mgv1a001446m (locus mgv1a0 01446m.g) derived from phytozome v7.0 (chr-ID scaffold_101 ; pos 123930 to 124445)
cccttggccagagtgtcttcgtttcccagatcctcgtaagccccatttttttttctcaatttatctgtgtgtgtgtgtgtgtgtgcccgattcttccgcttgataatgtaactcttaattgggttttgtaccggaacgagtttggggtttacgaaactatatgacgatggacgggcgcaaggtgtttgttgaaattcctcaatgaacaaaataattgtgtctgatgagcaatggtttaagtagctgagattttgatttgatttgctactgctctagggaatggatactctagttactagttagagatatgctttatgataaatgaggttaaatgtggcccgaaacgaaaaaagtatacaaattagtcgctttcatcagatgcgtagttgaacttattgtgatcgatcggttttatttatttaaagcccttgaaacgtagtttacgtcgctgtctaattgtgttgccttttgtgatgaccaggcaggggtaatattgggaccatcggtcctcggaat

SEQ ID NO: 104114 - DNA, 1027 bp, Mimulus guttatus
  Intron number 1 from transcript mgv1a021380m (locus mgv1a0 21380m.g) derived from phytozome v7.0 (chr-ID scaffold_8; pos 849676 to 850702 reverse strand)
cccatcgcttcattggtaactaaatatctcttcctttattttatctttatcaccatttcttcttttggttcaaatcataatgcattttttttttttttttaatcttttttcagctgcacatgtaatgacgtttgtattggtcttcttattatcatcaatttctcagattacaagtttttattgttcaaatattccagtgggcattttaaagaataccttttttttttttaaattctcaacttcattttccggggtttgctgcaaaacttgacttggttaaagaataaaaagggaagttggtttctttgtttggaagattccgtttttttttttgtacaccggtcgaaatacatcgggtagttttttttttttttttaacttttgatttgcacacaataacacgcacacatacatgtggatatgtgtagaagttaatccatacacgtgtatgataggatataatttgacgacttttgacttttacacagtgtagcgtataacaaaactgataaacgggaagcacttttaggatatgagttcattttccacttcttcgttggttctacaattctacattggtagagttacacacatatacgtggggacgtgtctaaaacgtgtttttagatacgtaaatatgtacaactagatataaagtttgccgagtgtaacgtcgaatacgtacaactgcgatatgctgattatagtttggaaagtgggagaatagctaaaactatgctatcctttagaagttgttattttctaattaatcttcgaaaaagacgatgcatgaaaatgagcagaaaatgctgctcctgcaatattgttctgtttcatgttctatctggcatctttagacacgagacaaacgtcgtatgtcaaaatttcgacctattttttcaggttatacccgtgaaatacttgattggttctgaaaggaaacatacatgagtttttaaaaatatttttgtttccgatttttttcttcataggcatccgctaatcttggcggagaaccattagctgg

SEQ ID NO: 104115 - DNA, 432 bp, Mimulus guttatus
  Intron number 1 from transcript mgv1a025938m (locus mgv1a0 25938m.g) derived from phytozome v7.0 (chr-ID scaffold_8; pos 1399846 to 1400277)
gtgttggctcttattccaaggtcccaattttttttctttcatattttcttgatctatttttctatttatttcttctgtttttatgtgtttttcttttatgtgttttaatgagtttttatgtgttgggctctcttcatttatactccttttggctgtctttgattggttggttggttccgtttgaaacggttatcttgacgattttttcgtggtggtcgccttcgtttccctatgcgtttaactagcgtaatttcttttaagagatttcgtagaagctataatcggctttcgtgcactaagattacgatgtcgaatcgcatttaacatttcggacggtggtctagttgttaaactcggttagttgtgttattcgttaaacgtgcaatgtgaaaaacaggttgtgagagcaaagaagaaagacacgggaaccgt

SEQ ID NO: 104116 - DNA, 482 bp, Mimulus guttatus
  Intron number 1 from transcript mgv1a007731m (locus mgv1a0 07731m.g) derived from phytozome v7.0 (chr-ID scaffold_75; pos 271271 to 271752 reverse strand)
gatttttatctgcactttcaccgttgcaggtgattcaaattactattttttttgttttaattgattttttggggggtttgtatggaaatgttggatgtttttttcttcttattttacgtgatcggtattatatggtgagttatgtagtacacatggaggtgcaattttgattataatgcatatgtaagatatctttcaaagagcactttatatttattaaattacgagaatcctgtaacgtaattttcggatcatgtataagaatatttgttccatttaccggcaacttttttatgtgaatttgtttccggtttgagactactgctttggtttagatcatttaaacaacggatatcttaattgtctgaattgtagcttagtgaatgcgactgttgtcaataggtggtagatataatatgatctttgccaaataagaattgttctatctgttgcagttggtgcggagcaacagtcgtaggttt

SEQ ID NO: 104117 - DNA, 1019 bp, Mimulus guttatus
  Intron number 2 from transcript mgv1a012702m (locus mgv1a0 12702m.g) derived from phytozome v7.0 (chr-ID scaffold_2; pos 1859044 to 1860062 reverse strand)
gggtttctaacgaggatattaaggtgatttttttttttgatttgttcctgatctttccaagtagttgtcaaattgctggattttatgccgttctttgttttaaccttcggcagtaaattttttttttgtgaaagatatgataattatcttgtttacctgattgatatgatctcagtgataggtgatttttttcactttctatttttgctacgataattgctatactgtgtgacaatattaaagtctgttgctgtaagggttagcagtattagttttttgctatgattatttactcagatttttagctatgataatcgccaagtggaatctcacataagaaaagctaatcataaccttggacgtaatgcttgctctaggaccaagtcttgtggcttaattgctcataaaaagagtatcttgaggagaaaccaccatgtttttagttaatgtgctaaacatcattcttccatcaattgtacttttttgagaaaaaaatgacagcattgtagattttggttaacttttgtaaactttgaatcactaggagaattaagctacatgtttgatctgcaaagatgtgtataagtaaacccttgacgtggatgttccttttttatttttaaataagaaaaaagtggaatacaaagaagctcctgattgtgcagttcgattattcccttgtgagctgttctggttgtcattgaccccttatgaactagtggatgtaaacgaccagcatttcagttgatgacatagtatgtgttgcatgtaggaggttttgattatttttctattcatgtgatataggcatgttgtgacatagtatgttttgcatgtaggaggttttgattatttttctattcatgtgatataggcatgttgtttggttggttttctctctattgtttctttgagctgtatgtagttgcataaggtttacatttaacattactgaccaggaaaatattgaatgttcaaccgcaggaactgtttgcggaggtcggtgacctgaaacgata

SEQ ID NO: 104118 - DNA, 725 bp, Mimulus guttatus
  Intron number 1 from transcript mgv1a000984m (locus mgv1a0 00984m.g) derived from phytozome v7.0 (chr-ID scaffold_76; pos 480630 to 481354)
taccgcaggtaattttgctaaatttgtgcttctaaggttatatgaaaatatctcgcgcgtgtttttgttcggtatgtgtattagatacagtgcgttccataagttcatagcaaagtatgcaataaaggctagaccttgagttccggggtggatttatgtacatattcattttttgtttacgtataccggcttgtaaattttataccttcgacgtttttatgtgtcttgactcttgagagagtgatgtagcgtagaagagtaatcggggaaaattatatatttgttccaaagtctctatctttatattataatgacgggtgtggattttttctgcccagaaaaatattctttgatttgaagggtcagtatctgatgattctggatgcttccttaacagctgtctttttctagggactgacgataattgttttgagaatttttgacttattccctcctatggttgtcaagtgaaagttgattctgaaggaagaggattgaccctggctaactttgtttttgatgatataagagaatgtttatgctgatttacgtgttcggggaattcggtatggatatctgtttggagaggggccatgaatatagaataatgttactgtaatggattttatactttcactctgagaatgattgaactgaaggaatttacgactccttttttttttaatgtaggacaaatcggacattgaaaagacactggaggaaga

SEQ ID NO: 104119 - DNA, 781 bp, Mimulus guttatus
  Intron number 1 from transcript mgv1a004715m (locus mgv1a0 04715m.g) derived from phytozome v7.0 (chr-ID scaffold_106 ; pos 36235 to 37015 reverse strand)
aaagaagaaatcttccccctttcctcctcctccaggtaatctctctctctctctctctctctctctctctctctctctctctctctctctcatctgaataaagatccaattttgtgtatcaaaacctcattgagtttctcatgttttattctatgaactgtggccatttatttggtgaagtaatttattataattatttgttacggtaaattacggccaccttcatgagatacgatgtaaaattacgaaaaaacgacttatgtttgggtaattacaaccatccctcttaattataaattttcttacgcgtacacttatgatgtaaattcaatagaatcttctggatcctgcataatgttctctagtttgtactcgttttgtataaaaatacagtttttgatgcaacataatttgatatttcaatccaaaagatacattttacgatcatcttgtttcaaaatgtgaaactcgaattgggtaaagtaaaacgggtacaaactggataatattctacataatttagaagattccactaaatttgacaccgcaagggtggacgtataagaagattttcatagttgaaagggttggatgtaattacctgaacatgagggagtttttcgtaattttacctttcctcaggaaggtgaccataatttacccttatttattgtgccataaattaattaaattaaatgaataattaagaaactaaaaaaagaaatttggattttttttgagtgcagaagtaccaggtttaccagtgattggaaacttgctg

SEQ ID NO: 104120 - DNA, 812 bp, Mimulus guttatus
  Intron number 1 from transcript mgv1a003021m (locus mgv1a0 03015m.g) derived from phytozome v7.0 (chr-ID scaffold_3; pos 1995725 to 1996536)
tgatttatctgcttcaacagtagtataaatttaaggtacaaaaattaatcatttcatcaccgccattaacgcacacctcacaaacctcacttatcttctgtgtactggtaagcagcttccatttttttttttttttccgattattactcgtctccaaatcttgattctttttctttcttctttttttttttttttttttttttttggttcgatcacattttatttcggtatgtattaatgctaatgattaatgattttgctggtttttttgagattttttttttggtggagtttcaccttctttgatgcaattcgaactcgaaatagagtgtgttatgatttatgaacttatgatcatggttcccggcaaaagtggcggtacactgtcgtgtcgtcgcggacactgctgttccagttccattgcagtgtcgcggctggaactgacaaatgttaattaaaatgtaaaaaaattagaattaatgtcgaataagtttttaatgttaatattacagtagaataataatatacaaactaccattaaaactccattttttaattttagaacaaaattcttcaaaaccttgagaagtgtataaataattggaatttgtttattatgatctgattatttcataacttatgatcagttaataattggaatctgttttcagaattcgaaaatcgaaaatactattggatgtttaaggtgtcgaaacttttggtattttgaatgcttgagcttaaccgaaaaaaagggtgtgtttgtgtaattctgattatgtatatctgttgttgtttatagttatacagat

SEQ ID NO: 104121 - DNA, 615 bp, Mimulus guttatus
  Intron number 1 from transcript mgv1a011131m (locus mgv1a0 11131m.g) derived from phytozome v7.0 (chr-ID scaffold_87; pos 212440 to 213054 reverse strand)
ctggcgtcagaggtaaaccctaattattatatttcagtttaatttatgtgtacgagcagtttttagatgataattacttagttagataaaccctaattgatattcagatatagtgaattctgctgccaatttttttgggggtttatcattgttaatacaattataattatttggaaccctagcttattccaacatcatccaatttggttgtcattaatcctggtgaaaattggattgatccactaatataatccctgagattaactgattagagttaacatgttcacttttttcggataattacattcaattatcaagttgttgttggtttgtagtttctaagttagtagtgctcgaatgtctttggtaagatcttccgttatgttttacgttcgtgcaaccttttctcgaaatgatattttgctcgttttccaatgatttggttttgaatatagatccgtaatttctcgggacttttcttttttttctggcttttattggtaatgtctaatgaaaacgggcttgtagttagaggcgtttgctttgtatgtatcctgattttttgaagagtttcttacaggcagtgtgcatacaccgttgaatttgagggaagat

SEQ ID NO: 104122 - DNA, 983 bp, Mimulus guttatus
  Intron number 1 from transcript mgv1a009250m (locus mgv1a0 09250m.g) derived from phytozome v7.0 (chr-ID scaffold_8; pos 1018515 to 1019497 reverse strand)
aggtcttcgattttcgttttccttttaatttttaaaattttttttggctgcaattgctctatttttcgaattttttagtttaaatctggaagttagtaggggcatgtttccgtcggaatttatgttttgtttattgttgtcggtgtagtttgacttgagtaatggaagcaacgcagtgttgattaaaaaattgcaattgattgttggtggatttttgcctattttagctgtaccgatcacttttggtagggtttagtctgacttggtggagtctactgatttgttaatgatttggggaaattgaattacgttgatgttcgaaaacctctcgcattttgatttgttttattttattttatttttgttctcctcttttggttgcattgctctgcctctgttttttttttcaaaattttagtgtaaatctggaagttagcggccagctttgtcggaatatatatatatatatatatatatatatatatatatatatatatatatatatatatatatatatatatatatatatatatatatatatcggtatatatagacatatatatatgtatatatatatatatatatatatatatatatatatatatatatatatatatatatatatatatatatatatatattaatttattgttttcggtgcagtttgactagagtaatggaagtaataatagtgttgaaagaacaattgattgttggtgaatttttgcctatttttagctatatcacttttggtagggtttagtttgacttgggggagtcttgtgattttgttaatggtttggggaaattgaattaccctggtgctaatgttggaaaaccttgcatttggattttgcctgtttagctacatcacttttggtaggatttaatttgatttggcgagttggtgctaatgttgtcgactaccttcggaaaacgagcttaatgtttttaagtttcaataataataaatgctttatagg

SEQ ID NO: 104123 - DNA, 565 bp, Mimulus guttatus
  Intron number 1 from transcript mgv1a014759m (locus mgv1a0 14759m.g) derived from phytozome v7.0 (chr-ID scaffold_55; pos 581573 to 582137)
attacgaccacattgttccttactctaaggtatatttctggtgaattttttttatgcccaccacctgtttgatgaattgtctgcaatatcagacttggttccatggaagatattttcgtagctcaatatgattctagtgttagtgtgaaccctgaccaccattctaaatgttttgtttcaaattttggggaaacaaggaatactccaatcggagagtgtgtcgacatgtattattatgcttcaagattcgccttttatcgaatctaaattcggttactgatttaatttctatgtatgggaaccacggtcacatttatttgcccggtgcatttgtaaaagtgctatccaagcctatatacgtttgtgggcgatttgattgcactcgttatttgtaagtgatcattctatacataatcgaaaagaaaatagaaaaataggctgtgtactctgcagttattacacaattatatgttcgcatagaaagtcgttttgaactgctcatgcgacattccgtatttatatatttgcagggaggaaaaagcacattagaaaactgtcaagtgtt

SEQ ID NO: 104124 - DNA, 482 bp, Mimulus guttatus
  Intron number 1 from transcript mgv1a014595m (locus mgv1a0 14595m.g) derived from phytozome v7.0 (chr-ID scaffold_44; pos 1576433 to 1576914)
gccttgaagctggtctttggaaggtaattatatatataatatatatatgtatgtatatatttatttattttttaattatgctaagtggggtttctttgcttggtttgaatttagagatttatgcttctgttttaggaaagggtattattggaattatatcatttatgtaagaatcagcctatgaatgtaattccctcactaaaaaggttgttaatttgaattcttctgtaaatgtttttttgtgtctgaattttttgtgttcttgtaatgtagaaagtatgcagttaaggaaggtttagaatctataacgtaaacgcgcttcgtaattgcttattcgtaaacattagtattcttaaatcatcggtgctgtagttttcgctgcagttgaagttgatctcaagacagttttttcgcaccttttgtcgaaattaaaccctcgttctatttgtcaaaactgcagatatttagttcaaaagaaacag

SEQ ID NO: 104125 - DNA, 1027 bp, Mimulus guttatus
  Intron number 1 from transcript mgv1a021616m (locus mgv1a0 21616m.g) derived from phytozome v7.0 (chr-ID scaffold_163 ; pos 239651 to 240677)
agctcaaaacggccacttccccgttgatttgtcaggttattaattaaaattagtttaactagttaattaatctctaattaggaggtttaaggtggtgtttgcaattgattatttaaaagcagaagttagtgattatgagttaaatcggttttaagtgcttactactcaaagttgggggtgtttgcaaatattccgaaaaataaacttaaatagaaaaaaacagggttagagatgctttaaaaaaaatagcttaaaacagattattttaagagaagcaaaaacaaaaattaattttgcaaacacgtgaaaacagattatgagcaaaaaaaattcataatcactttcaaaaaacttttgcaaacaccaacctaagagatgtgctacttccaccaccaaattatctcaatctaccatcaaagattataaaatatcataaataaccctcaaatttataatccaccacccttctttatattcacttaatcctcatatgttctacgttatttctattttattatttttttaatttttttaaattttttttattatgtttttattaatttttacaatgaaatatttattacaagatatttaaacttttatatcagatgaccatcagattatgtaattttttgttaaagaaactaaaatatattaagccaaatcggcgaagaagttcatgaccttccatacaagcaatcttaatttatttataaaaaaacgtcaattctcgctctttttgaccttcgaaaatgtttttctatgatgaaagtattattcacttaagctggagagggcgagatttccagtgaaaaatgtgggattttttttataaatattttaattagtttagtggtagatgcatggtttataaatttgtaaaaaatataggtgaagaagaagaaaggggtaaaattggaaatatatttaatttagtggcgaaataagatattttgagggtgaaaatagcacatctcagtttaattagtgctaatcttgttttttttcttatggtgattctcagtta

SEQ ID NO: 104126 - DNA, 823 bp, Mimulus guttatus
  Intron number 1 from transcript mgv1a018585m (locus mgv1a0 18585m.g) derived from phytozome v7.0 (chr-ID scaffold_108 ; pos 41050 to 41872)
gtatttgagataaatccattggacttaataacccatatatactcctacttattagtataattattaaattaaatattaaggtaaattaataccaaatccctcccaacaataaatcaattccaaatcaatcccaaaatcacattgccgtataaattcgcacctcttcccccaaatcacggtagaaaacataaccgtataatatgcagttttttttttaaatagttttttttttatattaatttaaaacataagttttttttttattttacttttttaaatggttcatatttaaaaaaaaaaattaaaatccactacatacacatcgaaaaccactaaatttatcgaaaaccactatgaaattaaagtaaaaattactataaaataatttatcgaaaaccactatgaaattaaagtaaaaattactataaaataagaataatccacattaatattaacataatccactatgtaattagtgaaaaaccactaatatgtaattagtgaaaaccactatgtaataaacaaatttcattaaaaaaattcacttaaacctatcaattaaaaaaaccactattaaattaacgaaaaccactctgtaattagcgaaaaccactgtactcagccgcatctcccggacaccacaaccaccacctctgctccgccatcctcttgatcttctccaaccaacagccccatctcccaattaagctttaagcttttttctttcattattcttcaagctcaaaacttgggcgaagacccaccaaaaacttgatgtccccgctgcgcaaaacttgacgaagacccaccaaaaatcagccag

SEQ ID NO: 104127 - DNA, 468 bp, Mimulus guttatus
  Intron number 1 from transcript mgv1a002934m (locus mgv1a0 02934m.g) derived from phytozome v7.0 (chr-ID scaffold_8; pos 2581474 to 2581941 reverse strand)
caaccaacttatcctctctcttttttcattacaaggtatgctttcttcattttttgcaaataaagactcgatttttatttctttttattacatgttggatgggttatatttaattattactcttatgggctttgattttgagtctttttattctgggctaattaacgaccaagtcttttgtaaatttagttttctttgtttttgatgtttgttgagggagtcttgttgacaccctggatatagggtggaattagccgttcattgtcgacattaaaaaaatgttttttattaatttttattatttaaggaggcctggttcagacaataataggtggaattaacaatagatttctgattagttatcgatgtttgcacatatttattgattgagatttgttgttctccattcacatctgagaatcctaaattaatttctccctctttctacttttccttcagggtttcttc

SEQ ID NO: 104128 - DNA, 728 bp, Mimulus guttatus
  Intron number 2 from transcript mgv1a015302m (locus mgv1a0 15302m.g) derived from phytozome v7.0 (chr-ID scaffold_159 ; pos 189698 to 190425)
actgcgggaattttcgataaaggattggaatttaggtattttgcagctgccattgttgtttattttgtagctcgtaatataattgatgggtttttttcgcgattgactttagaacactttgatcacagcgttgattcatatgtataagtacggagatagttttctgattttatggtttaaataataattactttgggaaattctttattgtgtattccaattgtcgatgctgtaaaggtcgagtcttctaaactcttctacatagaatcgtttttttttgttcgagggtaagtggtaaagattattaaatcgtaaaatgtgctacttggtttcgatttaattttttatacaatgtgaatttatccgtgtccgcctcgcctaaaagtgtgagttagagtgacgtagttgttatctgcatatggtgctgtgttattcgagtttttatcgtattttctttttctttgatatccggtgatcatgaaagctcgtttctttgagcttctttttcctgcatcctttgctcaaaatctcacgtatgtaatagatgcatttgcctttagttgtttgttacgatacttttgaaatcgatccttcgtcttattgagtttctattttcattttgttgaaatattgtcaaaaacaagaaagcataaatgtaatgaagactgattttcacttttgtcgtgtccaccattcgatgtacagctgtttgttctacacattgaaag

SEQ ID NO: 104129 - DNA, 373 bp, Mimulus guttatus
  Intron number 1 from transcript mgv1a012160m (locus mgv1a0 12160m.g) derived from phytozome v7.0 (chr-ID scaffold_24; pos 1404577 to 1404949 reverse strand)
cgatatccagggctttatccgggcttctcaatgtcagtgattatatattaattttacccattttttttgtttggatttttagctgctttgattcaatactcgcgaatttccagctcttaattgctgttattggtgctttaatcactgttaccaacagtgtattcttattgcccaagtgttgttgttggtgaattacactgttttttaatttttgctagcagttcacgagtttgattatttagatttctgttcagctgaagagaaaagcaatttttttaggtttaattttggtgtttaagtggaaagttgattgatatgtgttgttgtttgcatgttagaataagctgggcagaggtcagcgtgacaaattgca

SEQ ID NO: 104130 - DNA, 644 bp, Mimulus guttatus
  Intron number 1 from transcript mgv1a021989m (locus mgv1a0 21989m.g) derived from phytozome v7.0 (chr-ID scaffold_2; pos 3178892 to 3179535 reverse strand)
gaagtgagtttctctctccttatcctcgattatatgtcctacttgttggtatttttgatttctagattttgtcatctgaagattatgtttgagtctgacttaatcttcgtaattgatatgtcaattgttatatgttttaatagaaaattgaagctcgtttttctacttcaaataaatgttactttgcttctattgagtttgattgttgattgatttagactgtttatatataattagattatgtgtgcatatctgcatttccattttgctcaatgtgtatactttattaataagcaacgattagtaatttttatcaatttgccacaagaaatttgttgtcgtaattgaattactgaacgagtgtgatctcgaatttgtaaactaggatgctttggctacttatagccaatgtgaaatgctgttgtgtgtttgaaattattgagcatgtaatagcttttctattcttgtttcctgcttaaatttataaactctttggtaacaaaatgttttcgttttattaacacaactacgcttcatctgcttcgaaatgcgtgtcgttagtcaattgttttcctctgtttggagggtttgtttaagttaatcgaattcttgatattaacgtggtctcttgttgtgcatagaca

SEQ ID NO: 104131 - DNA, 948 bp, Mimulus guttatus
  Intron number 1 from transcript mgv1a021933m (locus mgv1a0 21933m.g) derived from phytozome v7.0 (chr-ID scaffold_12; pos 2468635 to 2469582 reverse strand)
acggcttcttagttttgcttacaatcgtctctccggtcaaaaaccatcatccctattcaacatatcaaccctggagtctatagttttcacctatgttacatagacacgggaacggggacacggcgacacacggatacggacaccgggatacacttaatcaaaaaaagtaggacacgggaacgtgggggatacgtgtaaatattaaaaatataggggtttatttataaattattactaaattatgttttattttttatgtacaatattaaaatatacatgaatatttaatacgtttaatcgtttattcaaataaatttgcaattaattatcggattaatgagagagagctgccaatttattcctccagtttcacaaaaacccaaataatcagatttgtaaaaaagaaaattcttttttttttcccttgacacgcgtgtccaacttttcaaatattacagacacggcccaacagcgtttcttaaaggtgtcttcgcgtttcgtgtccgaaacgtttccgacacggggaaacttcatgtgtttgccgtgtctgtgtaacagaggttttcacaggaaatgaattgagtggcagccttccaagtgacttttgcagtaaacttccacttgttcaacaaatttacctatctcgtaatcagctgagtggcgaaattccatcgaatatatccgaatgttaacaacttcaaactgtcggactgtctcacaactcctttagtgggaagataccaagagaaattggcaatttaaagtttcttcagattttagctctagggggtaacaacttaaatggtataataattcacattctttgtgaactaggttgatataatttttccgtttcttgattaaattacgtatttttgtaaaaacaattgatttgtgtgttccatatatgtaggtgttatcccttccgagattggcaatcttcagaac

SEQ ID NO: 104132 - DNA, 814 bp, Mimulus guttatus
  Intron number 2 from transcript mgv1a012595m (locus mgv1a0 12595m.g) derived from phytozome v7.0 (chr-ID scaffold_7; pos 3736811 to 3737624 reverse strand)
taagttcccgcaattccgccactacaaacgaagttgggtatttttttgttttttttttttttttttttttttttaataattcccgcaattccgccactaggattaaataattagctaggttcctttaattttcgtttgatcaactatattaaaaggtcaccatagtcagttcagaagcaatgtgtttgatttaatgggtaaattacggccacccttgaggtaaggtcaaattacgaaaaaccccctcatgtctggacaattacaaccactcccaactatgaattttcttacacgtccacccttatagtgtcaaattcaaattccgtaaactgttttatagtttgtactcgttttgtgcaaaaatgtagtttcagatgcaccacaatctgatatttattagctaatatacacatcttatgatcatcttgtttctaaatgtggagctggaatgggaaaaaaacgggtacaaactggagaatattccacataatttagaagattccactaaatttgacaatgcaagagtggacatgtaagaaaattcatagttgagtgggtggttgtaattatccaaacacgagtgttttttttcgtaatttgacattacctcaagggtggctgtaatttacccttgatttaattggtaattcaaagcagaatttgacgggttttcgtatatgtggcgaattaggaatcgaaaatggaatttaacatggatggcttgcatggttttttttcttgtgcttattatctcgagcgagacaccgatttaaaaatctataatgcttttcgattttttcattactagaatttc

SEQ ID NO: 104133 - DNA, 676 bp, Mimulus guttatus
  Intron number 4 from transcript mgv1a016895m (locus mgv1a0 16895m.g) derived from phytozome v7.0 (chr-ID scaffold_96; pos 744079 to 744754 reverse strand)
accaagtacatcgaagagaagtcgcctaacttctggtaagaaatatcgatatgttgttttcaccacggtatccaacggattaacttaagtaatgcactcgtgtattggttgatcttgattttgattattgtaattcgattggaaacaattaaatggtggatggctgtaggcatgctttcttttacagaaaatttgaaacgtgctcgggtattggcaagtcatgctatgtgtagtgttctcatgtaaaagaatgagcatctttttggtgatttgcattattaataaatatcagcgaatatttggtgatgagatgagtttgaagttgtagttactgttcgaacaacatgatctcatttcggtagacaaaccttttctaatcgacacattagaaaaatgtgttttggttggaagccaaccttcagttgttcactgtagttatcttctttgaggagaaatgcggtacaattaatttgccagaacctatataaagtttgtttagaaacatcttttgaggcctaacacttttttctgctcattctctaaacttgctcccctaaaacataactcagccgttctttaagttagccaattctcgtatccacaaatcattctttaaagtttttatttaataatgttgattgctgatgtacgtgtgttctacaataaaatgcagcca

SEQ ID NO: 104134 - DNA, 735 bp, Mimulus guttatus
  Intron number 1 from transcript mgv1a026960m (locus mgv1a0 26960m.g) derived from phytozome v7.0 (chr-ID scaffold_48; pos 327474 to 328208 reverse strand)
aggatcgagtttttcgttacgcctcgctcaattcggtgagttttatgttgcatttattgtgcgtttttagtgtcatctacttatataagtttctcgaggtcgttcttgatttgaatcttccagcttatgcaacgacatttttttttctctcgaaacttgctttgaaatattagagaagtgtcgtgtggactctacatgttgcactgtttaatggatctttattgattctttagtaagatgcatgattatagggtgaaggctgatgaagcaatcgacattgagttattaggctcttagtttcccttaatccgagtaatatctgttaaatttcgatttcgaccagcttagctacaaaactaagctaatatccaacatctgagtaaattacaatatatacaagtaattcgaacttttattatctctttcctcgttttaatttcttgggggaggcataagcaaatgtaatcaatcatcggctcaccattatctttaatatgtcgaagctctacaatagtgtcaattggaaattattttcgaaaaaaaaaatgcttaattatcattcaatgttcgttacatattacaaatgaacaaaacgagctaggaagcatcaaaatagatgcttattccttactttccggacctgcattatcctaaaacaatcatagttgtggtcttgatgatcgtatttgaattatttcaggctaaatttttggcagtactgatcattgttccgtg

SEQ ID NO: 104135 - DNA, 645 bp, Mimulus guttatus
  Intron number 1 from transcript mgv1a023645m (locus mgv1a0 23645m.g) derived from phytozome v7.0 (chr-ID scaffold_130 ; pos 341808 to 342452)
taaggtggagactccaccgattagccggtgcggtaagttttcaacaattacaatataaattattgcatttttcttttgtcctagttgcgagtactaaattttttttattcgtcgcaaattggattttttttctctttttgtggacataacataattcaatcttttctttgctaatgtttattatatgttccacattttacacgcatctacatatatgtaagtatatgattattagaaaatttatgataaaataatatctagtgtagcatctgcaagaccgaataccaaatacggtcgattttttgggtcacaaaacatggtttatcactttattgcatttaacaaccttatatatactctaattgttaaaaactccctgtattataaatattaacaaaatttcccctacaatgcaatgtttttagcaaactacacctaaaaactcgcatttagggggtcgtgtgctaaaccaaacgttatagcaagagagtttcttaacaattcaatataacacaaggtactaaatgcgataaataaacaaaacatggatatttgaattcttgagatattaacgtttcgttttttaacgtaaatgtgaaattgatgtaaacttgtttagctgttaacgggcctacaatctctcct

SEQ ID NO: 104136 - DNA, 651 bp, Mimulus guttatus
  Intron number 1 from transcript mgv1a000328m (locus mgv1a0 00328m.g) derived from phytozome v7.0 (chr-ID scaffold_45; pos 1635269 to 1635919)
tatcaagacatccttcgatcacgtcgttctcgccggtaagtttccgttaattttgtcctttttccccgtcaattcagcaaccctagcgtttttgctttgccgtttggtgtactgattgcaccaatctctctgtgtgtgtgtgtgtgtgtgtgtgtgtgtgtgtgtgtgtgtgtgtgattaattagcacttcaatcaaactaaagaagaattagatttcaattgaggttttagtggtcttttagctttgagtaaggtttatcgatgcagtgttgcttgcgagaagtaatcaatttagcctctgagtggttcatggatggaaaagtacttcactgattaagatcatctgcccactgttttttttctttttaattaataggcaacataaaatcaaagaattaatcatcggattgtacggttgtaccccgagattttacagcagatgtcaattatatttgaatctgacaaaccatgccattttagaattggtagatttttttggcaggatcagttattactcttgtataggtttcgagatttgcttatataaagtgctatttatgctatttattagtttcttatagtaaataatacaagaaaaatagaattgaagttgcaatttcataagagctacctttatcttatagtcgagg

SEQ ID NO: 104137 - DNA, 596 bp, Mimulus guttatus
  Intron number 1 from transcript mgv1a022836m (locus mgv1a0 22836m.g) derived from phytozome v7.0 (chr-ID scaffold_54; pos 1175763 to 1176358 reverse strand)
gcgacggaattactgataacaccaaggtattaatcaacatttcgattattattattaattttcttttcatttttatcgtacactttttactgcgtgggaaagtgtgtttatttaattattttgatttagtgattgtggaattttcaattcgttttgggggtttttgtgctggattgctagggttcataatgagagagttcacattgttgaagaaaatcatgcgtttggttttatgacaagtatgttataatccatcaatttcatttggattataatgtagaaattaactacaagccatatgtttttagatacactgtttcgtcggaaaattcgagcgagcccttacttctgtactgttatcagatgcaacttaagatttagactcttgactaaattttgtttatttcgatcggtttttcactgaataaatgaaggtaattttattcttgtgttctcttgtagtaatcgaaagcattttgtatgatctttagatataatcagtgagaaatgcatcctttattttccgggtaaaaataaaaaataaaaatcttttgtatcttaatcttgtagtaatttttttttcgatgtttcagatt

SEQ ID NO: 104138 - DNA, 643 bp, Mimulus guttatus
  Intron number 4 from transcript mgv1a014096m (locus mgv1a0 14096m.g) derived from phytozome v7.0 (chr-ID scaffold_212 ; pos 104310 to 104952 reverse strand)
ggaagacaatcaagctgcaaatcgtaagttacgaataattcagttatcgagtgcttcactatgtataaatgcattgcagagaattatgcaataccgacgagtgtgtagtattgtagtgtttttcgattgattgtgttttgatttttgtttgttttggggtattcgcgggtacgattcgttagtaatttgattaaattgaaatgttttcatttgttgtttttcaacgagtttgaagaaagctacgttgcacgatgattaaagagtttttattatcttaaatttgctttagccaaagtcgcatacgttagttgattaaattgacggatcactagtgttgatggttgtcgccgaggagtaaacgtaaagaaaattcttgcaaatttgattatactctcttaaaaaatgcgtggtgtttcctattttttttttatgattgaggaaactattgactctcgtactatgacgggaataggtagaaatacaaattatgccatttttaataatgcaatagggaattattaattacgtaagccatgcaatttcgataccttaagcaagattaggagttattagagttaacttattgttgttgttttatgtgtttcaagtgggatactgcgggccaggagcggtttcggactat

SEQ ID NO: 104139 - DNA, 614 bp, Mimulus guttatus
  Intron number 2 from transcript mgv1a010669m (locus mgv1a0 10669m.g) derived from phytozome v7.0 (chr-ID scaffold_1; pos 3961759 to 3962372)
ttcgggagcgagaagtggaagatcttttctacaaggttatacatgttcattttgattaagtttcaacttaaccttctccctctatttgaatttgtttgataattttgttcttgatttcttccgacggtgtttttttcttggataattgcaattttgggattcaaatgaattaggattagaactcaacaagtaccgccggaaaattacactggtagtagtagtattactttttaagtttcgattcaaaagcaggaacggaattttgtagcattttcatctctaacaaaaaatcgaatgcagctctgtagaatatttaatattagacgtctaacatcctgatgctggtcactttaatcgttttaagtgtagtatactaataaaatttagctatggtgtcagtctaagcgatagagtatagacccagtctttattcattgaccgtaaaacacacatttgtggtgggtttggagtggtggtggtttggactacgagccaaaatttcccaagttgtgttttgaatgacatcgtaaagtctacctctgacattttgtatagttgattttttcggttgaataagtcagagactaatactgtaatatccatttgcttgcagt

SEQ ID NO: 104140 - DNA, 545 bp, Mimulus guttatus
  Intron number 1 from transcript mgv1a020942m (locus mgv1a0 20942m.g) derived from phytozome v7.0 (chr-ID scaffold_58; pos 1043842 to 1044386 reverse strand)
tcaaagccgttttacaagttagtttatactttatatacatctatgcactaacctcgtacgttcgattcattgggtttgagtactggtttcgagttttttggtgttttcgatttgcatattaagaaaaaaaaaaatcgattctcaagttttgaacggtcgagcaacatcgtccaatacagttaaacctctgcaaattaatacagtcgggattagcaaaattttattaatttagcaaaatattaaattattgaacttataatttaataggtttttactgagtgaggatcagaagaaattattatttaagcaaggttactaatttatcgaatattaatttatcgaggttctactgtaattgccataaaatttctctttaatttgttttttttttacttgtatgcatatacatttttcatgtatctagtaatttccaagaaaaaactacggttcatgattttctattcgatttgcgattttacaaactaattatattgaaaaatacgcaaaatggaaaaaaatttaaatattttcgtcttgttcaggat

SEQ ID NO: 104141 - DNA, 618 bp, Mimulus guttatus
  Intron number 1 from transcript mgv1a010687m (locus mgv1a0 10687m.g) derived from phytozome v7.0 (chr-ID scaffold_37; pos 515995 to 516612 reverse strand)
tcgttttcgatttctctgttccgttcctccttcaggtactattttttttttctttttcttttttttttttcccccatttttgctgtgttcgtatttctttctattttttgatttcatttccgattcgttggtttcttcgattccgtcttcctaatctagataaaaaaaaaaatctctgatcccgctgcttttgccggcgtgatcagtgattgttgtttattcttttttttttttcaattttttttttgtgttttgttgggatgccctcaattcccaattttgatttttagggattggatagatttttggattattaggttgcgaaaatcatgtttatgtgccttgattgacatgggttcattaattttggtttgaagatttttcgttcaggtggtttcactgaatgtacaaatgttgaaaagatcacagctttgtaaataaataaaaaaaaataagatttgtgatattagtattctgaggtcaaagaaacttttttttgtatttagaaaacagaataagggtatttatcagattgcttgcggttttgagggatttgggatttacattgatttgttttgttcaggaattttcggtgattattgttattgctcgagttcg

SEQ ID NO: 104142 - DNA, 657 bp, Mimulus guttatus
  Intron number 1 from transcript mgv1a012018m (locus mgv1a0 12018m.g) derived from phytozome v7.0 (chr-ID scaffold_1; pos 2422524 to 2423180 reverse strand)
cttttggtggttttctaatcttccttcctctgcaggtattttttctatattaacttttcaattaatttaggtttttctgtattttttggggattcgttttttccccgatttcgtgcaattttttattttatttctgatgtatgcgatacacgagttagattttgtgctttccgttagatctaagatatgtggtagtttttctcctcgtcacgttccttttacggcatggagttttgtggaatttgattgggtattcagagagatgttttgttgaagatttagatgaaatttaaatgaaaggatgcgtacattgttgacaatgtgttttgaattgatgtgatacggcgaagaagattgtaagatctatattctacctggagcttttcttcgattacggtttttttttcttttttttttttaatttttaattggattggtatattttctgtttcttgagcattggaagttagaatttgggattagggttttaatggtgccctggagtggggatttgattcattcacactcgtcgaattcttcgtttgtcttgttttcctgcattttttttcactattcgtccctggcgattgcattgcattgataagtacttttggtttcgtaggtcagctttttcgcttcatttcaacacagagtctt

SEQ ID NO: 104143 - DNA, 950 bp, Mimulus guttatus
  Intron number 2 from transcript mgv1a012103m (locus mgv1a0 12103m.g) derived from phytozome v7.0 (chr-ID scaffold_39; pos 800244 to 801193)
ttgttagtcggtatgttcgtctcgcggacttgattttctttcagtttttttttgtgaaaattttgagttccgtcaagttttctttacccgcattgataaagtggatgggtttctgtgttcgggtttttgcgtgttgctctaatggaatttttctattggattatagctagccttaaaattaggtttcagctttgtcgatttttcgcaatttatgcaatttctcgacaaggttattgtagaattcatactcagcattgtagctggagagtagtgctttatgatctgaaacattagttttcattttaattttgatcccttttcagtaatcaattgtaggatgttcggttttttccggctatgttatctggttttactcgacgaacaaattaaatgaccttagtttgcacttgggaactgcaatttgaataattacttggatatagacttgcatttgtgttgctatttattctgcaacctgattgaagtatatttaataaattattaatttgcatttcaaatctctctttgggtcacgattttaattgggataagataagaactgatttttttgcaggcaaaaacatgatctacattgggtcgataatattttcgagagaggcgcactaaatgattgctacgaactcttatagtctacatacatagatatatatgttgacatttaggttatctatgtgcttcttcgcgtctgtctgtctagttatctatctacctatcgttcggtatatacatatgtgtctgtatgtataaaattcattattttggagaaattaagggtgcagaatagttgcaatagatatattcgtcaaatctttttttagtaaactagttatgttcgtcacctctgttcccattcctctgtagcgactctgataattaagtcctgttactttgcagttcgtcttgtcaagcgtagaaaacttaacaccatt

SEQ ID NO: 104144 - DNA, 990 bp, Mimulus guttatus
  Intron number 1 from transcript mgv1a010326m (locus mgv1a0 10326m.g) derived from phytozome v7.0 (chr-ID scaffold_7; pos 2106306 to 2107295 reverse strand)
ataaattctggtaaatattaattcttcttcattttttatacatatatttcacccctttatacatatagtgtatagggtaaattacggtcgccccctcaggtaaggtcaaattatgaaaaaaatcacgcatgtttgggtaattaaccatccctcaactatgaatcttcttacacgtccaccgttgtactatcaaatttagtggaatcttcttaattatgtaaaatattctctagtttgtacctgttttaccccattcgaactccacattttgaactaagatgatcgtaagatgtgtctcttgccttgtaaatatcagattgtgctgcatcagaaactgcatttttgcacaaaacgagtacaaactagagaacattttacaggatctagaagattatgttgaatttgataccataaggatgaacgtgtaaagattcatagttgagggtggttgtaattacccaaacatgagggctttttttcgtaatttgacttcacctcagggggttgccgtaatttactatatattctattctgtagattttttttaatataaataaagtatatcattaaatggtcattgagacgccacaccgcatcatcgggtgatttttaaccattgatggggtgaactagccacccactaagtacacatacacatggatatgtgcagatcaacggtttaataatcacccgatatatttcaccgaaagagtgattaattacctcactaccaccttaagtttttagataaaatagttattcaacgtggtatgaaagtcaacccggccaaatgatggtctggtcctagattagaattctatttccacccgtaaaaaaagatttacgtgtaagactttaaaaatgtaatacgcctgtacgtgaaggtgtataaaatatgtttgttgatatgtttgtattttttacataactaacattatttctctccattttacagtgagacaatatactcgtactgtaaattgctgtcgg

SEQ ID NO: 104145 - DNA, 572 bp, Mimulus guttatus
  Intron number 1 from transcript mgv1a023415m (locus mgv1a0 23415m.g) derived from phytozome v7.0 (chr-ID scaffold_57; pos 1326987 to 1327558)
ttgttatcacgagttccaaacaggttttgcgctcttacttcttgatgttttttttatttttttatttattattagtgttccttttaccctcacaaaaatatttcttaaacaaaaatcattacaaattattaatattcaaggataattttatcatgctgcactccaaacgtcacacaacctccgcttgcctacattgttgtagtttaaaaattctaaaatgacctctcatcgcatgtcgtctctttcattttcattgttgacatatatctcccaccattgctgttgtattttctttcttattagttagatacaatctcaaagggaggtcataacataatttactggatttggaataagtttttaatcacaatcagaactccggaaaagtttgtgtcagtatgtaattgaaccttaactcaagggacaacgcattaatttattatcctttgcatatgtgcatatatttgcattaaatattttgcctttcgagttttctagaacaaaatttgcaatttagtataaatcttcatgatgcagagtgtgaagactcgtgttgtgacgaaagatattaa

SEQ ID NO: 104146 - DNA, 758 bp, Mimulus guttatus
  Intron number 1 from transcript mgv1a012498m (locus mgv1a0 12498m.g) derived from phytozome v7.0 (chr-ID scaffold_115 ; pos 95822 to 96579 reverse strand)
actttctcgagatccgtatccagatctttcatcaggttttttcctctcgtttctctctctatgtatttgcttaggttttcgattgtgttttaccgtaatttcatttatcagctctttatctgtccctataattttcttattctgtttctgggaaaaatacatcggcacgaacatgtttgctgattggttttcttgctggtaaatttataattttgtgattagggcagatgaaatggaaataattccaatttattggaaaaatcaattaagcacgacaaacccatagcccaactttcacagactggaatttcatacttttcggaagttgtaacaatggtgattgaattttatcaacattgtctaaaggaaaaacaacgcatatattcagtacttggtccacttacttctgttacacctttgtgtcaactgcgcagacctaatcttttgtttgatatttgggggtttccgttagtggcagatttttttttaattaagcttcatattaaatcgcctatattattgtggaagggctagtcatttgcagttctctctatcttccattttgcctcgagataattgttgcaggttgtctatgtgaatttaccaatttctttcgtgcatgatcaatcccatttctcttcttttttggttcagcatatccatgttttaaactgttttatctttatcttaggtcacttatttgctaatttgacttggactctgatctcataatcaagtatttatgtgtagtatacaac

SEQ ID NO: 104147 - DNA, 750 bp, Mimulus guttatus
  Intron number 4 from transcript mgv1a015656m (locus mgv1a0 15656m.g) derived from phytozome v7.0 (chr-ID scaffold_4; pos 2425426 to 2426175 reverse strand)
gtcttctcaaggtttgtttttcctctcttgatctttttttttaataaaaataataataccatatttaatgcaaaattttactccattgttaattaaccgttgctttgaaagaaaaaaagattgttcgatattatccgtcacttaagtttacaccgacaagttagtattactctattacctgagacaagaatgttgaagaacagttaaataagcaattggataactttttgagtatttgtacggtcaagaactgtagagagagagagagagagagagagagagagagagagagaggggacagttgatccatagatttttttacatcatgtgcagatcgaattagagaaaatacaaaaacctttgtcacgagggctgcatttctgacttaaaaaaaatgttatatgtcgtatgtggtgttttaattcagacatagttttgtgaggggaaagatcataagattctttgccttaaaaaagaacaggaatttttttggctcatctgtcacgagatgttttttttgcacattgttgtgtgtgtgtgtgaaaatgggccttttgaaaatgactggtgttttattgttttgctcacatgctgtgaaatggtggatttcttggcactaacatcaactctctttttaaccctagaacacacctgaagtaccaataaataataaataaataaataaaaagggaaataaaaagttttaaatctacctaatattaggttattgaaacagattttggggaatcg

SEQ ID NO: 104148 - DNA, 1056 bp, Mimulus guttatus
  Intron number 1 from transcript mgv1a018389m (locus mgv1a0 18389m.g) derived from phytozome v7.0 (chr-ID scaffold_173 ; pos 10493 to 11548)
cccaataccctacagcaaccaccaatttccttctggtatgaattatttctttttcttcttcgtctctactaaattgtaatttatcagtaaatatatatatgttttttaaatattctaaagatttgaaaggtaatccgattttcacatggtggggttttgtgtaagtttttgtggattttgtattgcaattggcaattcagggtttggattaaggttttgatctaatagaatcagagtgctgattgtatcttttgttttagttctattttttcccctcaatttgacagagtgattttttctcgattcatgcttctctcttttagggttggggttgttaattagggtatgatatttcgattttaggatttattcttctaccttgagttatttttgacacgaagaggtaacacaagagtttgaataaagggtttgagtaagaattagagtgttaattgctccattactgttgaattacttatctatacagcagtttttttgacatcgccaatattttatcttcccgttttcctttattttttgactggaagatgagtgagttgttactcatccagtgatgcattgtgttttcttggagtgtagaagatatatgggaataaagatcgaagatgattcagaaagtaacttaaagcatgtatataaaagtatatgtgtgtatatatctgaactttgaaaataaatgttattaatttgcatcgtttcagaaaataatgcttcgacttctttatgcacaatatatgataaaacatcaacttcagtgagactatctacttttttcacgacaaagtaaatggtcagcaaaaattgcatgattatgtggtaatatatgttttggacgattgaatagaaactcagtgttctttccttagtgtgtttacttgctggtttactttgaaatttgtagttttctcgttttcttgctatgtataatgacttaaaactattgcaatattgcttctgatcttcctcgtccaacttaaattctgatgtctcttatcgtatttgttctgtaggggtcgaggacaacagggtgccatc

SEQ ID NO: 104149 - DNA, 985 bp, Mimulus guttatus
  Intron number 1 from transcript mgv1a002110m (locus mgv1a0 02110m.g) derived from phytozome v7.0 (chr-ID scaffold_96; pos 781528 to 782512)
tacgcattctggaaaagctttcagagttaagaagggtaagatctcgaaggaagttggtaaatgttcggtggctatttgctatctgctcttctagttgtgtttaattagactgtaaatctaggttttaatggattaattttattggaatccaatttaccttttgatgtgttgaagatcgaagaatgaacttgaagtcttaattaagtagtgatctttcattgatgttgagtgatctcttacgtattagtttacgagggacttcactaaggcctaaaacccccaaaaggctataagtttgttttattccaaaatttgtggttttcggttgttctttgtcaattatgtgcgctgtttagtgttaatatgtaatagaacttgattgatcaatagattatgtaatatgtacgtttcccaagaaagccgtgattcttttcaccacgtgtggaattctcaactcagtgtatggaattaatgtgaaaaaagaatattaatcacatgtcatcgacgttcttttcatttggcaaagtaggaatcgtaattcataaattaataagaggacatcataaattaataagaggacctcataaattaataagaggaccatgacgcgcatatgtttttttttaccctggactttagttttatttcattttccataaacaggagcatgttgaaaaatcttatggtatttgcacttatacagtttactgtagaagtatgttagttactaaatccttagaacttgtctgtaagctaatgatattttggcatagtcagcacctctgttacttcatgagcaccgggcttttaagttttaactttaagctgcatatcaatatgccagaatgttgttcgctacaacttttgtggaccatgaaatttttgtattcgttctatattcttcttctcagcctgaggttctgcttctgtttttttttattctaatacatgtactttgttcaatgtgattgttgcaatatttcag

SEQ ID NO: 104150 - DNA, 601 bp, Mimulus guttatus
  Intron number 1 from transcript mgv1a011596m (locus mgv1a0 11596m.g) derived from phytozome v7.0 (chr-ID scaffold_5; pos 1211422 to 1212022 reverse strand)
cccgagctacctataatccaggtattatattatatatatcaaatgattcaccttattaacaacttttaaatgtttagatgaagcgatgattccgatccacgtgcatggatcaaagtcgtcatgtgtttgaatcccacacctaacaaatccgttcaagaaattgaacgtgcacatgtctcaaataaggatagtgcatttcgcacggaatttttaaaatccaccgatttcatgaacatgaaaaattctaattttggaacaactttttttcgttcagacttccaaaattctgatctacgactttgtttttcttataaaagttcgagaactcatgttattttcacaaaaaaattgaaattccgtgaaatttcttctagttaaaattttggaagtatttttaaattcttaaaaaaaatccgaaaaaggatctgtacagtccgactttcaacccttgttttcaaagcatataatacatttgtacgtgttggagatataaatatcaaatgatcaataaaattttgacatgctattattaattgtttcaattttgcatatgttttgtggtgtaggtggctttgccaacaagaaacgcaggaaattatac

SEQ ID NO: 104151 - DNA, 1052 bp, Mimulus guttatus; identical to SEQ ID NO: 101652
  Intron number 1 from transcript mgv1a024264m (locus mgv1a0 24264m.g) derived from phytozome v7.0 (chr-ID scaffold_68; pos 638590 to 639641)

SEQ ID NO: 104152 - DNA, 662 bp, Mimulus guttatus
  Intron number 1 from transcript mgv1a012002m (locus mgv1a0 12018m.g) derived from phytozome v7.0 (chr-ID scaffold_1; pos 2422519 to 2423180 reverse strand)
cttttggtggttttctaatcttccttcctctgcaggtattttttctatattaacttttcaattaatttaggtttttctgtattttttggggattcgttttttccccgatttcgtgcaattttttattttatttctgatgtatgcgatacacgagttagattttgtgctttccgttagatctaagatatgtggtagtttttctcctcgtcacgttccttttacggcatggagttttgtggaatttgattgggtattcagagagatgttttgttgaagatttagatgaaatttaaatgaaaggatgcgtacattgttgacaatgtgttttgaattgatgtgatacggcgaagaagattgtaagatctatattctacctggagcttttcttcgattacggtttttttttcttttttttttttaatttttaattggattggtatattttctgtttcttgagcattggaagttagaatttgggattagggttttaatggtgccctggagtggggatttgattcattcacactcgtcgaattcttcgtttgtcttgttttcctgcattttttttcactattcgtccctggcgattgcattgcattgataagtacttttggtttcgtaggtcagctttttcgcttcatttcaacacagagtcttgctca

SEQ ID NO: 104153 - DNA, 899 bp, Mimulus guttatus
  Intron number 1 from transcript mgv1a023967m (locus mgv1a0 23967m.g) derived from phytozome v7.0 (chr-ID scaffold_157 ; pos 126088 to 126986 reverse strand)
atcaaagattcctctatccagtgccggccctgatgggaggccacacaagcagctgctttgggccccatctcaaaggggcccccaaatttgtgtttttgtgtataatgtagagtaaactgcaaaaactacccctgtgtaatctcgaaatagcaaaaacccccctgtgataaataaactagcaaaaacctcccctgtgaaattatttaaataacaaaaacccccctatggaactatttgagggttgacttgatataaaacgacacaaatacccctggagtcttgcaattaataaattcttatattttataaatattttaattattttatttaaaaaataatcaatttagttgtttactattttttcaatttctaaacaaataaattaaaaagaataaatatacatataatatgtatatatataaatgggataatttgacaaacacccctcattagactcctccaattacaataggtccaattttttttctcatttttaagttaaatctaaaacacttttaattaataaaaaataatatagttttacaattatacccttctttctatttgacttttatttaatattaatttataataattgtattataattccatctaaactcccaagcctatattcacgatccaagtcatttaatccatcgtctattacttgtttcttatttcgatttctcccaaacctctcctttatgaccgccgtcgtcccccctttcttcaccctccatcgccgcctcctcctctcctctctccaccgctcacagcgggatctcggtggtaaaaaaatcaagcgccaaatattctttaattcttccccttttctattcaccgccgccgctcaaatatctaaagggttttcggttgaaccttgcctttttctcatcttg

SEQ ID NO: 104154 - DNA, 805 bp, Mimulus guttatus
  Intron number 1 from transcript mgv1a020833m (locus mgv1a0 20833m.g) derived from phytozome v7.0 (chr-ID scaffold_91; pos 879786 to 880590 reverse strand)
ttttgatctcatacaccagcaataccttccccacggtctgacttttttgtttcttcctctattatgatttctgattttttttgcatactttcattttctgcatcataaggaatttgaaattaattgcaagatgtggaattttccccttttggtttttggtattgagaaatcggtgaaatcaaacgaaaagaattgacatcattatgctattttttaatgtttatgatcttgcattgtaatacctgatgagaagaagggtttgaatatgtgcaaagacaccatagaattatctaagaagttgaacattggtgtatctgatttacttatttttttattccaatcacacttaagaaagataatagtgatagatccatgggaatttgatttagcgtatattggtataccgtatatgttatttgggcttatttttagaacaattctaaagcttgagggggttttcaagtatctgccgaccgtgacgagataattgattcgtcaattcttttgttgatgtctatcacttttccgtttcaatagttttgtacaatatggatgttcgttatgaagctattctatgtttctttatgtttttttttttttttgtgtcttattagttatggtatgacagtatgtactagtatgtatcatcttcatgctctgaatacgagatatttgagctgatttatacgatatgatgctatgttctcttattctttcaaatatgatttgttaaatatttaacaatttatttgttctttcaaatgaaacaggattacgtgcctactgtatttgataatttcagtgc

SEQ ID NO: 104155 - DNA, 342 bp, Mimulus guttatus
  Intron number 1 from transcript mgv1a008811m (locus mgv1a0 08811m.g) derived from phytozome v7.0 (chr-ID scaffold_34; pos 675563 to 675904 reverse strand)
cttccaggtacttgtaattattagttcattttttttctctcagttctgtagttgtttgaggatcgaaatttggttctgagtggattacacaagtaggcgctttttgatttgatgtagaaatttcatatgttaatatgatttataaatttgctttcttgaatttttattaatatagtattgttagtttactttcacaattcagaaagaaagaaacgatctcattgtctttcttggtgcaaagtgaagatcctgttatacttgaactttggtggacatcctaaagtgtttattttggagttgataattggttaaacacgattcattttacgattttcttcagcc

SEQ ID NO: 104156 - DNA, 790 bp, Mimulus guttatus
  Intron number 1 from transcript mgv1a023291m (locus mgv1a0 23291m.g) derived from phytozome v7.0 (chr-ID scaffold_6; pos 2890856 to 2891645 reverse strand)
ctcaaatagtaattccaacttttttttaattttttattttatgttttaccaaccaaaatggtcctaattaaattttcttaaatcggaaaaaaatgaaaatatcattcgatttttttttttatatttatttatgaataaactattgcaattcttaaaagggcaaaaaaattcgtttattttgtgacgtcgtcgatattgtttggtttcatttttggtcggtcagaaatatcatgatgattcgttacgtaattaaaaaaatatatggcccaacacgaaaagttttgcttttattagcccttaattgtgtttattgaggaataataatatatttgacttatctttcatatactttagggatttcgccttttggtccaagtaacatctattaaataattttgattttttttatatattatgtgttattttatgttcatacttctcaaaaaatatttaagaggcattccatttgaatccccatttttagtctatcttttttcaataaagtattatatatatatttttattatatttaaattcgaacatttttagtaaatttctgaattcgtcactgtcagccgaagaaagttaaaaatatctttgaaatcgcttcttcttatatataacaattattcccctagaagaaaaataaaattcagtttgacttagctttcatacttcaaataacatcaaccaatttagggcatagcttctttgcatagaactaaacctaaatttcaccatttttcctaattacattaatgaatttccatcacccacagatacattcaag

SEQ ID NO: 104157 - DNA, 532 bp, Mimulus guttatus
  Intron number 2 from transcript mgv1a003467m (locus mgv1a0 03467m.g) derived from phytozome v7.0 (chr-ID scaffold_37; pos 214987 to 215518)
cgtgcaaccttctttgttttgggtaattaattaattaattaataattaataaataataaataataataaataaaccttaaattagttcttcttcttcttctttttcttcatataatcatcacctgcaaaaacacacacaaaacacacagtgagcgtgttaatgaaaaaaagaaaaagggcacctttttagttgtgggaattcttgcatgacctcaaccaaccaagttactttatttctttttttttttattttttgacttttttttgttttacctaaataagttaaatcaattacatgttaaacctctataaattaataaagttgagactgataaaattctattaattaagtgaaatattaaataacggaactaataatttagtatgtctatactttagtatgtctatactgagtcgggagcggaaaaaattattatttaagagagattactaatttatcgatgttctactgtagtatatttctattgttttctattgttttgcttatatatttgtaacagttgtggaggta

SEQ ID NO: 104158 - DNA, 769 bp, Mimulus guttatus
  Intron number 1 from transcript mgv1a001108m (locus mgv1a0 01108m.g) derived from phytozome v7.0 (chr-ID scaffold_123 ; pos 305143 to 305911 reverse strand)
aagaaggtgcattacttgaattttgattcttctgctccgttttctgttcgttttgaattgtgcgattgatttgatcgtaatttcctgtcattgtttcgatttatttgatttttttttttttaccttattttgaaattaaattcagatctgtttatgtttggactatgattacggcaacgattggtgttgttgataatggagaatccggtgaagttgatccgtcatacaataggattttagttttttttttgttagttttctctcgaggctgagagttctatgatttatttgattctccattgtttggagttagcgaacatgtcagagttttgattgtcactcgtgttaactttgacaaatgatttaattgcagttttgattggcatttcatttttagatctgcagttttttcggtattttggaatcacggatgtatttgtatagaatgaattagcaacacattagagaggcttgtaacgcagttaattggagtatggggcttaattcttattcagggctggaagtatatgacttgtttgattttgcaaccttttagtgtattaagtaacgtatcgtaactcctaaatatgatagaatcgtgaccttaaatggaataaaggtgtggcatatataggcttggttggacttcagttgtgttggttccttgactgtgtgtttacatctggtagataaatatttttttgggttttttcgtgattaatgttatgatggttaacatgtcgatattgcagttgattactctcctttt

SEQ ID NO: 104159 - DNA, 859 bp, Mimulus guttatus
  Intron number 1 from transcript mgv1a011932m (locus mgv1a0 11932m.g) derived from phytozome v7.0 (chr-ID scaffold_90; pos 86166 to 87024)
tcaagcgcttcacttctttctgcagtcgccagaaggtatgtatgtattatcgaaataacaaaatcttttatatatatatatatatatatatatatataaaatttattttaggaaaatgaaagtgtttttaatctttattccttaattagaagaggtagaagaggttttttagatgtgaaaaattgttttccaagataaattattgatgtgatatatgccaaatctccgcttcttaggtggtgtttgcaaaagcttattaaaaaaattaagtaaaagttagtgattgtgcgttaaatgaatattaagtgtttatttgtaaaaattggggttgtttgtaaatatacgaagagtcaactttaattggaaagcaagtgtagagatgcttctaaaaaatagcttaattaaagcaggttatttgtagagtataaaaacaaaagctgattttacaaacaacttacaacaaattatgagctctaaaaagctcagaagctgtttctaaaagcttttgctaacacctccttatgcattttgggattatattttctttttgtttggaaaatattttaaaaattaaagcaatattttaatttacttttcttaattaaaccctttttttttttgttttatcaatcaaataatataaacaattgttgaaaaaacaaattagttgtgattttggaagaaaaaagaaataacaaattttaaaacgaaaaaagaaaacctattttaaatacaaatttccaaaattaaaaattaataattggtaactgattttatttcttttaatttgggaaaatatataattttagttaatattgatataggctagaagggaaagtagcactgataacaggtgggg

SEQ ID NO: 104160 - DNA, 539 bp, Mimulus guttatus
  Intron number 1 from transcript mgv1a002481m (locus mgv1a0 02481m.g) derived from phytozome v7.0 (chr-ID scaffold_1; pos 1994905 to 1995443 reverse strand)
agaaggtagtcttcaattcttcttaataactggggaattttagttcctttctgtttttatgttgttttctatgtgtttctgggtggtagaagtattaatttggttcaacttttggaaattgcaagatttcttaggctttttttttactttcttttaactttctctctctttatttgggacacttagttactttttggtatgagcagtaaaggtatttatgtataatttgattgatgaagtaattgttggcctgatttgggaaatggagttaatcccaagcaacgtgtaatcaatactgtagatgatttataagtagacggtgacgattgcggaagctgccgtgaaggcttactctggtttgtatcgaatataataagtcatgtatcttcctttttgcccagtcaatttaaatggtaaaaaagtcgaggtgtgatattgttaacatcatagatttcttggaatacaatggatctatttggctgtagatacaaggttatacgaaatcctgatacactttgaaactatcctgcaggttgccg

SEQ ID NO: 104161 - DNA, 410 bp, Mimulus guttatus
  Intron number 4 from transcript mgv1a007415m (locus mgv1a0 07415m.g) derived from phytozome v7.0 (chr-ID scaffold_8; pos 2989144 to 2989553 reverse strand)
ggctgattacatccatgtaagaagattctgcggacatggatttaattgttttcttattccgttttataagctcgttttgttgtcaaaattaagtcaatagttctgtttttctcgaataattaaagctcgattttacaaagtggtttaattggctaatgggatttggattaggtgatagaaagccaggctgagacactgttacgtatcaaatatatttctcggactcgtttgtttcatgttctgcattagatttattttcgttcttttctttttctgctgtagtagcactgttataatgctctatgtatccacaatatcttcccaaacaagtgacgtgcatatgcacttacgggtgttttttgacttcgagtgcagaacaaggaggacttggggcagctatttgaaaaatt

SEQ ID NO: 104162 - DNA, 642 bp, Mimulus guttatus; identical to SEQ ID NO: 101236
  Intron number 2 from transcript mgv1a019825m (locus mgv1a0 19825m.g) derived from phytozome v7.0 (chr-ID scaffold_290 2; pos 3885 to 4526)

SEQ ID NO: 104163 - DNA, 540 bp, Mimulus guttatus
  Intron number 1 from transcript mgv1a004211m (locus mgv1a0 04211m.g) derived from phytozome v7.0 (chr-ID scaffold_169 ; pos 70138 to 70677)
tgaaggtttgtttcattttttccctcttttattgtctgttttttctgtttttctttaatttttaattcttatttatgtgaatgtttgttttatgtttctcttgataagtgtgttactgatactgagtgttgatttgacattttcaatttagctgcattcttgcgagaaattattcgttctcgattttgtcgaagagttaatcccccatgaaattcttatgttaataccctgatcatgtggtgttcgtattgtcatttggaaattggaaattttgtgaaaatttacctgaaaatttctagctgtaggaatctgaaaactataaacgggagatgtatttaaatacgtttttcgagctttgaggctttatgctgtagaaattttatttagtccaatggatatccgattttcggttttcgatagtttcatttttgtagaaatagtcttttttgaagaatgtgaaatcgtatttaaacaatgttaaatttctcgtatttattctcggcaggatccagatattcgtcccttggtcgagaaagattc

SEQ ID NO: 104164 - DNA, 990 bp, Mimulus guttatus
  Intron number 1 from transcript mgv1a021211m (locus mgv1a0 21211m.g) derived from phytozome v7.0 (chr-ID scaffold_691 ; pos 13376 to 14365 reverse strand)
gtcgttgcaagaaagtgtcgggaaactagcggcgagtgtggccgtgagaatattaatcaagggttcgatattgatgatactctgagcaagatgaatatgattgaagagttggcttgtgaccattatctttgctagctaaaacgagtgaaaaccggagattctcatgatcatatataattgtaagctctaaataatgtgtaaaaaaaaaagaaaaaaaaaagaagatattgggtaattcatggccagaagcttgttcgaattaagtaggtatctaaatggtgttgtattttttcttttattttttatggttttgatttactttctcaattatgttgtagttcggtatgtattggtttatatatgcatgtcttatttacttatgctacatgaatttgtttgtgctttattcttccttgcttccagaatttgtgtggctttgttcagtcattacttatcctttctctttagggaaataaaccgttttcattactcaagttttcaccgatttcacattcggtcttccgttttcgcaaaaacacatttggtccattatgtttcgaaaagtctaacatttttagtcctttctgtcaattttctgttagtactaacaaaatcaagtttgtgtctatcactgacttaacggaccggactaacggtaaattgacggaaatgaataaaaatattaaattatgaaaacatgaaggaccaaatataattttttgcgaacatggacgatcaaatataaaatcagtgtaaaactgaagaatgaaaactaatgtgatattatgtcggcccgtacttatcgtttatcttctacaatgactcttttgtttgtagttaggaattgggataatgaaatgagatttctccgcaagttggaggaagagccaaaaaactaaccgtcaaatattgaccgatcgtttaaactataacgactgtacgttttcatatccagtttcgcaactctcttggttactaatttagtaattt

SEQ ID NO: 104165 - DNA, 1009 bp, Mimulus guttatus
  Intron number 1 from transcript mgv1a014394m (locus mgv1a0 14384m.g) derived from phytozome v7.0 (chr-ID scaffold_224 ; pos 81320 to 82328)
gatcctcctccgccttctcatttctctactcgcaggtaccatttctaagctgatgggcgccgttctccattgctgtaaactgcgtttcgatttaaattttcgtttctgaatgtctgaaaaaaatcagtgatttcttaagttaattcgtgacttttatcgtataattattgattttaattgattatatgtatgtgtattttgtgttgcttgtttatggagtgtgtaattagatgtgccctgttaattgttcatacaagatttaatcttgtattaattagcataatgtgctggtttatgtttatcaatagcgaatgattatgaatttgatttatcgaattagaaactttgttggataaattgtatgatttaattatttggtgccctaattattcccttgtatattccctcataaagaggattcagtcatgttgaggtaaaaagattggttcttgtggggtaaaaattaactatattcaggtgtttgcataattgcatttctgcgttttttgtcggtagattaatttaatacgtgacttttatcctataatttttaatttcgttagactatatgtatgtttcttttgtgtttatggagtgtgtaagtaggtgtgccctaataattgttcatacaagatggaatcttgtattatttagcacaatgtgctggtttataatgatcctagccggatgattctgattttgttttttcgatttagaaacttaattgttaaaattgatgaattagctatttgatgccctaattattcctggtatattctctcataaagaggattcagtcatgctgatgtaaaagattggttcttgtggggaaaacgaactatattcgggtgtttgcttacttggatttctatggtttttcatcaatcttttatttgggtgaagatgaagttccttttgataaagaagctctgttcgttaactatatgatatgattttgttgaatttcgtataattttgtgtaattatttattgtttgtatagttgcaag

SEQ ID NO: 104166 - DNA, 768 bp, Mimulus guttatus
  Intron number 1 from transcript mgv1a004458m (locus mgv1a0 04458m.g) derived from phytozome v7.0 (chr-ID scaffold_213 ; pos 100597 to 101364 reverse strand)
ttaaagttttcgacactcaaaatcagactatcaaggtaagagtttttgtatgattgtatgtatatttttattatattcatgatcctgtctgtaaatattctctgacgtggaattgttttatgcttaggatttataattgttaaaataaaatattatataatattaatatatattcaaaatattctctgatttgaggggtaaatgagtaatatcactagttgcatttgcgtgataaataattaggtatatcattaatttggggaagttatggaattaggtataacattaatttggggaaaaacaaagaaaaattatattcgactaactacaaaaattagttgactattgtagttgactaggattagttgacttgaatttcagcttactaatttagcctactactttataaagcttagttaataactaaaattaaccttgatgtaaggatttataagatattttaaataagctttgccaaacgtgtccttagtcggttactaaatgaaaaacgatcgattaattcttcgtcaaaattgatgtctaactaaaatatacttggtccactactttgtatagcttaattaactaactgaaaagaacttagtcgtcgactaactaaaaaaaaagtagtcgagtatttcgttgattgatgcgtaactaatacaaattagtcgactaagggttcaatttacaaaatcctaataaacgaaaaaatatcaaaaaaagatcgataacgcggttcctaataattttttatgtggcaggagt

SEQ ID NO: 104167 - DNA, 973 bp, Mimulus guttatus
  Intron number 1 from transcript mgv1a019509m (locus mgv1a0 19509m.g) derived from phytozome v7.0 (chr-ID scaffold_274 ; pos 248901 to 249873 reverse strand)
ttttgtccggtaaaaacaaaaatattaatgtgtttgacaacaataataactttaatattgtctaacattacaatattttattaatagagtcatattaaaaaatattattgtgtaacacaataatattaacaacaatattcttgtgttgcaaaataatattgacgtgtaacacaataatactataatgttgaccagtcaacacataaaaaagtccaaaaattaatattactctagttgtcaattacattatttaacagtaaaaaaacaaatttcaaaaaaataatatatcaaaaacaaatttcaaaaaaataatccaatgccggagaccgtcgttgatctccggtcagctgccggtctccagcagccaaaaaaaaaaaaaaaacaaaactggattgttggggttgagggtaatttagtcgtaaatattagatttgcctatacttgtaatacatgttgaataggtgggctaattggcgaaaataattcctctagttgttttcttttgaattattcctttgcgttgttcgtatctttaaacgacaaataattatatgcgcttacttcataaaaataaagagattgttcttttggatgtaattttgttacatatgattatataaaattaggtattaaattttattatattactaaattttatggttatattacacaatcctctgattaattgttgtaatacattcacctacaaaataatatacaaccatattatttttattacaaacattataagcaatcattttcattcggttaaactagcaactagcaaatatttaaacacgtcggacttgtcaatttttttcattacgtaaagaagaaccttaataaaaatttaaatcgaaggccggggtccaatgaacaaaatcaacgtctctttgcttttaatttcttgcattttttgcgttgtacatggttttcagacaaattccgcatcaattggccgcaagcaagttgt

SEQ ID NO: 104168 - DNA, 724 bp, Mimulus guttatus
  Intron number 1 from transcript mgv1a019659m (locus mgv1a0 19659m.g) derived from phytozome v7.0 (chr-ID scaffold_124 ; pos 629683 to 630406)
gaataccggtactatacgttcttgattcttctgtcttcgattttgttctgaatcaatggtaattagtttatagctaagcttgctttaattatttggtttatgtttaattgttgttagtgttcatgttgaatgaagtgaagtagtggaatctcgataaattaataacctgacttaaataataatttatcgcggtcccgactcggtgtaaacatactaaattgctagttcgataatttcatatttcggtaaattaatagaatttttatttatagaggtttaactgtatattgtagttttatgaacataaaggctcgtgagaatatttacgaatttcgtatttatgtttaaatgaaaccgaaaaaacactataaattatctcgtcattcgtaatgttgatcaaacgggctttcgtaaaatgctctttttttaggcaatgaaattgtttcaacgtgttttattgtttcttgtcggaatattacgattatatacaagatcgtttgctgcttgagtttctatagttgttgttcgtcgacttcttattatgcttggattggatttttctattttctaccttcgaaattcaattctttcgacactgcaatgggatttgaagcgtttttaagtttatttacttatcgtttttttgacaagtagtttatttacttatcaaatattggtagatgtactcaaattatttttgtgtgcagatattgcctctctgtaa

SEQ ID NO: 104169 - DNA, 649 bp, Mimulus guttatus
  Intron number 2 from transcript mgv1a015166m (locus mgv1a0 15166m.g) derived from phytozome v7.0 (chr-ID scaffold_64; pos 992566 to 993214)
acgaagtttctaagtacaaaattgaaggagatctcgtatgtgttttttactccaattttttcttttcctttaatcctaaattctatgtgttttatttattgctaagtaaacattttctacagtaagtttaatgaaatgatttatgttgttaatgaggtatatgaattatactgtttggttcatatctaagtatatccagggtttgagtgtatctccgtttttttgtagttactcaatttgaacagttatcgttgttatttagtgatttttgattccgcggaaatcgaatttgttcgtttttcgttccttttggatttctcgaccgcatatcttgttgttccatctgcaagtatatctagggtttgagtgtatctccggtttttgtagctattcattttgaacggttatcgttgttatttagcgaattatagattctgcggaaattgaatttgttcgttttttttgttcctttggatttctcgattgcaaatatatccaggttttgcgtgtatctccacgtttgcggttattcgttttgaacactatctccgtgaaatattggtgaattctgattaatcggaaactgaatttgttcgttttttaattggttgtagaggaggtttaacggacttgcgataagaaggctgaa

SEQ ID NO: 104170 - DNA, 815 bp, Mimulus guttatus
  Intron number 3 from transcript mgv1a018236m (locus mgv1a0 18236m.g) derived from phytozome v7.0 (chr-ID scaffold_45; pos 563740 to 564554)
gaggtaaaataaaattaattaattactatgaaagtacattatttaattaaagggtaacatagtagttaatccccttgtggttataagctttcgcagatgaccctttgtgctcgtaatataagttcataactagtggcgagtcaagaaatttgttacaggtgggcttaaattttatggggttcgggggcagcgcttccgaaatttttttaggatttttttgtgataaaatcataaaataggaacaggaaaaaagaagaaaaaaatttagaatttttttgcattaatttggattttcggtgggctaattaataaaaactgggcctttttttgtattaatttggattttgagtgggctaattaataaaaaattaggcttcttttgcattaatttaaattttggatgagctaattaataaaaattgggtgagctaaatagatatatagtataatatagagggagaaattgtaaattgagggtgggcatgagtccacccttgcctaacactcgcccccgttcgtaaccgctttgtggttgatagagctagcgtccgttaatttttccgttaaacttacctatattttgtcatacataaaaaatctaagtatttgcagataaccccactgtgcttgcatttcttcctttgaactttgacacacacagttaaatttgaaggaaaaataaacgaactttaccccttatcaataaaaagggggttatgatcagctgattttacgagcacaaaattatcatcagcaaaaacttattatttttattattagatatcttccgacgaaactaaacaggagactgaaag

SEQ ID NO: 104171 - DNA, 628 bp, Mimulus guttatus
  Intron number 1 from transcript mgv1a006519m (locus mgv1a0 06519m.g) derived from phytozome v7.0 (chr-ID scaffold_11; pos 605674 to 606301)
gaggtaatagtttctatcttcgtaagaattatatttgtaagggtaaattacaaccacccttgaggtatgctcaatttacgaaaaaaaaccctcatgtttggataattacatctacccctcaactatgattttttcttacacctccacccttatggtgtcaaattcaacataatcatctagatttcgtggaatgtgctctagtttgtactcgttttgcgtaaaaatacactttctgatgcaccacacaatctgatatatataagccaaaaaacacatattatgatcatcttgcttcaaaatgtggagttcgaatgggataaaacgggcacaaaagtgatattattccatataatctcgaagattccactaaatttgaaaccacaagtgtggacgtgtaagaagatttatagttgagggggtggttgtaatttacccaaacaggaggaggttttcgtaatttgaccatatctcagggggttggttgtaatttaccctatttgtaaagaattttgaagttttcgaattatagagtcgatataagatatacgttgtttgctttagaacttgaagaaaatagtcgatatttaagtaccgataccgatgctatttgtttttgttaatagatagt

SEQ ID NO: 104172 - DNA, 747 bp, Mimulus guttatus
  Intron number 1 from transcript mgv1a019810m (locus mgv1a0 19810m.g) derived from phytozome v7.0 (chr-ID scaffold_63; pos 473561 to 474307 reverse strand)
cacgagcgggcccactcggccacagactcaaggcagtgccactaatctgcaaaattgtccttgttgtgggcaatctattttggcgaatgctataataacctgtccagctgcttcgtgccaggaatctgtcaatgttctgaaacgaaagctcgatgaggtaatgcacatcgtaagttgtatcagtgctatggtaaacgatggcaggaccgattcagcgaaaatgcgacgtacaaacgatcgtaattagcaaaaggtggtgttaagagatcatagccttgtaacgttctttacgtaataggcgttaatagtttttttttctttctttttaagcgtatgcagcgttatcctctggtaggttagaatcgcaatttgggggacggaatgcaaaagaacatattatacatacatacatacaatatatatatatatatacacataattttgcaatgatcttgtttggttatctctctcgaattggtatttcttatatttgttatgttagttcgttcgtagatttttgctttgttttctttgctgatgattattatgtttaggtttctcgagttcattgtaataacgtattgcgaggtttgatttttcgcgccaatttttttggatttaaaaatctcgttacaacagttatatcatttgtcggtttgcagcggtcgtattttaatccaagatattaatcacggagtttaatgacttctagtaaaagccatcaccacgtggcaaaggtgcatttat

SEQ ID NO: 104173 - DNA, 433 bp, Mimulus guttatus
  Intron number 2 from transcript mgv1a017675m (locus mgv1a0 17675m.g) derived from phytozome v7.0 (chr-ID scaffold_5; pos 2827904 to 2828336 reverse strand)
taatcagatttcaggccattacctttattcgccaggtatatattattttttatgggaaatgtacagtttgcaccgtcatgtttgcaccgattttgtattttggtccctcgtgcacaaaaatacacatttgattcctcatatttaaaaaaaaatcacttttagtcatttccgtcaattttccgttagtactagcggaatcaagtgtgtgccactaaaagtgttaagctattgaaacttgatggaccaaatgtgttttttatgaacatgatggaccaaatgtgaaatcggcgcaaacaagagggatgaaaattgtaatttccccttatctttatctttctttttgtttcttctttttttatttttcgtgttaattagattgttttagtcctatagagtagtttctttaaattgtctccaaacaagaataacaaga

SEQ ID NO: 104174 - DNA, 878 bp, Mimulus guttatus
  Intron number 1 from transcript mgv1a002476m (locus mgv1a0 02476m.g) derived from phytozome v7.0 (chr-ID scaffold_42; pos 481743 to 482620 reverse strand)
accaaatcctttatcggtaatcatttttttttttttttttttgatatggggcttttgatttcaactcaaatttcattatcagtatgtgtgtgtgtgtgtgtgtgtgtgtgtgtgtgtgtgtgtgtgtgtgtgtgtgtgtgtttaattctccattattgatgggggaccgccattcctgaataagtaataagcttgtactttacttgaatttaaaattgagacgctgttaaatttggaatcaaattgtttttaataataattataataaagagtttgattctggttacaaaggcacaattataaaggaaatgctagatgtattgtgattttggaactgtgattgatgactcggtttacagtttttgagttacagcatcgggcattccgtattgctttttaaaggttataccatttttcgggcatgtagaatgttttcatggttataagtttccctttttgggaaaaaaaacgaagaaagaagttactgtctttcttaggaaggaaagggagttttaggattataagtgtgcgtttggattcgaggattcgtaatccaccacaatcactccaaaaatatatatatattaaatgagaactaaggatttgatatcccattgtataagtctgctaaaaaatgttgttcgaatttgctatggaggagcttgttattgtgagttagtgtgtttttagcttacaaaggcctggttttacgtggattgtgaacacgtaatgcacaatcactttcgctcagtagaaagatgacgtatccttgtttaattgttgaaagataatctcttcttttcttttttcttttttcttttttttctgatgaattacttacaggcagcttattaagtggcggtgggagcacgccgcgg

SEQ ID NO: 104175 - DNA, 592 bp, Mimulus guttatus
  Intron number 2 from transcript mgv1a004598m (locus mgv1a0 04598m.g) derived from phytozome v7.0 (chr-ID scaffold_108 ; pos 411959 to 412550 reverse strand)
ttctgattgcggccccctgttcttgaaggtaataaaatttggcttctgaaaacttttaatttgatcaatcaacttcaaaagcttaaatatttgcgtagttgttgtgttattgtgttgttgtgttattgtgttttgttgtttgtcactgtcttgattggtcatatgtcaataagtagagagaaacataagctgatcaatctattcgatacgaattcatgtttctccgagtgtgtactctttcttgaatcttgatcttgtttgtggggtcgataatgatgtttttttcactcgagctttggatatatattttctaatatgacgaaccaaatgatatgtatctgcatatacatagggttagttttaagctcctgtattatgatattgcgctcgctctgtttttttctaccgatctgtacacttctatcataaaaagaagcactcgatcctcagttgaaaaagtttttgaagaaaattttgggtttaactatttatgcagtaccgagcgtacttttcaaaatatactgtgatataggatgagtccctctattttttgaattttctatgacacaaagggtaaatatcatgcaggcat

SEQ ID NO: 104176 - DNA, 905 bp, Mimulus guttatus
  Intron number 1 from transcript mgv1a003806m (locus mgv1a0 03806m.g) derived from phytozome v7.0 (chr-ID scaffold_51; pos 1026083 to 1026987)
tctactcatttcgacattccgtttctgtctaaaaggtattcagttcattttctgtacacagaacttcagatttctcggatttcatcttttttcatgattttttttacatgaattaaagctacgatctagtttttgtaggagtgaacgtgtggagatcttgctagtaactatttgcccccttcaatttcatacagttgtgttttaggtttagtgtcctattgaattaggatatttcgattgtatatttgtcggactatctcctgaaatttgatagacaattgtagtggatttatttgtggttcaagagcagcttggtggaggataatgaaatgcatggatataaataatttttgtcttaattacattggaattggcttagacgaaggaatattttgtttgtttagtaaataatttaaaacatagcgcaactgaaaggtaaggatagaagcaacttcgctgaagtgtgtgggcgaattggccctgtcacacatatttggttgtaataaagtgaactgattctatagtaatgcactggaattttagtatatctggagaaactgtacaacatattatccaccctatggattgtgtaaaagctgttcgagtttggattctgcttcgacgcatactgagagtggtgcatatttatcagaatgcctgttgaatcttgatatacttttgtcttctactttgttttcgtagtagaggcttgaggcattgaactctggctgactgataccgccgtgtttgtgtccagtgtccactcctcgtttatctacttcactattcaattctcttatcttgttttgttttttgatttcgtgtattgtcatctacttcttgtcgtctacttcactgttctgtgcttatcatgtaattgcagaacaccagagtggctgaggaag

SEQ ID NO: 104177 - DNA, 766 bp, Mimulus guttatus; identical to SEQ ID NO: 103439
  Intron number 1 from transcript mgv1a014697m (locus mgv1a0 14704m.g) derived from phytozome v7.0 (chr-ID scaffold_1; pos 4689359 to 4690124 reverse strand)

SEQ ID NO: 104178 - DNA, 822 bp, Mimulus guttatus
  Intron number 2 from transcript mgv1a016064m (locus mgv1a0 16064m.g) derived from phytozome v7.0 (chr-ID scaffold_54; pos 421630 to 422451)
cccgtaatctctctctctctcgatttgatttttttttttttttttgtctttatgtgaagcgaaaaaaatgggggatctttgctattttcattcttattgttcgccagtggattaacaaatataaggtgtggatgattgattaaatgtatgatgtttcgagtaaatatgcgattttgtcaaggtagcgacccaattatgtaatatcccgtggccgatatacaatgaagaagttgcgaattgattatagtgaagctctttttctcggatgattccaaagggttcggaaagagggtgattaatggataagcaaattaatgataacatctttttgcagcttcgatgaattggaaagagtaagactgaaaattaatctcttaagtctaggccatgtgtaaagaggctgaacgatttctagaaaggatagtagagggaagaaatcggaaaaaagtgggaaaataaaataacgaaactgctaaaaattggagggaaggggacgacaatctagactaaaacatatggaaatgctaattattttgtgcagttgggttattagcttcgattacattcgtccatatcttattcgttcgattcggtgttttttatttgatgtattcaagggttagcgattttgttaatggctatactgagccttactcattcagaagggaaattcttgaaaccgagttgtagctctccttttataaagtatttcccacgaatataaaaaaatggctttaaagtttgaattgttggttcgaaactgatattctgttttgtgaaaaagcagaacaactagcaaaagaccttgaattgttcgcacaa

SEQ ID NO: 104179 - DNA, 772 bp, Mimulus guttatus
  Intron number 1 from transcript mgv1a007143m (locus mgv1a0 07143m.g) derived from phytozome v7.0 (chr-ID scaffold_30; pos 1585241 to 1586012)
tccggcgacagccacggtcgacggtgcaatctgcggtaagatattttttttttttttaattgttcaattttatttgaaagggttgtggtttttctttccgaaacgcatttataaatacaaagctggtgttcaattttactaaaattacagaataagtttgcaatttcaggcatttctgtggctacctattaaattcgaatgtatagctatgactcaaatctgtttatgagattgaattagtttaatttcttcattaccagtgaaattgtcttgtgataatcgataaccggtggatcttcgtgttgctgtttcgtgtaaagataggtggttaactaggtcatctcttcacaatacttcaaatgggatttgagttgaatattttcataacaaactggacatgattaacatcaatcgactcattttccgatccataaattaggaccggtaatcaactatattaattttagaatgatttttcaaccgagcttgtagccggttggtagccggttggcagttgctaatttcttgtaaactcagttggtcagtatttggtcaaccagatcgaaatacgtagatatttggttgtcagggtatatgttagcaatttcaagcttcagcatactttgtcgttggtgtacggatacttgtcgtcatcataattttgcgagaggagttagcatatagtattgccgccattgtgtattaacgaattgtacttctggatattgaagacctaatgttattcttttaaatgaaattcataaaatcgtag

SEQ ID NO: 104180 - DNA, 641 bp, Mimulus guttatus
  Intron number 1 from transcript mgv1a012518m (locus mgv1a0 12518m.g) derived from phytozome v7.0 (chr-ID scaffold_94; pos 683565 to 684205)
agatttctcccgctgttcaatcacatctcaaacaggtttttttttctccttcttctctgattatttctgtttatctctttcttccgaatttctgttcgaggatttatcgatttttgtgaatttccgaaatcggaagaaaattgattgaaacttggtttgaatttgctttccgagttgtggctgttgaattaggttatctactattaggttttaacttggctatgtgtttcatgactcgaaaattcattctattttgatttaaccagatacggcgattgcgtgataaatatcttgtgaatcttttggtggtccccgtggagatgtttgtattttttcctataatttggagatgttaatcgagtaccactattactggattttgcttgaaaaaataaatctctgagcgtttattaccatttttatgcaaattgtggtttctgaattctatcgattctacttttcactaaatttatgtggtttgatattccttgtttttttgttcgatttgttttgtggtagtagaaattaatcgctgttgacgaactatgacctaattgtttttggtgagagaattatgaccttagtttcagtttagtaagagaaatattcaccgcgtcttgttttcaggtctatctctcgct

SEQ ID NO: 104181 - DNA, 931 bp, Mimulus guttatus
  Intron number 2 from transcript mgv1a002849m (locus mgv1a0 02849m.g) derived from phytozome v7.0 (chr-ID scaffold_130 ; pos 602002 to 602932 reverse strand)
gtgttgtagggtgagagagacagagagagagagagtgtgtgtgtgtgtttatatatatatgtcagggaggatgtgtgcgagagcgatagagagagtgagagcgagagtatgtgtgtaagagagagagagagagagagagagtgtgtgtgtgagagtgagagagaggaagagagagggggagagagatagagagagatagatatatatatatatatatatatatatatatatatatatatatatatatatatatatatatatatatatatatatatatatatatatatatatatatatatatatatatatatatatatatatatatatatatatatatatatatatatatatatatatatatctcatggtgcatgcatggcattatttgcaattgagttacattatatcacatacatttggggtgaaattagaatgcaatttccgatttatgtcgaatccaatctgaaatattccaattttttaaactacattttttatttcgaattccaaaattctgatttctacttttccctttttttttggaattgggattttctacacacttatttccgattcgattttaatttctaaaaacttaattttgtttttgaatattacacttatttttctaaatattattttgtattttattatttcaggtgactaaaattggaaattttcgaatccggtctttaccattcaaaaaaattaattttgaaacaagatgttcgcattccaattttcaaaacttaaattttaattttccctatttctttggaacggaactggaattagtttttcacttgcggaaaaaacaattataattttttcgaaagagctaatccgatctgatccatccaatttccgcctctacattaattaattaattaatttaggtgggctaattgggagttccatctagctttcgaca

SEQ ID NO: 104182 - DNA, 423 bp, Mimulus guttatus
  Intron number 1 from transcript mgv1a021294m (locus mgv1a0 21294m.g) derived from phytozome v7.0 (chr-ID scaffold_4; pos 2218982 to 2219404 reverse strand)
gcatgtgcgtctcacatgccttcaatttacaacacaacatgaaaaatggactttcaacaacacgcattgcgtcttgttaaaacatattttttttaattattatttttaattaaaatgaaataataaaaaaaaaaacaaatattattaatcagcgaaggccaaatcaacgaccagaaatggtctattcattaaccgattcaaacgctttgaaaatatatttcagttcttctttttcaattcacagtcaacagtctcatctcgtcatctctctctctttctctctctagactctctctctagactcttgtctatatatataccatagaatctcaccattcaatattcattcatttctcactgcacttcatcaaaacataatcagaagaaaataataaataaataaataaaaaattaatggcaggt

SEQ ID NO: 104183 - DNA, 782 bp, Mimulus guttatus
  Intron number 1 from transcript mgv1a018577m (locus mgv1a0 18577m.g) derived from phytozome v7.0 (chr-ID scaffold_54; pos 737188 to 737969)
caggtttgtttttttttttttctttttttttcaattttttttttggggctatatattaatcttttaatttgcatgaactgaacatgtgttgtatcatattcattcttatatgatctcactatgtagggttagtgaaggcaaaacaaagattattttattcaaatagggtaaattactgccactctaagatcggtcaaattaagaaaaaaaaaaaaaatctttatgttcggataaatacaaccattcgcatcaactatgaatctttctaaacgttcatttttataaggtcaaattcaacataatttttctagattccgtggaatattctctagtttgtacccgtgcaaaaatggagtttttttatgcaccacaatctgatatttacaagtcaagagacacatcttctgatcatcttgtttcaaaatgtggagtttgaatggggttaagcatgtactaactggagaatattccacataatttagaaggttccactaaatttgacactgcaataatggacgtgtaggaagattcatagttaatgtgtgattataattacccaaacatgaggagttactttttaatttgacatcacctcatagggtgcccgtaatttaacctattcaaataattgatacattttttttcttttttttctttttattttgagaaagatacattttttttttcactaattcaataaattgtacgatttcttgaccattgtcatatttgttttgttggttttaggtgtggatatactttttgctacaactgtggagctc

SEQ ID NO: 104184 - DNA, 999 bp, Mimulus guttatus
  Intron number 1 from transcript mgv1a007354m (locus mgv1a0 07354m.g) derived from phytozome v7.0 (chr-ID scaffold_1; pos 3736469 to 3737467 reverse strand)
tggtgggttttctcctcttttgtttgccagtcgttgttctggagttttaaaatatctgaaaatgcaaattatcatgaatttctcttgtatagggtgtttgagttgccaattatcttgttgagtatggttgcagcattcttattattcatttttttggctgggcgtctgtgttgtagatatcgattttgtacgcttatattggaacttgatgatattatctcgacaatgtgttttatatgacatatttgtctgttcattagatgttatagattaactatgttctttatgaagagatgcctgcctcctgcaaatgtgttttttgtatttgggaagttcgacccttcttcgagcgtaccgtggtagttgttcttcggaagttcaatcctctatgtttgtggggcaagccgacaagggtgtgaatgaagtacttaagtcctatctgtgactactatgcacattaatatgcagttatcttaaatattggctatttttttttttttgtaaatgtgcgagcatgaaaaaatcatgtccactaattcttagcaaatttgcctgctttaaattttcttggtttcatgagactttgcaaattatctattttcccttgaaaatggatggtgatgaatgtttgctggtaagaattgattatgctatctagcggtagtgtaaacaacaacatatggctatttacttcatttttttggttgacatagtctacttttatttacttgtatatgtaacatatccagataaatgcagaataccttcatgttttcagattgttagtaaaaataaattggaaatgcacatgccaaattgtttgaaaagagatggtcagagtagtgtaaagcttatcttctagtaggagcatgatatagtattatctgattgactcttgatcttaacagggctacctaaaagacattaaggtagatagtataacataaaattgttttggctgcaggggatacaagcgtttttttaagagaacggctttgg

SEQ ID NO: 104185 - DNA, 618 bp, Mimulus guttatus
  Intron number 1 from transcript mgv1a002580m (locus mgv1a0 02580m.g) derived from phytozome v7.0 (chr-ID scaffold_36; pos 1475794 to 1476411)
agcccgccacctacaacgccgccgtttgccgccgggttcttctctcgccctaataatctccgtctacaatcgccgttttacctccttgctttccaaggttcgtgattatgctcgtaaaacatgattttgacaacttttttttttcttttttattaacttgtgaatttattttatagaaagcctaactgtggtaaatgtatcgattcgtgaatgtattaatttgctcctccattgaaaaattgaactgaactgcgtatgcgaaggaggaatcgttccagcggttgattgatttcaatatcctaatttttcaagcattgatgatgtcatgatgacgtcattgagttaagcgatgttaatatcttgaaatttcattccaatgtcaaagctccaatcgttaataagatgtaatcaaaatggtttcttgagattgatatttggtggaagaaatgtctgcagccacaatgtaagtttccagcagttgaatagttgtaatgataataggttacaccgtagtcgattttccgaagaattttctactattgctgaaaagctcgaaaagttatcctccaaaaaacccccgcagtggattttgctagaaaagctcgaaaaggctctgaa

SEQ ID NO: 104186 - DNA, 443 bp, Mimulus guttatus
  Intron number 1 from transcript mgv1a009017m (locus mgv1a0 09017m.g) derived from phytozome v7.0 (chr-ID scaffold_100 ; pos 445039 to 445481 reverse strand)
tctggttagttttctcacacgcgcttttctctaatggattttgctctgtttctcaatttttttttcttccggcgaaacgacttcgttttgaacaaaccgcatgctttgatttatgcgttttcgtcagcgttgtgttttttttgtttgatttgattcgattgtgtgtgtgtgtgtgtttatatgtatatgctctgtttttttttacactctgtttgatcttcgtatacttagtggttacagatttaaatccgtttttttaaatgttaatcctctttattaagtgatgttgattgcagatcttaccttaattagatcttgattttttttagtttaatattattcggtgtttgtttttatttaaccgtttaattctatgattaaattacaagtaacaaacgccgccgtgtgtggtgaaaatcatttgcaggatcggcggctccggt

SEQ ID NO: 104187 - DNA, 1054 bp, Mimulus guttatus
  Intron number 1 from transcript mgv1a003425m (locus mgv1a0 03425m.g) derived from phytozome v7.0 (chr-ID scaffold_149 ; pos 66470 to 67523)
ctgctctcaccggacctgaacttgaccaagtcaaggtacgttgtactccatcgaaatctcgaacccggccggtcgatttcaatctaaaaagtttcgattttgattatatatatatatatatatatatagtgttccaatttcaaatgtgacggatttagtacttttttgtacattattctgaaaacttttaagtttattattaatattttaaatttttccgacgtttaaacttttgatttttgaatattttcatattcttttaggattggaattgaaattattttttattataaagaaatgatttcttatcaagaaaaaaattactagctagaatatttttaaactaatagtcccttgttaattagaatagttaaaacttcaaattttttaacaataatcaaattataagatctaggggtgagcaaacatactgaaaaccgaaaaaattgaggcgatgtgcaccaaccggacataaaaaccgcatctatggtaatgtttttttctgaaaaaccgaaaacatcagtttgcgtatgcagaatacagaaaaacaccgaaccaattaccaaaccgaaccgattagagtacaaattaaaacaacgtcgttataaacatttaacttccttgtcttcccctagatttcggtgctgaagttttgggcaattttgggttatggcgtgttattatttgttaatctatcatatatcattttttgccgaattcgatagacgaaaccgaaactgaaaataaaccgaattgatactgaaaaagttaatcaaaaactgaaaaatcgattagcaccgaaccgtaaaaaaaccaacatgttttgttgaaaaaatatgaaaaaatgatattaacgttacgtgtttggatttttgcaaaaatcgagtctttccgatttgaatttgatttgaatattttatttaattatgtgcctgagctaattcgaattttgttcaaccgagcatggtatacttataactaacctatactatttctttaattaaattaacgtggtgcaggattcggaagacatacttcttccgaaggacgagaa

SEQ ID NO: 104188 - DNA, 516 bp, Mimulus guttatus
  Intron number 2 from transcript mgv1a016436m (locus mgv1a0 16435m.g) derived from phytozome v7.0 (chr-ID scaffold_117 ; pos 642582 to 643097 reverse strand)
ccttatcaccacccgaaagtctccttgtggtgaaggtattaattctatatcaaagctttaataatcaatttcttccgtaagttttttttgcttatgtggatctttcattattatccggtggtatagtttgtatgtttcagctactcggtcaaatttttaaatctttttatgtatcttttgtataaattaatgcatttctttttgttgcaagaaaaggaagttaattcatttttgctgaattcttgatgtgaaatcttccttagacttgtcaatatggttactatctttcaaagatagttcttttaatttatatttcattttttggttgtgattttttcacgattttacaatttgatttggtgtattatgtaaagtacatctccatagctcatttgtaatgcatagagaaattggaaatgtagtagaagtgtttttggcatgacattgttattacatcttctgacctaattttgtggaatttggtttttaggaacgaatacattcgataggtttgag

SEQ ID NO: 104189 - DNA, 698 bp, Mimulus guttatus
  Intron number 1 from transcript mgv1a016436m (locus mgv1a0 16435m.g) derived from phytozome v7.0 (chr-ID scaffold_117 ; pos 643142 to 643839 reverse strand)
tcaagaatctcgagaaaggtaaccgctttttaatctctaatattttattttgctattttaatcgacataaattgatagtgtatgctgtgcgattagtcacttctgttgaattttagcgacgaaaattcatgttgtttctgcgacgaatttcctgtatttttgtgttattgagagaataaaagtgtatttcatgaaataggctgtcaattaacctatttggtcaactattcggaaattcgaggttttatttattatgcgactatggtttttgattgttaatcaagtattccttgtacatggatttgtataagctgataaaattcggtgtatgtgaattaccaatgttgtaaagttaaaattgtttttcatttcttcgagtttactacacgataattttagaagtaacgataatcgaccattaagtcaatgttaaattgcataaaattgtatttattaagaatgaattaccagaaaatgatcgatggggtttgttctgctctattttccattgtatggattggaattttcttcactgtcttacagaatggattttttttttactactgagtatatattctatgttctgataaatttagtttagtctgagatgtatggatactgaaattatttgagggaatattgaccgaaagttgtcttgaacagtttgttctgacttggtacgtggcgctaaggacaaa

SEQ ID NO: 104190 - DNA, 854 bp, Mimulus guttatus
  Intron number 2 from transcript mgv1a001536m (locus mgv1a0 01536m.g) derived from phytozome v7.0 (chr-ID scaffold_83; pos 798198 to 799051 reverse strand)
cgtagtaaaccttacacacctttggtaagtgcatccgttgtactagtgtataacctatgtgtcacatatcattacaaagttaattttatctgtactctgatttgcgatttgctcaacttgaacctcagtcgagaaaacaatttttctctgtgtgttcagttgcatgttgttttcctttcaattgtggtcttaaggctcagatcttgggaactttagagaactaacataaacgtactgaaaatatgcatatatccatcaagactgggatataaaggtctctatatccctatttttaattgcgcgcatggcagtataaggacttatagcaactagattataaggtaaaaactttggactgctcattctgtttgtcatttaaggatatgcctttcgatctgacctggatattccatcatttcttgcaagagagctcatctccagaccacataaaaatttaaagtccaagaacaacaaaataatttgatctagaaaaaagataagactagtattcgttcacatttgcagtaaaaagagatgactcaaggtgaggcatgagattaaaagacaagtagagaaccataccagaaacctgtaatcatatcatggcctatccgtttcacgaagtaattattatatacgaattaggatattttgctgtctttgctgcacaggacaactcactagagtttccaaatttaactgataatgggtaaaacacattcgaatgaatttgaggaattgtgaagatgcgttttgatttttttttttattgatgtgcttgtacatatttttttctttgcacatttttttcattttctgactgcaaatgctttatgcagatctttcgtctactc

SEQ ID NO: 104191 - DNA, 1037 bp, Mimulus guttatus
  Intron number 3 from transcript mgv1a012409m (locus mgv1a0 12409m.g) derived from phytozome v7.0 (chr-ID scaffold_87; pos 796910 to 797946 reverse strand)
aggttttagagcttaaagcagaggtacaagtagttcctattaatttcagtttattgcatttagtaccccttgtgttatatcggattgctataaaacacccctataatgcatttttttagcacacaaccccctatatagtgagtttttttaggggttattttgctaataaaataacatgagggtttttttgacaattaggaaagatacaggggtggctgagtgcaataaacccctatttattagcatgattagggctgggactgggttggtttttatccaccaaccgacccattactgaccatatttttaggcggataatcaatttttaaccgacccattggactgggtcgaaaatttcaaccaacccatttataatgggtcggttggtggtttctaatattatcacaagttggttgaccgataattatcggtcatccaactatattattaaaattatattaaaaatataaaataaaggccatgttttcttaagtggttatgaaattatcaaaataaatagtattttaaattttaaaaacaatcaacaaaagaaaaaaaattgacctaaatcttccaccagtttttttatgcccaagtttaaacaaaaagcccacaaactccactaaaactcttctgtatatttgaaactactttgaattttctgattctatttttcgttaaagtgttattaattattttgaactgataaatgatgattccaccgtggcattatgcagaatgcagatatttttactccaaaatttgatttttttaagtggactaggttgcgggtataaaccatcaaccgacccattccgaaaccaaatattcggttgtcaaccatcaaccgacccacaaaggttgggtcggcaacggttttcaaattttagcaaaaatggtttgacggattggtcggtttttaggctggtaatcgaccgacccaacccagtcccagccctaagcatgattgataacttttgcttcaaacattttttgttacagatagagagcctcaaaaaggcattggtaaacaacaa

SEQ ID NO: 104192 - DNA, 419 bp, Mimulus guttatus
  Intron number 2 from transcript mgv1a004956m (locus mgv1a0 04956m.g) derived from phytozome v7.0 (chr-ID scaffold_79; pos 231808 to 232226 reverse strand)
gagaggctttctcggctcgaggtaagctattttcctctgtttttgacaagaattctttaaattccatgtgatgtaaatcttagctatgtaatcggaaaaaaatgctttttttttttttttaatgctgcatgctttttgtttggactgtgtcttatgcattggtctgatactactaattactatttgtgtacgaattcttgatagtcatatgaaggcgtagacaagcattagttagacaaactagtcatgcagttatgataagaacatgagaactatgtgtttatctttgattgtattttccgtatattattttcacaatataatatatatacttggttgcagcttcaagctgatagagacttgaatccgactcttaattcaaaggccttggattttcccgctctctcgagggcagattt

SEQ ID NO: 104193 - DNA, 926 bp, Mimulus guttatus
  Intron number 1 from transcript mgv1a004039m (locus mgv1a0 04039m.g) derived from phytozome v7.0 (chr-ID scaffold_39; pos 180033 to 180958 reverse strand)
tcgccggaaactccacagaccgtctgcccgctctggtttgtgtaatttctgctcgccgctactttctgcttgttctgatgtttatcgtgtttgatgtttcttaattaatttgattagggcttttagttctcattcatttacttgtcctcgtcatgaatcgatttctgacttgccccaatttctctcttcgccctagtttattatcaaattgtacagtcatgggattcaattcgtagtgaatgggttagtaaaagtgaaattcagttttgtgtcatttgaaaggatgtttggtgattttgtgctttgttgttcatagattgtgcatgaaccctgttatctgctcagcttctttggactagaggctaatttaggttaagttgttgtactgactatatccatggaagtgctgttagttgttacagtggcctgcttatgcattctggatctcgtatcctgatttgtgttttataattttatttcactttacgagtacccgacgagtgaatggtccagaagaccacaactaagtttctttttcttaaagtcaaaaaatattttatacatttaatctatgattgtgaacgatttttgaactcgggatctaaattgtttttttatgtatatatatggatgtatgtaattgacagtggtttctgagatataaagttcgtcatatgcttctattgtttcgagggtgatttaattcaatgcatacggttgtgaccttaattgcttttaggcatgccaaacactagcttatgtttggcaagaatttgattagtaatgtaattgattaggagttgtgaaaattttgcatcgtgattcattagcatggtttccctggggcatcagtgtattgtgttgattatctggtttgcgtgtgaattataggggaagcactggcgatatctttaacttcggtcgat

SEQ ID NO: 104194 - DNA, 240 bp, Mimulus guttatus
  Intron number 1 from transcript mgv1a026889m (locus mgv1a0 26889m.g) derived from phytozome v7.0 (chr-ID scaffold_1; pos 3652356 to 3652595)
aggacgcggttaaaaactgctatcagttaggtaatttgttctgttatttacgtttcggatttcaaattatacttatgattatggaaagggatttgaaatcctcaacaacgatttaaaaaaaaaaactaaaaattagagctatagattgaaacaatccatttgattcaccaatcgttctatttaaatgcacatatttttatatgattcttctttatttcgaaatgcagcacatattgcaat

SEQ ID NO: 104195 - DNA, 1042 bp, Mimulus guttatus
  Intron number 1 from transcript mgv1a021288m (locus mgv1a0 21288m.g) derived from phytozome v7.0 (chr-ID scaffold_82; pos 260324 to 261365)
tgtctaagggatataatattgttggtctttcccaggtaaatgcattttcttctcaaaataatagttgaaaaccaacttttaaaaattgaatatattaacatatgatagtaaatattggcattgaattcggaatatttaattaaattatgaaaattagatctgactttttgaatattggcagtgaactttaaaaaaaggttaaattacaactaccttcctgaggtatggttaaattatgaaaaaacccctcttgtttggataattacaatcaccccttaattatgaatcttcttacacgtccacctttacggtttcaaatttggtggaatcttcttgattatatggaatattatcacttttgtaccagttttatcccatttgagctccacattttgaagcaagatgattataagatgtgttttttggtttgtatacatcagattgtggtgcatcagaaactgtatatttatacaaaacgagtacaaactagagcacattccctcgaatctagatgattatgttgaatttgacaccataagattggaggtgtaagaagattcttagttgaggggtagatgtaattatccaaacaatagggactttttcgtaatttgactatatctcagggaggtggttgtaatttaccctttaacaaatttagtgagttcacttttaccaaaatatgatggtaaattatgaaaattagatgtgaagaacttttgtacattggcagcgaactttttaaaatttgtagtgagcttatgaaaattgagcattttttttaaattgaatgttttaacaaaatatggcaccgacttttgaaaattgagaatcgtaacaaaatacgacaatggcgcattgcgcgcctcgcacgagacttttaactcataaaaatgtgggatatttttataaaacaaactagctataaacttttatcaacacaaaaaagaaattgatgtcctgtatagcagattaccccctatttataacgaaatttattttttcaggggagcctgatcggtcgaggaattgtggagttctg

SEQ ID NO: 104196 - DNA, 278 bp, Mimulus guttatus
  Intron number 3 from transcript mgv1a009033m (locus mgv1a0 09033m.g) derived from phytozome v7.0 (chr-ID scaffold_206 ; pos 278933 to 279210 reverse strand)
ttcattgcttagcaggtctaattaaggtacttttttcgctacctcttcttactcgatgcttcgcttattcataatcgataaaccatgaatttcatctagacttgttaatcagtatggataaaaaaaaaattgaatctttacaaatatttgcctcaagccgaggcagatgaatcattttgcttcgacttagtacataactcaaaactgttttttttttattttttttttatttttattttgcaggcctggtttagagaacttccaagagggatattgga

SEQ ID NO: 104197 - DNA, 784 bp, Mimulus guttatus
  Intron number 2 from transcript mgv1a012090m (locus mgv1a0 12090m.g) derived from phytozome v7.0 (chr-ID scaffold_8; pos 2258084 to 2258867)
gaaagcttaacattcttgtaagtccctcctccgaaaagtgttacattcttgtcattgttttttttttatttgattttttgttatttattttgtcttatttcgtagacccaccctcggtttttggtatgtgtagaaaattgagatttcttatgctgctattgtttggttaaattaatggattgatgaaacactttcttgccttagttcaggtttgtactttgacatttgcgaagttggaatattatttttcatctccatttcgaattcgaacctgatttgaaaaggagcgaacgaacataatacttgtcctgcatgcaagcgcacaaaatcgcaagttttcatcatctgcttatggaaaccaacttgaacatgtaatttgattttgaatgttaacttgttaatcttgattatccagtccaaagcagggattcccgaagctatagctattcgttgctatgatgtgattagataatctttcaatttcaatcatgttcttttgtggttgccgaaaatgctcgtatgctgtgaactaatagcagaaggtgttactaatgtccaggtgtatatcatatatagacaaagttgaactccatacaaggagaaagaggggaagctttacggttacagtatcgatcgttaagatacttttttttttttttttttaaatgcagaatattgtgtctgattgtttttatcttgcaagaaaacgaaaagatctgagactaactggtacaatttttgatgtgtagattaataacgttgggactaacattaggaagccaac

SEQ ID NO: 104198 - DNA, 535 bp, Mimulus guttatus
  Intron number 3 from transcript mgv1a011182m (locus mgv1a0 11157m.g) derived from phytozome v7.0 (chr-ID scaffold_24; pos 1904875 to 1905409 reverse strand)
cacgtatttctcttccatcctaaggtaagagtcaccttgccaactgtgtattctaattaatagattaaggcctcgtttggttggggagattagccatgattaactaaataataggactttgtttgatgtttcgtaaactactaaacccaataacttcccgggtcgacccgaaaaatattatgttatcatgccttttagggatcattttgggttttgattagattatttcatctttatcttggctaatcctatattggcaaccaaacgaggcctaaattcactctttgtctctttgttctttatttcccttgccgcttttttctcgtacgctctagtaggtttgggcttgcacgaatcttgatgttgaagaatatttgttctaagaagcctctttgagttgtgtatataagcggaaagagacttaatttagaaattatgttttcccgtgtttttttttttaattattatttaaactatattctttatctttcaataaccaggccctgacgttggtacttctggatcttccgggcct

SEQ ID NO: 104199 - DNA, 792 bp, Mimulus guttatus
  Intron number 1 from transcript mgv1a007849m (locus mgv1a0 07849m.g) derived from phytozome v7.0 (chr-ID scaffold_81; pos 818073 to 818864 reverse strand)
tttcttgtctgcactttgtgttcttcttgtttaaggtacgaacccttttttttttttttttgagcaaaatctttgatttttgttctgttttcttgggtttttcgaggttttaattcatgggttttgtccgatctgacatttgttttgcttgtagaatctgaatttttttttttttttttttttttttaagattttgaattgttgtctgattcttgaccatgtctgatttagtttttgggaagttctgcagttgttttaagagtatgagatgattatttcagtaggaaataatagggttttgacttagatctgaactgagttttggttctcaagttagccgtttgccttgtgaggggcatttatgtcatttcaacgttatttggtaactgttttctactcgtttcagtatgaaaatcaatggaaccttttacttcagatttatgctagatgtgctctgtaatgggtttctttagtgatgtttctttaagaaaatggttgatggttaatgatttgattctctattgagattctctcgatcctcgaaaataacacgaattcttcgatttgatgtagtattttgatataattgttgctgtatagactgaatctagtgtctttatccccttttaagaaatgatccagtttggtgtataatacttctgcagccacatattattttttatctcgtcaacgattgactcgaaattccgattattttgcttttatccagtggatccgaataattatttgtttctcaacactttttatttccttgcatgtagagagaggaaa

SEQ ID NO: 104200 - DNA, 360 bp, Mimulus guttatus
  Intron number 1 from transcript mgv1a017506m (locus mgv1a0 17506m.g) derived from phytozome v7.0 (chr-ID scaffold_4; pos 518829 to 519188 reverse strand)
aacagcggaagcttcgccggtcgccggaatttaaggttctctccctcattttcaacgcgtttattattattattatagattgtttatgtatatgttatgtatatttatgtacttattcattcaataatttcgagggttcttatcaatgtctcgatccaattgaatggctacaatttcatttgaagttttcgtactccatattgttttcatttcagatcgtctgtaactctttgtttttgcgcaaaaaaactgaaaatttgaagtagtgattttgtaccagattgggggatctgcttatcaatttttttcttttgattctacgcaggtaaagagttaattgagtgatatatcggttgaaaa

SEQ ID NO: 104201 - DNA, 971 bp, Mimulus guttatus
  Intron number 1 from transcript mgv1a005282m (locus mgv1a0 05282m.g) derived from phytozome v7.0 (chr-ID scaffold_16; pos 138509 to 139479)
agaaagaagcaagaaccaacttcgcaaaatttcaggtattgagttgatattgttttcttcttcataagagttatattctctcttgctgaatcttgtgtaagccgtgaaattatataaaaccactaaagcagaatggtgttacttcagttttggaagacaattcgtagactttgtggtagttgtcagaatccaggagtcagtccaaaagaatgcagctgatctaaatttgaaagttgtgttctcctaaattttctattaaaatcattttaatatatagtattttcataacaggaatgttttatgtgccctgttgatggtaaaagtgggtgtaacaactttgaaaaataacacatgtttgcacaactgcatttaacaaaactaataagaatgtggcgagtagttgtaagatgaagttatgatggaaaaaaagtagattaaatcttgcgaaataaggggtggtctacttcagtttctctgcaagcaacacgtgttggagaaatggcagatcaatatagggagattaaaaattgtgacatcataatatgaagctaagacagttttgctccacccccaaaatttgattgtatatttgatctcaaaacgttttcttgtgacatcaaataaagttagattgtcaggtactaaagtttcctaaaggtaaatttgggcacttgaagccgaataatcttttctcagcacgttactaagtatctgatgctaacgcagaaaaaaaaaattgtgagataggactgcatatagctaacaaattgatgttgtgaccatttgatgctacttgattattcaaaaaataactgactgagtctcaaacaagttgtcatcacatgtacgaccgatactttaaagaatttatcgtaccaatgtgttatggcatggtaaagtgcagtatttcttacatgcttcacgtattttaaaaggtttatgattctgatgttaattgggctggttcagga

SEQ ID NO: 104202 - DNA, 590 bp, Mimulus guttatus
  Intron number 1 from transcript mgv1a009708m (locus mgv1a0 09683m.g) derived from phytozome v7.0 (chr-ID scaffold_174 ; pos 202158 to 202747 reverse strand)
ctctctcctccacacacacacaacacacactcaaggtgttcttcatctttctttttactgatttatttatttatgtgtaaaatccaactcttttgtctaatgtttaattcaagcaaaatgataattttatgttaccaatacataccatttgtttactcctaagtgagtttgggtagagaaacgtcgtaaagtatactataatctcgataaattaataacgtcgattagataattttttttttatgtcctgattcgataaaagaaaacgtactaaattattagtttatatttgtttattgttattgggtttgttgtcgatttggatgacagggttgttgctggatgctgattattttcactgacttttttattttattttttctaatttttttaaattgatctttgattcagtgtagtaactattgtttagtcatattaccaatcactccaactgaagtggttggttatccgttatagtaacaaccaactatgaaatgatctgacataatagaattttgatcaagattcttcttttactataattttgatcaggattctttgtagggactcgaaaagaatcgtatacaaca

SEQ ID NO: 104203 - DNA, 337 bp, Mimulus guttatus
  Intron number 4 from transcript mgv1a005386m (locus mgv1a0 05386m.g) derived from phytozome v7.0 (chr-ID scaffold_2; pos 2698625 to 2698961 reverse strand)
agtacgacttctcgtttttttctttctccattttactttatgtactcgtgcagctttgaattagtgcccatcttctatgatgttacatatttgctgattttttttagatttaacttacgttaatatatatcgtcgtgtaccgattatgtgtgaacttgaagcagtgtaagcgttgatacaataatctcagcattaaaatcacttccaaacgtcattttcttactaaagctaataaccgatttaaaggttgtcttgtgaacaggctttcaggcgagggcagataatatgtattgcattcttttattaattttggttttggtttgttaggtacatcgac

SEQ ID NO: 104204 - DNA, 680 bp, Mimulus guttatus
  Intron number 2 from transcript mgv1a019636m (locus mgv1a0 19636m.g) derived from phytozome v7.0 (chr-ID scaffold_205 ; pos 269225 to 269904 reverse strand)
agaacattgcccaagaggatctcaacactattgtctgattttcattagttaatgtgactgatacttagtcttctttctattgtttgcttgtgatttcctgaattccgactcaccacttgttttttttcttccttgcatgacatcgatcattctctgcttatgggaatataacagcaagagatcgatttgctaaaggtaaatttggcgtgttatatttaccggtactgtaaagtaaatatatccgaagaaattagtataaagtgttagctgcgataatgttgggtctgtttgatgtgtatattaggtaaattttgtaattagtgctaaataaaaaggttgatctcaaaataacatcgttcttgtggctcaaacccttgatcacaaataacagagtttatgtgggtcaaaagtgtgttctttttaggatttatgaatgtcaatctcatgattgttcaagatttaatgcatgaaaaaaaataatgaccacatcttttccatattgttgttatgttggtatcacattatgctgtaggatttcaactttctactttggtcttcatgctgcaacattttaaaatgagactgcattactgtgaaattggtttctgcttttattcttattgatatgtggcctatctcttgcagaatttgaatcataagaacattgtgaaatatcttgg

SEQ ID NO: 104205 - DNA, 718 bp, Mimulus guttatus
  Intron number 1 from transcript mgv1a002756m (locus mgv1a0 02756m.g) derived from phytozome v7.0 (chr-ID scaffold_91; pos 238067 to 238784 reverse strand)
cagccccatatcacttttgatcatcctccgattaggttttttttttcttcctgatttccgattttgtttgatttttaatcgaattataaattgggggtttcttgattagtcaaccaattgggtttttttctggcttcataagttgaattaaaacaaaattgagttactctgatttgttgattatcattttcaaactgtgctgtattttgaatttgcagtttgcattgatccgaactcgataattgcgtattagggcttttttcatttgcaatttgctttcaactcacctccggtgaattttgtgtgcttcatagctattgcaatataaaatgtgatacactttagatatgtggttttcggttttctggttagcttttacttctcttctgcaaattttagatatgttctataagaaatgaacatttatacgtagcttcctcttcgacacaaatttacatatattcttgcttttaaaaaatgaattgtaaatcggagatttcttgattagtcaaccgaatgatcttgctggttttttggattcccattatcactttcactatattgtatatggattttgcagttatatcgatcagaactcggtatatctgtgacacgtagaaaaaaaaaaagttgtcactaaagttaaacgttgttaacattaaatttacgctcatttttcgcagaggacaggtggataacaacagattaagtccgtccc

SEQ ID NO: 104206 - DNA, 468 bp, Mimulus guttatus
  Intron number 3 from transcript mgv1a026665m (locus mgv1a0 26665m.g) derived from phytozome v7.0 (chr-ID scaffold_155 ; pos 285368 to 285835 reverse strand)
caacggatttggatattacgtcccttgttgacaatgtaagtgtagtaaatttcttgtctgcgaatttaacaaacaagctaatttttttgtcaaataagattaattcaatcaagataaatagggtggctcacaatctctaatttaattttcttattcttctctcaagaacaaatatatagtttgatgactttgaaaattcagagtctgatcgttgacttgttcttctactaatttgatcttcaataatgttatttcaaggatcctgcgacttatatgttgaatcaaatgctatgatttgaccaaatttgagctctttgatctcgacttttttgatggatttgatcctttaatcttcgataataaaggactaaatctctaagtagaccaacatagatgactgatattacaattttgccaatgtatatgaatgtatgattgatgagactaatgtatagatgttttccagac

SEQ ID NO: 104207 - DNA, 984 bp, Mimulus guttatus
  Intron number 1 from transcript mgv1a015275m (locus mgv1a0 15275m.g) derived from phytozome v7.0 (chr-ID scaffold_120 ; pos 480194 to 481177 reverse strand)
gtaacttctcctccaccgtcatttcctctaatccggtatattccgtttcccctaaaaccttgttattcttcttatcagtatatatatatacacacattaatggaagttgctcaatttcatatcttaattgttcttttcatgtgaatttaactagtatttttcagatatgattttagtggaaattatgccttttattaagagttttttttttctagggtttctgtttcattagttcgtgcaaagcaacttttttttttttatttttttatttttttttaaacccagatggaagttacttatattttatggattttaatattcttatggaaattaaattagtatccttgttggaatttcttagttagtccgaattccgaagtcactaggagaaataaaatgaagtgatggctatatgtatgtatacatatacacatatttggtgacttttgtaattaaatgaatctgatgcagcagcttaggaagttagagcgatgaagttacggaactttcattgaaactaaagctgttatctttttttctcagaggttgtagtaacttgagcttatgtgaatgtcaatccaatcgtaatcagacatttctaagatttcactagcaccatcacttatcgatcatgaattgaaattccattcgcgttgagctcttgagctcgtacactttcaatctttcttggtggttgacttgggttctcgtgtaataaaccaaacaggttggcaaaagtaaatacgatccatatgttaggcattaaaagaacttaaagagtgaattacaaatcagtgaagttaatgggcaatagacttttggttgtgttttccctatcgtcttaatatcaagtttggcctacttttaaaaaagaaagggtgtttgatttttgttgaatgtcgaagatatttattcttctttttttaatctttatcagtttatcgacatttaagttttacatgttgacaatttatgcagggaagc

SEQ ID NO: 104208 - DNA, 862 bp, Mimulus guttatus
  Intron number 1 from transcript mgv1a017065m (locus mgv1a0 17065m.g) derived from phytozome v7.0 (chr-ID scaffold_64; pos 379404 to 380265)
attatccggcggcttcgccggacttcttctctttcgtgagttttcctccatttcctccattttatttagctatgtcgttgctttgagtgcgatagatttgatatcagagtatgaattaataattcgtattatagctataagaatccctagatcgtgttttctggcactggtttctttaatttggataattagctgaattatcgaattatttcttctattgcattatgtttgttgagattacaggttattgtgtcactgcataccacaaattttacactatactgtttgttccgtaaagtactgatatgaaaacagggaatatcgaaacagaattcgtcatgtgcctcgggccctcattcgtcgatacgcggttgttggttaatagatgtagctgttactctattctcttgctagtttgatgattgcctagggatttaatttgtttttttgcaagagatctgcaattaatgattgtggcagcattttccgtggtattgtagttgttgctccagttttgtattgttcagtctttaggttttttgttaatattcatgatattacttgctaaaagttaatcaaaaatgttcgtcgatgcagaatgaattttgtttatctttttccttggattttctaagtcaatgataggttgcagaattagcatttagtagaacttcacatcatgttaggaaagagcatcataaatttcccgtttccttgtaaatctttttgatgccgtttatgtggaatgatgaatgtatctgtaacattaatctttatcttatcaatcaatttgaccgagctgctattttcttggttttttgcaccaggaagtcccgtgacacgctgggcttctgtagctttc

SEQ ID NO: 104209 - DNA, 688 bp, Mimulus guttatus
  Intron number 2 from transcript mgv1a012611m (locus mgv1a0 12611m.g) derived from phytozome v7.0 (chr-ID scaffold_114 ; pos 737066 to 737753 reverse strand)
tgcactattgcgcgatttggataaaagtttacaaggtaaatgtctcttatctgggttggttgtcataactacaaccgtacatgtaataatgtacttgagccgtttgcatcaccagtctgaataacaacccccttttgttttatttgggtggtacttcgatattttcactgttgattatttgggctctctttttttctgaattttttttagtatattcaaaatgctatgtagggtcgattaatctttatacggaacattgatgatcgataaatcgacataggaacctcttgcttcaagatcattaggatgtaattaattagctgataatgcaattgctactgcaacaggaaatctgtcaaacggcagattcagcactaattattttttgtgttttacattttttttgtcatgatcttaattcttaacactttttcattattccccgcctttctcgtttttcttcatgttgagttaacctagcaattcatgacttcctattttcggtgcttaaatattgcttgagtgggctatgtagctcttaatagtttgatttcctgtccatctgaacttacaaacgaacaaagaagataatatatcctgattttactaaaacaagatcgtattttatagtttcaatatttatcatgcttatttttttttttttgttgagcagaaatccaacggcaaa

SEQ ID NO: 104210 - DNA, 464 bp, Mimulus guttatus
  Intron number 1 from transcript mgv1a012611m (locus mgv1a0 12611m.g) derived from phytozome v7.0 (chr-ID scaffold_114 ; pos 737756 to 738219 reverse strand)
tcaatcagcgacgaatttcaagctggtgagtgcaattttcccctaattttgattttggtgtttttatggatttcgcttatgcggcatcgttttgaaaccctagctcatctccagtgatgcgattctacttaatcacccgtattttcttcaattgatgaattttatgtagtttaataaacgcgaattttcaaccttgattcatacactggggttgttttctggttaattggggaagaacggtttttttttatttcgttttcggttttcggttttcggtttttttgttttgtttctatcaaattgtaaactaaaggaatgaactttttctactcctgtaatcaagctcagtaaaatgatatgtttttggttgtaccagagagagttgctgaaagtctttcttttcgtgttttttttttttttttggaatagatattgaagcgttaccgaatatattgcagaggaag

SEQ ID NO: 104211 - DNA, 743 bp, Mimulus guttatus
  Intron number 2 from transcript mgv1a016083m (locus mgv1a0 16083m.g) derived from phytozome v7.0 (chr-ID scaffold_1; pos 2813284 to 2814026)
ttgtcgtcattgttgacgtcattgaccagaaccgggtacggctctccgattttttttttttttaatttgccgatgcattttgcttgcaataatatgtttatttttcaagttggtgtttcaattcaaatctggaagtgtacattttgtttagcatatgctttcgtttgaaagcaggttgtatgttttcctattgatcgcttatttgaaggattatgcttacttatggattaaatagtttttgctagggtttgggtatatgagtctatttcccatcttgattatgcggggatgatgacagtgagtttcatgggttactgagagtgagtatgtggttagtgtgtttagaaatgattaggcctcgtttggttggggagattagccatgattaactaaataatctgactttgtttgatgtttggtatccccaataacttgccgggtcgacccgcaaatatcatgttatcttgccttttaggcatgttttgaaattcaatcatgttaatctctttaaatagagggaaattaaaaaaaattgaattttgcaaatgattcgtgcttgccttcatctgtggtttatttgatgtcttcaccgagaataaacgattggctgtttcctcgatgcgtatgtgagttaattgcgtatgacaattcctataattgttctgttttgttcagttcatcttttgaaactttggtgccataactcttttgtgaaataacaggctctagtggattctcccgac

SEQ ID NO: 104212 - DNA, 727 bp, Mimulus guttatus
  Intron number 1 from transcript mgv1a022456m (locus mgv1a0 22456m.g) derived from phytozome v7.0 (chr-ID scaffold_198 ; pos 55525 to 56251)
tgccttttcattgctcgatctggacgttgaaagtaaggctgagaattcttatagagtgagaaaagggttgaattaaaacttgtcaagaactcaagtatacggttgtgaactttttagcatttgatttcttcgttatgtattgaataataacatttgcagctgatgaacaaacttcggaaccgattgaagcaaaatacaagatgccgctggtgtggattgacctggaaatgaccggtttgattcgagctttgaactgcttttgtttttctataacctgtaattattttctttacatagtttgttggtggcagtgaatatataaagctcggctttttatgtggaaagaatcggtttttttcatgcacggcattcttcttctagttcgaattgggaattcgaaaattgataaattgaactagggtttatacatgtcactttctgttacaatgtcacgaaacttggtgctagggtttacagatcatattcctcgtgttcgttgtaaaataaagaagagaagatttttgttgaatgttgcaatatattctgcaagttatattattaagtattagtagtgatggaattgcattttattttcttggtggctttctcaatttaaaatatgctgtatcgttataatccggatttggattcatggtatctatcctatttgatcagttggtttatttaatataactatgaatattattttatgggtatgtaggtctaa

SEQ ID NO: 104213 - DNA, 942 bp, Mimulus guttatus
  Intron number 1 from transcript mgv1a025861m (locus mgv1a0 25861m.g) derived from phytozome v7.0 (chr-ID scaffold_121 ; pos 745123 to 746064)
aacaccggaaagctcttcgaattctgcaattccgagtactctctctctctctctctctctctctctctctctctctctctctctctctctctctgcatgtgcccttccttctcaattttcggcttgccagatttgtttatctctgtatttgggggttttgttgcatgtgttgctcaatttttatttattttttatttttaatttaattcgagggattgggatgaattaattgaagcggatttatcggattggaattttgcatgtttgctagattgggtttttatttgggggaattcaagatttcagtaaaaaaaaaaaaaaaaaattaaatcttttaattttaggtgcaaattaattggaagaccccctcttgatttaaactttatttaattatttctctgaatttttaatctgttcagggtttgatataattaaacttgatttgctaactgtagttaccagatttaattaattttgttgttgtagtattaaaaaaatgtggttggttctgctattcttgcgaaaaatagagtttttttttttaagttagtgtaaaattgcaaaatttcatggtttgggagagattgggttttctctgtaaattgattggattcgtaatttttcgttcctatttgtgtcgagttttgggagttttcttgatcttggaaccaaaattttcacaacggaagtttgtaaaatacaatgtggctatatacggaacactacacgcagaaataaacaaaatttcccctgttttgcaattttttcgaagggttgttttgtggcagaacataaatggctgtcttttcggtcgttttttgtaaatagtcgaaactcgattttattactgtcttcgagggttttaattttattaatcttagtcgaaaaaatcaatctttcgaaacatcatatttaacaaaaaaagaattatttttttgcagc

SEQ ID NO: 104214 - DNA, 682 bp, Mimulus guttatus
  Intron number 1 from transcript mgv1a012446m (locus mgv1a0 12446m.g) derived from phytozome v7.0 (chr-ID scaffold_18; pos 653127 to 653808)
agactgcgccgccggtaaaccttttgttttttccgtcatctgttctgtaactctttgatttataatgtggtctcggttattttgttttttcttatttcgatctgaggcttacgatgcagtagttttatgtaattaaattaaatgtgatcctgcctagtttttctgctctgaattttgtacctgagttaagtgtaattgaattagggattgctggagtaattactctatgaatttatcgtgatctatttagatttcgcgttaaaaaggataaaaacataagtgattgtttctgtatatttgaaggaaggaagaaataactctgtaatggtcaaatttacggttgagtttcgattcggttgactttagccttttgattttgtgattataatttgttgctgtggtatagagagaaattaatagacatgaatgtcgatcgggttagagcgaaaagtccattgctaaaacgaacctttggtgtcgattttatgaaaattgcaatcatatcttgtacaatatttgatgaaaacacaatttagtatctatttgttacaaaagcaggaataaaccttggtttcgtcaaccatgcgaaccctgtagagcttctatattagtaatgatcacatttcacagatgattttagtttcaatgtatattccttatttttgcaggttgaccgcacagc

SEQ ID NO: 104215 - DNA, 892 bp, Mimulus guttatus
  Intron number 1 from transcript mgv1a008992m (locus mgv1a0 08992m.g) derived from phytozome v7.0 (chr-ID scaffold_127 ; pos 33217 to 34108 reverse strand)
cctcctaagcccgaagaattgcccgcttcgtgcaggtacgtacgtacgtacccttaataatttcaaatccatcgaattttgaaatccactatgcactcagtcaaatagcaaggtggatctaatctatgacacaaagtcgaacgtacgttaatttgaaggatttgtgtgataaaaaagtctagtgagatttacatctggattgaaggatttggagataataccaatatcgaatccacaacacaccaaatagattgaatttgtgaagataaattcatcgtgcaatggatttcaaatcactactacctcttatattgaacaacttttttcgagttattgtggtggatttaatttgaagtttattgcattcagtacctttgtgttataaagaatatatgatgcatttttcagcacacaaccccctaattggttcgtttttatgggatcgttttgctaatacaattaaagagagtgtttggctatgcttataagctattcaaatttgtttggtatttttctcttcaaacaatcttataaacaaaaaaaaaaaaaaaaaaaaaagaaaagaaaaagagtatttggtggagtgcttacctttttattaagattttatgatcagtaaaaaataacttatatgcttattatccaaaattattctaaaaataagatgtaacaacttatcaagtgtaacaacttatgttgtttaaaataagtatagccaaatacactctaaatcataggggcgatagttttttgattttctacaattagagtaaacacagggtgctacatgcaataaatccgtagtagttgtattgcataaacagagagagatcccaatattttcaccacatttattaattatgcagagatatacaaatagagtattcaagac

SEQ ID NO: 104216 - DNA, 980 bp, Mimulus guttatus
  Intron number 1 from transcript mgv1a010073m (locus mgv1a0 10073m.g) derived from phytozome v7.0 (chr-ID scaffold_55; pos 248112 to 249091)
caagggtatgtgaaaaatcagattcttgtttttttcttgttttttttctttacaagaaatgatttttagttggagaattagatttttcgataagttggaattgccgtgttgatttgataatcggaattatgttcttgtttgttgatttcgaaaggctagagaatttgaccggaatcatgagttgaatatgatttttgacttattcttgcatatgtgaaaatcggagaattcgatttttcttgttcgttattttttttttgaacttgatttttcaataaggatagtgtgatttagagtagagcccttcaaattttagttggagagtcaaatttttcgattagtaggagttgccttgtggatctgaaattcaccgaaactaaaccaaaatccggaaacccgaaacccaaaatccgaaacctcgaaaacccgaaacccgaaaccagaaaatcgaaactagaaaaccgaaacccgaaaacccgaaaacccattgtttgaaagttaaatttttcgataagtgggaatcttcgtgttgatctgaaattcaaacttattttcttgttttgttgtttatgagctatacaacaaaacaattatatatttttcatatataattgcagtcaactggaagaacagctggaggttgttcttttgaatataatttatgactaattgggatttaagcaatttatttttcatttgaatatgatttcttgacttattagcatttaaagcaaatttagtattccatcttatcttgtttttgttgactatttctaacatggttgttcatacccttaactttttgatctcgaaattaatctgaaattgcttgaggttgtcgtaaaaagattgcgtttttattttttcgtcgcgttttcttgattgttacgcaatgttcttgaaaattatgaataatttgcttcgtattattgttttaatggacagactctatcttctaccgatcttcgtaatccggaaat

SEQ ID NO: 104217 - DNA, 573 bp, Mimulus guttatus
  Intron number 1 from transcript mgv1a006096m (locus mgv1a0 06096m.g) derived from phytozome v7.0 (chr-ID scaffold_1; pos 4053676 to 4054248 reverse strand)
ttaatttggggctttcgctgttctccaaaggacgggtactgttgttgcctattaatttttaagttcttctttttctccttacatttcatgttttctggaatttcgttagggcttaactgagacaaattacgtttgataaattttacattctgagcattttctgaaactgtttgattagactaataccatattagctcgtaccatttgtttttcgctgattatattgggatagaaaccctagagtaatgctgccgattagtagttcaatttagatgatgatgtcgacaatgatgcttcgtttatgctgttacatttggaacacgcacctgtggatgtgaagtgtttaaatatcttccgtataatcgggataaatatctttaatcgaaaagcaaaataatgtacttgaagaggttaacctttcagtagactgtaatgtttgcagcaaagtttctggcttaattttcctagggcttctgttctgcgtctctatttagaacaaagactctccaattcatgttcaacatttggagagatttagcctaaagttacggtattctatattccaggtcaaag

SEQ ID NO: 104218 - DNA, 896 bp, Mimulus guttatus
  Intron number 2 from transcript mgv1a021984m (locus mgv1a0 21984m.g) derived from phytozome v7.0 (chr-ID scaffold_64; pos 839956 to 840851 reverse strand)
cgaagactgcagaagtgattctccaaccccgaccggttcccaaagattgcaacgagaatttcatgtagctttttcggcttttaatatcttagggtttgttttggtttttctaagtaggttttggtcgaacaattttcctcttaatttaccacttgtggagagtaaatatattttgatttatatcaatttcaagaaaaatattgttcaatttaatttataatttatatgcaaaaacaccactagatttggttatcttcaagtggatcctaatcaaggggataatccgagacggagaaaccacgaaaaaccgacgattgaataaaatttcgtcttcctcgtcaattataccaaatagttcggttcaccaccgacgattgaataaaattccgtcttcctcgtcaattaaaaaccgtaccgaatagttcggttcggtgaacggtagaaatgtttgaaggttttattgaatgaacacccctaatacaataaaattaaaaaaaaaagtttggttcacgcccagtgggactcgaacccacaatcgcctgattagaagtcagacgccttatccattaggccatgggcgctagtttggcaatgcagctcaaataatataatatatccaaatacgataatacgtactttaatgttttattaaaaattaaaatcactcaccaatcaatttaaatttatggtaaataaactgagcaagaaaaacaaatatggtgacatgataaggtctagaaaccattgggccatcataatagaggttctagaggagccctacgagcaaattcagtttgctttataggcccaataaataaacttttgaatcaaggcccaataagaataatatttataatttttattttaaattaaatatatatgtattagttccattt

SEQ ID NO: 104219 - DNA, 834 bp, Mimulus guttatus
  Intron number 1 from transcript mgv1a001566m (locus mgv1a0 01566m.g) derived from phytozome v7.0 (chr-ID scaffold_129 ; pos 642253 to 643086)
atccccgaaaccctcgccgacctccattttctcaggtaactcacgaattacagctgtgatttctgctggaatatataattgtaagtttaattttttagctgtcatttgaattaattccccagaaggggaacaaaaattatttaaattaaattcccctgtttttcttctttaggctttggaaattagcgaaattgagaaaaaaaaaattaatcaattctttttttttttttttctttttttgaacaaatcaattcgttttttgattaaatcaaaatggtcagtttacttgatgttacacttgattatttacactgagtgaattcgaacaatactctacacataattacacacacccatgtgtacgtgtgcttagtggttagttatttaattaaatttacagtttattttaaattatgcactagacataaataaagatataaataaataggtgtagcatctaacttatcagttttgatgtggggtttgatgctattattatgatgttttttattatgaagaaagtgaattattaagtgccattaatggtggaccaatattttctgtcatcatttatgaggattatccttctttatttcaattaaatatatataaatgcatgacactttaatattccaaattcttcaaatttttaaccatataagataatttgtcggcaattttttttttattttttttttatatattttactatatttcatacatatctaggtacgttcaactgcaggaaatttatttatttatttattttgttttttgaaatttgaaatgctcgggattaactaaattacaatctttgcaggtacgttgatttag

SEQ ID NO: 104220 - DNA, 727 bp, Mimulus guttatus
  Intron number 1 from transcript mgv1a004258m (locus mgv1a0 04258m.g) derived from phytozome v7.0 (chr-ID scaffold_66; pos 891414 to 892140 reverse strand)
ggttttgaggaatcttggctctcctttgcatgtaaactttgatttttttatttttctgattctttgttacttgatctgatttctgtgtcggaatgtacagaatcaaagactgcccctttttgtttttttttaacagttatttgtgaaattacacttgatcttcagtgttgattgaagaaacaatacttgttttttgttgatcactgaagatccttgttcatttgtgttgttaaagattggatttttatggtcaaatttccttgatcattgttgtttttaattcagaattttgatttttgacaatcacaagcttctgggatttttgttaagtgatgcgtgttcatgaaaattagcttttttttcggtgtgaaaaatcggttcttttttcgggcttcttttggtgttggaatatccctttgtgcacgttgttgtatgcttcataaaacagtattctttatttgtgttgaatgtatttccctttttagatactcatctttgccgaaacttcgtatgttttgatcaaatttgcccgtgttcgaaagttcacttcttgtctgtatcattgttgattattcacttccatttgtaatgtgcttgtctgaatatgtttgagtgagtggtttcgtatctgatgccttatcttttaatcaagaaaatgtgtatttgacagttcctcctatgtaaacttgcaggctcggtacgagattctccgatcaactaataactc

SEQ ID NO: 104221 - DNA, 400 bp, Mimulus guttatus
  Intron number 2 from transcript mgv1a005898m (locus mgv1a0 05898m.g) derived from phytozome v7.0 (chr-ID scaffold_7; pos 141026 to 141425)
ggtacatttttttctttctgcttttctgttttttgatttttcagtcatctctgtttgaagaaatgcagtgataatatgcgaagtcggtcttgagattttattcatatgcatagctagtgaagtatcttataagcattcatttcgttcccccagttaccaagtggcgttgaaataaacaagctaaaaatgtatatgttttgtctactgttaatgttttccattgtggactttagctgcttaaaaagacagaagaagctcctgagccgtttgcatttcttttcttattttaaatagttgtgttcaatcatcttgtacaatgcctattttggtttgttttttcattgctcctgatattgtttctttagccagcgagcagtcacaacagctttgtggtgcaact

SEQ ID NO: 104222 - DNA, 678 bp, Mimulus guttatus
  Intron number 1 from transcript mgv1a010511m (locus mgv1a0 10511m.g) derived from phytozome v7.0 (chr-ID scaffold_1; pos 3201168 to 3201845)
ccgaaactttctccagattgaaacaacaaggaaaagtaaggtttttcagattttttttttcccttatccatttctattttattaattaattttatcttcaattgattttattgaacctgttaatggatgcgctgtcgttttgttgttgattgcctccgtgaattttcaaatggggctcaatgaaactctttgttgatagggtttcttagtggctttccgaattcagtggcctgtttctcaattatgcttttttagatgttcttgtttttatggaaatgcaatgcctttttattctgtgtcatgctatcaatttagtcactgaatgactgtaacacatattatgtaaatcgatctcggaccgatattggctttgctattttgccgttttaaccaggaaatgcaattcatctcgatgcgatttttagctgcaatgtttcacagtgacatattttgatgcatatatgctgtcttacaactaatcatgatggaattccgatgaaaaatagttgatcgatagtttttcaagaatgaattaatgtatctttttctcaaatattcagatttataatcattttgttttgtttgtgtgtgtgtgtgtgtgtgtgtgtgtgtgtgtgtgtgtgtgtgtgtgtgtgtgtaaaaggtggcattcattccatatatcacagctggcgaccc

SEQ ID NO: 104223 - DNA, 761 bp, Mimulus guttatus
  Intron number 1 from transcript mgv1a014236m (locus mgv1a0 14236m.g) derived from phytozome v7.0 (chr-ID scaffold_60; pos 848431 to 849191 reverse strand)
aatccccaaattcaatttacggattcactgttaaggtgcgcgatttagtttcaatgaaaatttcgagattctgttttttttttctttttctttcttttttttttttttttttttttttaatttgtaatggtttgatttttggttttaccagtgagtttccatgtacattgtatcactgagttatgaacaatagaaatatatatatatatatatatatatatatatatatatatatatatatatatatatatatatatatatatatatatataaagtttttggtgaatttttttggttaaataggatttaagttttggggacaagggttttggacaatagacaaaattgtggctgaaatgaacaatgctcaagaaacacgacaaatttcaggcgatcgaacgtcgtttacgctatcaaacgtccctttttgctatttaatgaaaattgtcaaacatcaacatcaattcgtaggaactcgaatctgaaatccgtaagttgtgttatttctaaaattcggagttctaataggattagtatttctttcgtttttgcctttttttgggtagttttcgtattttcatagtttaattagatttttcagtttgctgacaagaattcggagctctccataaatacaattattttgagatttttctctagtttccggtagattccgaatttcgtttgttccgaattttggtcataaaacacgggctttttaatttgcatgctaataatcgaaatacaggatattcgtggga

SEQ ID NO: 104224 - DNA, 510 bp, Mimulus guttatus
  Intron number 1 from transcript mgv1a007359m (locus mgv1a0 07359m.g) derived from phytozome v7.0 (chr-ID scaffold_16; pos 1506065 to 1506574 reverse strand)
ccggactctgcccccacgagcttttccaactcaccgtacgttttatacaacgctcatccagtggggcttcgcatttttaattcgttccattttactgtattttcttgctcctttttatttttatttttaagaaatggcaaagcatgcaacggattgatgttagggtttgatttgattttacttttcaatgttgctttcttctgttcaattttgagttaatcatcatcacgtaatttgaagttattatgttgattagttttaaaaagttgagtgtatgattttcacggagttttggaagttcgactgtgcggtttattccataactatgcagattgttctgttcaattttgagttaatcatcacataatttgaatttattatgctgattggtttcaaaagttgtgtgtatgatcttcactaagtttttttcgagttcgactatgcggtttattccataacctcattttatttttgttttttttatttgttctttttttcttaatgcagaaa

SEQ ID NO: 104225 - DNA, 860 bp, Mimulus guttatus
  Intron number 1 from transcript mgv1a003609m (locus mgv1a0 03609m.g) derived from phytozome v7.0 (chr-ID scaffold_52; pos 859138 to 859997 reverse strand)
cgtctctataaattgcttgttattacaaccgtcaggtttaatatttcttctccacttgttaatttttccatttttgtattaattttcggtttgtttatacggtttcgattcgtcttatgttttccgggctatttaggttttgagacaataactttttttgtactgtttttattacagtattgtagatgctacatctgataaaacacattcagtagtattacactgtagatctacacgtaaactcgcaagtcattcatttttggctcgttaaccgtattcgattagtcttgcaatatttgtaggctttttatttctaaaaaaaccaaaaagaaaaaaaaaacacaataagatttaattagtttatgttgatattgttttgtcatgattcggatcgactttattattgttgtttttaactattttggatcaatttcatttagcattgcataaatttttcggtcaagtaagttcagatttttcattttttttatattttatatttaggagctttaaaatgggttgtggatacatgttcgataaatcttacaatattattaggctatttattcctccaaaaaaaaaaaagaaaattacaagacatgaaaaatttgtaccaacgttcgattagtgtatgttgatattgttgctaatggttttcgataaatttcttctgatttaaaaaaaaaaaatcatttcacaagtatttcagttaattaattacataaaaaaatattttcctcttagtaatttttattagtaatttttatttgggagcttcaattttcaaaatttactattcttaatattttcgaaatatttgtgcagtggtggagggctacttgcaatctcaaacagcagtg

SEQ ID NO: 104226 - DNA, 551 bp, Mimulus guttatus
  Intron number 1 from transcript mgv1a005815m (locus mgv1a0 05815m.g) derived from phytozome v7.0 (chr-ID scaffold_12; pos 2550658 to 2551208 reverse strand)
ccgttcaacccctcactccatcccattttcaactggtatactctctctctctctctctctctctctctctctctctctctctctctctctctctctctctctctctagctcacttgtgccagtactgccgctttacttttggtgtttttttttcttttcattttcgtgtgtaatttcatgaaatttgtcactgtttcttctctgacccttgcgtttgtgtatttactctgcatatttttttgcgaaattggatgaaattgttctgatttgcttgcaattttgttgtgtgtgtgtgtgtgtgtgtgtgtgtgtgtctgtttagttgaacgatttaaaaatatatatatattgtagttgtttgattattaatctcacgttttttatgtcaattttgtggcatgtatttgatttttagagtcttcaatttcagttacttatttgaattgtatgtgtaattatccttaaattattcccaatctttgatgttaatactgtttgctctgtgtttttgtgcagaaatttcttgacaatttgaggatagaagtttttct

SEQ ID NO: 104227 - DNA, 668 bp, Mimulus guttatus
  Intron number 2 from transcript mgv1a019252m (locus mgv1a0 19252m.g) derived from phytozome v7.0 (chr-ID scaffold_128 4; pos 2051 to 2718 reverse strand)
ctgtcggtcttactcttggccctaggggtaatttcttggttcactttgttttgtttcaattttgagctgactttcctgaattgtttgtttgttctcttcagtactatggtgttgtgggatgagtggagagtaatgtaattgatgacgatataattgtttaaaaaattgtctgaatatcgataagtcttgatagtttcagtggtacacattactcaggtttgatagttcgatttcgtattacttttgagggaaattgatgttgattagttgttgctgattttagagtttcgttgtgatgattgctttaacattgtaatcctgcataagacgaatttgagagatgatatagttgactatttgtgtgagtaaattcatagatggcaatgtattattgtttatttttttgtaggcaccttttttaattggtgagttgcacgataaacaacacgtttatgctttttcttgtatgaagagaccagctatcttgtagatataatgtagttttcttggcttgaaagattgtagattatttagctagtgtgaattctgttaggtgtgattgtggtgactgtagaaagagtacaagcggttcattttcagcttatcgatttatgatttttatttgtgcttatgaatggttttcttttcttactattatgtaggaagaa

SEQ ID NO: 104228 - DNA, 673 bp, Mimulus guttatus
  Intron number 1 from transcript mgv1a001658m (locus mgv1a0 01658m.g) derived from phytozome v7.0 (chr-ID scaffold_48; pos 1191523 to 1192195)
aagcctccttggaccattttcggttgattccggtatgttttttttttttttttatttttttttgcaatctgataacattttataaaatatttgattttttcttctgaaaaatgttgcgtggtattaggaaataattcattcggtaatgtttagctgtttatttattttccaattttttgattgatttgcagctgaggccatatgccatctggatgtgatgtttgagtttctattttacattatgtttttcaatgcacattttatacccgctgccaaagttcaattaattttttaattgaagtttattgatttttggctgcggatgtttagtttttgcctgcaatgtggattgtttcctgttcgtaattctgcttgtttgtctgttgttgagaaatattttgtcaataattgttttgtttttcaatagatggctaattattgtttgttattaatgagttccttaattaggtcgatgagacgagactaaatgatgagggtagtaatcattggtttgctaattttgaataatcaaatagttaaagaaaatgattaatttacttttctttttaggttaaataaatagttgattgttcctaatgatgattttgtattaaatttgatgttcgatatgttttcagggttttcgtgaaaattctgtcgtagtcgcagcctt

SEQ ID NO: 104229 - DNA, 884 bp, Mimulus guttatus
  Intron number 3 from transcript mgv1a016839m (locus mgv1a0 16839m.g) derived from phytozome v7.0 (chr-ID scaffold_17; pos 1443774 to 1444657)
agaacaggttttcaatttttttttttccttctgtgattatcgaagaactcattgggttaatttgtttgaagtgataaaataggaaatttgagaatattggagcttggtttatataagtgcattgaagatagactagcacatagtgcaccggaaacacaaaaatcgtaaaaactgaatcttgataaataatgaggatgttcgccctttgaattatacattttgattgtggagatggcatagtgtatcggcatatttttgaagaggctagacacacattatcaggaatgacatatcttgtgtatttcgtaaactgtatagggcaccatctattttcattttgtgcgtttggattggagggatttcaaatccataataacaaattcgctggctcgtctggattgagtcatttgaaaaggaatttcaaatacgtagctctaatttttaattgggttttttagcaattgtagtggattgttcaaatccgtaaccatttggagtcatttgaagttcttccactcattccaaatccttcaacccaaacgcacccttagagtatgaaacaatgcatgtaagggaggtaatgaatgtaaacgtagctttagagtaatggcatcatgtacatttaagtaaaacaatgcaaaactagccctagagtttctttctatgcgcacattctatttttgcatttctttgaagctaattttggatgatttatgagcttctgctttcatgaacttattgaacgacatattatttgttatcttcgattcagctttttaccttgtgttttcttaactagagttgaacgagcttcaagctattaacatgcttcttttttttctgtgcaaagcagggtggtgagcttacctgcaaatctagatttc

SEQ ID NO: 104230 - DNA, 628 bp, Mimulus guttatus
  Intron number 1 from transcript mgv1a008311m (locus mgv1a0 08311m.g) derived from phytozome v7.0 (chr-ID scaffold_24; pos 627967 to 628594 reverse strand)
attggcagcggattacaggttgcctccaattcttccttcaaccctagtgctttttttttttgtttaaattatgcgtttgtgttcttccttacttctgtaatgcaatgaggtagagtaagtgtacttggaaattggaattagctagtcttagtgccattacaaaaatttgcttatttaaagagaatttgtggttgaaaaagatgctaaatttgaatactgttaatgaatgctgataaatgtcagcaatttcttcccaaaatttaagaaatatgttctttctaaaattatgcgaagatgtttcctttctttatgtgattgccatttctcgttttcgctcacatccatatcaacacgtttatcggttttgtgctttgaatataataagctttagaaagttactttaattttcttcttatgcgcatgtaaactccccctcgttttaatgttccaatgcaattcgttttccagacactttatataattattgtgttgtcttcttcgtaataaatcaaacagcaattacttctttcttagacatatcgttacactattgtttaatgcattttcatctcatctttcctgataatataaattcctgtctgtgttacgtgatagggagtggacttct

SEQ ID NO: 104231 - DNA, 334 bp, Mimulus guttatus
  Intron number 5 from transcript mgv1a001905m (locus mgv1a0 01905m.g) derived from phytozome v7.0 (chr-ID scaffold_17; pos 1802866 to 1803199 reverse strand)
tgcgtcaccggcgtaaacttcaccggctgcaacaagtccgttttctttatttaaaaaaaaaatagatttcctttaaagaaaaatagaaaattcaaagtgtttgttatacactatttgaataacaaagatcgatgttaaatcggaagacgaaaaaactttctatcgaatgtagagcgtaacgttaataaaatgattacgaatagtagcgtataatgtggtataaatagccaaattagtaaaattctaatacagtagaatctcgataaattaataacctcgtattttcgacacgcatgcagcaaagtgatcggcgcacagtacttcaacatcgggg

SEQ ID NO: 104232 - DNA, 1027 bp, Mimulus guttatus
  Intron number 1 from transcript mgv1a000842m (locus mgv1a0 00842m.g) derived from phytozome v7.0 (chr-ID scaffold_139 ; pos 423202 to 424228 reverse strand)
aaatcagagaaacggtaatttattcactgatttttttttgctctgtatgtttggattcactgattgttgtatgtaattgataaataaatcagtttagaatttgggatttgattaagtttttgaatgttaatttgcattttgccccctttagtctaaatctgaaagctgagaaccaaacaaggcctcgtttggttggggagattaagccatggttaactaaactaaatagatgattaaggcctcgtttggttggggagattagccatgattaatttgtttgatttttggtatcccaataatctgccgggtcgacccgcaaatattatgttatcatgccttatcttatttgccttttaggcatgtcttttattggatcttccaaggtccaataatacaattgggtttcattggattatttaattttatcttggctaatcttttcttggcaaccaaacgagggccttaatattatggttgaaagacttaggcctcgtttggtatgggagaatagccgcgattaacttaataaattggactttgttttatgtttggtatgcctagtaaatttgccgggtcgacccgtgaatattatgttaccattatcttgccttttaggcatgttttttattggatcttccgaggtccaataatataattgggtttcattagattgtttaattttgccttggctaatcttatcttggcaaccaaacgagggccttaatattatggttgaaagacttaggcctcgtttggtttgggagattagccgtgattaacttaataaattggacttttatttgatgtttgctaaacccaatcacttcgaaggtcgactcgggaatgttatattgtcatgcattcattattgttgtgcattatttaatcttatcatggctaatcgtatcctggcaaccaaacgtgatcttattcaattggctgaaattatttattatgcattttgaaacttacgtgtataacatggaaaataggttcaagactgctacgagatttcggcagagtacga

SEQ ID NO: 104233 - DNA, 618 bp, Mimulus guttatus
  Intron number 1 from transcript mgv1a009793m (locus mgv1a0 09793m.g) derived from phytozome v7.0 (chr-ID scaffold_64; pos 1245167 to 1245784 reverse strand)
gatctttcaggttttaatttatatatgtagttttttttttacatgcactgcttttttcctcgattttaattccttttccagtcaattttgtgtttggtgttttctttcccagaattttgaatatgttgatatgtaatttgaaatgggtgttttttggagcttgtatagtaatttttttgttggaagcattgctttagtttgattttagattatgtatgtatacatgtttttctgtataatgattgttttcgaatatttgaatcgaacttctataatctttctgaagtaagcactgcagattatataattttttttttaatttttacgtttcgatgttgtataaatgtgaattgagaataagtgatccatggacgataattgagaagtgatgtctttgctttaccttattaaatgcatttcgtcgggggtgagaattcagcaattgatattgatttcaactttcttcgagtattgatgaattgtatatggtaatttcagttggattgtgatttatgcgaggattgactatgtaacattattttatgaactattgattacaaaatattcccttttctctttacagaaactggacttcaagtttccattatcagtgtcgtg

SEQ ID NO: 104234 - DNA, 748 bp, Mimulus guttatus
  Intron number 3 from transcript mgv1a013182m (locus mgv1a0 13182m.g) derived from phytozome v7.0 (chr-ID scaffold_26; pos 667347 to 668094)
tattcgaaggtgagcatcttaaatcctagtgatttgatttacttgtgcaacttcattgtgttgtacgtgcgtttcttgattggttgtcttttagaccaagacgggtttatatgtcagaaatcttagtttctagcattcatccgtaactaatcttggtttcattcaatctcaatcgtttttattgcttccaacttgtagcgtagcttatgaagaagatttaattaaaaaagggtaattgtcgatcatggaacaacgttcattaacatataggataaatccttttttatctatatttagatcttcttgatcccacgtaagatatatgtttttctacaaagcatgtaaaatttactttgacaattgatgctacttctttctcgattgattgtcttttgtagatcaaaaaacgggtctgtatcgaagcttttcttagtttccactctgtcaatatttacgacctatcgtttttttcttagtttctactagtgtaatcttcttgagccctcataagatatatgtcttaaatctatcaacaaattgattgagaaatttgcccttgctagcatatacttagccgattgttttcccgatcaagtagcccttttcgattttcttcgacttcctttatcttctttcttgaggaatggaaatgactagaaaaattcttgcaagtggtagaaaattctacaagatattaacttttccatgtaaaaaaaaaaaaaaaaaaaggtgagaatcaagaaaagcc

SEQ ID NO: 104235 - DNA, 521 bp, Mimulus guttatus
  Intron number 2 from transcript mgv1a003207m (locus mgv1a0 03207m.g) derived from phytozome v7.0 (chr-ID scaffold_36; pos 802698 to 803218 reverse strand)
aaactcttattagcttgggacctttttacgtgaaggtaagttgtgtttcatattctgaacaaatggtttctgcgttttttttacttattatggtttattatctgttatattctctcattattgtttctatgttatatcatgaagaatacagcttttgaaattttgagtctggaacttgtccatctatttaaacagtcgaatctgtaacttattatcagccatgaagcatattgtaagccatggaatcacttaattcaatcattatgacttaaaatcttgcattttaattttttgcgtccttctgaaggttttttcagcagtaaagcatgttgtattacagctatttgacgataagtaatgcatgtagcgactgtgaggtgccaaatggtcattttttgttgttatctttgttgttatgataaagtgaaccgagctataaaacgtgatcaagaggatcttacttataacctacttttctatttgcagttgggacaagctttaagcactagaccagacatact

SEQ ID NO: 104236 - DNA, 1036 bp, Mimulus guttatus
  Intron number 3 from transcript mgv1a013829m (locus mgv1a0 13829m.g) derived from phytozome v7.0 (chr-ID scaffold_67; pos 363648 to 364683 reverse strand)
ttccacgccttgctatttagctgctgctgctgccggtaattttttttattcttccaattcaagatttactgtatttttgttttcttgattatgctgctatatgtttaataatgttgttagcttccactgttcggtgtttcatttaattgtgggtgtacttgctacatgttgatcactgagaatctgcatgtttaaattttcaaaagatgctagatacaaaaatcgagttagtgaactactcttcttctttctctctgctatgttaatagtgtctacagccggtcccagctgttgaatggtcacttcaaccaaaagtttaaactgttagtcaaatgtatcatttaatatcaatatctacaatatgtcccctcaagtgcagacgaattacatttgtacccttgcacttgaaatatttgaaacattttgttttttccgagagttgcaagggaaaaacaaaaatttgatcccgcgttgtcatatatattttcatccatcataaacgtgtatagtatttagtcaacagtgaagtttcaatctcgttctggcaatccatagcttctggtttttgatattcagtaggtcttgaacagtggatctcgacttctttgactcattctagtgtgtttttttatattctatcagcgaaaaaaggaagtaaaaaaggaagttaattttcacacctcccgcatgcatcattgaatcattgttttttcctatttctttctacgacttggtacaacttatgtttacgttagtgagatgttgatgaattatttcttgagtagtcgggattttctgttggacttttagtaaagtggaagttatcaatttgtgttgttctttttcccgataatcgattgaatgtttaggcgattgcaatttgtctctgaagtatgtgcatcttctcagttgtgatatgtaaacttgtgctacaacagctttctattgtatgcttttttcactacattttaacacctgggatttttccgattttcccatttgcaggtaattccaaagttagagaagctataggctt

SEQ ID NO: 104237 - DNA, 583 bp, Mimulus guttatus
  Intron number 1 from transcript mgv1a002165m (locus mgv1a0 02165m.g) derived from phytozome v7.0 (chr-ID scaffold_75; pos 61849 to 62431)
taatctccgatcgtcctgtttttgctgttttcgaggtctgataattgatctgtaccggcttattgttgtttatttttttattttggttatttttcgtctatatttcatttttcttctaatacggactgttaataacttttctggttacatatatgtgaattattgtatgtttggtttcctgggtttgttaatttactttttgttgtactgggccataagtttccacgagtgtttagtagagattttctttttttccttttgtgaatatttcatttagagccattcctttttgttggaaaaaaagtatgatttggaaacaatatatacagagctttttattgtgtgcttcagtctgagcaaaaaatagctgaaactagtatctttatgcagcgattatcttaaatgcttctatttttcatagttttggcaaactttgattgctcatgatatgtgaaaaaattgagctttactagtttgtttctgtatttggaaacgtaaataaatgctttctgtttccactttccattcgtttgtggttattcttacagaaagctgaccgaagaatctgagcagaaggcgggga

SEQ ID NO: 104238 - DNA, 849 bp, Mimulus guttatus
  Intron number 1 from transcript mgv1a002482m (locus mgv1a0 02482m.g) derived from phytozome v7.0 (chr-ID scaffold_104 ; pos 845134 to 845982)
tgggctcggcgcgccttgattcctgattccgatcggtatggcattagtttgaattattacaactggctgaaacagttcttatcgctttatttgaagaaacattttgaatgaggttttttttacaacttaaattaagtgctatcctcccttactcttgtgaattgcggtgttatggaatagttactgttcagtatgtaagactaaaattgcgtcatcggtttgagagattttattgtatatatagattttctgaacctgatgcctaaagttatttctgaaattttgtaggtttagtttgtctttcacatttattttttcattatgcaccaactagatctgcagatttaattgatgaacgtgtttgataagtgaaatcgatatattaattttcatctccatttttcatttatttgtattgttcggatctcaggttccattgggtaaaaagaaagaagacgtcaaaaataaattctgcctcgtcttcaacttgcacaatatactaatcttatgttagatacttcctctactgtaactaccatgaattatttttgaaaattaatacgtaactagtgagtatgattgagtaatcattgataagtctgacatttttattcactcgctgctgaaggaaaatattgttgatatgtgggggtgttatgcaaatactcctccctttctgctgttctttagttgtcaagtttatgtcttatttatgctccgtgacattctttgacagttcaccaaggtgtgttttactcgtatgactcgctgttacttcttgataatgccttttctttgcattgtaatacttcagccaagcattcgcgcaagcaggcaaggatccaggct

SEQ ID NO: 104239 - DNA, 946 bp, Mimulus guttatus
  Intron number 1 from transcript mgv1a013665m (locus mgv1a0 13665m.g) derived from phytozome v7.0 (chr-ID scaffold_148 ; pos 268324 to 269269 reverse strand)
ggtaaaaaaaccgaaaagaaatgatgagtttattggttctgttttcgtaattcttgattgtatgtgagtgtgtatttgttggtttggtattgtgttttcgttgtccgaattgttggtttcgaggctactcttgattcttgattcttgtttgtgtgtaagtgtatctgttgatttagtattatgtttttcgttgtctgaattgttggtttcgaggctaatctcgattcttgattgtgtataagtgtatttgttgatttggtattatgttttcgttgtccgaattgctggtttcgaggctactcttcattcttgattcttgattctttattcttgatttgtgattcttgattcttgattcttgattcttgattgtgtgtaattgtatttgttgattcattagtattgtgatttgtgtttttgttttctaggtctgaatgttgggttgggatttttattttattttattttattttttgtgtctttgtaatcggttccataaatagttttcctatcggcctaaactattgattcggttgatggttcgattggtgattgtgctttctgttgatatgcgtgtgtgtggataatgatcctttgatgttacttttgttctttgttatgtgtgatcaaaaggtaatttacggttcttatgagtttcattaaatgatttcatttcttttctaccaagtgctcgagtatctattcaagaggtaattggttataaaatttgaaatagttggttgaaaatcccgaaaacttgagctatgcaaaaacttggtgacaaatgtcgatttctaatcttcgtgctgattgattatacttcttacgattgagttctcgacttcttgtaccatgttttatttaattgtagaatggccgcacaatgacaactggtttacttgatctcataggtttttttctcttcctcggacttttaatcgatcga

SEQ ID NO: 104240 - DNA, 600 bp, Mimulus guttatus
  Intron number 1 from transcript mgv1a001796m (locus mgv1a0 01796m.g) derived from phytozome v7.0 (chr-ID scaffold_168 ; pos 348547 to 349146)
ttaagcccagcagcgatctcctctggcggattcaggttcatatatctatatctatatctatatctatatctatatctatatatatatacccttttttttccattaacatttttcatgagccattctacctaattataactcaattcattaattatggtaattaatttcttgtttaattttttatattgttaattttgtttgtcacgtaaagagtattagcaaagtggtacaatatttgagttttgatcaccccctgcaaaatgaatttctgttgattgatttttgacaatgagaaagttggtttgtaacttagtgccttctttttccactaaaattactgtttacttgaccaatatttgatttccagatcgattttattttctcctcttaatttttatttaattaattaattaatcaagcaaactttacttgaccaccacaaagtcttctttatatgctcgatttatcattcattacacacagacaggcctaacaaagttatattcgttttataattattgtcttaataattattggatttttcggacaaatatctaatattatgtatatctaaaaattaccgaaaaatgcagttcctgc

SEQ ID NO: 104241 - DNA, 691 bp, Mimulus guttatus
  Intron number 1 from transcript mgv1a001657m (locus mgv1a0 01657m.g) derived from phytozome v7.0 (chr-ID scaffold_115 ; pos 267275 to 267965 reverse strand)
aaatcgacaccatctaccagtccaagactgaaaaggtaactataattcaaaacaaaatcacgctctttctcttctagagttgcgaatttttccacccgtttttttttctcccttagcttaatctacttgaaagtatcaattgacaatacggaaagtaggttggattttgggggattttgtttgatatcgagctataaatgatgattctggatttgaattgtttcccgaaaatctatttgcctgaattctacgtcgagtttaaacttacaagtgtctatcgacgaactctttcaaattggtgcccttttcccatgagattgtaaatgctctcggtggtcaatatctagttaggaatgtggattttttttttttacttttttttttggttggggaaagttaggttacgatctcaatggaacaagagtttgttatgattactacaaatttctattgattttgtgtagagggaatcaggtcttttgcttctcaacttttttacttctagatcataatttaattttctctaaacaatgcatctaattagattgcccttcctttatggatcttcttttatctaactgtattatattacaattgtatatatatacatacacacatatatatttatgtttgagtcattgcctaaatctatgtagggaatcagaaagatctgttttgagcttttggatct

SEQ ID NO: 104242 - DNA, 466 bp, Mimulus guttatus
  Intron number 2 from transcript mgv1a013027m (locus mgv1a0 13027m.g) derived from phytozome v7.0 (chr-ID scaffold_129 ; pos 116202 to 116667 reverse strand)
agatccttatttttctcgacaccaaggtattcattcttcttctcccccttttctcagtattttcactcgataccttcataattatatgtcatttcgattgatgtatttttgatcaattaagtaggttgtggaaattatgtgtaccttgtttgatcggaatcttgtttctgacgaattgtttcgtcttgattgaatagattctttcgtggtgattattgtttgttctgttgtgctctttttaacacgtactactcagttgaatgtttggtaaaatcgcattatttataattttgtgttacaaaattgaaagcttgaaatttttgaataagcaattacagaaataccaaaatatgtacgaagcctgttcttatgccacctcgtcattgcatataataaatttatgttgcaagtgttgctaacaaatcatgttttatttgataattgactgactacttattgtaggtgg

SEQ ID NO: 104243 - DNA, 742 bp, Mimulus guttatus
  Intron number 1 from transcript mgv1a002533m (locus mgv1a0 02533m.g) derived from phytozome v7.0 (chr-ID scaffold_361 ; pos 71799 to 72540 reverse strand)
gaagctgcgatttttggggaaaccggtgaggttttcttctgtgtgttttttttttttcttccttcagttgcgttgacttcattttgaactgatctgattttgatgtgtttctgtaaagcttgtgctgatttgattctgtgaaattattcattagcttttagatttgatctgtgtgtatctgtgaattaggttagattttttttttttttaattttatttacgatcttcatctctgctgagccgctgacggtttcttatgcacgttctgccatttatgagggtagtgaacatttttttgagtaatttatatttggttatatgccttttttcagttgaagattcgtttttgtccgagagtaaaattggtgaaacatgaagaaattaatctgcttttgaagaagtagcaaataaaataaaaaataaaagattttgtttcttcaattttgtcacctgggattgggtatttgatgctctatttaatgctttttttggtaaaatgttttcccttctgtctgctgtagtatgcaaattattttcgggcataatacatgacggtaaatcagtggtagaatgtttttttttattgattcgacatgtctaaggctaattcaattgttttaaaagctatcaccgcatgtattaggttaaaccgaattatccccttttgtatctgagcacatgtttttttttgttgactcacagttgatcggagcattccgctgtagtaaaatttaaaaaaaca

SEQ ID NO: 104244 - DNA, 848 bp, Mimulus guttatus; identical to SEQ ID NO: 103815
  Intron number 4 from transcript mgv1a014265m (locus mgv1a0 14265m.g) derived from phytozome v7.0 (chr-ID scaffold_4; pos 2465075 to 2465922 reverse strand)

SEQ ID NO: 104245 - DNA, 693 bp, Mimulus guttatus
  Intron number 1 from transcript mgv1a011108m (locus mgv1a0 11108m.g) derived from phytozome v7.0 (chr-ID scaffold_92; pos 863748 to 864440 reverse strand)
gcggattcaagaaatccaagcaaggtcattattttattggttgaattttcgttatatacatgctttatgttggccgaatttttgattttttttttagtattttcttcttccccgcatattattttgccattgccatcgattccgagttgttttgaagttgtatttatggagtagtgctttattctctgtctaagttgagcttactgtggtttgggttttttgctgcattttgccctttgtactttttccagtgatttttatgcttgcgtaactgtactagacttgtatttgtactactcagatctcgtaatggaatgaaatactcggtagttcggaatgtgaaattttaaattattaagtgaacctgtaaatttaccaacttggtcgtaatttgggtcgaagctgtagaggtgtgtgctcttttgtgcttctgagtctgtgcgtttagttgtttttcggagttcgtttggttatttcaagaaaaaggctattatcgtgaattattcattttgagctggctcgattaagtccttagagaactctagcttaatttgttccgggtctgttcttggaaatacaacggttattgtcaatagtgagaaacgtgcggattcaatatacttttcaagtttggagattaattaacttacataaactttagctgaagaagattattaattttctgtaacagaa

SEQ ID NO: 104246 - DNA, 1007 bp, Mimulus guttatus
  Intron number 1 from transcript mgv1a025463m (locus mgv1a0 25463m.g) derived from phytozome v7.0 (chr-ID scaffold_125 ; pos 445046 to 446052)
caagagccagagaggaaacgacctgctttagctaggtgacaaacaagattaattatttatttctcatcattttttttattacagtttgtgtatctttttcttacttattttgggttgaattattgcaataaacctgttttgattttgtcgaaaagtggaaattggaatttatttattggtatgtgacatggcaattcatgtactaaattcaatgattgaagtttgaacgttgcccgttggttctcgattgtttcattatcagaaagtattattaaccaaattcttgaactaatttctccttgtgtattacccgcagtattgttagaatttattttctactgcagtgttcggttatacgtagcctgtctcacattaaaattattaggttaaattttttgattcttcatagatatctttgaaactgtaaacaaggttacaatagatgttcttttggtttaactttccttaacaatgtttctagtgcgtcctcccaagttttgtaggttttcgttagatgaatatggcttgcttcttaacctttatttacgacaaaagtaaataaataaataaaaactctctggtcagttccactactcagaaagtgaaatagggcctctcgtaacgcatttacagtttcggattttagattttttagtcagcgtatataacttttcgtttttctccctcgagtatagaattgtgaattaaaatgttgagaagaataagacatgatagtttgttgtactctcttatgcaatatctcgagtttttaatccgtctagtagatgtatatgggggctactaagtttaactcaagtgtgcaactgtgcatctgttgatcatgaatttccttttttagattttccgatttatctgtcttcaatattttttcagtgttaaacttgaatacacatggcaagtaaatgaaaaaaaaagacagtaatcattaaaaaatgtgtgttttttgtgcagcgttattgtggaagctctaaagttggatagtctcc

SEQ ID NO: 104247 - DNA, 563 bp, Mimulus guttatus
  Intron number 1 from transcript mgv1a008544m (locus mgv1a0 08544m.g) derived from phytozome v7.0 (chr-ID scaffold_174 ; pos 193188 to 193750 reverse strand)
cactcttgagcctcaaggtctgtttctctctctagctttctctctctttggaaacacacactcaaggtgttaatattctttctttgcactgattttgttctttggtttgtgggctctttctgaattgggaggaaaggtttttttttttttatttcttttttcttcctacaattgtgggatgatggggttatttgagttcagctagtgcaattagtgtagttactcgacttgtgtagatttgttcaaagattgtcttataggtgtgtctttgttgttggcaatcattggtagagtaaaacttgtctttcaagcacttatgaagctcgtgttagatttttcagatggtttgtatcttgactaaatttgtatgtttctactttcttgagattatttaccaacacaaactatgtaattcttgtttagttacaatactgatataccgaaaaaacttttttattatagtatcaaaacgaaataaaatcaagggagtgtcactgatctggtatgtgttcttcctatactattttgatcgtttgtagggacgtgaaaaatcaattacagtc

SEQ ID NO: 104248 - DNA, 828 bp, Mimulus guttatus
  Intron number 1 from transcript mgv1a003318m (locus mgv1a0 03318m.g) derived from phytozome v7.0 (chr-ID scaffold_67; pos 580101 to 580928)
ttaacccccctcttaatcccaaactcggggtaattcaatctactttttaaagttatcttctttactttgatttggattttggagttcccgttttggattgtttccactagtaaatcttcttagttaaattatttaatattttttagtagatcccgatcatggtcctcgtggatcggttcatgcatataatatacaaaaaaatcggaactcaactcctgatagttgatatcttgttaaggatggcttctaatgtcgagaaaatcgttttagcttagcagtctgtcaatcgaatgatatggagcaacttggacttgaattttgaaaggttgcggaaaggaaaagacaaaaaattaaatgttggttccgtagaaagtcttcaatgcagtaccataacccgatgctgattcaatccaacacttcaattacaataccatatccagttttagcaaatgaaaaaagaagatgtaagaccatatgaattatatgatttaacgactctaggaaaaagaattgtatattattatatgtctctttgtctaaatttgacatttttggcttcaaacgttttctgaagtttcttttcaaaattcgggtattatctcctcaccttttttgagcttgtgagttcctctctgagtatttctctggcattcatcagtaattggggaaaagcatgttacttccttctcttatttatttcggtttcaagactttcactgtaatgattcaacgtaggcgcttcactgctaccatctgtagctgtgaaaagtaaattgaattgtgtttctctaattatctgtatttttcctctttcaggttcaccacgat

SEQ ID NO: 104249 - DNA, 518 bp, Mimulus guttatus
  Intron number 1 from transcript mgv1a004018m (locus mgv1a0 04018m.g) derived from phytozome v7.0 (chr-ID scaffold_1; pos 3007130 to 3007647)
tttgattcctatttcttcgctagtaggccaataaggtatgctttaatcttcttccttccggtttccagtagattctcacttttttttttttttttttttttaatttgttaaaatatttgttaattgataattaaattgcttgattcattgaaattcgtgcaatgtaatttgccaatcttcgtaaatgtatgatgcacttcagctatcttatgggcaatcgtaattcacttgttgatttgttagctgaatgtggatcagtgatccatttttttattttcgtcaattttcaatattgcaatattaatccttgaaatgtatttagttataagttcgaacctcaccaatgatttcaacttttcttctatatttgttgcttaattagttgagttgaaggttgcattacatgcctttgtttttttaactttactacttcactcgaaggtaagagatgctttgattggaattttcgaatcttcttttatccaatttttgatatagtagaaaatgtaggtgtagca

SEQ ID NO: 104250 - DNA, 792 bp, Mimulus guttatus
  Intron number 2 from transcript mgv1a008825m (locus mgv1a0 08825m.g) derived from phytozome v7.0 (chr-ID scaffold_75; pos 743728 to 744519 reverse strand)
caagggcattctctcgaggtcaatattctgattcaattatgtttattacagtttttgctccgtagaatttcgttatgtcgaacaacctatatattgatttgaacgcgcatgatgtatcgattgtttgtagtgtcatgaatcactatattgttcttgtatattttttttcggttatctttctttggcataagaatctagtagtacttaactttgcaagtagcactggattttagttattgatgatgtaaggtattttaatctctagaactccttgcagataatacacaatttttataacgattaacaattactatctcgattttatacaattagcattgcacatgctgttgggggtctggccttcctcctttccccttgatcatgattttaattttggcatgttcaggtttttatttatttgaattcgggaagtatgttgcctcggctacttgtttttggtatattgccgattgagaatacgaaatattgcagattgaagagaattggaaaaacattgtattgattaattgcgcggtgtgaagcattggatcccattaaaagaactccaaaatgcgagaggcaatcaacattatcttgaatggaccagtaccaggcaggtgactgcctgagaagctccatcaagtgagcctctgtcacgccatatatcgttcgaggtttgaggattcttgtttaatacattgaattagagctccaagtatataccctttggagagaagttttaggtaccgtaattcctgatagttagtgtgttatgttacagaggcctttcac

SEQ ID NO: 104251 - DNA, 629 bp, Mimulus guttatus
  Intron number 1 from transcript mgv1a017191m (locus mgv1a0 17186m.g) derived from phytozome v7.0 (chr-ID scaffold_58; pos 463448 to 464076 reverse strand)
tcgtttatctgccctttgaacgattgaagtcagcggtaaaatttctcaacccaaatcataatatgttaggatttgcactctggatatttagatgttttaaccgtttaccccttctattgggtataccctcttctttatgtaaatcgacgttaaatctttctgtttgctgtcagaaattggaagaatggttacgaaatgtaatccactttttatttttattttttactttttgttagttgatttttagattaatattatcatgcattttaatattagattaggattgattatgctccgatgtgttgtaagtaattgatctgccatatgatgtctgggaaattgcgcaagggctttgagtttgtccatttgtatttcttcaaatgtgacagtgaaataattaccatacctattccttctgatggcagtattaataatgaatgattcttgtattcgcccgttttcacctatgtagttgcgttgcttttcttgaatattttgaatgacatgtgtctagtgttttgcctaatggaagttgttttctcttcttaagaactaaaattatgttttcctaattaattgtccaaggtactaaagtgaaattgaagtgaaaaatagtcttaatcgagatc

SEQ ID NO: 104252 - DNA, 450 bp, Mimulus guttatus
  Intron number 1 from transcript mgv1a000295m (locus mgv1a0 00295m.g) derived from phytozome v7.0 (chr-ID scaffold_11; pos 1330977 to 1331426 reverse strand)
gctttgtatacgccgctcaactttcttcgcctcaagtaacacatttctactcttctcctttgccatttccgcgtccaattatctcatgttttttgttttattttatttgttttattttatcataatttggtagtattaatttcgttaataaaatatgtcgtatctaatcatttacctgatgggtggtaatgcgttgtttttgcttgatggaagattatagagaaagcaactgttgaaaaatgcaagatttggtgcttgatgaatttgattgcacgatgaaaatatcggattgaactcagaaaatgtcgatatgtttttttacaacgtgctcgttttatgttcttcctctactgctttatttagtttgagaaatctccttttattaccagattgaaggagcatggaataagggtttgttgcctgctacagctcagctgattgatttagacg

SEQ ID NO: 104253 - DNA, 546 bp, Mimulus guttatus
  Intron number 4 from transcript mgv1a006804m (locus mgv1a0 06804m.g) derived from phytozome v7.0 (chr-ID scaffold_26; pos 1115667 to 1116212 reverse strand)
cacgattagtcaaacctactatacttcattttcaggtatgcttgaaaatgctttcgagaatcgagtatgcatatttaatcccagtgaagtcttttattgcttatatttttctctggctttatttcgtttcaaaaatgaattctgcacaatttgttttctttgtccctgtttgtttgcaattgatttttgggtttgtaaatagttgacttttgttatcccctcatgatctaatgcttgcatcttaggttccgaaactctacgctagttgactatgctaatttataaatcatttgagttccatttatgttatgccggtatttcatctttttatttctatacgatatttatttcaaagtgcttttcatgttcaagtaaaaccagcctcgattgttttctttgccaaggtcaatgatgttttccatgttttgtaataatgacgaattatattcttgattgagattgcttctctattaatcacacgatctttataacagttgttagtgatattattacagttaaggaacttggtgtgggctacgtcgaaac

SEQ ID NO: 104254 - DNA, 569 bp, Mimulus guttatus
  Intron number 1 from transcript mgv1a006804m (locus mgv1a0 06804m.g) derived from phytozome v7.0 (chr-ID scaffold_26; pos 1116777 to 1117345 reverse strand)
ttagttccgaaaacccacttctttttattactgaggtatgtctctattttgattgccttccagttatttttcttcgatttttcatgtttttcggattttatcttgtaccgtttgttgttggctgaatgattctgattagttctgcttcagaaattataatctttccttttttggtttgtttattgaaaattttcttcataattaattaattatagctctaaattaccccctttgttttcctaattctttctctctatttgtatttacactccttgtaagtgtaattaattgggttttttcggtttgacccctactcgaattcgattgccttttaatttgcaaaaatcagaggatttaaatgaaaatatatttctatggtggagtggtatggattttctctgggttgggagttctttaattaactgttattactatgattattgctgctgtgttgtcaaattttcgactgtttatagatactgtaattattctattacaagatttcttgttcttgtggtaatgagaaacaacaaaaatgtaggttcacgaaagaaagaagaaagaaaact

SEQ ID NO: 104255 - DNA, 389 bp, Mimulus guttatus
  Intron number 2 from transcript mgv1a000001m (locus mgv1a0 00001m.g) derived from phytozome v7.0 (chr-ID scaffold_24; pos 859133 to 859521 reverse strand)
tgccgagctcttgatttgattcctttcctgttggggtaagacaattctttttcggttcttgagtttctacgtatcaccgtttcaatttttttgttgttgtgattattttgttgtaatcgtaagataagctttatttgattttggaatgatatttgatattcttgagcaaaaactagttgcatttaaaaataatgttatttggggcatatgatgctaatgaaattatatgacagaagttgcatgttcgatggaagaacataatgtcaaaatggagatgagttatagagatgatatttggcaccatttccttctctgcactagtataagttataacacctttcttctctgctgcagggatattttaaattattttaaagctgctcctgctc

SEQ ID NO: 104256 - DNA, 752 bp, Mimulus guttatus
  Intron number 1 from transcript mgv1a012106m (locus mgv1a0 10820m.g) derived from phytozome v7.0 (chr-ID scaffold_45; pos 126687 to 127438 reverse strand)
aagcggaagaattatcatcccgactcgggcaaagggtacgtaccacctaacatggctagtccgtattacgagggcctcagtttgtatgacgtggcctcgcctctagctcttcttgatttttgctcacaaattgatgcatcttctcaccaaaggtgattctatatctcaaatttttaaatcatttgattctaattttaagtactttcttgtatagttgtttaagatttcggcacatatatagattatatataagaaacatatcagatagtctccatttacgacaaaaaaacactcgagatcaattcactaacgtccatacaagaatattaatattcgaacaaaattatcgttattagctgtgaaaaaaactacgagttggagaaaaggtaaatttgattaaatgaaaattgattctgcattgacttaagaacttcataagttcttttcttattggatagatcatttaaggtttacatataaagattcaccgaaaaaaaaaactaatcaaatttttgcatgaaattcaaaattacccttcacacgaaacgagacgtacattttttcttttgaacaaaatcgaactagttgtgaaacttaagagttgataatataattaatggtgatagcataaagatcgaaaaaaattaacgagtttcggactagcgtttaattaattctttttaagtatatatgattgattattttaattaattgtatatgtaattttctttgcagggagatcttggaaaagt

SEQ ID NO: 104257 - DNA, 738 bp, Mimulus guttatus
  Intron number 1 from transcript mgv1a012316m (locus mgv1a0 12316m.g) derived from phytozome v7.0 (chr-ID scaffold_87; pos 435497 to 436234)
aaggagcgctgtgaaaaacgccaacataatttcaggtgaattaaattgtattaattttgaacaaaaaaacctatgatttcctagggttttaatttacgtttgattcatttattttcgcgtgcaattgcgtgaattcgtgcgtgtgtttgctctactggcgtgatcttattgtttggcggtggttatttttttttcttctttttatgattctaccctggtaattaattttgttgtcggttttatgattttgttatgatcataattgatggttggtttaaactttaaagcgatatccggaattatgatcttggttgaagattgaatttcatgttgttgtagcttgtgtattgtgatttgtggattattatattgtttattttttcgaggattattgttttttttttaattaaataaaacagaattgattcgattatggctttgcttcccctacataataataatttcttttaggaactacaatttgagattcatgcttctgtaagaaaaaaatgctcaattgtcgaacatggttggtaatgttaaggagatgtttatgcgtatagaaaatcgtcctttcgatctatgtacttgcatcagttgttttctgtcccgtttagatatattattttgctgcttgtgaatatcgaatttgctgtttgtcaattattaattatgtttatgaatattgaataatgaacttcaggctacacggagtatcggattgacaagaaacactgg

SEQ ID NO: 104258 - DNA, 742 bp, Mimulus guttatus
  Intron number 1 from transcript mgv1a010154m (locus mgv1a0 10154m.g) derived from phytozome v7.0 (chr-ID scaffold_1; pos 2573095 to 2573836 reverse strand)
agccgtcttcttcggaaatcaggtctcctcattttcccccaaatttctaaccaaatcgccaataatttgacgaaaaaaaaaacaattggcatccattatttaattgcctttgtttcggttgctagggtgtacttcaaattgcgaattatgtgttaccgattacatttttgtagtttttcagcactgagccagaaaataattgtgctgtactattagtatgcatccgtgcatttgtggcatttgatgcatactgaaaatggaagccttcatttgaaggaagtctttgccctaattaagttgtcttcaagagattgttattacattttcagtcttctcatttttgtggtttgaagtagatgattggttgcttatgttacatttagtttgattgtagtataatttgattgttctgtaacctgactttcaactgaaaagaggactttaacctgtgttagtaggagcctcgtcttcgttttactgattactctcgttagaaatccatgtattgcatctggaactcttttgattggctcgctcaaactcgaaacgatgaatccgccaagatctaattctgtatcgtttgctataagtgttatgttaattctgtatcgttctttcctctcaaatcaaaatgttctgtacccacgtttgtgttttaataagcctcgtagtcatttgtaatcgtcgttttattttcattaattcagttcaacagccaaaatacgaagtgaagtcctcactc

SEQ ID NO: 104259 - DNA, 964 bp, Mimulus guttatus
  Intron number 1 from transcript mgv1a002614m (locus mgv1a0 02614m.g) derived from phytozome v7.0 (chr-ID scaffold_26; pos 858871 to 859834)
caggtaattttgatgatttgaaagtttcagtggccatggcgatgtgattttggatttatgtatccgcaattttttttttaacccatgcaagtgcgccgataaattatctcttaattagtaatggtgtagcgttattaagataatcaaattaagaaaaatatgtatatctatgacgactcgatgtagagtctcgttttgtgaggtggagattcaaacttcttaattgtctttaaaatatactcatgtgatgataaatattgaaggatgggggcaagatctgaaatgcgttttccgtttgtgtgaaagagaatttgtatgctagttgagcaggaggactaattagcacttatttgtggaactggtaaaaaaaatatggttaggatatttaatgtggaaaaagttgttctgagatgaatactggtttgtgtcttcagcattcagcgggtaatgactgattactccaatggaatatagcaccagcattgttcgtttctctgaaatgctaatttttgtgtagttctaacttctggctataatttttcatattttgagttttgcaaaagggaataaagttaacagtgtttgggataagttggtaggaatttattctttctttgttcttattttcttatgcaattgaacacagtgatttgtgatatacatgtttgtttcttgaaaaacaacagatagtgtttgtcctgttgattagaataatactctcttgtctattctgagcatggtattacttttgctgccagtttgtttctttataggttaacgagtttctaatacacgtatgatatacatcctatagaattttcttaaatagttattattgtgcaattggaccttcaacaattgatcaatttttgtgtttctgattgatttttaaactataatggaactctatcttgtgtcattctaacagttttatcttcgattcagtttccaggtgagacctttg

SEQ ID NO: 104260 - DNA, 997 bp, Mimulus guttatus; identical to SEQ ID NO: 103271
  Intron number 3 from transcript mgv1a020570m (locus mgv1a0 20570m.g) derived from phytozome v7.0 (chr-ID scaffold_131 ; pos 290702 to 291698)

SEQ ID NO: 104261 - DNA, 929 bp, Mimulus guttatus
  Intron number 1 from transcript mgv1a026494m (locus mgv1a0 26494m.g) derived from phytozome v7.0 (chr-ID scaffold_94; pos 366353 to 367281)
caacaaagaagccctcaagatcagtgtctggcaaggtcattaattattcattttgtttttccatggattgtgtatttgagattgaattcctctatgaaattgtttaattctgttgcaaattgatgataatccggcatcaactgtttactactaccgtcttgctgcttgaatcatgtgatgagcgtagcttcttcatttcgttcggacttttgttcgtctaccaacagtatgcttccaagctatgatttgtccaatgatcattgtttctagttctcctgttattttcttaggagaagtaagcaggtactcaggatatccgggataatgaaattgaagtaattgtaatatgtttatatgctctgctacttggaaatacgatttgatggttggtcgaacaagtaggatatatagtgtggacaagaagaatgttccatggtagaaagtgaccattttacccccaaaatgatcttattcgctatagttgtgtccgaacttgccgcatccagatctggaagtccacatttggttttgtggagaaaactagataactcttcgcagctttgccagcgtgaataaatatctcttctaattggggataacggcaccgtgaggcagtgcgcatatttaattgtaattaactgacggaaaccctatgccttttgttgtgttgttatgaatgttttagttctcttaaatcaattgtaaattgctgaaatatttctaaaacattcttgagatttgctgacattattgaattctgatggttaaatgctgaaactaagacaaaactgttgaggttattaagtgttaaaatgcatgttattttctgttattttgcatatatattcaattattattagaaaacatgcagtttgagccttgggcatttaactatgctggtacttaatgcttggaatgttcaacaggtg

SEQ ID NO: 104262 - DNA, 662 bp, Mimulus guttatus
  Intron number 1 from transcript mgv1a015538m (locus mgv1a0 15538m.g) derived from phytozome v7.0 (chr-ID scaffold_18; pos 1921695 to 1922356 reverse strand)
gccattctaagctcaagaaacgcaaacagctccaggtatatatacatatatatcttctctttccaacacacacacacacacacacacgtgtgtgtgtgtgtgttaatttggtatttttcaccgagtaaattttggttttggctatactttttttttttgtaatttattatgtatttttttttataattattgtaatttagtatgtagaggttatgaatgtgtatgcatatctgtgttacaaatggtgaagttattaaaataatgtttatttaattagtgaagaagaaggagaagaagatctgggttttagatctggtatagaataatatattttccggtttttagttgggaagtaattatcctctaactgacaccccaccgcatggtgcgggctccctattttgtcttcttgcatctaattaggattcagatattttttttcttgcaactactgtatctgtatcccaactttcaaattcaaattcaaattcaaatttaactattgtatttgatactaaatttgcatcaacatttgctcttctttgttttcttacattgattaaagttaatttagtatctattaaaccatgtctaatattcttggaatctctgtctctctctctctagacggtggatataaagatcaaaatcgattgcgaagg

SEQ ID NO: 104263 - DNA, 867 bp, Mimulus guttatus
  Intron number 2 from transcript mgv1a015096m (locus mgv1a0 15096m.g) derived from phytozome v7.0 (chr-ID scaffold_27; pos 1141461 to 1142327 reverse strand)
atatccgtgaaggtgagggtgtggtttatactgttttagctattcacacataacttatatttcctactagtggtcggactttcttccgtgtttaaactcgggcagacatatttttatgtttccattcaatatctgtattacctcttacataaaaaatctagggtttcgtgtatcccgataatattatgttgttgggaaaatccagcttggccattgcgaagaggcgaaaagaatgagatggttttcggaagtggaatttgatttactagacttctgaattggtcattggacctttactaatctactttcccttctcttcgtagttagctttactactaatttcaagttttccaacccttattaggaaccttcatgttctgcattctgaccacattatcttcaatactaatataattaagcccgaactcgtatatccttatttttccaagatcatacgtctccatcattttctaatccttcttgttacagaactacttgaaaatattccgaagaatccatcaactttattgaaatagaactgtttagagtgaagcagcattatgatttaaggtagttttgatgtggcatgtctatatactccgatgaatgatttaatctgaagaatgaaagcttaattggttctattatcacttcttgaatatatatcaaatggttgtttagtttgaaaaccatcaattttgtttttctttttcatatattgctgtttctaattaacttccttttccaactgaaccgcagtcattcatgaaaaattccatatgatttataatttccttgatatatattcatgaattcagaaagacaaaatataagccttataacggtgtaaaataaaactctgcaggg

SEQ ID NO: 104264 - DNA, 1024 bp, Mimulus guttatus
  Intron number 3 from transcript mgv1a008467m (locus mgv1a0 08467m.g) derived from phytozome v7.0 (chr-ID scaffold_85; pos 691326 to 692349)
gctctacacaggaactcaccgaggaccattgtcaagtaagttcgctacgataatcggtgaattgatctattcgattgtcccgaattcactttttcgttatcggtttcttaaccgagattcctattattgttaagtgatttcatgtgtatagttatcgtgtacacgtttgtcttctatagtttttacctgtgaaatgatatacgatcttagtttataacatgcttactcctcttatacaatttggtaataatcttccacaacttagttaatgttcacatactcgtcttctagttagactccagttgtgttgaagatggtaagtaactaataatataagtgctctgtaggtttttcatcctcgttgtctacatgaaaaagaaaatcagaaaaacaaaattgtttgaatttccttatttttcctcgagtaaaccagccatacaaatgaagtccttcaaatttatctcttctttctgttttcgtcaacgaattctaagacagtctagaatgcattcggatataaatgttgtcgactggagattttgtttggcactgagagaatgaccttaagtggatatcgttgtctggacaatgattgctgatgaattatttgtttctgaatgttgggttctttttctccgaacaatgcataattgcaaaaacctctgttttttttgttccctctgaaatagaagttggtcttttgtttgtgatgttggttgactgatatacctgctgtaaataagatagattgagccgttcatattcttttttactcctaaacatgctagttttcacagttactaatgtttgcctcgacactatgctgagataggcttttcctttctgtcaatatctgtagtttttattcacttttcctatctgtcaatatgcctgaaacaatcatttttctgcatcaaaatactctttttttttctttgatatttgtaacttaaatattacggggacttaaccgtttattgcattgccagtatttcctttaccagctattacgaggacttaaata

SEQ ID NO: 104265 - DNA, 443 bp, Mimulus guttatus
  Intron number 4 from transcript mgv1a005488m (locus mgv1a0 05488m.g) derived from phytozome v7.0 (chr-ID scaffold_27; pos 1134755 to 1135197)
acaactattatacctgcatctggtttacctgaaaggtcttctgttcttgacactagtgtttctttctggaactgtatattataatatctattgaaacacttacttgccatgcgggctagctaacagttattcttggaaatagtattacatttaaaaaatctcaagcttctgaatgacaagtgaatatgatattctcttctagttttgattctttcatcagtctttgttgaactaaattaaaatgtattatagcacatcggcggttggaaacatgttttatttgataattttgaaaattacacatgattccactttctttttgttgctttctgtcattttcctttcattacatgattatttatatcatggatgatgatatacattagcagcattctgattattgttcttttgtgatgctcaggaatctttcaacttctgccatc

SEQ ID NO: 104266 - DNA, 868 bp, Mimulus guttatus
  Intron number 1 from transcript mgv1a009473m (locus mgv1a0 09473m.g) derived from phytozome v7.0 (chr-ID scaffold_63; pos 230678 to 231545 reverse strand)
tattctacgaatacggcgccgtcgtcgccgtcaaggtatcatcagtcctttaaaaaaaaaaaaaaaaaaaaccaatttctctgctgttttagccttgtcaatttaccgaatcagttatttcgtgcttacgggatatgaactctgtcttctgaacattgattttgatttcttccgctttacttgtaccttgcagcagctcactcttcaatggagccactttttttttttttttttttattatatatatatattatctaatggtgtatttgatgtttctgcatctgattgtaactcttagttccttactttccgtagcaagggtacgcagaaatttgtattttatatctcagttcttggggaatacttgattttaattttagtttatctcatactcttcatgttagtttttttatgttgatttgatttaaagggatttatttaaatagtagaatagcacagataattaagaaaacagaaatctccggtcgcagttattataatgcttcaaaactaatccgttttacacctaaatgacttagaagtaaggacatatattagactttatttggtcttttagaaggattttgaataaaaaacatgattcaatatattactgtaggactgtaggagcccttttttcgttgcaaaagttcttttaactgatttttctgatgccatgctatctgcatcaattgttgttacgaatcttcccagtaagaatgcagttgtgtttccttgaattgaaagagtatattgattccgcacatttcggtgctacattttttgtatatccgtttctctgctctcctcgttaacttatatagagcattaagataaagactgtcaatatctgatctccagataatca

SEQ ID NO: 104267 - DNA, 575 bp, Mimulus guttatus
  Intron number 1 from transcript mgv1a015080m (locus mgv1a0 15080m.g) derived from phytozome v7.0 (chr-ID scaffold_1; pos 556309 to 556883 reverse strand)
cggaaccaacttttccgaatcccatcactgccaaagtttttccgaccatagaaacaccaacgtatttattgcgtagccattttcctatcaagaaagatcatcacatacaatcaatatgatatagaagaaatcaagattgttactcaagatcgataaacggataacgccttcattggtttctgatatagattcaatttaacaacgggtggaagtctctagacaatgattttgttgccttacagtcgaaagacgtatgcttaattgattcgatatttctaaatctgagtcgaggaaaaacatcatcaatccacattctctttaatcatattttgcttaatttgttttcctaggatagaattagttaattgctaaatcaaacaaaactgaataacgcaggagtgactgattcacacaattaccgtaccgtctttgacggaagcatcagcctgtgaaacattccgagccatggcagcgagcaaagcaatcccatgctcggctgcggcaatcgtattggcggtgggggcattgacaaccaaacagccgaactccgttgccgcctggagatccacgttgtc

SEQ ID NO: 104268 - DNA, 444 bp, Mimulus guttatus
  Intron number 2 from transcript mgv1a012774m (locus mgv1a0 12774m.g) derived from phytozome v7.0 (chr-ID scaffold_27; pos 1446422 to 1446865)
atcgatcctgttgtttacgctttccaagagttctcgtaagcaaattttctccgtttcttttttccttcaatttattttttggagtcgttcaccttcatattcgattttaatgtaattttgtgtttcatttgttgtctctgctaaactgtaattgagtttctatgaggaatgtttatgaacttgtgttactttacactaaaaaagaatagaagaaatttggtaactgtttggtttgttagagccggaaatattgaatttggggccgtcattgttagatcaagtaatcggttatacatatccactgaaataaggagtggtaggataggatgaacataagattttgatatcatctaaggatgtaattattagtggtaattgatgccattgaaattgttgaattaatcgattgatagtttctgaggtggggtatcgttttaggttccg

SEQ ID NO: 104269 - DNA, 503 bp, Mimulus guttatus
  Intron number 2 from transcript mgv1a007672m (locus mgv1a0 07672m.g) derived from phytozome v7.0 (chr-ID scaffold_90; pos 936134 to 936636 reverse strand)
ccagctcgaaaaccctgattttgttgcttttactggtactttaattaactaacatccttaattactttgggtttatatatatatggtatgtgtatctatcttctttcaatgtatctatcattaatgtaacttcctttttcaatagtactttcttggattagcatttattacatgcttataatttgatgaattcttgatatttgatgttatttaacacacacacacacacacagtttaaatttttcaatctcatgtgtaattagttcttctttgtcatatacagtagaacctcgataaattaataacctcgcttaaataatagtttctcttggtcccgactcggtgagaacgtgttatattattaacatgataatttaataattcgctaaattaatagaatttccataaccccgactgtattaatttatagaggtttaacaatatatacatatttgtgttttttttcgatgcaggggataacattttcggttcgagtgcaaccg

SEQ ID NO: 104270 - DNA, 659 bp, Mimulus guttatus
  Intron number 1 from transcript mgv1a008381m (locus mgv1a0 08381m.g) derived from phytozome v7.0 (chr-ID scaffold_169 ; pos 199388 to 200046 reverse strand)
agaaaggtggtttcatcgtttccagccatcttcaggtagtttttttatttattataatttatttcttcattattattttttgcaagacgttgcagacaggtgcggaccaggggcttttagttggagggccaaaatatggggtaaataaagagtaggaaaaaaataatttttatgggctaaaagtgtacaaattttgaattttaagtggaggcaaagtctataaattaatagataagtaccaaaatgcaattaaaaaagtaatagaatataggtgatttttttttcaacaggggtgggcgcctccctaggccccacgtggttccgcccgtggttgcagatattatctatcctagattggggcggaactaagaattttggtcggggcgagaattttaatgtgacagaaaagatttacaggcggggatttggggacaagcgtaaaaaaattgggatatttacttaaaatagcataatataattaattaaatcttgtaaattttaagtaaaacaacataaatagtagatttacgaggatttaggttaatcgtatccctacatattcttttcattatgttctacgttacaaataaattgcatttcttttaattatgttccatgatgaagggcgaagtagtaaaagactggcgcgaaattgtgac

SEQ ID NO: 104271 - DNA, 983 bp, Mimulus guttatus
  Intron number 2 from transcript mgv1a017624m (locus mgv1a0 17624m.g) derived from phytozome v7.0 (chr-ID scaffold_1; pos 693179 to 694161)
aagaactctcgatttgtgcagaggcaccaagggaagtaagtttttttgacgtttctcatctgattgcaaaccctagaaacgttttgattggattcgtggatcggtgttctttgttgtttttgtttatttatgtagactgtgctgattatattagtgttgaaatgtagattcttatacgtatatgtatgtatatatacacattgtgattttccttaaaaaaaaatcttgatgtatttgtttatcggatattatttggggtttatttgttcacatatcgagtgccaagaaatttctatctaggatttaaattgagtagtatggcaattacgggaatttcgataatcgttcatctgatttgctgtagttttctttcgtgcttgcttctaatggctgttctgttgacgttgaccaaaatttatttagacttctgcactctgagcttaggcagtttaaccatttacgtgtttgccctttaacaatagcaagtttccttttggtagaagttatattggatggacttcatggctgggctggctgcccactgatatgtgttttactcaaactcgattaaacagtgggaagaagttattattgtatgttcttacagtttaccgtgtgaagttacgatcaatgtcaatgacatctagtaatatttttctaatacttatatataagaacttcttatgttggtgaaatgatttaatcgtttcgttaattgagaccttactccggagcgtcaatactttcatcttgtggtctttatggattttaaaagcttgaatgtgtgctgctcttttctatcattgtgattttaatgagattttatgcatatttttgtatcttgttcttcgggatgttatagcaggtatcttgtaacgaaaactatttgtgtatatgggataggtttaggcaaattttgctcttgtatttcaattgatttcagtaaactctgtcctgacactcattttgtttcgcagataaac

SEQ ID NO: 104272 - DNA, 857 bp, Mimulus guttatus
  Intron number 1 from transcript mgv1a013526m (locus mgv1a0 13526m.g) derived from phytozome v7.0 (chr-ID scaffold_130 ; pos 151926 to 152782 reverse strand)
tctggaactccgatcatccaggcatcgacttcactgtattgcttcttccttccccttatacacatacacatatgttgttttttttctcgttgtgaatgagtattgatctgtgaaattgaaatcaattttgtgatgtggagatctaggtattgtaaaattttgtgtttttttccggaaaattgggggtttttgtttaattaggtctttaattgctgcttgtttataatttagttcattcgttattggaaatgggtgtgattggtagtttttgctaaaatttgctttattttatttttgggggtttttgtattgttgctgatttctgttttgggtttttatttgctcttatgtgatttgttgaatattaaacgattcgatcaatgcttagtttgagtgaagttatactgcattatgaagatatgcttatgagtagagtgttttagattgtaagtgtatacgagtacgactatcaaatgttagtgttcgaaacacctagtccgagatacatttcacttggccagattgaaacgaggctataattaagaaacgaggctataactaagaaaaaaaaggagataatctatggggttttggaaaccgaagttgcttattttgtttcaatctgtttgaacgttctaggaaagagcttattattttgggctacgtctgcatagtatgcatgcatttattgcgaagacaacgtttatcaatacgaaagttgatgcaaggctttgtttgtttagatttagattaattcctcaaattaattgacgggggtgttgatattgatacttggtcattttctgttcttgatgtatataggtgacatctccagcgggtgataccgttcacaatat

SEQ ID NO: 104273 - DNA, 721 bp, Mimulus guttatus
  Intron number 1 from transcript mgv1a015792m (locus mgv1a0 15792m.g) derived from phytozome v7.0 (chr-ID scaffold_204 ; pos 357579 to 358299 reverse strand)
ttcatcaaccacttctgggctcgttactcacccttgtaagtaaatacattgtttgggggattttgatttagcagatttgtttctttcagcattttgttgttcttagttttgggtgtctggaaattgaccttttcgttagttttaaggatatggttttttaacttgtatttgcatctctgggtggctttttttcagtttttatttgattttttgaactgggtttttcaggaaagatgaacactttgtgtttttttacttgaatttgttagtacactgtacactagcaattgctttggatggaattactgctgtacttttgggggtatgttctttgaggcatttcagcaaacatgtggtctgcctcttgattatggatgtgcatttcttgattttagtgttccaattcttaagaaaatctgagaatcatataaaaccaactcgtttagttgttttaacccacgatcctcattcttgataatgaattaatctttccgaagctgctacctctttgaggtatttcagcaaacatgtggcgtgcttgtgttgtgtctttgaggtatttcagcaaacatgtggtctgctcttgattatggatgtgcatttcttgattcttatgtgctatctcttccaatggatttgtagattttttccgggttccatttgcaaatgaatcttttgttatttagtcctcaggttgtgcaacaaatccgttactttccat

SEQ ID NO: 104274 - DNA, 962 bp, Mimulus guttatus
  Intron number 1 from transcript mgv1a008324m (locus mgv1a0 08324m.g) derived from phytozome v7.0 (chr-ID scaffold_13; pos 1136929 to 1137890)
tcctccatttctagggttttgaaataccaaaacaggtgacgccatttctctttcattcaattctcactttcacgattgatcacttcatctcgttctaattgtacgtagatacattttttttctctctcatcgatcagcattttttttcttttcatttgtcgatttttgtcgtttcatgtgatgtttgattgatgcattcatgtatacgtttatatgtatgtgcgtatgtgagatctccgatcagatcatcagttaatgttactggtgttttgatcagtgatgctgaattctaaaaatgtataatctatttggcattttgcattatgaggtgtttgattaagtcccgtgattggctctgcattgaattttcgaagtcggttgtttgttgattgaatcaattggtgaaatggtacatcaaatggatgaatctgaccttaagtatatgatgattggattttttttctctgtttattcggtgtgatgtgttgtttaaagttgatagagatgtggatgaagactgtatttcatacttgataccatcagcggaaaaggaatgtgttaggactgtatggaaatggctaggtgggattggatttggattttatttttgactagataggaaacaatcgcagttacttatgggtgtgtatataagtgattggtcagatgggaattattcctttgtcactgcagattttgaatattatttggcaccacgaaattaaaattttgggcaaaaactcgtgattagggtaaaatttcttgcaatctaaactgaaaaagctatttttgttggctcggatagagtttcttgtattagttacttgcttatacacacatgttctttgagcatatgccaaaatcaactttagcttataaatcgcaaggcatgaataaagttggttgtgtggatgtgatgttttagccggagaactaacacccctttgcaggttaaaagctaa

SEQ ID NO: 104275 - DNA, 389 bp, Mimulus guttatus
  Intron number 2 from transcript mgv1a001284m (locus mgv1a0 01284m.g) derived from phytozome v7.0 (chr-ID scaffold_13; pos 834088 to 834476)
tgcattagccagagggatcccacagcagcgataaggtttcttttctcgtttttcttagatacagtttatttcttaataaaaatatcatggttaataagatgcaagtgttatcaggacagtgaaagacaaactgatgattttagtgttatagcctgctttgaatcaattcgtattgtattttcgtggtcgtttatatttttctaccataagcggacattggatatttcattaatttggtgaatagactctcactgtatgaacgttgttatgcatatttttctttgactatggtgcaaatgtagtcaaacgagtagggacgtggggaaagtattatttgaattattgttcatgtgaagacccgattaagtttcattgttgcttctgcagat

SEQ ID NO: 104276 - DNA, 612 bp, Mimulus guttatus
  Intron number 2 from transcript mgv1a013567m (locus mgv1a0 13567m.g) derived from phytozome v7.0 (chr-ID scaffold_69; pos 667545 to 668156 reverse strand)
atcatccggttacaaaagaatttgtaagtgtctctcactgttgagattactttgatcaattgctccttgctttgatatttatttactgtttatgttaattgatgtgaatatatgaatgtatgattatatgcaatagtattagttccgtacttttagcctttcgatatgtgttcttgatgttctttctatcagtatgattaagcttaatgaaatgaattaacgacttcgtgctcagagttcgaaattgatgtatcagtgcctaattttgtttatataccctcttttcgttacttttattctctgtcgttctttttcttcttcactatgtggtttttaccagtaaatacactttatatgtagttcttatgtagaaggaaaatttgtcgctccccaatagaagatgacaattcttatgaaattttttttaaagaaaatattatactacgctttcatacgatctatttctgatattttaattggtcggcagtgcttggttatcttatagtatttgcaatttaaaatttgcaacctatattgatggtggggcatatttctttttttatgatcatttgttcaggagagattgagcttgtaccaagagaaattgaatca

SEQ ID NO: 104277 - DNA, 906 bp, Mimulus guttatus
  Intron number 1 from transcript mgv1a000719m (locus mgv1a0 00719m.g) derived from phytozome v7.0 (chr-ID scaffold_1; pos 860497 to 861402)
gtcaagaaggaagatattgaagccattgctaacaggtaattttttaattttctatttgcgttttctctgtaaatttctttgatggtttattatataattttgcttgtagaattattgcacaatgctcgcctgcatgctgattggaaatgattttatgttctttgttatggtggataatgatgagtatcggttttcaattttgtaattgtaatttggtgtgtaacctgtggtatctattaataattactttataaaattaagacggaagtaattgtggatccaactccagtggtgacttggttttgtttactgaaaagaattctcatatgaccctttatacaaaaccaaatgaattgaaaggaatatactgagttgtgtgttatgtaatcttcccaaacacatggacaagtaaggagttttggatgttccgtgctccttggttgacacttgatataaacaggaaatgcagatgatttatagtctttaatacttacaaggtggtatgtgtgtttgattgggaaccgttagaacagtagaaatgcggcaaacaaatgtagtgatcagatgttgtgtcggatgaaagcaatttatcgtaaatgaatataaaatgcaattctatttccttcttcatttttatgctgatatttgaaagaacccgtattctagctcttcgtagacaacactatcagtactacgtaaccgtaactgacaaactaagagggacgagattctccttcttggaaaaccttgacctgtaatatgcctgtttttatatttgttatatgcctgtttttatatttgttatttctctcctcttgcccctgcgctttatcatcctcttatcatgtgtttggaaatgctatttgtcattttcagtcttcatatttttcgtgtaatattccagat

SEQ ID NO: 104278 - DNA, 624 bp, Mimulus guttatus
  Intron number 2 from transcript mgv1a008815m (locus mgv1a0 08815m.g) derived from phytozome v7.0 (chr-ID scaffold_255 ; pos 227812 to 228435 reverse strand)
tgcagcatatcaaagctatcattacagcagacgaggtcagttttttacgaaaaaaataaataaattaatatctatgttttttgttctgtatatcatttttcgattttttattttgtaaattaccagaaattctgaataaatgtgtattttcaattttggattgattgcttcaatagaaaattcagtgtttgcttgtcaaaattagtttgacttcaatcttacctttgtcattcttgttgttcaagcttgcgtgatcacgaaaagtcgaatttcacaaaatgagtagttttgtgtgtgtgtgtgtgtgtgtgtgtgtgtggaaattaagatttagtattgatcaattaaatggtgattcttgaaatacattaggcttcgggtgatgctttagtcacattctttggtttgactttgcttcgttaaaattagtttgacttcaattcttacctttgtcgttcttgttcgttaaagctcgtgggatcataaaaagtcgaatttttttatctgatgaaatttgacatttagtattgataaattatctgataattcttgaaatataatcagagtcttcgatttttgactttgatatatgttaggtattgcttcgtgatccgttggacgata

SEQ ID NO: 104279 - DNA, 391 bp, Mimulus guttatus
  Intron number 4 from transcript mgv1a013747m (locus mgv1a0 13747m.g) derived from phytozome v7.0 (chr-ID scaffold_4; pos 3379174 to 3379564 reverse strand)
ggtaagaattcttcaaacgaatataacaaattctcatcttatgattttcgttgttttatttcgagattttgtaattaaaaatgaatgaaaaatttcgaaatctcgtcatgttatcaattttttcatgtcaataggttttcaaatgaatagaaattgggtcttattatataatcaactctaattgaaaaaaatcttgatgttttagggggttaagtgcaaattttatatcttacgagatgaagtgcaacaaaagaaaaaaaaaaaacaaagtatggtggataaatgtaaaaacatatataattcgggtgtcaaagtgcaattaattcttatatggacaatcttttaataataaacagacttgagagaagataagcaatttttaagcgaccat

SEQ ID NO: 104280 - DNA, 1050 bp, Mimulus guttatus
  Intron number 1 from transcript mgv1a010545m (locus mgv1a0 10545m.g) derived from phytozome v7.0 (chr-ID scaffold_1; pos 772140 to 773189 reverse strand)
attgaggcggcgcaaatagaaatccaacgaggaaggtatgcgcaaatgcatctactttgtatccaatttccgaagctctttatcatttgttttgaatttggtacagagttattgaagaatggtggattgtcatagatcctttaattgtgtttctgcaacatttcgaacaggggagaagaagaattggaccgaaaaaatagaattttattttaggagtaactaatttgtttaacgaatcgaatctcggtatcgattcggactgaatcttatttaaatttaacgaaatgctaacggatttaactaattcttaatcgcttcccccaaacggcgtcgtttgtgtgcgcctcatttacgaagtcgtgtgcgcgtttctgataagccatgcgatttacctcactcacctttgatgaatcttttcattataataaaccttgcgaaaatgtggtttggaagtataacttggaaaccggtgcatttacactatgtttcgatgcttggagttaagttcttagagctaaaatgtatgacttgaagtacttgtagtttcaatttcaaggaggcaagcgttcgatttcaaacatttattaagaaatttgttgtgtggagtgtcggaagtggaataagaactccaccgcagaagctaaatcttctgaagagattgttttatactgtagaaataaatgtgtgtcacagtttgtcttattttcgtttgcctgtctaggtaattttttttcccccaaaaaataatgtgtacttattttgtgttttagaagtcaatgttttttccttatattattggcgagtacagattttttttttcgttcaaatttgtcggcgttcatccaacgacagataaagtctaattgattggtactggtcttgaatgtcacacttgattttggaaatattttattatgaatatatcctcggtactaaatgttccacgtgtcatttatcgtcagaagataataatttgtaaacttgagaataatagaaatgcaaccttctggctgtgaatatgacagggctgcgattgaacacgaaagaaag

SEQ ID NO: 104281 - DNA, 239 bp, Mimulus guttatus
  Intron number 1 from transcript mgv1a000133m (locus mgv1a0 00133m.g) derived from phytozome v7.0 (chr-ID scaffold_335 ; pos 10003 to 10241 reverse strand)
tcttttcccctgagttacgctaatttggtagaaaggtaaatgctgtaattgcttatttctatccattccaccttgtcttaaccgaaggaaattttgttctgggtcggtccttacgacactttaccgtttctttatggagagagtgcagaaaggagttcttatctcttgtcttttcattttcttctttgatttggactatactcattaatacaatttaacttgtgttcttaggcatccac

SEQ ID NO: 104282 - DNA, 978 bp, Mimulus guttatus
  Intron number 1 from transcript mgv11b016217m (locus mgv11 b016217m.g) derived from phytozome v7.0 (chr-ID scaffold_2 13; pos 24450 to 25427)
cgaggatcgacgcccagctggcgcagtcgcagcaggtggtggctaagtctccgttctcggacacggtcaacaccccctcgacgatgaagacctcgaccatttcatggtactacaccaaacctaatatttttttaatctccaatttatatttgtttatgtgagtatttaatcttgataattcttttttttttcttctgggtatttgaaactgaataattttgttgcattattctccaacaattatctgattttatttttaatttatttttttggtctagtttccaagattgaatttttagatctctggtgttgaatccttactactgttctacacatagacaatttcgcagataaattctgttttaaataagttcctactctgtatttcaagaattattggaatttaatttccgtatatcaagatgaaattaattaatgatggtacttaagtgctcgaattctggggttgaatgatgtttaattttgtttcttttataaaaaagattcaattagcttgcttgcaacttgtccgattagtatagcggctctcgtaaaatcccgattaatatagcggctctcgtaaaaatcctgaattttgccgatttatgtgcttaagtgaggtcactgtttggatttagagtgggaatacaaatatcaacaactactcgcaattcatcgaatgaggataggagagaataagttaggacagaggataataacataatcgaaatcaaaccaagacgaatagttggcaaatcgaatctgtaatatgggacggtatatctgtttatcccatcaaatttaggaatcgtcttgtttatcggtacactaataatttgaactcccatttttttagtgctttcaagaatctctttcttgatgtagtagccccacttgcggctcgttttttgttgttgttttttcttctagaagttcttgtctgaaatgttagtcgtttaaactttacgcagacgcatt

SEQ ID NO: 104283 - DNA, 525 bp, Mimulus guttatus
  Intron number 1 from transcript mgv1a018982m (locus mgv1a0 18982m.g) derived from phytozome v7.0 (chr-ID scaffold_24; pos 1881147 to 1881671 reverse strand)
actggtccaagtaaattattattataggcctatttaaaggcccaaatatttatatacatatatatgtatatacatggtaaattacaaaaccctcctaaacttagattaaattataaaaaccacctccacttattattaattaccaaaaaacccctgaggtttgtttccgacctacaccaacccctcacagtgtgaattttcacggattttttttttaaattccagggaatagactttacaaaatttccttacaaactgcgcacattatatacactctataaatacacacttcgcacatattatatatatctccgtacaaacaaaatctaatatatcttcttgaaaaaaaaatcaaaatatataattttcgcaaaagatgaaacttttctctttaatcttcttcttccttcttctgatctgcgtagtttcttgctcggaaaaagaaactctttccgtcgggaaattgattccgaggagccttttgctggattcagttccgcctagttgcgtacataagtgccggaa

SEQ ID NO: 104284 - DNA, 993 bp, Mimulus guttatus
  Intron number 1 from transcript mgv1a008458m (locus mgv1a0 08458m.g) derived from phytozome v7.0 (chr-ID scaffold_27; pos 1565074 to 1566066)
ctcttaattccgttccctaatctccattttacgaggtatgattaacttaatttctgtgtcaattcctttttttttatggagtgttgtgcaattattatttgctgatcaccttgaattatctaccaattttttttatttttttttaggtttaaatgttgattttgacattttatttttttaattcgttcgttattattccgagagaaaatttatatattttaaaaaactattctgcggggttccttttgccaaattctgattaaaagcaatgaggaattttaattttaggtttgtaatgattgaattgcggaagctctgattttttatttaatttctcagattcacaacaaatttgtgcaattcgattgatagttttcacagttttaggtggctgaatcgcttaattccctgttttcgagttttcgaattctacacgaggataaatttgtcattactgagtagtttttgtttagagttttagacccccaaagcagtagattgtcgttgtactgctgtgttacagtaccggccatcggggtttgggtgtgagagtgaaaagacgagaaagccctttgccctcttcctctttgggtgggtgggttgatactttacaaccctgacccggttatgtatggacttcggactttggagttttggggttttcttttctatgtggaccttaattagattttctccattattcagttttgaattttagtgaaggaaaagtaccaaggaaatagtctcttaattctttttttttaatagtatttaaacataataaaaaaaaaaaattcgtttttgtgttttttgtatttccgtgtaatttaacatgatcaaagggattttcagattgatgtttatgctgttctggggcgattcgttgatgttattaatattaaaaaaaaaaaaattgctttctatgacattgtctcttacatgcattttcacctggcagaacattgatacttgccatcttattacctgtcgttt

SEQ ID NO: 104285 - DNA, 446 bp, Mimulus guttatus
  Intron number 1 from transcript mgv1a005568m (locus mgv1a0 05568m.g) derived from phytozome v7.0 (chr-ID scaffold_155 ; pos 57417 to 57862)
caactcaaattggtaaaccctcgtatgctgaatctgttctttcttctaccagtctagaattctagggtttctttgattagatttgatttgctgtattttctcgtaactttggtggttgtaaatccgtgcaacattatattttcctgttctttcttctaccagtttagaattctagggtttttcatatgtttagtccgagaacatgtttttttgggggtttgtgtgaaatttatcaattcaggctgtgggggagtgtgaaggggttaacagaatctcattatgtcgatttcacgatattcgcatttactttacattgacgtaattgggtgatgtggactgcatcatactcgtaatctttcagtcgggcatctttcttgtttcgttaatgttttatttttactgatcttgcagataggtcagagtcatccaactggtttaaccacaaa

SEQ ID NO: 104286 - DNA, 557 bp, Mimulus guttatus
  Intron number 1 from transcript mgv1a000721m (locus mgv1a0 00721m.g) derived from phytozome v7.0 (chr-ID scaffold_196 ; pos 23490 to 24046)
gcctcaggtttgccaccggcggtggcgatcataaggtaaatttttttttctttttcttttttttttctttttctgatttgtttcttttaatgcaaaaatatttcttgtcaattctgaaaatgttgccttgttaggatttgtagtgaagcaatttggaccatcatgctgctataagtgtcataattttgtggttttatgaccaactcagtggtttgcatatgtaatcgataggacgattatcttacgtcgtaaatcttgaatacaccgtttttaagcattgggtattatcagtaacttatattcggattttttagaagtaattcggtttcaaagaacacccaatgaatcttggatcagggaagtttctattcatcggttaccgcgggaaatcatccgtttgaatttacgcgcgacaacagtaaatactgagaaaacgataatttaaattgctctaatcgtccttcaaatatgtgtaaaccacttagattttatcaagattctctttattgccgaactaagcaaagtttctgttacatattcaggtccgtgtttggaac

SEQ ID NO: 104287 - DNA, 896 bp, Mimulus guttatus
  Intron number 1 from transcript mgv1a002148m (locus mgv1a0 02148m.g) derived from phytozome v7.0 (chr-ID scaffold_13; pos 806074 to 806969 reverse strand)
gattcctccacagcccagttgccaggtctctctctctctctctctctctctctctctctctctctcaattgaatctgctgtgttttacatttttgagtaatttgtgtaatgggttttgctttgttcttgccatttgagtatctggtatctttttaatgtatttgtagcactgcccccttctgtgatgggactagattcttgattctttttttattacctgaatgataatttattcttgtggtatatttgttctcgttggttggattcacttgttaaggttgttgaacttgaactaactgttaattacttgtatgccgagtggattttgaaagaaaacgacaacacgaaatacaagaatttcccggtgaccctgaagtagcaatgcataagtttaaatcaagtccatatgacagaatattgtatattatatatgtgccgtgcaagaactattattgcacataatttgcaaaaaagaatcattttttagcaaattggtgccctagattcaagcatgaactttcgtttttaagtaatcatttgtttgagaacttttttcgagagattacatttctatatttagataaaatgagccgacctcttcactatgtttagatcttggacttgctataatctgttttgccagttcgaattaggcatcggtagagggttaatggttaactcgtaagtactaggatgcattttaacgagcatttcatttgagcattgatttgtcccattaacaaactgtatattcgtatgtgattctttgtacagtttatagctccttgaacgattcttgatacgcgtcggatatatatacaagtccatgtttttgtagctttgttcttacaatatctgaccctatgcaggttttgtaagtgtggattgtggtggta

SEQ ID NO: 104288 - DNA, 800 bp, Mimulus guttatus
  Intron number 3 from transcript mgv1a016207m (locus mgv1a0 16218m.g) derived from phytozome v7.0 (chr-ID scaffold_1; pos 3204649 to 3205448 reverse strand)
gaggaggaaaactaactacctcattgtcgactcaagtacgtttgatgcatactcgcttagtcacttttatcagaatatcttttgtttccacttgctgatgcaatttctgacttctcttatattttttacttgtttgtttgtggggatggaacataaaatttcaaaatgtatgttactagattaatggaacataaattgaaaatttcgtcgagcgttatgattacgaataaaagatatgctgtgccaacaaaatcaaaatttctgaatattgtaataattcaaacctgttcactacaattctatgccaagttgtggtgttctttcgttctatatttcaagtgttctggtgttgataagtacataatttctggttgtttctgcttgttccaagtctagttgttttggcattgtatatagttgtccttttacatgaatgtattgacaccttcatctttaacaaattgattttagtgtagcttttgaggttcagggctatattagtcattttgttttttcctattatatagtgccttttaccatttagcttcttcacaatttgaatgtaccaaacactctaagagtcatataattagcgatagcggtggaagacatgaaaatatgatagttaggatatgtaaataaatgatagttagttgcattgccaaaaaatcccataccgatgataaaattgtctataaaccgatatttctattatgtcaacgtgcttgctagtggctcatcgaagatctcttctatttggtttagaaacaacggtgaaacagattgaagaggcattcaaa

SEQ ID NO: 104289 - DNA, 644 bp, Mimulus guttatus
  Intron number 1 from transcript mgv1a003085m (locus mgv1a0 03085m.g) derived from phytozome v7.0 (chr-ID scaffold_24; pos 297204 to 297847)
ttcctcttaaaaatctctctactcctattttcaaggtaattttgatacgccgatttctgttttttgttcttcttcttccgatctgttgattgtgtggtaattcgtcgatcatgttgttgaatttttggatcaattttacttttttttttttttctggtgaattaattttgatatgtccgatttggagatctaggttttattttcagttaaaagctggaacttgatttatatctaggttttcttttgtcagttcgaatctggtttattgatttaagtttcgtttattctcgatggaatcgtggtgaatttgtttgattgttgactgcttaatcaatcgatttacctattcgattttgggatctaggttttcgttatcagttagaatctggatattgattcatcgatttaggttttgttgtctctattgtaaatttgtttgattgctgactgctttttcctgaattgtgttgagggatctgtctgcttcattagttttgtagaatgtcgtgtttatgattatttctatttgatcgactactatttgttttcttcatgaattatcatgtgtttgtgagattttagatagaattcaatttttttgggataaaagcatctttttctgataattttgtattgatgtacag

SEQ ID NO: 104290 - DNA, 499 bp, Mimulus guttatus
  Intron number 3 from transcript mgv1a012762m (locus mgv1a0 12762m.g) derived from phytozome v7.0 (chr-ID scaffold_7; pos 1645209 to 1645707 reverse strand)
ctcaaaggctgcaatacttaaaaaacgagataaaggttgctcttcgttttccgatatatattaaaattgcaaaattcggctcttacaaattccaaattccgttgatacgtttcacatgaatcaaaagaaaattgctaatcaatttttcgttgattaacggtttcttttgaagtattaagtcgacacaagtacatttactctgctttctaatacggagcaattgcatttcgcaaatctcgcctttttgagacgctaaatctcgattttctaatatggttgtcgttgctcgaatttaattttgcatttttttctcaagattgcaactgtctatactaatagaatgagaatccgaaattgctcgttcataatatactaatatccatttgctattgtgctaactccatactttacgagcttataaattttaaaattcattccagtaacaacaatttctgctacccaagcagctgccgagctcccaaacttgcttttcgaagct

SEQ ID NO: 104291 - DNA, 443 bp, Mimulus guttatus
  Intron number 1 from transcript mgv1a014809m (locus mgv1a0 14809m.g) derived from phytozome v7.0 (chr-ID scaffold_83; pos 319576 to 320018)
aattccactgttgctgttcatcacttttctcgtcggtaagatttctcgtctgcaggaacataatcgtgttttttgatttatcatttcttcgttgaatttttccttttgaatctacgatttttggatattcctatgcgagatctcgtctttttacctcttggagattgtgattttttttttttttttaataattgttcgcgtattctggatcgattaggtgtcggagttgttttccgctcacaagaatttttccttcaatttattcattgcctgcaaatattgctatttgataaatgttatagctaaaatatccctgttttctgatttattttgctagaattttgaaaatttcaagcatattcaacacttacagagatggttatgaagtttctgcatctatgttttaacttttggttttcatcctcaaatttggttcctcagat

SEQ ID NO: 104292 - DNA, 800 bp, Mimulus guttatus
  Intron number 2 from transcript mgv1a021123m (locus mgv1a0 21123m.g) derived from phytozome v7.0 (chr-ID scaffold_24; pos 1276392 to 1277191 reverse strand)
tgaagaaacttaatcgtgatttggctaaggtaatttttgtactgtgctacaacaatttacaactaatactgttctagccgaaatatctgaggattttttttcagattctacctgactaattgtagttagctattctgcaaaaatttttcctgagtgttgggatatggcgataagttcataaaataggattgagctttgcatctgagtatttcaaattgccgtgtacgaaagaaaaataaaatgcttcttatggaacttatgtttagttatatttcatgttgtcgtataagaaatcaaatgcattttcacggcctgtatattcaaattatcttctgctgtatttctgttaattaaaaaatagaatttggttactggaatttgaactaaaagtggctgtgtttgaatatgatcgttgctcgtgaattttgaaacgaagagtcaatacacctaaatgtagcacacaggtaatgcgtaaattactgaattgtttcttattctacaagtcaggctccattgctccatctttctgtttcataatggctacagtaccttgggctttcagttttccgtgtgttgtgtgtgtgtgtgtgtgtgtgtgtgtgtgtgtgtgtgtgtgtgtgtgtgtgtgtgtgtgtgtgtgtgtgtgtgtgtgtgtgtgtgtgtgtgtgtgtgtgtgtgtgtgtgtgtgtgtgtgtgtgtgtgtgtgtgtgtgtgtgtgtgtgtgtgtgtgtgtgtgtgtgtgtgaatatctatctaacttctactttttttgacagctggagacatttaaaaggcagctg

SEQ ID NO: 104293 - DNA, 1034 bp, Mimulus guttatus
  Intron number 2 from transcript mgv1a000448m (locus mgv1a0 00448m.g) derived from phytozome v7.0 (chr-ID scaffold_607 ; pos 12112 to 13145 reverse strand)
ttcttgaggtaaggttatgaaacaccagttctttcttaaagaatttaaatatataatcagtgaactctggatgcagcgtatacttcctgttttgtccatttcatgtattaaaagaaaaactgttatttatttgttatttttagatagttttgcttaagtttactttctggaatatataaacaaggacatattttagaaaaggaaatagtttgagagaaagaaaactttttcgctcatcccatgcatatatagagatgtatgggcaaagtattagatatattatcattacatgcatgacatatatcgacaaatcagatccaaattatgatagctagtgtctgaaaagtttaagtagatagtaaataagaagtaatttcatacatattgtccagatatgtttcgatacaagaagtcaagaacaatagaaatgattactattagaaatataatgcttgaactatgttgctttaatctgatcatgtttgagggttcgtcctgcaatatgtgaagacatatgtcagttaatttcatacatgttgtccaaatatgtctgtgtttgctttgtgaatactttaccgtgtgattgtgtgtctaagcaggagtgcatgagcttttgctggtgatcagataaacaggaagacgataacctgaaaatggaaggaaaaaagaaaaaaatataagaaaagtaacatgaaaagaaataaatataataaaaactgaaaaaaaggacatgtgaaaaccagtatctgatttttttttggtatttgcagataaataaataaaaaatatgaacaggagtgcatgagcttttgcgcgttatcagataaacatgaagaagataacctgaaaagtaaggaaaaagaaaaaaatataagaaaagtaacatgaaaagaaataaatggaacaaaactgtttgtgctctgcacgtactgattagtaacttgaccaaaatttgatcccatttagctctcactttttttttgtctaatcttctgtaactgttcgcaggtaaaggctgctttgtttgctgcagg

SEQ ID NO: 104294 - DNA, 814 bp, Mimulus guttatus
  Intron number 1 from transcript mgv1a017584m (locus mgv1a0 17584m.g) derived from phytozome v7.0 (chr-ID scaffold_44; pos 439067 to 439880 reverse strand)
tcctgcctctccaagaacaatttccttccccaaaagtaattttcttttttttccctttttcttaatttatttattattattaatacatatatatacacttaattatttcgtgtgaaaaaaaaggaagataaacataaaaataattgatggttttctttgtgtttgattgaggtgtattgttgaactttgttaagatacatttcctttgcttggattttattattaacaagaatgcaaatgttgttttattttaatttaattttgtatttatgttattttaatttaattttgtatttatgttgttgttctttgtatactttgctgcctattgcattgactcaataatcaattatgtaatcccccatctgtttgaatctccaaacttatttacagacatctttttttatctagtcgaaaaattattaatgtcgagcttgcgaaagtttccttacaaatgttcggttttatcgtaatacgataatagtatcttttaatcacttcataaatataaggttcagaactttatttattaaaaagtgaaaagttttaatgtgacgtaaataatcggttaaatgtgacgtaattaatcggtttaagttatgtagttcttgattctttgatagcaattcaagcttttgtggttgtattgtgctaactagtttgagatattgcatatataaatcttgtaagaaatttttttattatacgttttttttctgctgtaattcgtatacgaagcttatcatatttcgatttttttttttctttttctggtgtaggtgcatcaaagtcattcagttgctacagttttgct

SEQ ID NO: 104295 - DNA, 934 bp, Mimulus guttatus
  Intron number 1 from transcript mgv1a010772m (locus mgv1a0 10772m.g) derived from phytozome v7.0 (chr-ID scaffold_858 ; pos 34229 to 35162)
ttcaaagagtatgtaataattattatttttatttttatttattttaaataatttttgacctagattttttgttgtttctttaatctttgaataaaaaaaaaaagataattcaaataattgagtgtgtgaatctttttcaacactgtttgagcaaattcaaaggctggtctacttgtacggtcaaaaagctaatctcaaactatgccaaattaaaattatattatattattaattattttttaacatcttcatcaagaacccttttttttttttttttttttttttttttaatttaataatttggtgtgaagaacccaaattcgattttggtttctaaataacaaattaaatgtttttgttagcgaaaaaagaaataattagggaacaagaattttgaaaattgacaagggtacaatttgattcgaaaaataattgttcttatagtgattttttttctcattcatctgtctgtctttttggacatatattgttgtcttcattctttccgggcataacctcaccttctatcacaaacccttgtccttcctaatacattaatataaacaacatatttttatattatatataataatatatatatgtatatgcacaccaaccaagtttggatttgcattgttaattttctctaacttattaatcaaatctcctcttcttgaaatatatatatagtatcttcaaattgatagttaattttaatattactagtagtactccaaaatatgtgttatttgacagtccatatttacttttaattagtaaattttaatcaatgcaatgaacttcataatttggagtgtcaacatcatttcatgatattatatatatatatatatatatatatatatatttttaaattttaatttttaatttttttgtagggtgaccaagcctcaattgttggtggtgccataga

SEQ ID NO: 104296 - DNA, 635 bp, Mimulus guttatus
  Intron number 1 from transcript mgv1a009341m (locus mgv1a0 09341m.g) derived from phytozome v7.0 (chr-ID scaffold_181 ; pos 124714 to 125348)
aattgaaaaacgaatcataatccagattcattaaggtatgttttttttttttttttaaattaattgtttattgtgattatatcgctgaattttgagcttgatttgtgtcaaagtattggcaaattcgatttaagtttagggattttgttcttcggtgttagaattactgtccagaaagcatcgaagcaattacacattctttatttaaataaataaaataaaatagcagctgttgttgcataatttagaagaagaatttgaaaaataaaagatatgtgtatttgttttttttagtggaatttatctgtttagcttttggaattcttttggggaaatgttttaagaagcttaacaaacacgagttagtttttacgaaaaattggttgttgccctaatttgaatagcatcgaaaatttatcgaggggtccggtttcgaacctgcctcgtttccaaattagttaaaacatagtaagatagaagctcatttcaagaatctacttgttccggaaaaaaaaaattagtcgtttttactttttctaattcttgcattgtattgccgtatttttttcgatactggtaataggcataacgattttgtttttaattttttttaatgctgatacagaatataaccg

SEQ ID NO: 104297 - DNA, 887 bp, Mimulus guttatus
  Intron number 1 from transcript mgv1a008937m (locus mgv1a0 08937m.g) derived from phytozome v7.0 (chr-ID scaffold_270 ; pos 142817 to 143703 reverse strand)
caggtccagatctatgttttttccatttttgacacttacttttcttcagctgtccctcctgttttatttatttttttctctaaatttattttcgtctgtaacattcttatttgactttctgttgttattgaaggcttgagtcgtccttggttttactcgtctcttgattagatccgtgattcgttttatccttctgttcgttatgttacggatgctattgattgttaagtttataggataatcgaggttagtgtgattaaggggttaggggggtggaagtttaattattatttatgatgagtattataaatagggtaattagaatgttacgggagagaaaatttattgtaatcaatattctcttgtcttttatctcctcgattcttattctatcttctctaattctaattctcttaattcacatctctcgacttcttcttaattctcaaactatgttttctcgctcaaattaccacgtaacacttttattttattaatgtgaatgacttctgcatttcttcatgaactacaatgtgctttgtcttggttgctggcactatgtttaatcgtgtgttttcttcatctggtttttagattaattaaatggaatacatacttttgaaatcataactcaataactaatttagaccgatcctatgcaaaaatatgtacgcatgacataaaaatttaaaagtttaaaggagtttggaagagattgggagttagggaggggataatatgtatcttctaaataaaaagcttcaaagttcaaatatctctatgctttcctgacgttgctggttagttattggcatctggttaatagttttgtctaatgtctacatcaaccagatcgatcctgcaaaatacaagagcatttcatcagg

SEQ ID NO: 104298 - DNA, 300 bp, Mimulus guttatus
  Intron number 1 from transcript mgv1a021766m (locus mgv1a0 21766m.g) derived from phytozome v7.0 (chr-ID scaffold_7; pos 2769996 to 2770295)
gtaacattgatttctcaattataatacaatttgaaatataaatgccaactaaatagagaaaagaaagtaaccttttaaaataaaacggctaaaagtaacattgtcttgccgtgtagggttttcgaaaatattaacagagaaaattttaggttgaagaagaaaatcaatcgttttgaataggatattaaaaaaaaagtaggataataaacaaggaataaattagttaattaatttgattaagggtaaatatgtccaaataaaaaagttgcaacgactaaatttgagcgccaacagattcac

SEQ ID NO: 104299 - DNA, 531 bp, Mimulus guttatus
  Intron number 1 from transcript mgv1a015531m (locus mgv1a0 15531m.g) derived from phytozome v7.0 (chr-ID scaffold_4; pos 148519 to 149049)
gaaaatcagggctaggcgcaaccgaaacagtatagcattatctggtttagttattgcattcaattaatcttttgctttctctgtcttaatatatcggaacctcttcttgaccagatattagtctagaattgtgttttctgctaacgatgcattcaatggtttcatttatgacttgaattgacttttttcgtatatagttcaatgatttgagtttattttgtcaaatatctcgtcagactttcaacaaacttactaaaaagttcgttccatgaaaaaacatatgtatactagataaatcgatgaacctcaatgagagagggaatgtagtaactatctgcatatttccttggactgtcatttttttattgaagctttgggctttgtatttcaggcagagacaatttggcaatgttcactactgtgattctctcttttcgtgttcttttctatgtaataaaaaatgttcgcagggatgctaacttgaaatattttgcagaaaaacgaaaagcttaaaagagaagaaaagaagaa

SEQ ID NO: 104300 - DNA, 734 bp, Mimulus guttatus
  Intron number 1 from transcript mgv1a008155m (locus mgv1a0 08155m.g) derived from phytozome v7.0 (chr-ID scaffold_2; pos 3537465 to 3538198)
tgcttaacatctctcctactgtaagttgattttgttcacttctcgtttatctgattttactctttcagtagtgtgtgtgtgtgtgtgtgtgtgtgtgtgtgtgtgtgtgtgtgtgaaagacaaattattgtaattgaatggaatggaagtcacgtgattcaaatatcacaagagattgatgaaagaaacaattttgaaagcactgcatttattgatttctactgatctaatctaactggaatcaattcatgagaatgtaattttttttttctgcatccgatttttggtattcggaactgattttagtgataatcgacattcttggcttcagtcttcagcagaagtggtgaaagaaatcgctaaactcgaagtcgagatcgtgcatttggaacggtatcttctttctctctaccgtacagcttttcagcagaatctcccaagtattccgaaaaacaatcaaacgaatgaaataagcccatgggtcacatccgatcaacaatctcccaagacgaaatttcagttgacgaaaacctatagtaacaatcaaaaccaaagctctcctacaagtgctttagctggtccaaacgattcggttcaagtttctactccaaaatcatcatctgtaagtgttccgtattcagattcctcttatctgcatgtttaatgttaaattaaatgtgatttatttgcaatttgcaggaaaaaaagagtgcttattctcggcactctagcct

SEQ ID NO: 104301 - DNA, 470 bp, Mimulus guttatus
  Intron number 2 from transcript mgv1a009496m (locus mgv1a0 09496m.g) derived from phytozome v7.0 (chr-ID scaffold_157 ; pos 368144 to 368613 reverse strand)
tcggcacttggcaaatcttcagaagacaagaaaaggttcatttctttctcattttttcgaattcatccaaaaattataactgtgtgtgtgtgtgtgttaaaccgaagatctagttattatgaaacatatttgagctaaattgatctactcaacgtaagctagtttatcagtgtaaagagtatacaaaacaaacgatcaaacaagctgcaattcacaaagtttgagagcaagccattgttctatagttactacctatcttgttcagaatagtcgtaaccgtagtgtataattccaaatgtgcttgcattagtgatgaatgcaataggtttcttgtgatgaaacatttgaatacgtggagtcatttgttgcaattagcttgttgtttagttcgaaaatgaattcaaatcacagggttatgtttgtttgcttctgtagataaaaacgctggagtatcggcagagtagactaga

SEQ ID NO: 104302 - DNA, 501 bp, Mimulus guttatus
  Intron number 3 from transcript mgv1a008789m (locus mgv1a0 08789m.g) derived from phytozome v7.0 (chr-ID scaffold_140 ; pos 778321 to 778821)
ctagaatacccttggccaccagccatccacaggttaaatcttttcggtttattatgtattggcgtttatgatatgagatattatgaacttttagttggttttttcatgcaagaaacctgtttggggaaaccttacacttctttctaactgcaatttaagtgttcatttcacgtttatgttgcatatgaattgggtgaagatactcgtgtcaccaaattgttatacgaacgtatacacctttttttttttttttttttttttttctcatttgtagcatttctgaaggaagacaatcaaaactatttgaatttgtggtacgaaaagattttgagaatgaaaaaaaatctaatatttttagcatgtttcacccaaagtaaaaaaaacaaggtgcactcttacaacatctgatagccttgatattatatttttatgctactaaatctttcccgtattattattactatgtcttggtatccattttggtttgactttcatgaatag

SEQ ID NO: 104303 - DNA, 340 bp, Mimulus guttatus
  Intron number 1 from transcript mgv1a007178m (locus mgv1a0 07178m.g) derived from phytozome v7.0 (chr-ID scaffold_208 ; pos 325120 to 325459)
ctccaataactgccggcctcgattctgtcgattaggtgattcaatgaatttgactcgtttttgttgttttatttcttctaattcttcttcttcaagattggttcctgctcgtaattattttttttaaacttgttatcaattcttatgttgctgattttaggcaaccccttttgtttttttggttcgttttcgaagttttgattgaattttggggcttgtgggttttaccgtttatgttcaagttcttagtgtcattttatcgaacagtttgtgatcatctttttttcatttgtgttttctttcagtttttttgggggttagggttttttccgagttcagg

SEQ ID NO: 104304 - DNA, 716 bp, Mimulus guttatus
  Intron number 4 from transcript mgv1a007178m (locus mgv1a0 07178m.g) derived from phytozome v7.0 (chr-ID scaffold_208 ; pos 326535 to 327250)
gaaagcgcaatttacttcaattcaatcagagaaatgtaagtatgacgatgtcatttacttttttcatcttcttcttctttgtttttaaagcaaatgactggttaatctattattaagaattgaaaagtggtgaatacataacagttttgatcgtcatctagcttatcttaattttcgaaacaatctctttcctctctcttaagtcttacccctcatttaccgttacccctgtggttgagtggtacctctccctttcttgtagtggaggtcctggtttcgatcccagttgtgtgcgtgcatgtatggccatcatatatatatatatatactcttatactttgaatagttacatattttccccactttcccgtgtcatcttagtgggatatgccattttccaatgtctgtttcatgttttgccgttttggcgttctcgtgattgtgcatcgtaggtctgctacatacagtgcatcttaaataccgtgaaagtaaattacgggaagtagagcacatcttggacggtgtagaatcgtctatctagctgtttgaacttgcatgatgaagccaaatatgctatttcggtccagctatatttctgtgatcgaaccttcaatagcaatgattagtactgaaactattgtagttcatgctttattgatcgtgtttttgctttatgagtttcacaattcttaatccgatttcgcgtctttgcagat

SEQ ID NO: 104305 - DNA, 445 bp, Mimulus guttatus
  Intron number 1 from transcript mgv1a002397m (locus mgv1a0 02397m.g) derived from phytozome v7.0 (chr-ID scaffold_257 ; pos 135324 to 135768)
cctccgcccccaccacccggccctaaaggtgataaaattttcacatcaatccgccattgaaattcatatccgattctttgttttcttcaaaattaaattcaatttctctgtttcgattcatttgattgattgtttagcgagatccttctcaatccagaagatgccctttcaaaaattcatatattgttttttgcacatggctgatgtcagcaaaagatatttttacattttgtttcttgttcttcagtggtggagatttatcttatctctaatagctttccttggatgcattgtctagtaattatcctcaataaatctaattttagctaaaaaaaaattagaggaaaaaaaaattacggttagttaggttcgattgagtgtgccgacttatttacacgtcgtttttacattttccaggcgatccatacggaggtcaagtacaaca

SEQ ID NO: 104306 - DNA, 539 bp, Mimulus guttatus
  Intron number 2 from transcript mgv1a013531m (locus mgv1a0 13531m.g) derived from phytozome v7.0 (chr-ID scaffold_163 ; pos 195210 to 195748 reverse strand)
ggtggaaagaagaaggcctggaggaagaagcgaaagtgagtccttttttctattctgcgtttcagatttatctgattgtaattttagggttttgtaattttgtgattttagcagacccatttctttctagctggttaatttcttctgtgtctaatacgatttgtcttctcgtatgttcactgagtaatggctgttagttcgttcattatctgattgttttttctgatttatatattattgagattattgcaaatgttattcggaaatgtttgtattgctgctgtaatttagggtttaatttgattagggtttctatttgcattttacccctcttttaaatttcactacttaattctagatttatcactttactatattgctcctgtattacagtttccagggattgtatgtaaatcttttgtggtttaatctgatattgattttttattacatgaattaattatccgtttcgttaatctgatattcccttacgacttttactaggtacgagctcggtcgccagccagcaaacaccaagc

SEQ ID NO: 104307 - DNA, 689 bp, Mimulus guttatus
  Intron number 2 from transcript mgv1a000139m (locus mgv1a0 00139m.g) derived from phytozome v7.0 (chr-ID scaffold_204 ; pos 399610 to 400298)
aagaagaaggtcagtacaatttttgcccgaaaaaaattgcatgtgtaatttgatttattttgatgttgatttttatgtgtttttattgttaagggcttctagtattttagggttctgttttgtctttgcttttatgtttaggagagaattatttccggaagaaatgcgatttgtttcagtctgcggtgggagacaaattgtggtattctagtgcatgcgataaactttaccgcattgagctttatgtttttctgtgtctgaaaaggacgtggttctccaactcttctcgagctggtttaaacatatgaccaccgtgtttagcaacccgacaccttcctcttgtctatttgggctgtatttttattttactatacaatggatttatttgttgtcaattgtgtgtatgttctttttgtttctatgcatactggagtcttgttgtagcccactggagtattgatgacttttctaattgtgataattcatgcttaagatctatagcaaaaatgggttatgagttctattgtcttggaatattttcctcaagcagacagttgtactttttatgtacattgtagagaacttagttaattgcattttggcatataaaatcacttgttttcatttctatttgttttttttcttctgtgattgatgggaactgctggtttgagtagaagaaggacaag

SEQ ID NO: 104308 - DNA, 500 bp, Mimulus guttatus
  Intron number 1 from transcript mgv11b017481m (locus mgv11 b017481m.g) derived from phytozome v7.0 (chr-ID scaffold_4 21; pos 26338 to 26837)
cgcattcgtgtcctcgaactacagcacgtattttcatgatcgcttttcgaatcaatttttgaccatgttgcagtccgaatttggaaatttgacatgagacgggaattgtagccagctaaaatagctccctaatgccgccggaaccagtcgatttggagtccggatgagaaatttatgctcgacttcgtggacactatcgaagatgttgagggatcctctattctaatttgattttattttcctaattgcaactcttttcttactctttgatcattattgcttcacggacacctaattatcaatttgtacctataagatactaaatccaccaattaaaacaaaaatataaattaatccataaaaaaatccacataaaggtaaacgttagtgttatttctaaactccactgcatgttttgtatttagtgtttttgctattgtttggttatacgtattaaagtcctagtgttcaatttcgtgttttttagaacgttgttgcga

SEQ ID NO: 104309 - DNA, 612 bp, Mimulus guttatus
  Intron number 1 from transcript mgv1a003307m (locus mgv1a0 03307m.g) derived from phytozome v7.0 (chr-ID scaffold_3; pos 4280924 to 4281535 reverse strand)
agatctcaaatctgtttcaaaaaggggaaccgttggtcagtaatttcttctctatttctttttatatgcttttcgtagttttattcgagtttattttcacattaaagatatgtatagatacctatatattagggcaaaactttgcagaaagtcaatctatcatctatgtcttatggtttactgaaacatcaagtcttgtgacttgttcatgctttttgagtgttcctctgattaaatttggttctcagcatggatcattcaattcctaagtgttcatattatgtagatgaacttttaaaactgattttgagaaaaaggtccatccagaggtcgttgaagttgctttgtttggagaagctggagtacatatagacatacctgatgcctgatggactcaattacattttttatttagtgcatcaaagaatactcatttagaccaactatattggatgagactttggtttcaaacaatttggctcattggcatgtatttgactttaatcaagtgtatcaaaaaccttgagatgctgtttttgagggatcttctcaaaccaagatttatgtcattgtttgtcctcaacttggaactaccttgttttttgtcaggat

SEQ ID NO: 104310 - DNA, 553 bp, Mimulus guttatus
  Intron number 1 from transcript mgv1a007275m (locus mgv1a0 07275m.g) derived from phytozome v7.0 (chr-ID scaffold_7; pos 158024 to 158576 reverse strand)
attaagcgcgaccacttcgattctgctcatgtatgttttgtcaacatctacttttcgtctggtgttttacacttcgattaattgtgagactggttaatcttaaactttttgcttcattttggttgtaaaaaatcattttgtgtgtggaatggattagatttggtttattgcattgattgatttgtcttttagtttgcgcatctgatgacgtatgagcatttatttgatctgaatctgttggagatgtatctttggataattacagcagcaacttcttcaattttagcattttgtgctagggattgtgagatcatcaagactgtgcttttctgttgtggttcgacatttaagagaatgacgtgagcaatcacgtgtatcttttaatttcatttgctgcgtgttaattgatagaactatactatggtagattcattgtcgcttttttttttcttttgttttttttgattgtcaactgactgaaatgtttgttttcttgtgctgattttcctctttaaaagccggctgttcataatacgaataaagcttcggacca

SEQ ID NO: 104311 - DNA, 492 bp, Mimulus guttatus
  Intron number 1 from transcript mgv1a015749m (locus mgv1a0 15749m.g) derived from phytozome v7.0 (chr-ID scaffold_54; pos 1154135 to 1154626)
atagctaattccgaagggaatattctcgtcgaacggtaatctcactttctccaatgcacacccatttttttctttcagtagtaatgtctcgtaattttgatctgcgctgtgaaattattgatcttcgtttcattttcattttcatttttttctgtaattaaagctccgattccttttccaagttgatctgcgcgtgtttaagagtttatagttgtcggatttatgcaatcggatgtatgtttctgctatctgtatttaagatccggaatggtaaaaaaataaaaaattaaaataaaaaaactgttaaaagggctaaaatttgggattgtttttgcagtctataaattaatctaagactttgattcactatattgtgatcaatttttccatggtgtgtgttaatttgtggagattaggagaattgcttgatgattaaagggtttaattttttttttttattttatttgattttattggtattgtgtagtttca

SEQ ID NO: 104312 - DNA, 510 bp, Mimulus guttatus
  Intron number 2 from transcript mgv1a015749m (locus mgv1a0 15749m.g) derived from phytozome v7.0 (chr-ID scaffold_54; pos 1154711 to 1155220)
aggagctcctcgttgctaatcacaagtatgtaaccatttctttatttttttccggagattttttttttttatgttctttcgaatttcgtttttcgtgggtaagaatatttcatggttacaagtccgaattttccgtcagatatcgaaatgctgaacagtcacagtgattgatgtgttgtatttgagttggaatgtatattaatctggtttagagattgatctgaaactgtaccttttgctccatcaatgattttgtgtgtacgtatttgaatttcggattacgaaaacaacctaaggttaacttgtataagtttttgttttattactacagagaagcaaaagctgcctcttctttcccttgcttgtgaagttgtaaagtcgatctgtaataaataaaatctataaaggttaatattactgtttgttttctgtacttttacgagtacctaatgctgtagctggtttttttattggacaggtctgtgtatattgtatacacggtgctgggtg

SEQ ID NO: 104313 - DNA, 610 bp, Mimulus guttatus
  Intron number 1 from transcript mgv1a024090m (locus mgv1a0 24090m.g) derived from phytozome v7.0 (chr-ID scaffold_8; pos 3306516 to 3307125 reverse strand)
acatgtgagtattcattcttctttaatttgattaattcaacttttgtttaatgttaatttaaggtagttatatttggttggtttttattgtttttctctttttaaccaactttgagatctcttgttcttgttttcttcaaaataaataataatcataataatataataaaaacacaatttcacataatttcccagtgttttctgatgatcccaaggtgaatcaagtcaaatgttattacatgaaacataaaaattcaaaaaaaattataaaaaaaaaaaaaaatatctaacttaggtaaaactagattcctacatgctaggctgttgtgtcagagtgaaactagccaaatcatgtgaatacttccatgtttgttttacagacaatgccaccaattatttggtcacactgtatatatgtatgtgtgtgtgtgtagcctgtaataacagccaatattccctatatcatcatttacaatgacagagtagaaaaggctgaatataatttttttgatataattgctctaaaaatttttaacttattaaatgttttaattatgatcaccccttaatttatttatttattttcccattccctacagattttacaaca

SEQ ID NO: 104314 - DNA, 802 bp, Mimulus guttatus
  Intron number 1 from transcript mgv1a011203m (locus mgv1a0 11203m.g) derived from phytozome v7.0 (chr-ID scaffold_21; pos 664146 to 664947)
ccttcaagctcgccaaatcatgtaatttttttatttttttttatgcgtattacccaattccaattgatcggtggacttttctcatttattttgtggaatttaatttgatgtgattgtaataatttccgtcatttaccttagaaaaaaagttaactgctgaaaaaggtgccaatcattcatgatctcttataagtttcttaggtatggattggatttcctgatgattttatgtttggatctgggttttattgaggcggatgacgaattggaaaagtttagatacaaaatcctggtatttgcataccttttatatcaattttaggcgattgaatatagaaaaaaatggatagaggtctgcgaatatctctcataatcatatggtgcaaatatttactttgtgagttcgtgttatttggaaaaccaaacgaggaaaatattttctttggcgttttcctttatctaaattcaaggcattccaggttttatttgatgcattccaggttttatttgatgtctcactggaatactggactgattagtgattcgtgcatttgcagcttttgattagttcattgttttgtgttgcgcttttatgggaacttgatttagatggatttcggcagctgatataatcttctagaacccatcttgttagaaagataaagaaatcacaagtatttgccgtttatggaaatatccttgttagtcttggttgcatgtatagagtatgtttcaataattgttctgattccttgaaatttaaaatattttttcttatcaggggatcaagctggagccgtgt

SEQ ID NO: 104315 - DNA, 489 bp, Mimulus guttatus
  Intron number 1 from transcript mgv1a011126m (locus mgv1a0 11126m.g) derived from phytozome v7.0 (chr-ID scaffold_66; pos 158126 to 158614)
ggttgagctacaaattcgcgatattcttcttttaggtactctctttttctcgattcgtatttatatttttatttatttatttatttaatttgaattcatttcttcctgattacgtagcgactttcgctttggcttcctccgatataagaaattctctgatctcgctgcatatttcagcgcgatcggttaatttctttcattttttgtttttcttaaacatacaagtgtagctttttttttgggggaaaaaaataggtcaaactcattattttatgcgtttttttttgtaattaatttcataaaaaaaaaaaaatcggcttttgcagattaagagcaaacgatgatttactagattgtaattttaggtctaaagataagaactttgtgaataacaggaaagggggtttttttaggttgtaaaatttttaattgattttgtggcgtttctgtttaggaattgctgtggttgttattgattgaggtgttatt

SEQ ID NO: 104316 - DNA, 598 bp, Mimulus guttatus
  Intron number 2 from transcript mgv1a001279m (locus mgv1a0 01279m.g) derived from phytozome v7.0 (chr-ID scaffold_23; pos 13489 to 14086)
ctgcagtacagggatttagtgggattcagtttttaatttttttttcttttgattttgtgtttcttcgattcttctgaatagggcttcgatctgagaattacaaaatgctaaagaaatatgatttcaccaatgaagaacaaatgttagctattttacttgaacaaggaatttatgtcgaagccaaacggtaaaggaattttaaacaattttatcttctgaagaattcctcgatttttggacctgataatggtaatcacagtgatagctaagaatggcccctaaagcaatatgatgggtaatacaaacgacttcaattttcacgtaaaatgtaacggaagattagggtggtttccttgtggtattagaaatttctcctttcacttataggatgattttgtcatctatactgtcacaacagtgattgtttacgtggcttcttgcttctgttcttctcttttgatttgttccgataattatttgatatactcgatggagcttataatttataaaacatcgatattgagcatttcttattagataggtttgaaacttttcttactaatagaagttaatcacaacgcaggaactgcatttgcat

SEQ ID NO: 104317 - DNA, 732 bp, Mimulus guttatus
  Intron number 2 from transcript mgv1a026386m (locus mgv1a0 26386m.g) derived from phytozome v7.0 (chr-ID scaffold_15; pos 2115289 to 2116020 reverse strand)
tgggacactcatatctttcttcatcacatcatttggtattaattatttcaattcgctgcccattctattatacccacatataatgtaaatcttacgaaatcctatcgaacaatggataaatcatatattgtttagaaatcaaagttgtaaggaattttattttcatcgattgtaaaatttgatcacatgaaagtatattttcctagtcagtttacgataaaagttatcggtattttgagtttacgcatccgtaaagctttgatggttgagaagtggttgtgtttgcatgatttcctacttataacttatttttgtgcacctgtctatatattatatattttatggtttgtgatttcgcatagcactaagtatttaactttttcaggttcgaaactttttttcgagacattgggaatagtcaattttgaccttaaagattatcttggtcacttcatcctcttcactacatattcatcctgtatatgatatttcatcgtatatgcatgcaattatcttgtaattaattctttgttagtcgataatttcatattatatctcctagggttctctctctctctctctctctctctctctctctctctctctctctctctctctctctgtatatatatgtcgaactaatgaaacgtcttcttgagggatacgtttccaacttgagccttcgttttttatgcagcaattggaaccatcttttcagctacggattctata

SEQ ID NO: 104318 - DNA, 626 bp, Mimulus guttatus
  Intron number 2 from transcript mgv1a010142m (locus mgv1a0 10142m.g) derived from phytozome v7.0 (chr-ID scaffold_18; pos 1478998 to 1479623 reverse strand)
gaagcagaggtattcttatcttcttttcataatgtttaggtgcccagcattattttagtatgagtgtatattgttttatgtttaaattaatagttcattgaccattgttatgaatgggtgtggtacttctttctttatttgactgacaccagcagcaggaacatcagatatgtaattatttgcgaatattcttttgattgctaataaggtcctcgattactagtggcaaattccctgctaagccagatattaatgtatttatccacccaacattgaaactagaatcaatatggttggtgaatggtatagttaacagttgaagtcgtataaaaatattaattgttgattctttttaacgattttaacatattttcaaaatttattgtttttcttaatttcatattcctgaaaaaagtgagtattcatcttgtaaagcatcaatgatacggaaagacattggaaagcctatttgaaacaagattatctcatttctgaagtaactaagatgaaacttattcttctggaatttgatatttaatgtttttatttggtagatggaggtattaattgtcgcactgcttgcttggatttaataaacaggacgactttgatctgtgcagtcggta

SEQ ID NO: 104319 - DNA, 919 bp, Mimulus guttatus
  Intron number 1 from transcript mgv1a020808m (locus mgv1a0 20808m.g) derived from phytozome v7.0 (chr-ID scaffold_20; pos 1630174 to 1631092)
ggcgatgttcataatcgaaatccgttgaatcgacctccaccttcaggtaatacaatttctctcttgttcgtataattaaacatgcgattcattaattatattaaagaactcgaatatgtttcgatattgtcttgtacattcattatagttgtgtagctacacgatctcaaacacccgtaaatgtatttattttgattaattgtttcacatatcacttgaattatttcaagtacataacttgatgagactagtttcgaggtgattcgtaggagcgaaacgagtgaatcgagaacgcgttatatcaagtggtcgatttttttatattttttattcttctgagactattcattttgtgtttattgttatgtttaaatttcgaacatagatatatcttgaatggtgtagttatatatataatctttgagtgacaacaaaaattttcacatggttaggcaaaaatgttgtcactactgggtgtcactaattctatatggtaacaatagaaaaagattaagtgagaacaaaaagaactattagtgacaataaaaaaaaattaactgtcacttaatatatcgatctagagacaacttttgatattgtcacaattagactgccactaatgccattttttcttgtactgtatttttgagtaatttagagaacttgatatgattataggcgcttgaatgttcacttaattttttttatttaaaaaaaaacaataaataaaaaatcttgatgaaaactgcaatttttcagtctcaacttccgaagaaaacaccaaccgaaggagtcatcctctcccgaaaccaaaccataacgaaaacaacaattacaagggaaacttactgccattgccgaaaccggaaaccccccctaaacagcacgagaaatcgagtgctccgtccacgtcatcatc

SEQ ID NO: 104320 - DNA, 416 bp, Mimulus guttatus
  Intron number 1 from transcript mgv1a025644m (locus mgv1a0 25644m.g) derived from phytozome v7.0 (chr-ID scaffold_210 ; pos 343402 to 343817 reverse strand)
tatccatcacttgtaaagataacaatgtctctctgaaaagtttgctctccgtattttcttgctgcatttcgcgattggagactcttcacataatgctggtgagctgtcatgatatacgaaaaaaaacggacgagctctgcaaattcgccgagatgactggattgaagaaattggtagttgaacattattcatttgatgatgaaagtttaagtagactcgcttttttgataaggatatctcctaatttggaggaatttgttttaaaggttagtcaattttctcttttgcacgtttctttcgttttcggttttgattatatcaacttatgtgtaaacagcaaacataaaataaaatacggtacttgtatgatttagtcacgtgcgcagagtagagggttcgatggttttgcagtaaga

SEQ ID NO: 104321 - DNA, 787 bp, Mimulus guttatus
  Intron number 1 from transcript mgv1a003438m (locus mgv1a0 03438m.g) derived from phytozome v7.0 (chr-ID scaffold_32; pos 1709034 to 1709820)
agagactgcttttggaggacggtcttattgtggaggtgcctcttcctttttcattttctattattttacgcaccaatttcgaattgtttaatttgttaattttcgctcttctgatctgaattttatgatttatttttttgttttcgttatttgtttattttatttgggggatttgatgttgttagtctcttgcaattcgagttaattgaaattgaatttttttcagatcaatttggatgaattagggattatctctatctagggcacctaatttagctttgtgcatattcacaaatgaagtaattgtcagctaagtaagtaattcggttggcccaagaaatactgaagtgtttgctttgcgttctcttggtttttcttatgaagattgaagttatttttaatcccaatggcagataagaatagattttcaaactgtgcttctttgatttaagattgtacgttttcgttccgatcacagtatcgatgatgtattcatcttcacattatcttgaacttgaggtgcttttgaccctgaagaatcgtctgtacggtgcattattcaccggtttatttgcgtaatcgctgttgttcgtctcacaaatgattaagatcaggcaaatattcattggctcgtgactataacttctgtactaagaacatatcttctttgaaaatgtttttttacatggaatattttgaagtacttcagtttgatggtggttaattcagctattcgttgtacatataattttttattttttttttattttccggtagagtgaaagta

SEQ ID NO: 104322 - DNA, 567 bp, Mimulus guttatus
  Intron number 1 from transcript mgv1a017455m (locus mgv1a0 17455m.g) derived from phytozome v7.0 (chr-ID scaffold_216 ; pos 324491 to 325057)
ttcaccacttcagtagcagcaagcacttccagataataatttgttgtctttgttgtttcgttctttttgtgcgtgtgtggtttccttatcgtgggaaatatgatgtcttttcttctgtcttttttatctattatttgatatactccagaaaaataacagcgattaaatttcctgacttttgagttttttgggtttaaattaccagcataggtacacagagggtcaagaatttatgtgttgccttcagaaacttctgtaaagagaagaacttcaacgggtgtgttcaacctattttgattataaattatcaatctcatcgatgaagttgtctatttgcacatgatattgccttgtttattgctgccaaattatgtttattgctgccaaattatgttctaaagttagctatgttagcatttgtgcctaatgaattatatatatgctactaacatgaactgttctttttggtttaactaaaggcccaatttcctgaacattgcctcggtagaagcaaacccaactaatacgcaagccctcggtcaccgagccgacctcgtccgacaccat

SEQ ID NO: 104323 - DNA, 865 bp, Mimulus guttatus
  Intron number 2 from transcript mgv1a003284m (locus mgv1a0 03284m.g) derived from phytozome v7.0 (chr-ID scaffold_48; pos 1325541 to 1326405 reverse strand)
cttgtttccatctgggatatttactctctcaacaggttacaaaatttaatatcttttcttaattcttatactattgtttgttgcttcgtcttctgcctcaaatgtatagaatttttgtaatacgtttcaaattagtttcgttttcagcagtaatacaatttcagacagcttatttgagttaggaggtgtgttatctgaataaatattgttaaattgattataagcacgttcatacctcttcgaaaatattagggcttgtaagattcttatgaaattttagaaatgaagttcttcgggttttcgggttttctggttttggtttcagttttggtttcgcattctctttgaaaaatggcaaagatttcatacttgtttgaaaatttagtttgttagtaatcattactagcaattttgtattaaataagttcagtcaaacgcattataatatgctgtagtttctctcagtaaggtagaaaatgtcgatggggtcaggttttaaatgatcgtatgcaacatttttacaaagaatgacttcttcattttttcgtacttcaccaataaataacactgtcgtcatagttacatagcttcgtagattgtttgtttcgagtataatatgtcacagattcaaatattggcatcctacttattaggaagttattgaaatcgaatcaaattgcatgggatcattcactttgagaaactattaaaatatgaaggaacacattcttcggggggaccatcctttatttttatgccttttgattttgttgtttgtcaatagtaatgagggaatgattgtcagtatgattatgaatttgctttttattgcagaggattagagtttaccgtgcgaagctcgcat

SEQ ID NO: 104324 - DNA, 643 bp, Mimulus guttatus
  Intron number 4 from transcript mgv1a010379m (locus mgv1a0 10379m.g) derived from phytozome v7.0 (chr-ID scaffold_17; pos 1888364 to 1889006)
tgacgatttatcccaacacttcacaagtatttctggtaaatcattaaattccttttaattctgattttatttaatcatttggtctttgaaatactaaaaaaaatgtctgtaataatcttctttagaaaaaataaaattgatcttacgacctaattgagcgaatacgtgtacattagctttttataatcatgcatcgaaaacttaaacaacgatcatgcacaaataagtgaaaatgttgatattataatatagacgatgcatttcactaatatataacaacttaagaatttgattgaaatagtcattcaacacatggtatcaaatgaaagacagatcgccgaattaaataaaatgtcgtttaattttatgtatgtggacgagaataaacatatatacaccggtcccaataattaacctgactagtcacttgttggacggttataacttgtacgatcgacttgtcatgaataatcatgatcatgtgctcgatcgacaaatatttattaataaaccccacccaaccccatgcatgcattaattcatggttggcatatgattaattatatatgacattttatttttaatttattttctgaagttaattatatatatgttgatttgattgaatataatgcagaaagga

SEQ ID NO: 104325 - DNA, 470 bp, Mimulus guttatus
  Intron number 1 from transcript mgv1a026070m (locus mgv1a0 26070m.g) derived from phytozome v7.0 (chr-ID scaffold_123 ; pos 218723 to 219192)
cctttcattcgccgcctccctgaattcaaattctggtatttatatattattttgtcacattgaggtttgacttttataagtttatcgtgtataagtttatcgtgttcttgaaattgatattttgtcgtgtatttgacatgcttcttttgtttatcattcctttattcagtatcatgcatcggtacttgctaggtctatttctggttctgatattccctttttttatttttttggatataaaaaattctttgaatgttgtggttttatatatgtaagttaaggcaaataattttctttctgatttgaggacgaatactcttaataaaaggttcaaagtgaaacgatgaagagacttaaattgatttatttttatttattattactattttttaatttatacgtcgatttaagttttgctaatgatgtgttaatatgttaatgatgtgtcttaattttggggttttataggt

SEQ ID NO: 104326 - DNA, 917 bp, Mimulus guttatus
  Intron number 1 from transcript mgv1a019157m (locus mgv1a0 19157m.g) derived from phytozome v7.0 (chr-ID scaffold_21; pos 2035213 to 2036129)
ccaataatcacagataaagcacataaattgatcaggttcatgcactaacaatcataacaagtagaagaaataatcataaaatcataattgcataatctcaagaaaacgggatcaccatccccacatagggttccaataaaatcctagattaaaagcttagctactcgtaattcttatgataaacaaaatagaataaatgaaataaataagaaaaactatgcttgagtcttcgttgatcttcgttctccgcgttttttggtgtaaaatttcgtgcttatggtgtagagacatgttgcttttataggcttttcttgataaggaagtagtagaaacctaataggaatcaatttccgccactttcccccatcaggacttgttcttcgattttcgccatgttggagtccgaattttggaatattgtgtaaataagaattgtagcccttgaaattagctttccaatgccgccaaaatcacctaattcggagtttgtatgagagagatatgctcgaaatcgtggacagtgtcaaagctgtggcgagattccttcttccaatttgatttgtttccttatttgcaactttttcctttctttttgatcttttttccttcatggacacctaattctcgtttttcacctataaaacacaaaatcaatcaattaaagcacaaatataattaaatctaaacaaaagatccacgtaaagtaaacgtattgagtgtaaaatctacactcaacatgggcctctatttttattttgtattcacaacaaattcaataagagaaggctgcggccccgcacatctcatcgtatatctcgatatttcgtaataaatactaacaattaggaaatgttatcctagatgttatcctaaaattcttagacggtctttatcggctgaaaaaagatcaaccgaag

SEQ ID NO: 104327 - DNA, 825 bp, Mimulus guttatus
  Intron number 1 from transcript mgv1a009483m (locus mgv1a0 09483m.g) derived from phytozome v7.0 (chr-ID scaffold_48; pos 810215 to 811039 reverse strand)
gaattcttccgtgatctcaaatttctctgccgctggtgagtttgatgcaatattaatttggacacttctattcattttatgtgaatctgaatttgttgtttaatcttaaatctgtgaattgagatatatccgtgccctaggggcggcgatcctctataatatccactgagaacattgataattaatcacagctcaattttgctcattatttttaatttttttttttttattttagtttttaggttctgaatatgttcttgttcggagaatctgtgggtctgtgccaattcagttgcttttgagctcaattcatcattttgtttttcttcactacaactgtagtagattttgtgatgggatattcgaagatttcgtttattggaatgattgatttcgtagtttgatggttgcaatttgttaacagggctaggatctacttctttatagaaaagttttagctgagcatcaatttttgttacattttgtttttaacaaagattttgtctttggtcattttgaaacagagaataaggtctgcagtttcgatacgtgtttgtagtgtggtgtaattcagaagattttagtcggtgatttaatttgaatttgctttgagatttgagaaagaaaataaatcgacttcctttggtttctttcgaatgggtttcattatatcaaataatattggattaatcatcatggatcaccctataatgatctatgagtctatgactgctcttttcatgttggttcagtttacgttttactatgatggctaattcgatctaattgacacggactttcggaattgaaacagatctcttacaa

SEQ ID NO: 104328 - DNA, 803 bp, Mimulus guttatus
  Intron number 2 from transcript mgv1a008416m (locus mgv1a0 08416m.g) derived from phytozome v7.0 (chr-ID scaffold_13; pos 649724 to 650526 reverse strand)
gagatatagtctgctatcttcttcagcatcgcgtgagtgagtggtattcagaaactactatgttattttttttatgttcgttttagtatataagggaaatgaagccgattcaaagaaagctgttgtttcaactccatgttactgcacatattatgtactcattgcggtgttgcttatatgattgttttgaaatgggatactcaaaagctaatccgaattaggataacgtacgggaagatgactagttttgagttagttgaacattttgagaactttatgatgactagttttgcctaatggtttcatattatgaaatattacatgaatgtaggatacagtttaggagcattctgatacgaaaaatatatttcatgaatttagttagtggaagaagtttattatattattgagttagtgggtggttcaattttaattcgtcatttacatagaaataggttccgttagtaaagaaagtaattttccgtgatatgcatgtttttagtgcgggtttagtgaagtagttcatatattgctattagttgtaagtcctataagttgagtactgcgtgaacgaaaatggggatatcaagcttttagaagaatcaaatacttcttttatctcctctatttcttcctattctatcttctcggtttcttcttaattctcaaaattatttatgctaaaattaccacatcacattcttgatctatatatatatatatatatatatatatatatatatatatatatatatatatatatatatatatatatatatatatatatgtgggggtgcaggtag

SEQ ID NO: 104329 - DNA, 889 bp, Mimulus guttatus
  Intron number 1 from transcript mgv1a003120m (locus mgv1a0 03120m.g) derived from phytozome v7.0 (chr-ID scaffold_25; pos 358406 to 359294 reverse strand)
caggtttgttcaatcgatttctataaaatcacaaaaccctcgccgtatcgaatatgttagttttttttttaggagttttcagacattctctcgattctcgagtgattggatatggtaactgaaacaagcggaaattcatatttatacatttctgcttgaatgaaataattgttggggattttatggttctctcgtactttataatctctggtttgatggaatacgatgagaagacgaatatgaacattgcaatttggtttaattagggtatcttgtgtgaaattggttgcaggaggttcattttgtgagatgcttttgagaattcctgttgtccagactttatgaatcaaatatttgatttatgatttggatgttgcgattcattattcagctagattcttcgcatgtagtgttgttcgttatcggacgacacttgtcttagggttgtgtagaaaataattatttgttaaagttctgcaatgtgcttaattatcgtgccggcttctttgaagttcagaaactaattgtgtgataatttaatcatcaaactaatcacaaattcttgataaaactggtagggttaagctggttaaatataggatatcttgtatcatatacttatatgatttattgttgtggaattcatgtatatctaaactactgtcagtccagagctagttttataataggttttgcgtactttaacaacgttataagtcatgcttgaccggtaagtcgaccgaatttgaaaaagggccggacggtcttaattaatttattcgaatctttgttgtaagttttgatgttttcatccctgtttattttatttgtttgattttatttataatgatgtatgggcctagtgatatgagtgggctaaactgtgcag

SEQ ID NO: 104330 - DNA, 524 bp, Mimulus guttatus
  Intron number 1 from transcript mgv1a017086m (locus mgv1a0 17086m.g) derived from phytozome v7.0 (chr-ID scaffold_98; pos 473736 to 474259)
ccgtggtacgtacataatttttttttcgttttttttgtttattttaggaatttaattatctcccttaatttgtgtttaattatttacatttttctcgattattttgttattggataatcttatagtactcactatagattcgaattaattttgacttttttttcttgagttaattagtgaatgaaaaatcgaaacacatcttcgacgaagtcgtttgaacttcttctatgtatacatcgaaacatactcgaatggaattgtattaaacgcccttgtgttgattctaattgttaaaaaaatatttatgttaatttattagcaaaactccctataagtcaattaatttagtagattaccccgtaaaaactcgtagtttatgggatttttttgtaaaaatactaataacattggattcgggatactgaatgcaataaactcgatttgacatttaccagtaattaaaagtgttattatgggttaattaattaattaaataaatgatgaaatataacttataaaacagc

SEQ ID NO: 104331 - DNA, 1023 bp, Mimulus guttatus
  Intron number 1 from transcript mgv1a014351m (locus mgv1a0 14351m.g) derived from phytozome v7.0 (chr-ID scaffold_219 ; pos 103047 to 104069 reverse strand)
cttgctactatcgccggcgtcagtttactgtggtatggtactctctctctctctctctctctctctctcacacacacacacacaccattttctttctccaactaggaacaataaattaattagtatggatctgcatgcagtttgtgattttcatttattaacctgaatgaatttcatttcttccacagtaggggttttattttggtttgggcggcagagttcgattttggtggcgcgtgttgtaagatttttttttttatttaataattaagtcactagggaatttagaagtatcgatctgatctgataatattgaaggactctttatgacatctcgcatctaattaattaataattatttcattctttcaaagaaaggcagacgttttatttaaagaaatgccttatttatgtgtccgtgtcagtggagtggcgagtccagaaatttgttgtacttaaggaatttagtggagtggcgagtccagaaatttgttacgtgggtaggattaaattttcaggggcgcggggacagcgactgtgtgaaatttcttttaggacttttcttgacaaaaacagaaaatagtaaaagaaaaaaagaagaaaaaaatccaagtgttttttttttttatatttgggttttgggtgggctaattaataaaattggggtttttttttttttttttttttttttgcattaatttgtattttgggtgggctaattaataaaaattgggtggctaaatagatatatagatgtaataatataggggataaattataaattgagggtgggagtactgcatggtgtctgtgcatcatagcttataactgattgactgctaccgatatcgtagatagcatgaatgtttaatttttaccaacaatttcgaactatttcgtactgaaatgatcttgtttgtgttcgatttattaatgattatatatgcatatgacaagcattttccctttgaatactttttacgtgcagacgaggaaaacaatctccttcaaggaataaacagc

SEQ ID NO: 104332 - DNA, 615 bp, Mimulus guttatus
  Intron number 1 from transcript mgv1a010959m (locus mgv1a0 10456m.g) derived from phytozome v7.0 (chr-ID scaffold_79; pos 879524 to 880138)
ctagtacgtctttttttttttttttttttttttttttttttttttttttaatttggtgtttgattgattagttttatttgatttgattcactggtgatttaactggatgtaacagtgatttacggcactggattaattacaggatgcttttatttgtcgagttgcttttatttactctttatctctcagtttttcttttggtaaagagaatgtgtgttgattttgcctttttcccttccgattttatgctttacttgatgttttctgtgcttaatttttgcttgtgaagataatcattgtggaatctataatgcttcttttgctgttgtctggaaattgatctggatttctggattcggttgagcagtttgagctgaagaacttataaaataataatgcagttgattatcgagttgttgatgccaattttgtgatattttctatcagttcagttgattaaagtcgatcgttacagtttgtgattctgtgaaatatctatggaagtgtggtagttgttacagacgtttattttttgcgagcgtgtctgacattgttatttttatgttttccgttttcattgttcaaactggttggggaattaatcaccgtggacag

SEQ ID NO: 104333 - DNA, 749 bp, Mimulus guttatus
  Intron number 1 from transcript mgv1a024813m (locus mgv1a0 24813m.g) derived from phytozome v7.0 (chr-ID scaffold_16; pos 2088554 to 2089302 reverse strand)
cttaatactaaggtaatttttcctttctccatattcgctagtttctaacccttgcaattgcacagagggattaatttcctaataatcaaattaattgttaaaattgtcagttgattgtaattaggaaatcgcccaaacgagtttgttcaattatggaaactgagattgtggttttatgatgtggaattttgactctgggtcagagaatatcaataatttcaaattgtagtaatgataggtttgaatcaaatcttcgtgttctcttttgggaattgaaggagggaattgatgtcctgaaatgtgttcgaccttttgtctgaaagagcatgtttcaaatgattaatcggatcaatttttttagtcaattagcatgttctgtgattagtaatttttccgcactctacacttttggcatgttctgtgattgaatttaccaacaatgtaatgtgatggatagttgcactgctatatgtagatacaatctaactgattcgcatgcactcagttacgctatcgtttgttttatttatttcatcacaattctttatgccgctggcatggcagagttggtcatgaataatttactgacttactttcatttgactcagctcttgcatctagctgctagtcgtaaacaactactctcagcatcatgaacttctcttatcctagtttttggaattcttttctctatctatttcctttttctaatgatctgtaactgattcagtttccaagtggggcctttg

SEQ ID NO: 104334 - DNA, 581 bp, Mimulus guttatus
  Intron number 4 from transcript mgv1a008602m (locus mgv1a0 08602m.g) derived from phytozome v7.0 (chr-ID scaffold_228 ; pos 160491 to 161071 reverse strand)
acttcaattctcgctgtttgtgtaaataggaagaggtagtttttcttacttatttctaataaataaatacttattggttgaatttttcatcattactcggcaatcgattcattgatctagtttaattggagataagttgaaggtgctttaagagaagttgagctcagtatactggctgaacgaaccgattttacatcctgccatttctctaattattaacataattatctacatcttactgtaaaactgttcactgactcggtttcttcgaaatttacaagaataccacttaatagcgtccaaaaaaaggttggtttgacttgttactaaaagcagcaaactagtattaaaagttcgatttgtttaaggattgtacagacgatagttatcatcagtaatcaccaggttgagacaaaaattgacatgagaaagttcttaattttattattaataaggttttgtcgtgcaaattatgcatctctattagctattcagaaattatctcgtcatttttattagtttcttggatttactctttatatgcagattgatagttgtattgcaagagaaaacttatattt

SEQ ID NO: 104335 - DNA, 771 bp, Mimulus guttatus
  Intron number 2 from transcript mgv1a008918m (locus mgv1a0 08918m.g) derived from phytozome v7.0 (chr-ID scaffold_212 ; pos 50981 to 51751)
gccgaagcaaccggtgtatccgacacttcacaagggtactgttttttttttcttcttctaaaattggcccgcaacataatcgaacaagaatagaaccctgcacaatatatattttggctaaattacaactacccctgaggtatggtcaaattacgaaaaccccccttctatttgggtaattacaaccatccctcaactataaatcttcttacaactccacccttatggtgttaaattcaaaataatcatctagattccgtggaatgttctctagtttgtactcgttttgtgcaaaaatacagtttctgatgcaccacaatctgatatatacaagccaaaagatacatcttataatcatcctgcttcaaaatgtggagctcgaatgggataaaacggatacaaaaatgagaatattccatataatctagaagattccactaaatttaaaactgcaagagtggacgtgtaaagaagatttataattaaagggatgattgtaattacccaaacatgaggggttttttcgtaatttgaccgtactaggggtgattgtaatttacccaatattttttatattttttttcatttttttctcgaatacaaatcaagttcaatggatttgttattatgaattcaaaaaccttcgtcgctgatcaaatattcccatccaaatgcaaccttatattaataaataattaattatattacgtttttcaaatttaatttatataaataggtaccgagatacacccgggatttggacaaaagagc

SEQ ID NO: 104336 - DNA, 433 bp, Mimulus guttatus
  Intron number 1 from transcript mgv1a002699m (locus mgv1a0 02699m.g) derived from phytozome v7.0 (chr-ID scaffold_113 ; pos 798564 to 798996)
aaggtacttttaatttctctgttttttttttcaattgttcatatgcttgtgtttatcttcttgatgttgtatttatttatttatattattagaaaattcgagttttttttatttaatttttatgtatgcaaaaatagatcttacatccttttagtatttgggaaattttaatttttgaattattaattaaatgaggggagtgtttgtgaagaatcattttgatcttgccttatgaacatctgaagttggaaacttgatggttgactttagatcttgtccacaactcatgatgttttaatcttcgacattgatttaggcttgtaatacaccgtttcgtagtcgtttgttaggtaatttatcgaattaattttttcgtcatttttttttggtttcttcagtcacaacttgcaatcgagcggaactcgcattgaaa

SEQ ID NO: 104337 - DNA, 503 bp, Mimulus guttatus
  Intron number 1 from transcript mgv1a013224m (locus mgv1a0 13224m.g) derived from phytozome v7.0 (chr-ID scaffold_170 ; pos 3604 to 4106 reverse strand)
tcgtcatccgtacagcatttttttcgtaataacaggtactttgaaattcagtgttcgggggttagtttgcaattttgcatgccattaatttgctggaattttttgaattccgaaagttcaaatttcatttgaaatattttaattatctgttttacctttttaattaacgtaatttgtgattttcctctgtctcaatttgctggaagaatataagccaatacaattatgtgtgtgtgtgttagagagagagagagagagagagagagagagagagagagaggattttgtttttgaatttaattatgtttaaggccgctaatttgatgatttgatttattaatgacagaaaacttaatgcattacatttataacttccataaagtataaatgtcaaactcaaaaaatcttccctatttctatctctaatgcattgtattccttattgtttttacagtatagtttaattttttttctctacaggattcggagattttagattttgg

SEQ ID NO: 104338 - DNA, 773 bp, Mimulus guttatus
  Intron number 1 from transcript mgv1a002486m (locus mgv1a0 02486m.g) derived from phytozome v7.0 (chr-ID scaffold_41; pos 382984 to 383756)
ttccggcggaaagttcaatttttttgtgattgttggtgagttttcttaattttgctcttgttattttgtattttttttcagtttgagctactggaatcagttgtcgttgacttcaatctctactgatctgctttgcgtttgtgacatatgtttcgtttatttgatttaaagcaatttttttttgatttgctttttggattttaaacttgatttgtgttaggttagatttattttgataattttttttttcttttatgatatggatttgttaggttaggcttcaatctctgctgcagttgtgtgtatttttggtgaatatatgcagtttgctcatgaagatgcgttttttataggttataggtattattcgtttttacaaaatggagtgaagaggtagattccatttttggcttatccttgaatattgacttggggaattagcatactggtgtattgactttgattgcccttgggaaaatcttttttattttccccatttttctcccttttttgggggaaagattcccttttttttttttttcgttttatcgttatatataagaccaaaactttgtggatagtcagtctaagattgtataaatttgattgtatgtttttgtaatgataatcttgatcacttgagaaaatattttgttaatacatgtttatgttgttttccccctttatgctatatgaaaccatatgatcaaacctactgccttgtatcttcttcatttgaaagtgcttcctttttgcttgcaattgattagagt

SEQ ID NO: 104339 - DNA, 941 bp, Mimulus guttatus
  Intron number 1 from transcript mgv1a008136m (locus mgv1a0 08136m.g) derived from phytozome v7.0 (chr-ID scaffold_27; pos 985323 to 986263)
aaactaggtatttataattttttttttttttttttgacggattattttttattcctgaaattatattgaatatcatgtttagtttggcgttatgtttctttgtagaatgattgtgcatataattttacttctgttgcttatgtaagtatcttagcatgaagctaataaattaacacgaaattgcactttgaaagggtttgcaaatgactgaaagttgaaccacgtaacttaattaagaatcaatggagcgttaatcatttgcttgaatgcagtacttagtaatgtgaaaccgatgaaagtggatttccttttcttttattttcattctaaacaagtattgcctccgtttattacgaaaactagaaacattattttcatgttttattcccaaacttaatccttaactccaacctgaacgaattacattggtcattgtgaactcatcaatgatcgaggttcttggaaatggaaatgagtttatttgtctatcagtttgattatagatgcggtagaatcaattctgtaagcagatctgcaaattgtatgatttggtgtaacgtggccatctttgataaatgtcattgagtctgcttacaatgctaggaatagcatatgtagttggtacctaggaatctccgcttatgattaaacgaagaacaacttctatatttctagagtctggttgcatccactcagtataaaaaaatatgatatgttattcaaagagttattaagatgctccattgatggtttttgtgagccttattaatggtctctattgttcgggaaaagactctctgttgtcgctaagtagtaagaaacaagcatatagtaggaaatgacattatgtatttattgttcagatgcaaagaaaactgtaatgatgatatttatctattcatttttgcagcgttactaagcatctggagtctgcgaatacc

SEQ ID NO: 104340 - DNA, 761 bp, Mimulus guttatus
  Intron number 1 from transcript mgv1a006552m (locus mgv1a0 06031m.g) derived from phytozome v7.0 (chr-ID scaffold_39; pos 471306 to 472066 reverse strand)
aaacagttgtcactaacaatcgctgtttcgagacggtaagcaacttatctttgctttgtttaattgagctgattgttcattcattcatgcaggactgttctttcttttagcatattcttatctgctcaagcaatctccttttctttttcttttttataaggatatttgtgtgtgtgtgtagatattcccatgtgtaatgttattatttcaagaatgatagatgtttcactatatatttttgaattgtggaattgggtttctgtgggagagtaaaagaaggatcttttttatgttgagaggtatattgaggttttgttgtttgtatttttagggtttctaattttaattgtgaaaaagcaatttcattttttttcgaattcaagattggttttttattgctccattttgtgtgtgcgtgtgtgtgttttcttggtttttgttaccgaaaaccacatgaaatctagtgaggtgattacatgtcccattgtccctattaggtgatgcttgagaattttcgatagaggtttagataagcaagaatataataatcgagatcaagaagaagatatgcttagtgatgatgtatgggtattttcttcggttctaattagatatcgattccgatcccctttttcgtggaggttttcggattcatattctcttatgtcattttgattctttagcattatacttgtacgcgcaattaatcctcttttttctgattttattcgaaacctgtatgtttattaggccgaaaccca

SEQ ID NO: 104341 - DNA, 622 bp, Mimulus guttatus; identical to SEQ ID NO: 100641
  Intron number 1 from transcript mgv1a006054m (locus mgv1a0 06021m.g) derived from phytozome v7.0 (chr-ID scaffold_66; pos 912671 to 913292)

SEQ ID NO: 104342 - DNA, 827 bp, Mimulus guttatus
  Intron number 1 from transcript mgv1a008526m (locus mgv1a0 08526m.g) derived from phytozome v7.0 (chr-ID scaffold_121 ; pos 706351 to 707177 reverse strand)
cagcgattctctcttcttcgtcgacaaatccagaggtatgccggaaagaaaagaataaacatttattaaaatcatttttatcgatttttggggatgaaattgaagtatgtacaatgatgatgtaattgattgcatactagtgattttattggcgtgtttttttgagtttgagtgtaataatttttgggggtgaaattagggtttctgagctccattgtagttagtaaataaaaacgacactcgaaatggaaattttgttgtcttagttttatgggggtcagactgttgaagaatttggattaggggtcaaagttggaatggagtttccgatttccgccggttctgattggaaaagtttcgatttttggaacaatttttttcgttccaacttccgaaaatcctatttctgaaaatttccgatctatttggattggaattggaattatattaaaaatatttggaatttcagatttccgatccgattcaatttccgaaattaatttctaaagtttttgtgaataaatatgtaaccatgttcttaccttatatttggatatgtttatgtacttttgcaagatagataatatggtcgttttgatggaattttctgatttgattatttgtccgagttttctgaaaattgttttgacagatgtagatttgactgtttcgattggtgacctatttgatgatggaattctttaactgaaataatttcgttcgtgttgacaagttttatgatattttgagaggaaatgaaatgggtatttatatttcattttacattttcagatctttccgccaggcgaaagattgacaaaagcaga

SEQ ID NO: 104343 - DNA, 1055 bp, Mimulus guttatus
  Intron number 1 from transcript mgv1a019419m (locus mgv1a0 19419m.g) derived from phytozome v7.0 (chr-ID scaffold_64; pos 1251408 to 1252462)
gcccaaataaaagcattatcgtcaaattactcaaagtaaacagaacttgaaataaattcactgctagtataataactatacgtaattgggttttgatttcttctttccgtttctttttactaagttttttttccccaatttgttgtttctttgcttgttttttaccgtttgtatagatagttagttctatcgattttacttcactgtttcttctactttagttttctttgttttgccacacctgcgccttgaaatcctgaaaaattcgcactcacagatacctgaagaaaaaaataagaaaatcgaaaagattgtttactgtgctttactggggtttattgattcaaatcttcgtgatttttttacattacacgttggtgtattgattgaacaagggtttacaaaattgataagtattcatgacctatattttttttggttgtgcacaagtagtgcatgtgtgtttattttgagatgcttattgtgccgtgcagttgctatctgtgctcatgatcgtgtagtgtttgtacaaacccctgcgagtggactcttcaagtttattttcatgtggttttagttgtaaatggtactgctattgtagatctgaactgtggtaatttgaatgttaacgtacttttttgacacatgcacgaacatgtaagaagctggcaactgtgtagattggttttactctaacttaggaatataaatatagtaatattatatatactactgggttttgggttgccattgttaccacaggcggacaaagcatatgatgcttgtatactgcatgctgatgcaataatcttaaattaaggattgtagaaggtcacttttagtgtgtgtattccttcagttcatttgattttccccttaaactctgttttaatccaattaatagagtacttaatcgaacacttctactctatggctgcttatttggctaattatgtgagattacgtaagtttctgtagctttttgctatgtggtaataagttgtaatatgtttaatgcagcaagccgctagtgcttttggaaagttacaacagtc

SEQ ID NO: 104344 - DNA, 403 bp, Mimulus guttatus
  Intron number 1 from transcript mgv1a016404m (locus mgv1a0 15989m.g) derived from phytozome v7.0 (chr-ID scaffold_15; pos 159837 to 160239)
tgattcttctccgttgtttcgccggcgcaacggaggtattacctaaccccgctatttcgatcgccgcttgaagattccgttgtattcttgttcattgttattccaattaaattgtaactagggttgggaatttttatttgttagttaacttagacagtgagacaaattttgattttcattgttgttctggttattaaattatccaagttttgatttttcctcttttctcactgattaattgtcttttttctgtgcaaaatcaaattaattaattaattaattaaaaaatgtattatgtttaaatctgtttattaatacaaatggttttaagtcaatgtttaggtgtgttgacttgttatggatgctaggtgtaatctttgttaagagcagcaatttggtttac

SEQ ID NO: 104345 - DNA, 779 bp, Mimulus guttatus
  Intron number 1 from transcript mgv1a001265m (locus mgv1a0 01265m.g) derived from phytozome v7.0 (chr-ID scaffold_24; pos 520796 to 521574 reverse strand)
atatattgatctctctctggattccgatcaaccaggtataacatcgatttatctttctgcctttatttttgtccagttgatttgatttttttcgttttaccgggtttggggttaaaaatttgcttcatttcatttggttcaaggagataggtaatgttatgatattgaaatttattcggagaggaaaaacctaagtgcagaggtgagatgttgggatattgaatcgagactaaagtgcatggaatttgtcaatggggcagaaaagatacaatttttttaaatacatcaacatcttaactttcttaaaatgattggataagtgtggtgagtgttttgttgaaatttgttttgaaacgaatgccttgagcaactagtagaagagcaacttttcagtgacgtgtttccatgtatgggatcccaagtagattaaacaaagtcaataaggtgttccgtaatagtgaacggctctaagctctacgtctgttgtcaaactactgtttctgttggaatctcttaaaaaaaaaacaggttagaacaaaagaaaggtgtcgtagctatctagtttgtgcgggtagcatacttctttgctgtatgcttcgatatttgcaggaaggattaaactgtgtgacttcatccagttacaagtaaggcttctctaaattccagaaacttctttctcgtagtacttcatgtttatgtttaattaaacagcaggtgttagtattatttcttgtagctagcgtggtatctaaatacctatcatattgtcttgtgaccag

SEQ ID NO: 104346 - DNA, 608 bp, Mimulus guttatus
  Intron number 2 from transcript mgv1a004022m (locus mgv1a0 04022m.g) derived from phytozome v7.0 (chr-ID scaffold_87; pos 562160 to 562767)
aagatacagctgccgaaaccaagtcactccttcaggtatttcactaagaatctatgatatacgtgtatctaaatgttgccgactttatgctagttcccgagtccacaatttatttcaattgaactgacggtgactaatttcttgtctattcgactttgattttgtgattgctgcattgataagtgaatggtaaattcaagaggattacaagtattgtatttgtggtcacgggtgtttaagtgtcaactgtcaatagtatacttacgatgtcttctatttctcacttgtgaaacgatgactgtaattggggttaggatctactggctgcgagtcacattgtaattcttggaacttgcatgactcagcatcacagaactctatttgtgaactttaaatcgattctgttaaatcgacatttatcacaaaactatgaaaaaacctctgcatgtcagtgtatatgagaaacagtgtacttttatgcctcgtatgatttgacaaaatcctctgcttaggaatatgtttaatggaaaatgaactcatataatctagaaatattccggaacgttattgcaggaagtattaactctgtacacgaaagagctacctgc

SEQ ID NO: 104347 - DNA, 478 bp, Mimulus guttatus
  Intron number 2 from transcript mgv1a020961m (locus mgv1a0 20961m.g) derived from phytozome v7.0 (chr-ID scaffold_5; pos 3903153 to 3903630)
taatcacatttcgggccattacctttattcaccaggtatatattttttttttatgggaaaagtacagtatgcaccatcatgtttgcaccgattttgtattttggtccctcgtgcacaaaaatacacatttgattcctcatatttaaaaaaaataaacacttttagtcatttccgtcaattttccgttagtactaacgaaatcaagtgtgtgccactaaaagtgttaagctattgaaacttgatggaccaaatgtgttttttatgaacatgatggaccaaatgtgaagtcggtgcaaacaagagggatgaaaattgtaatttccccttatctttatctttctttttgtttcttctttttttatttttcgtgttaattagtttgttttagtcctatagagtagtttctttaaattgtcaatgactacttttttttatttataatattatttgacaggaataacaagacgtttccaaaaca

SEQ ID NO: 104348 - DNA, 720 bp, Mimulus guttatus
  Intron number 2 from transcript mgv1a011991m (locus mgv1a0 11991m.g) derived from phytozome v7.0 (chr-ID scaffold_20; pos 651821 to 652540 reverse strand)
gataagtttcagctcgccgaggatcctgattctgtgtatgcttcttctacttctgaatttttttccccatttttttttttctttttagaaattgattgttggctgatttagggctgaagaattaactgtgaaaaagacaaacagaaaacctgacaatttgtttatcgtattatattttctcagttacaatcgtcgtttaccgatcatttcaatactatcttcgtggaaataaattgactgatgtgtattgtgtataaaatggtgaatctatatgagtcatctgattatattttctcttaggtttagatttgtgttatttattatcaattttaagaagttagttgcggtacttttttatattttacttctcatatagtacgtttggccacaatttaacgtaaagtcgagtacttttgacctatggagaagtatgtttcgaatgcagcaaaaacttgacgtgatatatatagaaatcgagagattaggcagtttcaatgtatattatggtcaaatctcggcaatgccgggtaaatttataccgttcatctacgtgcattaacatggatatgcgtgtttttgtgcgtgaatcaatggtaaagatcttttcgttgtagcctgtgtaggcggatgtagaatgtagcataagactttacttttgatatacgtatttcatgtgaacttaattttattctgatcatgcaggtttccaaagggcgttcc

SEQ ID NO: 104349 - DNA, 742 bp, Mimulus guttatus
  Intron number 1 from transcript mgv1a014324m (locus mgv1a0 14324m.g) derived from phytozome v7.0 (chr-ID scaffold_48; pos 1266081 to 1266822 reverse strand)
acgtgcgcaatatctctcaagccctagtttggcaagtaggttcattttcaattttcccccaattaaaacctcagttgttttgtctttgtgtttgtgtacgtgcgcttatgatttaatcgcaactgcgttgtaaagattggatttttaagcacaaacttaaccctaggaaggattacaaaaacaattgtttggcataatacattttttttttttttttgttttttgattaaatactttagaattgaattaatcaatatactcgtttacttagaaatattagggattgaaactaatttgatctcaagaaaatcaattatttggtaaacttgtattcgacttctaaagactagtgtatcggtatcaatctgatttcgcagttgtagttgttaccccttacgatacttttagcggttgtttttaatggttgattagtattgtttctcaaacttgttgatccctctgccgtttttccacaaccaactgtgcaacaatgttggaatttggatagattattaaccttaaattttacatttttatacgtcgttttccagctcttcgtattttccttaatcggtcattataaaagtcctttatcttgtaattcttggtttatgaaagcaagaaataaaactatgcatgtcaatatatgcttatgtagcctaaagagaaaaaatcggtttgacatcgacacgttcttcaatcaaatgagcaggttaagcagaagcagagaggagcaaaaagg

SEQ ID NO: 104350 - DNA, 902 bp, Mimulus guttatus
  Intron number 1 from transcript mgv11b018005m (locus mgv11 b018005m.g) derived from phytozome v7.0 (chr-ID scaffold_2 7; pos 1739553 to 1740454 reverse strand)
ccgcgatcatcgtcccttcacgcgattttcagctggtatatacgtaatttacaattctcaattttgaatttctgcgacgatgagtttttgcgttcgtgaatttgttttcgttcagagctcaaaaacataacggtcgatttgaattttgtttttggccgatcgggtggactggggatttagatgtgaaattaaactcgatttacattatttggggtgttagttggtgatcaagtattgcccaattagattcgaaaattcgagttcaaagttttataaactgaattgtttaaattgcgtgatgattcagcaggaatttgagttcaattttgacgttgttatgtgtgtgtgtgtgtgtgtgtgtgtgtgtgtgtgtgtgtgtgtgtgtgtgtgtgtgtgtgtgtgtgtgtgtgtgtgtgtgtgtgtgtgtgtgttttctactgagatctgtttttatctctgaatttgaccgagatttttccggtatgtgaatctattctgctatttgaggtgaatgagtttatccagattctgtgagcctcagctatgctcatttggctacagctttagatttgaaagttggaacacgcatttcaatctaaaattgatttgatgcgagatttgaaataataatttatgctggattacctcgtgttcttcgatcttcaagttcttccacaaagatcaaaaggtttccttccgggtctactttaagcagtgctgagcacacaagattccaccgagtagccaattttttctgtatatgttgaatttgaaatttgtttgcaatagaaatttttatgttgttgcttacttgcatctataataatcggaggcattttgtactaatttcgtttatccatctgttgatgattatctcaaatgtggataggtacgaagaggat

SEQ ID NO: 104351 - DNA, 724 bp, Mimulus guttatus
  Intron number 1 from transcript mgv1a007330m (locus mgv1a0 07330m.g) derived from phytozome v7.0 (chr-ID scaffold_396 ; pos 64053 to 64776)
ccctgttctttgaatccgttactcctccattccaggtttttacttcttccacttacttttccattggtgcactttctgtttattcggatatctcactcaattttagggtttttgctttctttgttctatggtttacactcttaaaaaaatacttcaagatcaatgtacaatttcagtaactgctactttgagttccgattcttgttcattgatgtgatagttagcttttcatcatcactaatatagctctgcctgttatattttgcaaggataatgtgtctcaattttaaatggtccaaacattatcccctgaatcgaaatttcaaaattctttaagcaggaaaaagatttaaggataggcgaatagaagccgccttcaccaccttcccatacgactatcgactagaatttttatgcatcttggtatcaacactgagccatattttagtgtaaatccttctccttcaccattgagctggcatcatacataataattacctattggtattggaaggagtaaccgggaaaaaaatcccagttgatgagttgggaggcaactgcataatcaagggtttcaggattttactaatgtttctcttaaacaagatttatggattcgcatatctgactagtttattttgcttggtctatttccacatgacccgtgagtttttcgttaagcttcatcatactaagtgtcatctttacttttgatagagacaag

SEQ ID NO: 104352 - DNA, 598 bp, Mimulus guttatus
  Intron number 1 from transcript mgv1a026402m (locus mgv1a0 26402m.g) derived from phytozome v7.0 (chr-ID scaffold_7; pos 1182938 to 1183535)
ataggccacctgcaatttgatccttcaacctgcaggtattgttctctctctctctctctctctctctctctctctctctctctctctctctctctctctctctctctctctctctctctctctctctctctctctctctctctctctctctctctctctctctctctctctctctctctctctcatctgtaataacatttgcagaaaaatcaataagaaaaaatggacggtctggattggagtaggtactaccatcaccaacaaattgaagaaacaaacttgatctcaaacaacattttttacagagagaatttgaatattccgattcaaaaaagtaccgattcattccccaatctcttttcaccgcaatggaataatattaataataataattcaagattatcaaccggtggtaccaccaccaccaattgggccgggggaccagccgccattaatgcaggagtaggaggaggagctttgaataattcttacaacattaatccaacaaataataacattggcctaattctcgatccagctggaaatttgccgataattcaaagaaataacggtcgtgttttcgagcccgtgatttcga

SEQ ID NO: 104353 - DNA, 800 bp, Mimulus guttatus
  Intron number 2 from transcript mgv1a013270m (locus mgv1a0 13270m.g) derived from phytozome v7.0 (chr-ID scaffold_30; pos 1611476 to 1612275)
tacagatattctacgactctcaggacttcttccttgtaagttttaactttcggatcgttatttgatgtctttttgttaatgctaatttcatttgtaaaactatccagtatcatttcttatatttggtttctgatgttcggtggaaaattgctatcggttcctctgcattttcatatataattttcaaggtgtttgttgtttttgtttctgctatgtatgggcttacaaattttcttgaggtaatcttataaaataactctttaatcaattcccttagttttaagttgcatcgtagaataatggtccaattgttaactatccgtgctccctcttcaaatttcataatgtatttacgaaaaaacgaaaacatgtgattcaaacaaatagctaataagaaatattagctactttcgtgtcattattcttgatttcaaggtctctggtttgctagtgcataatgtggccagaattatgacatttgaaaggcataatagtacttttcttttcttctccgtttgttgttgtattgcaaaagcttctgttgctcagttctcggagctagtattacatgctttattttgtcctgtttcaagttatggccgagtgttattgatgagtatagggggtttctctctttaaggtgtcatattatatttccttttcattgttcaagtcgacgtttattatatataaaaataatacagtatttgttttatcacatgccatcttaacaagatcattggatattcctgaatattgttttagctcaaggaactcgagaagtcgggaccaaaaaaggg

SEQ ID NO: 104354 - DNA, 747 bp, Mimulus guttatus
  Intron number 1 from transcript mgv1a015309m (locus mgv1a0 15309m.g) derived from phytozome v7.0 (chr-ID scaffold_2; pos 3540580 to 3541326)
agacagaaactccgccggccaacgccgccgccgtaatacatctccgtccttggcttccgtcactttctccccagtatttttatgtccgattccccaattttcatcatcttatacgtatcaatcgacgaattaattgattaataaggattccattttttgacagcgccgtgaatctaatttatcattcagatcttccctcatcccctccgtttgtttatgatctgtttgcatttttcagtgacgattcactgcgttgagcaattggctcgctttttatctgtatctgctctgttgatcactgcaagtgggttgttacattactttacaggaaattgaaattatagcgcttagatctcttcaactagttcataagaataaattaggaatcagaaactatgtaactgttcgtttttctgaattgtattagcaattaccaaccggaataagtaggatccaatgaaaggaggtattcaagtaggtttgatttgcctgttttagctggtacaccgttttcattggatcctgagttatgttggtcttatggtttttctgctgcttaggtttttcgccgataaaattgtcatgcttccaaacattcaaactgtttaatactattcccgacaatttataatttgttattaagataattggtctgttttctttttttcgtatacagttgataagggactaaaagtttcttggtttatttcagattcattttgttcttctcattagcagacaagggaa

SEQ ID NO: 104355 - DNA, 698 bp, Mimulus guttatus
  Intron number 1 from transcript mgv1a005345m (locus mgv1a0 05345m.g) derived from phytozome v7.0 (chr-ID scaffold_16; pos 134350 to 135047 reverse strand)
ctgcgtatgttgttctgacatcatcgttttttttttcgatctgtaaacgtgttgttgttctattgctgcatgtgttcgatttaagattgatttgtgttttgggactttgaatttgaattatggagcaatgaatttcagttcttgactataatcatgtttttaaaaatcaatgatattgaaaatatgcaatttaaccttcttcaagtagtatgaattgttcgattgataagtaattgtagtggttggtttagtatttgaatcctatattactcatttgttcacattgtgatcttgctataagtgttaaggatcttctttttgcaggtttattgtttgtttacttttgttaggaagtttgaagttttaattttctttccgatctgttgattcgaaagaggtggagtatgctatttgtatttgctggatctgcgtatgtttactctttgtagaatcacaatcaatgtagtgtaggccatgcttcaaatcaaaacggtgaacttgagatccaagtcacgtgtttttcctaaatatagcatcaaatcacgtgaagtaataaaacatttcagctcgactatatcctctacatgattatggacagaaaattaatgatatttcttgtccttaacagctcatggtaatgtttatttgatttgattgatgcaggctctattacacaagaattactatcggcactcctc

SEQ ID NO: 104356 - DNA, 868 bp, Mimulus guttatus
  Intron number 1 from transcript mgv11b023706m (locus mgv11 b023706m.g) derived from phytozome v7.0 (chr-ID scaffold_4 9; pos 501286 to 502153 reverse strand)
cattcgacgagaatctttggtatcgaattgccaaggtaaattaattaattagtccataataacataactattttttatttattttctttaattttttatttgggtatatttgaagtgacgtgttattgggatttacttaaataagggcatctgtagtgccactcccaatttaatatttttgtcagaattttagaatattgggagtaattgttgattttaactcctctagtgcttttctccagcctccctaaatgtgccatgtggcaagggactcccaattaaagtgcccacagttaatccatggttggggagtgtatgtggagcccttttgattattttaatgtatttttggaatgtgtgccaaccaaatctgctttaattatttattttttctttttctttttttccattatgataagtaataattaattctaataattctttaattattttataatttttagaaattacatatttaaatttcattgattttaatattaatagtaaaataaatattatatttaaattcattaatatggtaaaaaaaaaaacttatattttaattttaataattcaatttcattatagtaatacaagaaatatttattttataattaaatttaaattttgtaaattcgttaattttaatttatttgattgttccacacatgtctctcatattcataacttttattataagaaattccaaaataaattttcatgaaatttaattttattaaattcgatcacattataaaatataatacgaacaatgtgaaaataaaagaacattaaatcacaactataattagaaatacacataaacaataaatattcagacatcttcttctccgtagatattccacaa

SEQ ID NO: 104357 - DNA, 726 bp, Mimulus guttatus
  Intron number 2 from transcript mgv1a020061m (locus mgv1a0 20061m.g) derived from phytozome v7.0 (chr-ID scaffold_3; pos 2612499 to 2613224)
ccaccctcaaatccattcttcccaatactatcaaggtattaataaatcactttcttcttagcttagattgcattaattttcagacagtaaatattaaatatgtgttcacacagtgacggtgtaaataacgaaaaaaaaaaaaacacacttacacacacagacagcatgttcttgatgagatgtttcatgaaattacaagaaagccactgtgctgaatgaaaagtacatcttgttttttttttttttcattcacacagtattataaatgtccgatctttgattcttgggtaaattacgaaaaacacccaatctattcgtaattatcaaaaatcccctaatgtttgtttccgtcttacaccaattcttttgcagtatgaattttcacggatttttcttgattccagtgaatagactttaatttacacaataccgtatatatttttcacctatttaacagaagatataatagattgtacacattttctgttaaaaaaactcgagcaacagttaatcaaagggatattttggttattacagatatgtcggggtgtttttcgttattcagcctaagttcatggggtttttgtaatttacccttgattctttcacacagtaattaattaattaatatatatatatattaaatttgtcggaaatatagtgaattaattaatataatataaatattcagacggacaaggcttctttactaggagaagcagtgaa

SEQ ID NO: 104358 - DNA, 697 bp, Mimulus guttatus
  Intron number 1 from transcript mgv1a001508m (locus mgv1a0 01508m.g) derived from phytozome v7.0 (chr-ID scaffold_41; pos 254220 to 254916)
atttgtcaagctttgagttcgaggtcatcacaaaggtattctttcatctaaattgtattgccctccacctgtttgatgaattgatcactcactgaattctggtttttcttcatttgtccgatgtttttctttttttgtttcctgatgattggattttgttctttattcaaaacattattatgaagaataatgtttcttgattcccgaactttctttagtttcttccaccattttcttgatttcattatttttcaatcaaccaattcactgtcacgatgagatgatctctataactttgccaagagaagtgatttttgcattagattttttcaactctttattgtagatagactaatacagcatgcatcgaggaacgatttccttaaatgtgacggtatcattttttttttatgtttggagagtaacaacgttgcggctgatccttgtatgaaaactatcaagattttgatttgttgagaaataagctcttgcaggaactagttgaatacgacgtaggattctttctgttttattattaacaatgtgcgatgatggttgttttgattttgggaccagactgcagactaagttattgaattgaagtatcccatatatttatgggtgatttatttctgttgaatagatctgttgtattcaatatgtttttaattatatgtaattgatctcaaatactagg

SEQ ID NO: 104359 - DNA, 948 bp, Mimulus guttatus
  Intron number 1 from transcript mgv1a011529m (locus mgv1a0 11529m.g) derived from phytozome v7.0 (chr-ID scaffold_42; pos 1224611 to 1225558)
aagtgtttcttccagacctacattctcaacaacttgtacgttttctttttctttttcttttttgcaatttgatgtaaaaaattggtgcttgtaattatttattattcaacttatggttgccctaaaggcggctgtctctccggtccccccacacccacaatctttgtctctctggttattgattcatgcaattttctctctgggtttttgtgcttatatgattataaacaataaaaaaataaaaaaataaaaacccttctgatgttagctaattttaaatagtgtgaattagttttttttaaattttgtttaattgatggaatgtagttgctttcccaatttggatccggtgcaaagggactgtttctgtggtcccaatttatcttgatggggtttgtttttgtttaaggtttgaaattttggcattaaaatcgaattccgaatgagtgttttgttttcgggtgtactttgaaattatctacgtctccacgaaatccgttccggttgagttcggtttcttgaacttgatcaatgctcatttaagaatcatcgtattaagaagtattattcgttcatacacttattgctcaattgggaatatggcgccaaatgcttgtttcgtttttttaattcagaagatattaaacattatttatccgatcgtattcaatgctgttatagtgtgtgtgtgtgtgtgtgtgtgtgtgtgtgtgtgtgtgtgtgtgtgtgtgtgtgtgtgtgtgtgtgtataggaagttcaatgatcaagaaattcattagaatgaagatacgaaaagctattaggtaggcgatctataggaaactttggggcaatgcaattctctctctacttttttataaagttatgattttttttttcgtttcacgtatttcgaagccaaatgaagtattaggtatcattagttgaaaatgctttctctttaacag

SEQ ID NO: 104360 - DNA, 803 bp, Mimulus guttatus
  Intron number 4 from transcript mgv1a012067m (locus mgv1a0 12067m.g) derived from phytozome v7.0 (chr-ID scaffold_460 3; pos 864 to 1666)
cgtcgtgcactatcaggtattgataatattgatttcttatacaaatttgggcaggttctaaattctaattgaattgatggatttggagctaaagatttcaatccatactaatagttgaaccgtagatctatatacgtttggatcgttcaatctttacaacaatctatactaataattgaaccatatagatctaaagaattatgtgttcatatcaaacgtcatttttattgaccggcaggagtcccaataagaaaagacggcttataaaggtagaaagaaatataactacatattatcgacaattttagaaaagtcggcttataaacatcatataatgaatgaatcgacaattttagaaatctccgacgatgtttggtatgaatacagaagaaagtctcaagttttttaaagattatctaataatatctaacactgtcacattacaattataaaagtgatgtaaaaaataaatacgagacatatggggaataaatataatattcgaacccaaaggaagtctatatgtatttagcccaactactgaggatttttttataattatacctacttaaattgtgctgcaactaaactatgggcaggtggtgcatatttaatataatagcgaaaagagtatgagttacgagacttaaaatattttgtccgactgttgacttaatatatatagtgaggtctgctgctcgttaaacaattgtaattggtttctatcttactggtcaccttaatcaatttttttgatgctgctgttctttcattctcatgttagcatcggtttttttaacagc

SEQ ID NO: 104361 - DNA, 847 bp, Mimulus guttatus
  Intron number 1 from transcript mgv1a004165m (locus mgv1a0 04165m.g) derived from phytozome v7.0 (chr-ID scaffold_21; pos 265717 to 266563)
gcctcagcgtcggtgtttcttctctgcatttccaggtgagttcttaactttttttcaattttctttctgctttctgctgtgtataaatctaattgaagctgtttatttatctctgcgcgcgtgtgattaaaattttgtcactgcaaagttctgctgttttccgatcatctcgtattctctttcatttgatcatctgtgtttttttttttcctttttcagttaagtaattgattgagttttagtgactgcattagattatttggcaaaggaagtataatcaaaattgaattgttaaaaaaaatccgagtatgtcaaatctactgtaactggatctagttgaagaatgaaaatccggatccgaacatggaaacaagtgtattacagagattccttctgatctgagtaggagtttttttgtttttggtggagtgaattttctctcactgaaaaatggtactgctatgaacatatgcagaattgttgagcttagtgttagttagtctaatttatttactttccacctaaaaaaataatttctctgatatgtggtaaatcaagcacaaagtccctgcaggcttgcaataattggttaatggttatcctgatttatatagaatttgcaataattaattaagttcccaaatttgcaattaattaaccattaataatttaggttcttgttttcccgaaccaattaatggttatcctgatttatatagaatttgcaataatttaggttattcttttcttgaaactggtgcttgtaaatagccaaatatgtttaattaactaagttcccaaattttcttaggtctcttctcgtttaatctttttaatcagggcaaaa

SEQ ID NO: 104362 - DNA, 897 bp, Mimulus guttatus
  Intron number 5 from transcript mgv1a007938m (locus mgv1a0 07938m.g) derived from phytozome v7.0 (chr-ID scaffold_13; pos 2028836 to 2029732)
aggttgccttgaggcttgtgaggccagggaaaaaggtattacaaccactcattcaatggctcttctaatttccagtcttgcttttcatgttgtacgtactttggaaatgaaaataaagtccatttgtgtcagttttgtgtttgatctatggggcatagccaacctatatttttatttaatcattacggtctgacttatagggtgttttgcttgttgatgtttgactataattgcttattgtaaccaacttttagttaaaccctctaatcccattgagagggaagccattgttacttagaaagtgtgtattgcatttatgttgaggggtaaacatgattctctacatgatgatgatagtacagagtgatggatcttgaatctaatgaagctctttgtagtcatagttacactgatagaggtatcatggtttcctctcataacgtgttttgcattcaagtgttttcatatgcttgtcattagctgttatgttggttttatattatttgtgtttttttaaagaaaattggccttataaatggcgtacgatggaacccttggcctaatactaccctccccaccccaaaaccagctgtatttattttgaacggtaaacatggctctctacatgatgataatcaagaaggatggatcttgcatctaatgaagttctttatagtcatagttacactgatagagatgccatgtttactttgtttctagtgtttttttaattcaatttctagtagtctttcgactaaaccgttcgaataaatccttacagtagaagtggcaattctaagttgttattcatgtaacgcgtagttgtgatattacgtaataagtcagttttgatatcccttgacagcattttttttctgttgatggtatagaataagg

SEQ ID NO: 104363 - DNA, 513 bp, Mimulus guttatus
  Intron number 1 from transcript mgv1a008072m (locus mgv1a0 08072m.g) derived from phytozome v7.0 (chr-ID scaffold_96; pos 893185 to 893697 reverse strand)
ggctccacctccggcatcggcaaggaaatcgccaggtttttcccaatttactgctttttcccagcttgtaataatacttttgtccatttcttcgcaatcatctctttttttcctagctgttattggatggaattagggttcctgtgggtgaccgcgtgaggattgttcttttttaatttatttggcgattttttttggctcggcgcagtaatttatctttcaaaattcattttgattagtctgtgctgattactgatatagtcatgcgttaactgtggttcttgggtaggtatataatatgctggcgtctgattttggcaatccttgctgatatttttgatttagaaatatgcaattttagtatgatgattgaatcagtattttgtagctttagggttttagattgtgcttataccaagtgatgctttggattcaaacttaacttatacgtgctttttatgaattcgtttctggtttcgttatcgggcaggcaattggctgaagcaggggggc

SEQ ID NO: 104364 - DNA, 965 bp, Mimulus guttatus
  Intron number 1 from transcript mgv1a022499m (locus mgv1a0 22499m.g) derived from phytozome v7.0 (chr-ID scaffold_205 ; pos 365743 to 366707)
cctaagagtcgaccgctttccctccaggccagtttactaatacttttacacacacgcacacacgtacagataattggtagttgatctaacatcatcgtctatttattgatttccaacttcatgtttttcttaagagctaaacgcatacggtttctcaacctctctccgtgttttttttttctttgggtattatactaccatatactctaattacacacacacacacctatgtctatatttttcccaataaaacttataacttgcatgcatatatatatatatatatatatatatatatatatatatatatatatatatatatatatatatatatatgattttaggtatgaacttcaacaacttctttgattcttttatccccattcttaagcttaggacttctatttgtataatataatatattgaataatagatgtggatgtgaaagaatatggcatggcccccctatcttgtcatgcttaattagtttcctaatctctaaaattggaggcaaacaacatacaattaattaacccctacatcaaatcctatacttttgtttattttataattgtgtaaaatcgccgtcggttttatttttctttgcaccgactcttactttcgttaataattaaatctgttaattatacgattggacgggagtggattttatacaaacaaaaaataaaatagagacgacgagttttaccgaataaacgagcaagaatgaatttggtgcaagttttcgataatataggaaagttttacgttgtacgttaacccgattaattagcttactaaaaaggtggtccactcttaatacatagtgcaaaagggtactaatatcagaagggacaataaattagcatcaacttgaaagattacaaatattaagattaattaattattgaattttaaaacattaattttaatttaatttacagactgtggagctcaaagtgagg

SEQ ID NO: 104365 - DNA, 515 bp, Mimulus guttatus
  Intron number 4 from transcript mgv1a015593m (locus mgv1a0 15593m.g) derived from phytozome v7.0 (chr-ID scaffold_178 ; pos 231149 to 231663 reverse strand)
ggtgagttcaactttgtaatcgttttacattccttttttcttaaataagaaactattaatcccatcgatgaaatcgtccattcgcacagaggatatccggtagcttattgctgaaaattttttatgtcttagaaattagctatgttagcagttgtgcctaatggatttgtctatatgctagtggtatgaacagttctttttataagttgaatagaaacttagcatgaaacaggataacaacaatcgtcactcccaatatttgtttgttgcagtattatgatttaatgtaacggagattactctgtgacagtacaatcacgtctcgtgttccattttcagttgttaaaaatataaatttcaaaataaaaggtagaggttatagccttcaagtcacagtgcatgactagggatgtatgaataatgttgattctggagtttgactggttttacatactgtcatttttattcgagtaggatattttatagctaagaaagtattggtgcaggtgtttgag

SEQ ID NO: 104366 - DNA, 320 bp, Mimulus guttatus
  Intron number 1 from transcript mgv1a001277m (locus mgv1a0 01277m.g) derived from phytozome v7.0 (chr-ID scaffold_101 ; pos 847109 to 847428 reverse strand)
ctctcattttcgttcatacatcggccgtaaatctggtaattcattgtttctctgctttaatttcgtattttttgtttttttttttttttgtgtgtgttttctactgtagtttcatcatgttgttgcatgtgtttttttgtagccgaatattcttaccattgtttacgatttacacagtttgattcgagattctgctgaatcttcttctaatggatgaaatattctagttgctgtcaaatttattaatttttgattttatcatttttttctgcatctcgtttgcaggtggtgtattttaagacgcccgtagaaattcgtag

SEQ ID NO: 104367 - DNA, 637 bp, Mimulus guttatus
  Intron number 3 from transcript mgv1a015156m (locus mgv1a0 15156m.g) derived from phytozome v7.0 (chr-ID scaffold_27; pos 214592 to 215228)
ctgctcacactattttggagaaaggtagttgaactagtattttatattttgttactgtcatcttatcaaatgatgtaaatgctgtgattagcctgtttcagtttaagttttatgactctacatcagtatccgggctccgaatttgattaattttgccgatggaaagcccaggaaaataggaaaatgtaacacttttaaattctggattccatctaaaagtgggatttttagaaattcttttgcatatttctatcattcatcaaattacattttgaataactaccatataaagtgtgtagtaaaagcattgcagtagtcaacatctcccagtccttgaattgaattctgcgtatatttcatttaaacactatccaaaaataactccgaacatttaccacgtctacaagaatattccatttctgtctgctacttagtgaatcagtataacataatgcatcttatgccttaccacagatcatttggaggatgtgttttttgaagaaaaaatcatcccttgtttccagcaacacctgattttttttcgtatcttgctgtctttcttgtacattgtttgcttattaaatgtgatattaaatgtgcagatcaagtgcgccttgattttgattcgaagaaactc

SEQ ID NO: 104368 - DNA, 934 bp, Mimulus guttatus
  Intron number 1 from transcript mgv1a001320m (locus mgv1a0 01320m.g) derived from phytozome v7.0 (chr-ID scaffold_236 ; pos 227722 to 228655 reverse strand)
cttgtgaggtaaacctgataatgtgcttccatattaagacttaatttgattgctaactttaaattatttcagtataccattgtgtaggtatgactcttgatatgtggtttagtggtaaagggttgtgaatttgtttactctgttgactaagctaaagtacccgcgagtgacttaattgtaatgttggagaactgtaaataagccagcagtttcttgcgttgtgatttcaatgcttcttggtgcctgtattgccagccatcctcagacaattacataggacactgtttttgcaatgtttccagctatcaaaagaagtataagatgttgatttttatgtctctttcttcagttcaaccttgaacgaagcaatatttcttgagtagtcttgtctaatagcaatttggacttcctttggacatctctttcgaggttaactttgttttagtcatgaggcacatgagttaaaaaccactaaatattgatggttttagattttttctttgggtcatcctaaagagcaccaagtctcattaacatttgaagcagtcttcttttttggactatgttcacgacaaagtaaagtgattttgaaattgtcatttcgaattggtcagtgaaaaaacaaaaatgatgctactatagacaaactcaaattgttcatacttacttggcaatcaactataagattgcagtcacagactaaagaatggaaatattatagcttcatcaggttgtttgggtggggaaagttaagtatattgatcatattatatactacctttggcatataattctaacttgttaaattgttcctctatccatctcttgttagagaacttcaaactgcatattatagtctaagtgcctaaccgatttttgtgttacttatatgcgtgcagtctgctcttcctcctgaccaactagcttggtgtgg

SEQ ID NO: 104369 - DNA, 773 bp, Mimulus guttatus
  Intron number 1 from transcript mgv1a001476m (locus mgv1a0 01476m.g) derived from phytozome v7.0 (chr-ID scaffold_3; pos 3844825 to 3845597 reverse strand)
cctccgtgagttcaattcgtcatttttctaaaatgctcgtcaatttttatcaaaaattgtttgttctaatggagaatatatgtcaattgtatccgatttatgagaattgtttgttctagtggagaatctatgtcaattgtgtttgatttatgagaattgcttgttcggtagttgtgcggtgatctgatttcttgagggttttactgtttggtgtttttgattttgtttctgattaatctgctctaacatttgttaggatttggcttcagatgtttctgattaatccgctgtaatattctaaggcctcgttttgttaggaagattagccattattaattaaatagttggattttgtttgatgtttagtatcccaataacttgccgggtcgacccgcaaatattatgttatcatgacttatcttgccttctaggcatgtttttttattgcatcgttggaaggtccaattatataattgggtttcattagattatttaatcttatcttggcagcaaaacgaggcctaaagatacaatcttttccttctaatcgggttttggaaaaaaaaaatctgaatttcttgtttctaaattttctttatgtcaaagtgtaattgaacattgattttgtcctggtaccttttttataagtatttcgtaaagttgaaaaatgttttgttgaatatgtagttcaattatatgaaatacggggaatgatttggatatcttctaaatgtgcagttggctgcaaggattgccgtttcaaatcttcacaa

SEQ ID NO: 104370 - DNA, 949 bp, Mimulus guttatus
  Intron number 1 from transcript mgv1a025162m (locus mgv1a0 25162m.g) derived from phytozome v7.0 (chr-ID scaffold_327 ; pos 163723 to 164671)
ccattgcccgttttcaggtaatacaatttttttttttttgtgttcttggcaattcaaattgttttcgagtagtttctttgaaggtaatgtttttttctcttagctgatgttgttgcatttccgactatccttaggcctcgtttggttggggagattagcccttattaactaaatttttagttcgataatttcatattcgctaaactgataggattttgctagtcccgactctattaatttatagaggtgtaaggccttgtttggttggggatattagccattattaactaaataattggattttgtttgatgtttggtatccccaatagcttaccgggtcgacccgcaaatattatgttatcctgacttatcttgccttttagagggttttttttttgttggacgtcccgggttccgataaaataattgggttttttttagattatttaatcttatattggctaatcttattttgccaaccaaacgaggcttaactgtattatgttatcatggcttatcctgccttgtaggcatgttttttattggatcatcgaaggtccaataatataatttggtttcattagattatttaattttagcttcgctaatcttgtcttggcaaccaaacgaggccttagtgtacatgtgaaaatatcctcattaattttatttgcgcctgtatatgtagttataggtgatgatttcagttgcatatgtaaggtaaattccgaccgaggatcggtgaaggagcaaccatagagccaagggggcgaaggcccccccactgtttctcaataacctagtattttatatagagattttgttattttccgagtagtgtagtattttctacattcggcccacacaaacataaagatttgttatgtatttatagagagtcttttgaactgcagagacttcttgggaagaaggttatattcataacggg

SEQ ID NO: 104371 - DNA, 466 bp, Mimulus guttatus
  Intron number 1 from transcript mgv1a012798m (locus mgv1a0 12798m.g) derived from phytozome v7.0 (chr-ID scaffold_178 ; pos 428315 to 428780 reverse strand)
caaactcgccgtcatccttgctgccgacgtttacggttatttttttttctctcgtgttcattggattccgaattttgtttttggtagttatctttcaattcaagtgttcggaaatgaattttctttggttattatcttagttaatgttattttttgttgatgacatgataaatatggctagtagtgtcaaattggggatattcataaacaagaacacactatgatcggatgggtagaactttgattttttctctccgttattgattttcttatttaaatgaagaatttggatttcaatttgaattaaagatttcgtactatgaagaattttaaatccattgtactttcaaattatccgaaataatgaattggttgattatgatggctttaatatgagtttgttcgctttaaattcataagttgaaacggagactcaccaaattttaaatttattgttttgcaggat

SEQ ID NO: 104372 - DNA, 677 bp, Mimulus guttatus
  Intron number 1 from transcript mgv1a002006m (locus mgv1a0 02006m.g) derived from phytozome v7.0 (chr-ID scaffold_130 9; pos 7178 to 7854 reverse strand)
gttcggtaagatactctcttttggtcaaatttacggtcaacttaaaattagcaattattcattatttttacggtaattacggccacacccttgaggtaagccaaattacgaaaaccccctctcatgtttgggtaattacaatcactccctttaactatgaattgctgtgtcaaatttagtggaatcttttagattatatggaatattctccaatatctacccgttttacctcaaatcactccctttaactattaattgcagtgtcaaatttagtggaatcttttagattatatggaatattctccaatatgtacttgttttacctcattcgacctccacattttgaaataagatgatcataagctgtgtcttctaacctgtaaatatcaattatggcgcatcagaaactgtatttttgcataaaacgagtacaaattagagaacatttcgcggaatctagaagattatatatattttgaatttgacaccatcagggtggacgtataaaaaaaaatcacagtgagggaggtggtcgtaattacccaaacataaaggtctttttcgtaatttgactttatttcttcaggggtgtatgttatttacccttatttttaatctcatcggttaatctatttttaccaggcaagagtgaggagaagagaaggttgatcaaagtg

SEQ ID NO: 104373 - DNA, 778 bp, Mimulus guttatus
  Intron number 2 from transcript mgv1a020842m (locus mgv1a0 20842m.g) derived from phytozome v7.0 (chr-ID scaffold_89; pos 626229 to 627006 reverse strand)
agcttggttttgggtattgcctttttacctgaatttaattataaagcatttggtgactcaacacaaatataggttaagaaagtgaaatgtcaaattaaaaactaattttgctactatgaggtaaactgttactgtgccaggacgaagaaaattgcatttatttaccttcaagttagttcttattcaataccaagtccccatctatgagactcaatgcattgcagtttcaatcccgccccagctgtatttagtttctggaaataattcctttccacgtgggttttaagtcaggttttggagggaattttatcatgtaagtcacatggttatatataaacatcagaaaaacacattttcctatttttttcttccaagaatgctagcttctcacccgaaaccatatctgctgtgaattcatcaaagttggagaactggttgaatttaaccacaaagaatgatcaggatttaagaatttaatcattttagaatgccactaatgtgtaagaatataatgaagtcattttgtaaccatttatagccaagaaatcgagcttgttattagctaagaatgagatgattgggcgttagagtccacagtattgggaccagaatagcacaaaagataaattgttggactggtaataggaggtcgtctttggatggggtgggatggatatgacagggttttgcgtaggcagacttaacatggagtctgagggaagacactaattatcgttcttggataatgaatgtaggatattaggggaaaataaaaact

SEQ ID NO: 104374 - DNA, 289 bp, Mimulus guttatus
  Intron number 1 from transcript mgv1a019166m (locus mgv1a0 19166m.g) derived from phytozome v7.0 (chr-ID scaffold_67; pos 124252 to 124540)
ttggtatgttgcgtacaaaccatatgctagggacaatctttatcgtacctaagttaattgttataatgtttaggtttgttttggatagactgcgtgtttcgtattcttaaattagtggtcgtggaaatataattccaagaattcagaaaaattggaatgtttatgttcgggctcttctgtattcctttctacttcatatatctccttttgatattgtattggtgtataacatatttttttattttcaaaaacaggttggagcacctgcacgtgttggtttggtggctcc

SEQ ID NO: 104375 - DNA, 505 bp, Mimulus guttatus
  Intron number 1 from transcript mgv1a024778m (locus mgv1a0 24778m.g) derived from phytozome v7.0 (chr-ID scaffold_210 ; pos 178493 to 178997 reverse strand)
aagtctctaggtaattaatatatataattcactatatattcacacacacacaccccaatttgtgtgtgttcttagttaaaaccctaatttttccaattctcaagaacagcaccgaaaattcaagggccgcgattaattattataatttataatcatcctctcaaattaattaattaatttttctaattaattaaacacaagacgatgaagaagataaaacaatttatttatttatttatttttaatttaattttggggcaatacgtagtaacagtggcaattccattacagacaaagttttgaaacagtgatatgaaaatcctaaaattgggttttgtcaacacttatgaatcaaactgaacacatgtgtttgtccttccttagcaaatatcactatcaaatatcaagattattttttttttcttttttggttacacaccaaactagggttctccattttattaatattttcttgaaaataataataataaatttaatcaggata

SEQ ID NO: 104376 - DNA, 1006 bp, Mimulus guttatus
  Intron number 1 from transcript mgv1a001123m (locus mgv1a0 01123m.g) derived from phytozome v7.0 (chr-ID scaffold_27; pos 689349 to 690354 reverse strand)
cagccccgcctctatcggcggcgtcgccgagtctggtgagttgcgtggacttgtttcttacgatttctgacccggagcgatctgattgctttgagagttgtggaaaactctgtgttaatctaccgtttctactggcaatgtggtttgcatttgtgttggagctcgattttgagatgtagtttgctgaatgaatctgctagtttgatatgtgtgtttgtttccgccgttataattatctgaatgaattgattgaatgtttgaattggtgtttagcggcgcgcagttatcatgttgtggtgctattagttatgtctccttcgcctatgtttttgtgcatatctatacttgtgatttttttatttttaaatacgagcggatagcatttgaagaacttctctgaaatgtatgatagatggtgaacctgctattaggatctgacttcatggaaaagaagcaaaataacattgggaaatatttgagccgcttctcctcattctgagaaggacaatgtagttagtagtgtcgtgtggaagaaaagtattgtttacattttgctacgaggcaaaactaaggggatttcagttattatgtaagataaatcaaaagtttctatgatcgtgttttatgtacatccctggggtacttcccttattgggatctgtatccatatatgatataccacggaaatggcttaatgagattgttacgaggcttaaaaaataagccaagtgttttttcatgtttatacggtagtatttctgaagatatttcttataaaaagattaaatataatttaggcttggttggtgaattatttatgtcagtcgaatggttttccagttacggattaatcagtgttttcgaaccacgtcgatctatttaaattcttatcttctttcgtgtgattaaacatgaaattacaaaatatattttaggtggtaaaatctgattaatgtatgttactgaggtagtttcaggaagagttcgagttgctgtaagattgaga

SEQ ID NO: 104377 - DNA, 617 bp, Mimulus guttatus
  Intron number 1 from transcript mgv1a008319m (locus mgv1a0 08319m.g) derived from phytozome v7.0 (chr-ID scaffold_206 ; pos 262512 to 263128)
aaattgtaagtttcttttgattttatgagccaattttgattcagtagttttttgtcggcaagaatcctatttcatgatctgtaattttccagggttttactaattgttttaattccttagatcagatttgagtgaatctgattggataagaatgattcttgaagtctgcactgagtagggttcttgtttgtgcttctgatttaggtgactgttcttgataaataaaaaaaaaaaaaaagttgtttaattgagttgcatttctctctactttgatttgaacatatgagaaaaaccttgtttaattcagttgggatttgatatatttgcaagattgatttttttttttttttttttttaaatctagaagcttctagctgatcttttggttcatcgaatatggtcgatataatgatgtaaaccgatgttcttatttgaaaaacaaaataaaaatcgcgttttgctcattcgggcacaaagcaaatgcattttatgacttgtgattttgaattgctaccttttgaataactccgattgtttagtcttagtgccgattgaatttacatcaattatccgttgctgtagattggccgaaacaattagacacagcaaaaagctct

SEQ ID NO: 104378 - DNA, 608 bp, Mimulus guttatus
  Intron number 1 from transcript mgv1a015543m (locus mgv1a0 15543m.g) derived from phytozome v7.0 (chr-ID scaffold_33; pos 1497717 to 1498324 reverse strand)
acctctcctccataccaaatcaaattactatttctgtgagttccgctttttctttttattgttttttaattaatttttgagcgaattgatgtccgagtaaacatatatccaattctagcagtaagaatatatgctagggttcttcagattccccgtaagcatacgagaaatcgttccttttttggttcaaagtgttgataatatgctagataaaaaacactccttaatttcaataataaactcagtttctgcattgttttaccgattctgattgaaaggctcctttgctttgattttcatcaaatatttcatgcaagaatcaagatgaggcaatcatttatttgcttttcggtttctaaaactgggggcatccttttgcctgcactattatcttgttatttcgggggtgttatacttgcattgtttcattatatttaacatgtttttggagtatttcgttgttttcattgaacaacttgttgacgatcaacagtgtttgccgttgtttttagttgcatgtcatttttgttatagtttttcaatttgatgacgcattgttttgctggaaacgcggttttatcaacagtgatttatttaacttgatagta

SEQ ID NO: 104379 - DNA, 395 bp, Mimulus guttatus
  Intron number 1 from transcript mgv1a008809m (locus mgv1a0 08809m.g) derived from phytozome v7.0 (chr-ID scaffold_161 ; pos 406982 to 407376 reverse strand)
tcgttgcggttaagtatatagagcgaggcgataaggtcagtttttaattttttccccctttttcttttttaggtttactttatctcgtcttttattggcttatctgaaaccgattttttttttttttttttttgaattattatttgaaaccgattttgatttgcctatttggggatgtttgtatttaacacgcaattattcatgtaatcttcctccactccactgtgtactaaccttttatagaacatacctaattttgttttgttaaaaatggcaattcacagtaatcttagtgtaaatcaccaaccgttcattagttcatgaagttattattgaacaaagggattgatttttgtgaattgttgtatggtaactctatttgcagatagacgaaa

SEQ ID NO: 104380 - DNA, 642 bp, Mimulus guttatus
  Intron number 1 from transcript mgv1a004418m (locus mgv1a0 04418m.g) derived from phytozome v7.0 (chr-ID scaffold_8; pos 2782864 to 2783505 reverse strand)
tgactggagatttcggggtttactccaaacctgaggtattatcattctcgaagtagtgtttattttccagaattgattttgaatttgctgattgtaatttggaaatgccgtcgttgattggtgtgtttggattagggatttataaccattagtacacatgagggttttggcaacatgaaattcacataaaattggatttaaacaagctttgagttgggtatgggtatcggtgacaatgaatgaactgttatgctgctatcaataaactgtcgtagttatgttcattgctattagcactatagtgtacagaacttgcttaactactttttagaaagctaaacgttgttacggatagactcacgaaaaatggctatggctggcatcacatcagaagttaggattaaaaaggaaaacgtaacaattgcctagttagcgaaatgcatatattcatctttccctttgattttgcatgtcttatgttgatgacttattttttatccttggataattattgcaacgcttgctccttcatctaaatcttcgctctgtggatgagaggctgtttgttctatcttgatttttatcataaccgaagtgttttttgtaggctcgttcttggtcgctagaagggtcactgaaact

SEQ ID NO: 104381 - DNA, 631 bp, Mimulus guttatus
  Intron number 1 from transcript mgv1a005956m (locus mgv1a0 05956m.g) derived from phytozome v7.0 (chr-ID scaffold_245 ; pos 235359 to 235989)
attggccaggttcggtttcgattacattttttttgttttgaaattttaattatcttctgttacgtatggttcttgattttgatggatcggcatatttactctttgcttctgaattgaatctgattttgttggtgttccagactttagagtcagtatatactgaattgttggtttgacttttcaattttgtttgcttttattcccatgcttttttgtggggtttgacatcctgatgttggatttactgtttgcttctggcatccggttctgtttatgtttcactttttagtaaaaatcggctccacttgtgcgattttatggagtacctctttcgtatcttcccttttcccgtctttttgtggggtttgtaatccccgatgcagctctatgtattatctaatttgttggttgactaacgaggttttgcatataatgcaatcactaattgatattttgctcccgatcttatttgaattataatgagattgtttctgatcaatcaatcattcattcgttgcagtatttgttaggaaattaaccagagttgaaaatattcgtgttttgttgagatcttgagtttcacattccaactctgttgtcccacttgcagatcaagcgtgaaatctctacc

SEQ ID NO: 104382 - DNA, 648 bp, Mimulus guttatus
  Intron number 2 from transcript mgv1a005160m (locus mgv1a0 05160m.g) derived from phytozome v7.0 (chr-ID scaffold_24; pos 484595 to 485242)
gcatcattttggtccagggttgttgcagaagtaagtggattttagagttatatttgatgtatgctgacttaggaatgattgaccgactctttatttgctttagtggataagttgcagtcccttattatgcaaggtgtttctattgattttcttgtatgatacaccgtagttatagattgctggaccatctcaccgaattatgcgtttccatggaacgttcgtctatataaattgaaggagtcaagaaaatatgaataactgcttccagttgcatcctaaaagtaggtgattagttatataactgctaccacttttagcatactagcgccacaaggtctcttccggaaaattgacacaaagaggttatgacgatagtcaacttgttttttcttagttcctgtccaaaacagcaagggaaaagaacagagattgaggaagtatgagttataaagaagtcaaagaaaattaaaaactcctaccagcttagtgtgtggaactagttaaaaaggttgaccttaatatgttaattagtcgccgtccttttgatttgttaccctttgctcctagcttcttgaattttttgacgtatttactcaaatgattcaccttgcagctgagaagactttggtacgaaggtcaatatattcc

SEQ ID NO: 104383 - DNA, 742 bp, Mimulus guttatus
  Intron number 1 from transcript mgv1a012020m (locus mgv1a0 12020m.g) derived from phytozome v7.0 (chr-ID scaffold_151 ; pos 523515 to 524256 reverse strand)
cttgccattctacttctggtatattccgtttttcttatgcttatttttctgtccgtttattttttctgaatttatatccacattcttctggtgtggttttgtgtagaaaagtgtgcattgaagttgtggattgtggattgtgaattgagaaaaaaagttacgttaattgatgcctatttgcattaagatttgtggttggattcctttttgctgtttccaaatcggtctgcaatttgatctttctgcaatctgtttattcgttttattgatatgcagcaatcttttgaacttgatgttttaccgtttttttcgttgcataattatatatttgaaatagagttactgttgtatattatttgaaataatagagcagatcttctgtatcggataaagcgtcaacgtgtttactactgttttactcaatcactgtgatgcatggggctctttgtgccactagagccagggtaaattgcacagctttctgataatacatgtttgctccattcagttctgatccttctaaattatctttgaggtgttgaatatgttcgtacgtgttatacctatgttcatttgaatagtatctgaagaatatgaaaacttttaaacatgtattggataaacattgcttatgatatatgaatgtgatacaactatgaaaacgtgtgccggtatctttcctgtttatttttgcgaatcatttttcctttcttacagtggagattgtggcaggatctgctgc

SEQ ID NO: 104384 - DNA, 602 bp, Mimulus guttatus
  Intron number 2 from transcript mgv1a014391m (locus mgv1a0 14391m.g) derived from phytozome v7.0 (chr-ID scaffold_181 ; pos 44717 to 45318)
ccttcatatttggggttattgctgaaaataaaaaggtaatctttttatcctatgaaaaaaaaaaaatgatgcttttatcataatcatatgcaaagattacatctttttttggttcttttactgagttttaatttgattatattttctggtgtttattgtttatttaatgcccttcatattgttagttttggtttaaagattggatttttatgtgatgttatattgagaataactgtgtgtttggatgcaatttctctcttattgaaaaataatttgtcttatttttcgatccggggataataattcgtcacgattaacgaggccctcttcgtatattccacaaattattgatgtatgaaattagtatatttcaagattaattatgcacttgtgctattcttgaaggagctagtgtatgtacatgattgataatctctagatcaaaattctttactcgtatcgtgtaatcataagaaaataaaacattgaaaaaggaaataatatatcaatcaatgtagtaaaaattcgttctttttcgttttccggttatttattcggttggattttgcagcctgcagcaggcactccgataacagggacga

SEQ ID NO: 104385 - DNA, 300 bp, Mimulus guttatus
  Intron number 1 from transcript mgv1a015391m (locus mgv1a0 15391m.g) derived from phytozome v7.0 (chr-ID scaffold_181 ; pos 499882 to 500181)
tcactctccactcttcaatcttcaaaactacaaaggtaaccatttttctatttaccattttttgtttttcttatttgtttaatcggttcgttattcattcatttggttgtaaatctttgattttcctcatttctaattatcggtaatttttttctactgaggatttattttgtggtatgttaattagtacgaacacgatgaagatgtagtttcttacagctgatcgatcataagtgaaactgttcgtacgttatttgtggtttaggtttttgaattgaaaaatcagcaacatttggaggt

SEQ ID NO: 104386 - DNA, 687 bp, Mimulus guttatus
  Intron number 1 from transcript mgv1a002652m (locus mgv1a0 02652m.g) derived from phytozome v7.0 (chr-ID scaffold_4; pos 3604132 to 3604818 reverse strand)
gtttctattttgtcaacccagtaagtgacattaaagcatcattactgctgccaaatgtatcgttacttctgtataatgcttcgttttttgtaggaaagaagatttaaggaactttttgatactataccctctttagacgagcttcatgctttggatgtggaggggctcaggcccaacgttattcttgttgatacacgtaaagataagaagctttccatgttaaagcagcttactatcactttggtgaagggattgaattctaatcctgctgccatgatcaagaagatagctggactggttcgtatatattcctatctcgtttttatgtgtgtgcttgtgtgtacattttcctgagttcatcactaattgccacatttgcttaggtctgtgattttttcaaaagaccgaagttggaacctgatcatgttaaaggtgcacttgaagaagtctctcatgcactagataatcaaggtattcatatgctgggccacataaaacacggctcttgccattcgagagctatcttattcaaagttcttgctgatactgttggcctcgaaagtatgcttatggtggtaaggtgccattattattcaatttccacagaaatgtcacatgttttgccttttgcttttcttatttgccttttcatccttctgttttcaggggttacctagagaaggagta

SEQ ID NO: 104387 - DNA, 731 bp, Mimulus guttatus
  Intron number 1 from transcript mgv1a012517m (locus mgv1a0 12517m.g) derived from phytozome v7.0 (chr-ID scaffold_21; pos 680441 to 681171)
ctcctaccgcttacaccttgccgcaatatcaacaggcaagcatgccaaaactgcttcttttttttttttttttgttttcttaagttcctttgattatatttttagattgttgaatttctcctattgtgtctgtgtccatcagaggtggggtcatggaattggaaattattaagggtttttattttgtaaagatcttcaaagttgaatcggacatcgtgtgatcgaaatcagaggcgttctcgtcgtttttcctcttttcgtgtgtgtgtgtgtgtgtgtgtgtgtgtgtgtgtgtgtgtgtgtgtgtgtgtgtgtgtgtgtgtgtgtgtgtgtgtttgaggggtgggggtttaatttgtaatgatcttgacagaaaatcaggcattaggggattgaagtaactattacttcatcagtattgttaagcttgcactttgattacgaagaaaaatatcgatgttgaaaaagctataactttttaccagaatgtgctattgaattggcaacctgcaaacatggttcaaataaatagagaaaatacatgttttattatcaatgtggcgttttgggtctcctcattgtattatggaattagtgaagaaatctcgaggggtgtttattggaaataatgattcatgaacatttgtacctacttattattgtttctgttctaatagcaggttttgatgtgggcaggcccaacagttgtttcagagggacgcgcaaacaat

SEQ ID NO: 104388 - DNA, 702 bp, Mimulus guttatus
  Intron number 1 from transcript mgv1a004880m (locus mgv1a0 04880m.g) derived from phytozome v7.0 (chr-ID scaffold_251 ; pos 148503 to 149204 reverse strand)
gtacttgcctcaacgttggttgcattccttccaaggtatcctcgtcttctccaataatttactacatctgttttgctttttttttttttttatgatttaagattggtcgtattttattgtatgtgttctgacttctgagtgtgtattactgggtcttcaatgatacatctagtagtaggaggtacgaactgctcttgtgaggattttcattcttactgcttatattggtactggaattgcgtcttctactttatgcttttttctaattgtaattgaaaatggtagcaaatgaaaatttgatttggtgatgagcaagtgaatcatgattgtgttgccctaaattgaatgattacctaaatgattttgagggctagctggtggtaacggaatatgttaggatggtaattgaatatcatgtagtgtttaagaaagtttgatctcaaacaagttagcttcagttgcttctgtatgacataagagtctttgaaaaaagaaactaatgtgtttcaggagtttgttttaactatctgtttgacatgtatgattctcattattttattgcttagtgaaagttacaaaagagttcaaactatctgttagccatttaggtatctgataagatttcaaagatgtcgctcgggcttccatgtcttcagttttgctcattgtttacattttcaggcattgcttcattcgtctcat

SEQ ID NO: 104389 - DNA, 1026 bp, Mimulus guttatus
  Intron number 1 from transcript mgv1a016077m (locus mgv1a0 16077m.g) derived from phytozome v7.0 (chr-ID scaffold_65; pos 1087830 to 1088855 reverse strand)
gcagtattggcaagactctcaagggctttcaacaggtttcacttttttctcctttttcttcaattaattaaaataaataaataaaacttttagggcttttttcagtttgttgctgttattaattactgattgatgcatttgaattgaatgatttgaacttgataagaggattgaatttgattggaggatttgggggcagatgaaatccaccccctattaactcaaaaactagttcaaacttcaaatcgagagctaagaatttcaagtttattcgtccaaacagcctcgaaagatttcttattgtgaatttgaaatccttccatccaaatgcatctttaggtgtatgtatgtttggtggatcttcacaagcaaaaattctcgtttttccggtaatttatatgcattttaaaccagtttcaaggaatgaaattattccatcacgatcgttacgaacagatatttcagttggacttggaatgatttgcataattagtctttaaaagcttgcattatagttgaacttgtagaatcccgttccacttcaatagtcgactgcttatttgatttatcgagattaatgatgatcaattactatttagaaacatggtcagggaattcaaatggaatgtatttggtgccgataaacgctgtgttagccgttgaacggaggaacaagtgttcattaaagggcgcagctgaaccgcccaagctatatatagaaataaaatctattattgttcgattatgaaccaaacctatatatagcaatttatatcctctctgactttgatatttagaatgagtattttctactgttaagcgtttattatacagctgttgtgtaatttgtgatttgaaagatcgaaaagctgattacattaactcctgtatatatcatctgattgatattcggtctttttttttaaactatgttccccataaattataagctgtagcttttatcggttttgtgtcattaattcaagtgtaggcggcaaaagaatttgagacggaactgaagagcga

SEQ ID NO: 104390 - DNA, 746 bp, Mimulus guttatus
  Intron number 1 from transcript mgv1a002773m (locus mgv1a0 02773m.g) derived from phytozome v7.0 (chr-ID scaffold_30; pos 1124999 to 1125744 reverse strand)
cgccgccgatcgcagcccagccgatcgaactccaggcacaatttcgcctattacgtcttttatagaagtgattcaattttccgggaaaggagaaattaatgctgttattacatatatatgaatgagaatctgttcaaaactttagttgccacttgggttattgtttcttcatcgttttgaattattattattattttttttatggcgtaggtttgctttatttatttgtttcgttgttgtctgtttttaactattgttgatttattctttttttggggtttatttatgtatggttgcttttacttcattatcgttttttgtagagttgtgatgtgggtctaggacattcgtccaattttggtgattctatggtatgatatgggttcatcgaaacgccgtctcttttttcttcgggtgcaagtttttgatgttttgatttgatgcaaatcttgtgagagatggatatttattggtgaaaaaaaatctgaatgttgtgtttcgtttgcctcgcattatcttctttagatctgtataggaattaatagttttctatctttgatgagttaattacaaccgatacgctatttaacgacttaacttttaggaactagcaataaatttcagattgccgactagtgggtagatattctttttatgtttattgatgtaatggatttgttattgattgcttgttgttgctaaaatcagggggagaagcgtatctttgtgagggataacgtgctcta

SEQ ID NO: 104391 - DNA, 611 bp, Mimulus guttatus
  Intron number 3 from transcript mgv1a014376m (locus mgv1a0 14376m.g) derived from phytozome v7.0 (chr-ID scaffold_2; pos 2053477 to 2054087)
tctgagccacaagagtcagtagaggtatctggaaggtaatttctctttttttctttgatctaagattgtctttggatagaaataattggatttggatatgggtttaaaattattaattctctaatatacttcaaatccatcaaatgactgcaaaaatagctcataagtggttactgaactagaggatttaaattgcctttgaagtatctgaataagcacaaagaatttgttattgtggatctgaaatccttggctcccaaatcctacaattatttcccttggaaatatcagcaacctattttgtacttgggggtgggatcccccacacaattttctgtttctcggagatgctaggaaatcgagtcatctgaaagacagggcattatgcttttcactgaaagattcctttttgtcaacaaatccccgctatcaagggtagtttcgaacaaaattcactaatttattatagacaagtttatgtattgcatatgtatcatgtataatatcatttaccgtatgttctatagcttgagcacattatcttttgctcaagcgctcgtgttatcttcaatgcagggagttggacgaagtgcctagtaaagaattggaac

SEQ ID NO: 104392 - DNA, 998 bp, Mimulus guttatus
  Intron number 2 from transcript mgv1a013668m (locus mgv1a0 13668m.g) derived from phytozome v7.0 (chr-ID scaffold_106 ; pos 547903 to 548900 reverse strand)
ggtcgtttaaggtaaatacaattattttgacccatattttatcttttgattgtattggactatgaaatttctcgaagcattaaccattaagtctgtcaaatgagggcctcttagttcttcgtaatcgtttgtctactaggatttagtggctgacctacactaagaaaaaaagattacagtagattatgtttacttattaaaactgtaaatgcttgtcgagaatctttcagaatttgtcaagaatctgtgggtgagtgcactcttattggagaaatgattatattagttactatttttagttatcgtaactctcgagacgtgttgaaaacatggtaaactttgacttggagtgaatttaaacacgatgacacaattcttttttgtgatgttttaaatatatctgctgtaatttacatcttgtagctctcatactactgcataatcgaaagcaaggcaggagttggttaccactttttgacttgcaaaattgataagctataccacgaacttatataagtgaagccaatacagattcgtttattaatcacattctttgctgccttttgtgtacgtatttggaatttgttcatctgttagttagcaactcacgtataaaatcgacaataacgtgttttgtgttcctatgatttgcccactatgtgttctcatcaagacattattattaaaatataacattgctatctatcaaatgttgtcgtaatatctaccgatttagttaaatgcatctgttgtatgttactagtgatggatcaaatatgtaaatactgtggctgagtggattcttagatagtcgaaaagtttgtgtgtttttgctgtaaattgttagaagtacttctccactgtcgctttcgtttcaaaatttagtcacatcactttttgagtatcttagtactgcaagcatgacgagctcttaattaatttaaactttaatcgtccgtgcagatttcaacatccgtcaacttggcagaggaacgcaa

SEQ ID NO: 104393 - DNA, 773 bp, Mimulus guttatus
  Intron number 4 from transcript mgv1a007375m (locus mgv1a0 07375m.g) derived from phytozome v7.0 (chr-ID scaffold_4; pos 957781 to 958553 reverse strand)
gcacagctatttcaggtatggaaaattggcaaaacagcaataatttgtttattccagttatctgaaaaagaactgataaatctgatgttctattaccatagattttacaaaggtcaaacttttaacaaatgaggatgttcaattttgtaatggcatgactatacaattggagggaaaaacgagtaccgatgataaagattaaaaatttaagcacttattatatggttgggcttattaaaggctgcccctaaagtctgttgtctatgccagtgagcctagtatattcaggaacttgaatgattattcgtacttgctttcccgataatgacaaaaacatgctcgtaatacagccctatcacagcattcacatataatttgacattgtccaaacttccccgagattcgttcgcccataagaagactgagttgtgattttggcctgaatgtatatcatcttgataaccctatggttgttgactaagtcaacttctctcgtcaaataatatcatgttgatttcaccgcgtcagaattttaccagacgcttgtagtgtcatgattgatctgaaaaaaggggaactttcttcaagcatagtgattttgacaattggcttcaatgtacatatttgcataattattttctggctttatgactgttggtgtatttgcaagtgcttgatggtaatttatttaaaaattaagtcttttattgatacttcatgtgctatgtgaactaatagagcgaccctgagttggcacaagctatacttggaaa

SEQ ID NO: 104394 - DNA, 1000 bp, Mimulus guttatus
  Intron number 1 from transcript mgv1a010792m (locus mgv1a0 10793m.g) derived from phytozome v7.0 (chr-ID scaffold_159 ; pos 366394 to 367393)
ttgtttttattgttgttggttttctctcttcttaggttttcattgcttgaactgttgctatacatgttttttatttttcttttgaattttgaatttttgtctcagttaacttcctgtaggatatctttttgagattaaggatatttggttgcttatgaccaagtacttttgttcttttctattcgtagttagttcataggtttgtgtctttgtgacaatgtatagtgaagaggtttgattttcagttttaatatttcttgttagagattcctttgtcactttattaatattggatggtgatcaacaaccaatcatttccatttgaaatatgcaattcctcaatctttaaattatcggagaacatagaatattcggttgggatggatggtgtaggaatagtcctgaaaatggttgttcagctatcacttctttcgtattcggttactagtagctcgatttttcgagttggttgctctgattattcttctctttgtgccgatgcttagtgtcgtttctaactttttttcgtgtttattgaaaattctagcagttcgtatatttatattttttcttaaaaatccttagtgaagaaaaagaaagtcgaaattcatcgtaataacttcgagcatcgctttcgttacatacatgtcatgaaagcaacaaatctatattcctgaaaaggaaagctttatcgttttttcctgattttgtattgagggttggtggcggaatcttatctgatttaaattagttttatcatctaccaaacagaaatacagatgtgccttaagttttggtcaggggctgtttaaattaatagcatacttagacttccaatcgtagtttttgtccgtttcgtcaaaagcttaccaataaaacaatttagctaataaaaccgaattcgtcgattactttattcttaataatatacttatatagtttcattttgtatccttgttcgacaggctctaaatactgtggagtagaatacacattggat

SEQ ID NO: 104395 - DNA, 648 bp, Mimulus guttatus
  Intron number 1 from transcript mgv1a025191m (locus mgv1a0 25191m.g) derived from phytozome v7.0 (chr-ID scaffold_58; pos 291387 to 292034)
gaggttaataataattagtttgtattaagtcaataatataagcatctatgtataattatataacttcttatgaactatgaattttatggtttggcgaaagaaggcaatgtaataagtcaactcctcagaggtatctgtgttgattcattccaataataaaaggtcaaagttcaggacaagcttcgatagtgttcatttgggaagttgactttgagtatgaagacggtgtttataaagttcaatattaagcaggccgacccaacaatttaatgggccgccctaagtaaaacaaaaacttcttgtattttcaataaaattcaatttttcggggttttttttttataatattatttttgtgtagataactaaatctcaaaattaattttgtgctacttttaatggaggagaatattatttataccgacatagtgataatgaaattagaagacatttttttgtcccctccaactctggtcgtatacgtactttgtccaaaaacatacttttcagcatgcaacttacaatctcctttttgcactatatgtaaagcccaccaaatcaccaattccaccaaaataaaaataaataaaataaaaataaaatggcactggagtgcagaaagttcgagataaccatcatatcagcaga

SEQ ID NO: 104396 - DNA, 779 bp, Mimulus guttatus
  Intron number 1 from transcript mgv1a020107m (locus mgv1a0 20107m.g) derived from phytozome v7.0 (chr-ID scaffold_121 ; pos 203338 to 204116 reverse strand)
tcacttggagtcattctttacattcttctctcagggtgagttgatcttactaataattaataaaataatattaaatggaaacccgacgaattagcaatttcggaaaagttccgattttttttttttttttttggaagtgaaaagctaatttcaattccgttcgaaaaaaaaaaatggaatttcggaaattcgaatgataaactcgttccaaaattagaaattttcgtatcggagtgtcggtgaaatttggaagatttcattttttagtaaaagtataaataaaatacataacaattttaatattataatagtatttttggaaccaaacggaattttcagaattattttcgaaaattaaaatcgaatcggaaatttgaatctcatatatattccaattctcatccataaaaaatgggaaaataggaaccggaatattcggaattcgtaataaaaaaaacatttgttccaatattggaaaatttggaccggtatatgaggaagtcgacttttttttcatgattgcgggttgggcctgaaaaatattggactaaccaaacatccaataacgtccaactgtttgattagtcatgtctaatcttaacgaccaaacaatgcctaatagtataagcaatggtgcgggtttcgggtctcggttttggttttgatttcggttttgatttcggtttatggtgacatagatagaattattagaattttttttcttcatttttctgttcttaccaggtatcctcctttcattgcacaatcaaacctgcaga

SEQ ID NO: 104397 - DNA, 728 bp, Mimulus guttatus
  Intron number 1 from transcript mgv1a026086m (locus mgv1a0 26086m.g) derived from phytozome v7.0 (chr-ID scaffold_27; pos 1674005 to 1674732 reverse strand)
ttgttgtgaagcacatcaaagctcctgttgacattgtaattttctcactcaacacatcttagtgtgtgcgttttcgattttgatattttttattttccccccttttttcactatgatgattagtaatttgttttgcattttggtccctgaattccgatcttgtttgtggtgtgtttattttcaaatcacttacagttgatattcgttgattgcaattgaatttaaattaccggacagcataattaggtttccatttttctaaatttgattttgtcgctcgatgctgtgaattgtgatgacagattgacttcgatccgatgtttacaatttgaaatcgagttctaaatgttgaattttgaggttatcaaattttgttgctttatttaatttttcactttttttaggttaaatgtgaaaaggttcacatctttggaaatacccgtatgatctgctcgtatttctctcattgttaaacatttaattgaatagctaaagactgggaaattatatcgatgttgatggaaggtcaaaaaaaatggggcgaaaattttccacgactaatttcttctagtccttttgttaccaagtctcgtataatttacgttccctaggctgaaaatttgaatgcgatgttatcttcattcttcaggtttggtcattggtcagaagattcgatcagccacaaagttacagccctttgttagtcggtgcactgtgcagggcggtga

SEQ ID NO: 104398 - DNA, 387 bp, Mimulus guttatus
  Intron number 1 from transcript mgv1a024976m (locus mgv1a0 24976m.g) derived from phytozome v7.0 (chr-ID scaffold_841 ; pos 9224 to 9610 reverse strand)
ttattcctccgatttgcaggtacatttattgattggctaatgtgtttttttttgtttattgaattttcattgaagatgtttttcatgtgaatttccaagaataacttaaagccttgtttggttggtcggattagccatgattaattaaataagtggacctaattacttattggatgtttgattagtccaataacttttcgggccgggccgagccgcaagtatattgtagaaacgagacctacattctaaatttagtggttaaaaaatcttgcattgttcggtttcttggagaaaaaacggctctaatgttgcattatgtcccttataaaaagtcctaatttatcgtctgatttgaattggttcaaaagggaggaaatcactgagtac

SEQ ID NO: 104399 - DNA, 1048 bp, Mimulus guttatus
  Intron number 2 from transcript mgv1a017595m (locus mgv1a0 17595m.g) derived from phytozome v7.0 (chr-ID scaffold_17; pos 1987650 to 1988697 reverse strand)
caacggcatcagtgatttggcatcagtgattttaggtacttatctaatttcttctaccggcaatttaagtgggtagtttctgattttgtacttgactacatatctgtgtctacatgaattctgagttttggatgcaaatgtatattgaaatgttataactaattccccagatctgcagttaggccgtatataaacaattattgttcgagattaacgtatttttatcttctctagttgttagaggtcgcactacttttatttttttaatagtgttttcaaggtcgtattaactctaaggtattgtgcctttagcagtctaggacttttttccatctaagtagtgagatttgcttttaaggttggttttagtcatggccaatgcatttgagttgtgcttttacatttagcagaattttcatttttctcttctaatgatcttgagatatcaatgccctatccaaatattattcaattgcttctagactaatgtgccgaaggtgttatactactgcaagttttcaaattagatttaatcttttactaagttgaaatgaatgtttcaataaaactttgtccatacaagtccttgaaaagttaagattgcaggtttgcttctagtgttcagacaaatatgattttgcataaaagtttctcttttttttcggatttttttgtagtaaagagctagaatgaagatcttagtggtcggatttttgtattttgccccttccttacctagtgcttacgattttgggggttaatcataatgtttcctctgaataatattgatgcaagatgcatttcttgtttttcaaatgccaatagcaccaagaactcatcacaaactctgcatggctcatgcataatcgtggacgacaagagtatttttgtttcctattgtgatagattacacatcagtaagtatagaggaataattataaattctttttccataatcatgaaatctgcacattggaatttactgattgttaaataaatttctttgctcgcagggtctcgtgtaaattttgttcgagttcaaatttga

SEQ ID NO: 104400 - DNA, 529 bp, Mimulus guttatus
  Intron number 1 from transcript mgv1a023830m (locus mgv1a0 23830m.g) derived from phytozome v7.0 (chr-ID scaffold_56; pos 1048269 to 1048797 reverse strand)
ttctctgttgaaacccacaacgaaattaaaactaggtaaactcataacaacctattttgtggtcttctgatttattattcttattgtttgtccttttattttattatttcttaatacccattttgaagaaaaaaagtttttgagattaaattgtacaacttttatgaatggagtttggattttttttttctctgttgtctttgaacatgaattattatcaaaattatgtttatggttttagttatgtttatggaaaattggaaatagataaattcttgtgtttatagctaagaacactcggggacgaagactctgttcaagttttgtgaaattgacaaaagattggtcaaggattatgtatagtagagattgtacatgcaacttgattactggattattgcaatctggatggaattggataggttatttgtttcgagtttcgtgatattttccactgcaatctggatggcctttatcattcatgcatttgatgttcatttgtatcggatatgtttggattttgtagtac

SEQ ID NO: 104401 - DNA, 545 bp, Mimulus guttatus
  Intron number 1 from transcript mgv1a015866m (locus mgv1a0 15866m.g) derived from phytozome v7.0 (chr-ID scaffold_13; pos 839713 to 840257)
gggtacgacgagcttacattttgtttaattcgtatttttgttttgtgttgtctctccgcgcgtttatttttaccttttttttgttttagttaacgatggttttttttttttttttttttttttttttttttgtggtatagtgtagtgtatttctgattgaatgaaatttaattcatgtcgattcgaataatttgctgttttttgtagatcgtgagaagttaaatattatcgaatttgaatttacacattttgaaggctaatgtaattgttttgaaattatgttgattggattatattggcattttgtgcctctgaaaaaaacatgatttgttcctataaacatctctttaaactatttcaaattaatcgattctaccgtgatttttttgtgtggctgattttgagtattaatgcactatggtagttttatgtgtaagtgagaagagattctcaatgtggctattctatccttgtctgtaagtttatatcagtgttgttgattggttcgatggtttgtttgactgtatcgcagtaagacacgtggt

SEQ ID NO: 104402 - DNA, 400 bp, Mimulus guttatus
  Intron number 2 from transcript mgv1a018386m (locus mgv1a0 18386m.g) derived from phytozome v7.0 (chr-ID scaffold_68; pos 1016836 to 1017235)
gagcctaacatattcaaggtttcctcgccttttgatttgttaagttttgttcttgattgaaatatgtctgctttttatatgcttacttctatatttgtttccttttggtttacttctgtgtgctcaagttctaacttgtgccatgctccttaatttaacctttgcattgctgatgatataagcaatctgaaatgttatttttctgatttgcaccttttttttcattgcctgatttatttgattttataaacctcgtaaacaatcttggatttcttcagttttttttcttccgtctcgtttgaggttttgtcaccatagtcctctcatgacacgagtttaatggctcttttactttcatgttgtaggccctgctctggtttctgtacacaggaactctttc

SEQ ID NO: 104403 - DNA, 840 bp, Mimulus guttatus
  Intron number 2 from transcript mgv1a001301m (locus mgv1a0 01301m.g) derived from phytozome v7.0 (chr-ID scaffold_210 ; pos 270126 to 270965 reverse strand)
gaatttagagatagtttcaggcacttcacaggcatgtcagatttaaatccctttgccccagccgaatataatagcattctactggggcctagtaaactagtaaaccgattttttctttttcggaaaagagaatagaaaagaataacacaaccactatttccggttttgcaatgttggtttggtctaaaaactgactcaagtatgcacttacttttaggcgcttctttgagctactataatttaattttcccgttgcccctgttcgaaatctgggatttcattatttagcctggaaaaccaagatttccaaattatcaagaacatacttaaagatatgtaattcaagaaataacctttaagagagaaaattggtttgagtcggtggttttgataattgatttgtagcaggtgattttcttctttaaccttgaggtttgagactaagtgtagatgcctagatggactgtgtagattatactacatactgcaaaaaaaaaaaaaaaaaaaaggagctcaagtaaatctgacattgctacttattatctagtacatcgaagttgaatgattttacttcattttcctgtgataaacatttacatgatataagatcattaataaagaatattaacggaggataggcgaagccattccattcaagtatttattatgctttatttggattctccttacgtgttaactgtatgcgtataacctggattcttaacttcaatttggtctatattctccaatacttagaacatcagtttgttctctcttcattgattttcttttccccgtgtgatttcttttcctagatatcaggtaatctagaaagtgtag

SEQ ID NO: 104404 - DNA, 587 bp, Mimulus guttatus
  Intron number 1 from transcript mgv1a001301m (locus mgv1a0 01301m.g) derived from phytozome v7.0 (chr-ID scaffold_210 ; pos 271082 to 271668 reverse strand)
cgtaccatcggcggcgtacaaggtgggaagctgcggtttgggccatgtcgatcggaggagtgccgcccatctccgttttttactcaaaaacaaatcccaatcgcgtaagtgaattcgaaattgtgtgtgtgtttttttttgttcattttcttcaatggcatcgattattctgttagctgaatggagtttaggttgaaattgatctgttctcgcatcgggaattaagcttaggggtttgattttggaggtaaattgtatttataacacagtgactggagtgaatacgagtgcagatgattcagtcgatcgtcgattttagttcaatttcttcatggtgttatggtggatcatcttcttcgatcatgtcattttttcccccaattttaggatcttcagtaatgtcaaatgtggtttagcggtcactgaatttgggggaagctccctgcgttggtgcccgtgtgtggctagattattgggctaaatgcgattctcgaaatagtaaatgcaattcagaaaatttaaattgtcgaaatgactgttcgtagcaagatttggctaaatctagtgcttatttgctatttgcaggg

SEQ ID NO: 104405 - DNA, 648 bp, Mimulus guttatus
  Intron number 1 from transcript mgv1a002757m (locus mgv1a0 02757m.g) derived from phytozome v7.0 (chr-ID scaffold_172 ; pos 254959 to 255606)
ataatcggaccgctgctgctcaatacattatcgaggtatcccattatgtttttcgtgttggaaatgtttgacctttttcgtttgatgtttaatggtggttgccggaacttaattggattctggatttggctatgctcatttaattgtaattgattcgggtcgtttaggttatataggaggctaaggaagtgacgagtcgaagttaaatgccgtagcaaataagctgagaatgtaaagaatgtaaagtccataagtgattacgttgtgaaaaaaagatcatttcttggaaaagcttctgtgggtgaacatttcttaaagataggagcagattacagattcctatatatgatgttgttagaaacatgttcaatggacctaattttaagtttgattattacgacttttagatttaactgctgcaatttagttatttaatttgagagagacgagggctggcgttatggcgggggttgatttcccgggatagggtgcggttaacagctgcagcttttatgtgtggcttgatttttgtgcagtttactgtctattttcttaatttggttttatggttgactgttgtatcttctgattatctctggtgcattactggcagcacggaggtgatattagtgctcgtgatcatacagg

SEQ ID NO: 104406 - DNA, 438 bp, Mimulus guttatus
  Intron number 2 from transcript mgv1a011579m (locus mgv1a0 11579m.g) derived from phytozome v7.0 (chr-ID scaffold_89; pos 636582 to 637019 reverse strand)
ctgtttcaattactcacaggtgagttaatttatttaattttttttctgttttaaaatttttaggacttgtttttaagagagtgatgattttatttattttgtatttttggtgaaatgttagttgatcaatggaattctttcgaattcttattagggttttactagattgagagggtatttttgatttatttttttgtggagcatgtagttagggcttaggaccgaaggtttgttttcgagctgtaataaatttgaattacgagctcgaatgtttgttttttttagtacaatatcttcgagattcaatgtccaccaatgattatttggatcatttattcccttttactcatttgttatttcgactaatttggttaattaattttccatttttttatttgtttagggaagtcgttcctcgtgtagcgcaggcaagggaaa

SEQ ID NO: 104407 - DNA, 619 bp, Mimulus guttatus
  Intron number 1 from transcript mgv1a006534m (locus mgv1a0 06534m.g) derived from phytozome v7.0 (chr-ID scaffold_181 ; pos 2465 to 3083)
cctggagcaattcaagtcgaagatccatactctcggttagtgcggttcgagatttccggttcatgattgaaaaaaccgtgttgataattttactttgaagcttggtattgatttaatttttgagttaaaaggagcagatcttgtgaaatttgaaatagcaatagatacagaacaaatgatcggtgaaatttttgaatagagcatttggaactagtaatttgagcatgatgctactgtatacctgcatttggagtttgatgcaggttattttggaatttgtgcattttttttcaatagcgcttaaaatgttgagaatcgattatgtttaagagaatgtcgttgtggctcaatccattgaagtgaaatcgaagagttaaacttccttattgtggagtttgatattatttgaatctggggttgtttatgtgtaaaatcagttttttgttggttacgtaaaacttgtgtgcgttggttgtgtgttccgttccgccttttgttgttatgtcatgtgacgtaatgatttacttgcttttttcattgacaatggctttccgtattctcttacgaaattcttttgtatgaagaatctgatattgagaagaaaactcgagaaataaag

SEQ ID NO: 104408 - DNA, 661 bp, Mimulus guttatus
  Intron number 3 from transcript mgv1a006669m (locus mgv1a0 06669m.g) derived from phytozome v7.0 (chr-ID scaffold_22; pos 708525 to 709185)
aagaagtgtgccaactgcgtttaaactcttcacgggtaaattttgttttgcattttctaaatcttgcttctcttattatgtttctactgatttgcggtttgaatgagtactgtgaatgtcatattttcgatattatcggtcttctgtaaggtttaaggtgtaatacgactccgtttatcataagccgaatctcatattatctaatatgaatttcgtcagatgcatatgttatagtaatccagttgctatagttcgtaatacttttttctaaaacgaagtttcatccaattgttcgaaattaccgaatcaactattttattccaatggattgattggatgatagtttttgtgatgcattagcaaatttgagtcgatcttttagagtttagacaaatataattagtcgatgcagcaaatacgaatctcgattatcctccgaaataaatttcagagatcgtccgaagttactgcacattatggaagtaagagcatcaaacagagagggtacctataagatatacttatcttcgaagtaggtagaaaatagttcaatcaaaattattctcgtttatcccaaaacatgcatatattcattttgttgttaatttttatttttatttttgcaatttgttcacaagccatatttccgtacagggtcggc

SEQ ID NO: 104409 - DNA, 682 bp, Mimulus guttatus
  Intron number 2 from transcript mgv1a017026m (locus mgv1a0 17026m.g) derived from phytozome v7.0 (chr-ID scaffold_24; pos 1354182 to 1354863 reverse strand)
attagggttttgggttctctgccgcttgcattgtatgttttctatacggctcccacattttcgaactttcttttttatcaagtctttgtttctatttgatgtgaagatagccgtgttcttcttgttctatttgctcttttttgtggaaatttatctgcatcgaagtttgcaaataaatgagaagagttcaatatgggatattcttgaaagttcagtcggctaaacgtgtaagattccaagaatataccaatcttatactgaatcgaaaatgcaaaacaaattttgatttagagaaagggagttcggggttggggagagtatatgccgtctccccctttctcgtctatccatgtttctgagtgagttgcctttaatattaaatatttcggagtttttattgcttttgaataatgtagtttctatcggtattcttgatggagcttaaaacttaatatctcaattcgcatttgctgaaggctaattcttctcatctttttttttttctaaatgggaacatgtaattgaagctgcaattgaattgaattatactctatttattcgtcacacgtcgagctcaatcatttacaaaataagttgatgaatatatatatatatatatatatattaataatctggtattgatgcaggtactagaatcacagttcctcgaagtctaaggtgg

SEQ ID NO: 104410 - DNA, 854 bp, Mimulus guttatus
  Intron number 2 from transcript mgv1a007931m (locus mgv1a0 07931m.g) derived from phytozome v7.0 (chr-ID scaffold_17; pos 1726680 to 1727533)
ctggtaaattttctgcctccttctgcgtgcttaatttatcgtttttgtgtttttaattggtgatttgttgtttgattttcatgtactcagattagatcttggcgattttggatctagatttgctctgctttatttattttttatttttttattttctgatgaattttgagatctggatcttctttgttgatcttcattttatgatctcgagaggcggatttcgtgttttgatgtcgtaattttgttcacacgtggagattttgacggtctaatcggtttaatttgatctttgattgtagtttatcatgtttttggaatattctatttgcgtacggttgttgctgagttcttctgtttagctggctctgtttttgctcagttcagatcttggtttgtgcgtgctttttttacttgcttttttggttaaaaaggttaccgtcttatgtttagtgcgtgagatctggtttattttgttgtggtatggaattttcaaatgaattttgctttgattttccaatccaatctgtttaggttagatccattcatttcagtttggatccattgtggattgagattaatttgttcggacacatcttgtttataaaattgagacagaaatatttttatttcaattaaaacacagtttggagcaaagaaattagaaatgctatatgtggtatgtgaatgaatttttatgagattactatatgtggtttgacccgattgaactgaatacttgctgtcaatgtttatttcttttatttatggagttaatgttcaaaatttcttcgaaagtggttctttcatctcgtatatatttaattgctattgatcctgctattaaccttttgcag

SEQ ID NO: 104411 - DNA, 833 bp, Mimulus guttatus
  Intron number 1 from transcript mgv1a004243m (locus mgv1a0 04243m.g) derived from phytozome v7.0 (chr-ID scaffold_60; pos 896249 to 897081)
ctgctgtggccaggagttataagggcaatcccgcggtaaatattatttgattatttgcaaaccggtccatacaaaaatatttttttttcttacctaaaaggacatgatgaaaacatcaagttcatcatcattcacaaatatacccctcgaatcctaatttttatccaatttcatcctcaaattctaatttgactctaatttttaccaattaactaattttgaccgttgacctcggtttgaacagctttggttgaactcgataaaatatttttgtagcctgactttctcgatgtatacctcttctgaagtcggttttttatcgcttatttccgctgctctgtagcgattttgaccaaatttttgaaacgccgcgccgttgatttttttaattttaaagttttatatatttataaaaaaaataagttattttttttagttattaattttttttttccgattaacacagtaacattactatgttcgtcaaaagaaactagaaacaacaaagtcaatcatattttgtagaccaacggtcaacagtggttggcggcggtcaatggtaaaaaaatgtgaaattatggttaaattagggtttcaaatcataaattggatgtttaaaaatagttaggggtatttttttcataaaagctagagttgcctagtaatgaatgcataagtggtggatttatttgcaaaatataaaaaaatggaagtcccttttagaattaagtcaatattttatgggcttttaggaaattatcccttcatttaattataaatttccagatctgatcgagctagtctaacatggtttttatatataggttgtagcc

SEQ ID NO: 104412 - DNA, 354 bp, Mimulus guttatus
  Intron number 1 from transcript mgv1a002144m (locus mgv1a0 02144m.g) derived from phytozome v7.0 (chr-ID scaffold_75; pos 756984 to 757337)
ttctgcaagcatctgatctgggttgttgtggaaaggtataaagttaatttctttttttttctccatttcgtaaagttctttcttctctcgctattcgcacttcgtagatgtgaaagtgaaaataataaacgaattaaattgataaatcttcgttggttatctctgggcaacgcaatttttgtgtttttgagcttcgtttgtgactaattttggtaattggggtttttaggaattcagaaaatctaggtttttactgttcatgtttctacagatttgatttttcgctcgtctttcttctatctaaatacctaactaaatacctctgcatgttgcaggaagcttttgctttgagct

SEQ ID NO: 104413 - DNA, 605 bp, Mimulus guttatus
  Intron number 1 from transcript mgv1a000036m (locus mgv1a0 00036m.g) derived from phytozome v7.0 (chr-ID scaffold_27; pos 1298539 to 1299143)
aacaacaacagcaacagcaacagcaacaaagacaggttgggttcttttttgtctttatatctgtggttttcctttgttgcattgataaatgtgctacaggaatttcgagcttgtctgctttgcattgtacggtcagctagggaattcatgtttttgcagagggttgatagacttgtttattaacttttgatttcatgtttcgacggatttggtgaactctggagttctttagtgcttgtggcttttttcctttgacttgccaagattttctagagatacattcttcactatgttagaatagttcattcatttagtatttgttgcatatttttttatgtgcagtttttgactgggtaaaagtttcgtctgctctttacttagttgtgctttttcggaaacttaatcaatcgtttatagtttctttagttctcgactcaactactattccacatttgttcagtttgcttctttgcgataatatgttctgggagtcctcttgaaactaatggtatttagaattggtaattgaatctagctgcacttgaactcatttctgaatgtcatttgtagtcatttcaacaacaatttctgaggagacccgaagg

SEQ ID NO: 104414 - DNA, 720 bp, Mimulus guttatus
  Intron number 1 from transcript mgv1a003217m (locus mgv1a0 03217m.g) derived from phytozome v7.0 (chr-ID scaffold_182 ; pos 233868 to 234587)
caaggttcgtttctcttttcttttcccctttatgtattgattaaattaaattagggcaaaatcttcatgttttactgttctttaagcctttgtggtctctctctctctctctctctctctctctctctctctctctctctctctctctcgtgttcctaggatttatttgctttaatgggtttttttggttattttttatttattttggggctgatttgtcattccaatcctgaaattgattcttgcactcaatggaattactaatctattacatcctcaggaaatttgtttttttttttttttttttgtaattatgtctgggtgctttggccacacactaaagtttctttaatgggtttttttcttttcttaattttggtgctgatttgcataatttatggttaagaattcttaatttcatcgagttcatacgaagcaaaaaaaaaatagtagatcggtttttcgagttctgttaaatttcagcatttgactttgaaatgcttttgcacacaccacaaagctgatgtttactttgtgttccgtttccgtcttctatttgattaaaccgattgaatatcgtcattgcaatcgtgaaaactcatttttgcactcgataaattggtaacatataatgccgtcaatttttattttattttttacattgaaaacgtgtaactatatttaggtgcattgcccactaaagttcctacaacaagcgaa

SEQ ID NO: 104415 - DNA, 1051 bp, Mimulus guttatus
  Intron number 1 from transcript mgv1a003225m (locus mgv1a0 03222m.g) derived from phytozome v7.0 (chr-ID scaffold_181 ; pos 487846 to 488896 reverse strand)
tggagaggcttctcaattttcgttttgaatctttggtaattcgaaagcaaaatatttacgcctggagatttcaatctgggaaaaaagattgaatcttacactgtcagaaaaactccttccttgtttctaaactaaattaaacttattttagtgtacatttctatgatcagtgtatatttgtcactttttgcaatgagttcattggctgagttggtgcttgactaaagcacaattcttgggctgattatgtatacatctgtatttattttttattcatgtacatagtgatgctttgtcagtgcccctactttgcttacttttgcatggttacagttaggtgagattgattgaattggtctcatttttttctctcatcttttttttttccctgagttagtggtggaaggggccctcattaagacggctgaaattcataaaagggttgggcccaatatcatgtggaaatggaaataaaagattgcatagaaagtattggtgtgtcccaattgttgtctgatctttagttcttgccagatttcaaagtcagttcattattgcttgtattgactattagatctgaaatattttccatgtttctctttcaatgttgatggtgcttccagtttatacgaaacaactctctaatctactaacattcacaattcatgattctcgtagaacaaatcttcccttcacattggtaattgttacttacttactgtgattacactattgctgtgatgtttcacatgtccctttgctactttgtagtgtgatcgaagagcataacatttgtttgcttcttccctcttcgagtttcttgatctttatgtcatccgtttgatccatgaattatgagaatctgaagaatttatgatgattttttttttttcgtttttcttgttctgcgtttctaaactgtttcattttatctcaactctcaagtaattattgagagatgattattcttcaaacaatttcatttgttgaatggagtcgtttataacagtttcctgtatctacttgcagattgtagagaaatcttgacacc

SEQ ID NO: 104416 - DNA, 489 bp, Mimulus guttatus
  Intron number 4 from transcript mgv1a023530m (locus mgv1a0 23530m.g) derived from phytozome v7.0 (chr-ID scaffold_370 5; pos 743 to 1231 reverse strand)
agcttttcttcatattcgagtacgtatatcatgcgatttcatttactcttttgcaaattattttctgtttcttactttcgtcctttgttcttttcattccatacatgttagaacttatgcggcatatttttacaatgtatgggcaaaggatctctgtaaacatgtgaagctataaatagttcacattcctttgatttaatttgtggcataaatacagaaaattctttaaacttcactttctttgaaatttattttgattttccttttcacttatatactcccaagtcatgcttagttttgttcccgtttgtcctcttctttctgatgaaaattgatctttatagacaataataggcctaagactgtatgtcttgatctgactttaaagttcatcaaaaaaaataatatcaccaatgaaaattttataataccttcttgatcatgagatttatataactatatttccaggaacacaacttataccaaata

SEQ ID NO: 104417 - DNA, 685 bp, Mimulus guttatus
  Intron number 3 from transcript mgv1a023315m (locus mgv1a0 23315m.g) derived from phytozome v7.0 (chr-ID scaffold_74; pos 744339 to 745023 reverse strand)
caccaaaggcgacaaagaatttccttctgccaaaggtatatttaatactctatatgtttatctaatttgcatcccatttataaatttatctaatacatttaatttatgcagtgcaaactctttttaattaaattgcttggactttattattattagtctaaaacatatagtattatggcccttttctttttctcctctctcgttgagttctttctttatattattgttgtagcatgcatcatatttataagtatacgatctaggtcaaataatcgtttatgttgccaatatggggaatcgatcctaatatttgtcaccgcttttgaactcacaatttttctctaaatttgtatgctcgttttgttcttttctttattaaattattagctgcatgtgttaatattttgaattaatgtggaagaggtggtacgtacattggtattaatatagtatttgctaaataattattacaaaggaaaaatgactttgtttcactaatgaatttagtttagatcaaaaaattattagctgcatgtccatagaatgagatttgttggttggagattttgatttattaaaacaataattattcactaatgaagttattagttagtcgatggagtatttgagaaagcttgattggcatgcaggaataagcttaactattggtcagtggaaggtgttg

SEQ ID NO: 104418 - DNA, 922 bp, Mimulus guttatus
  Intron number 1 from transcript mgv1a015844m (locus mgv1a0 15844m.g) derived from phytozome v7.0 (chr-ID scaffold_157 ; pos 298597 to 299518 reverse strand)
agatctgggcttacatcaagctccacaatcttcaggtatatccattttttttgaaaccctagcctgttcgtcttctagcatatgtgaaattatttagcttcgtatttaattttttttttcaatttttttattgtgatgttgacagttgtgaaaatactctgtttaatgtgtaatttgtgttctgactgagattgatttttatcagcttatgtatatgtatgctaactcggataaactatgtcgaatcgacaattaatagtacagcctagtgcttgatccgaatatatttgatttaaatgcgcacaagtttaagatttcggtggtgctattgggtgaagggaaggttcgtcgatgaacgaacagcttatgttattttgtacgattttgaaatttactcgtcaaactgttatgcaccatttgtaattttgaaccgatgtaaattatgttgatgatagaatataacgcgtttagaagtgcaattttaacctactctacataattgagatgtagaacactcgaagaatctattgagccttatattctaggtcatcggtattgttaccttgtgaatcgagtatttctttctgagttctgtatcgagtttatttgatgtgtgtagattcggtacatctattacaaacatcccaccacgtaagaccttatcgatatgtttgtattatttttatatggttaaatctcgtgtttttatatcggcattttgattggatcgttcttgatattgtgctaggggttatccacatcttcaaaatgtcgacagttactacactttgtattgatttctgcttaattgtttttttaatctttcggattaatagatgggattagaactgacttggtaattaaaaaaaaaacaatttttttttcaggatccggcagacaaaaaagtcatcgtctgtgacga

SEQ ID NO: 104419 - DNA, 844 bp, Mimulus guttatus
  Intron number 1 from transcript mgv1a012358m (locus mgv1a0 12358m.g) derived from phytozome v7.0 (chr-ID scaffold_27; pos 574136 to 574979)
gccttgattctcggtatgttttttccatccttctataaaccgacacgtgtcattcaactaaatttctttctatttacttctcttatctttttgaaaaaaataaattatttcaatttatgtgtcaattgcctttcatcgtatttttttcttaactagttacaaatatttaggtagtttacaaccacttgagataaagtgcacataaaaaaaaaaaaaaaaaaaaaaattagaaattacatccagcccccgtagtttgtatattttgtacatctacccctactaaagggtgttaatgtaaaaaaatataaatataagggtgtggatgtaattatacaaaaataaggagttttttcgttgataaaccttatctgaggggttgtaatttgcctgaaatatttttatggctttgattgttgcgcgtagattaaaaaaaatactccctcccttcctaaataattgtcacttttcacaaagattaagaaactcaataaatatatcttgattttagaagaatcatataaaaatgactaaaaaacctttaatatttaatgctttataagagaaaattaatgcatagagtttcattaataaggttaaaacagaaaaaatgcatttaatgcagtattgaaaatctaaagtgacagataatatggaacaaaaatatttttcaaaagagacagttactgtgtaacaaatggagtaataaatacgtatggattctagcaaaaataatttttgtttttcattttttgtttccttaattgaattgttaaataattttaaataaaaaatcattaaaattgttttaggtgacaaggaacactacaagcaccttaaggataca

SEQ ID NO: 104420 - DNA, 904 bp, Mimulus guttatus
  Intron number 1 from transcript mgv1a011226m (locus mgv1a0 11226m.g) derived from phytozome v7.0 (chr-ID scaffold_44; pos 657543 to 658446)
ataccacgatttcgccgaccagcgtgaattcctcggtaatttttttttgttttcctgtctccgagttctctccttcgtatttttttgattactctattttgctcatttttttaatttcttctttgacttttagtagtttttttcacagcttctttctctgaatttatagtaatagaacggaaaatgcttatccttttgtcttcctagtcaggttttgttgccttatttattttggttgttgaggtttttatttaagggtttgctatgttcatgtaggatatatgcagatgattttttccattttttttttcctgatcacagagttttatgaattttaaatatgagttcaattcagctgagtaatcttgaacaaggaaccaattgaggaaaccaacaagtgaatattacttgaaaatcgaggtttctgattacatctacgaaagagaaacaaggacaataacggcaagaatgagcaaagaaagaacaaaacagcaacaattaacgacaaaaaaaagtagaaacagcaaaaccgttaactgctcgaacaacgagaagaacgtatgatcctacactagaatgccctaaatttgtataaggtcagaccccaaatccgtatcagtgcacttgccaaatgaggatacatatgggaatatattctagcttactccactctttgcccataactaggtattcctttgaaattaccattctacccttcaacccgtccactaatcgtaacatatgaattctgttgtcatctctgattcctttttttttcggaaagtttctgatgtcatttgtttttgtgattgtcgttaattattgttttagctgtttcaaggaagtcgtagttactaaaccatgctgcttttgtttgtcatttgattttattcaggaattccaa

SEQ ID NO: 104421 - DNA, 1045 bp, Mimulus guttatus
  Intron number 1 from transcript mgv1a008334m (locus mgv1a0 08334m.g) derived from phytozome v7.0 (chr-ID scaffold_75; pos 212751 to 213795 reverse strand)
agagagagagacccattttcgacaaggccacaaaggtacggtgtttaagcctttaattattccgtttcatctcactaattcggtaattatgcccattttaggtaacaagttcagttgttctctccatttttaacgaaaaattggatctcgtaatgtgtatcgtcttttaccacctccgagttttttgatctgtgaaatgagttgttttctgtttggtttatgttttgagatctgtatgctttatgcttttcataaatctgatttcatggatctggaaatgagtgttctgaattatgacctaacatcaaatttcgggtgatacgaagttttgcttagtattattaacgaaggtgttctgttgttgtatggaatttatctggggtttgaagaggtgaaatatggataaagtgattcactcgttatttgcttaattacatgtgcttgtgattgttatgttagttaatactgaaaggtatgaagattattgtcattgaggtattcaactaaaaccacagccaaatgaaattataagttatcgattttacccaatatgcatgtaaacttgtagaggaaagattcaaagtatttatcgttttgcttcgtttgtgctttaaagccacttgtttcataatctgtgaagaagttgaaatatcttcacagtgtttagaaatgcttatatcatatcctatcatgttctctatcagaaagcaatatttagtttcagtacactatgataagattccttggcgtgtgaaacatttctcgatcttaaaattgcttttgaggaaaatgtaatgcatcgactggtactaatttatgcgatatctgataaactatataatacttctttatagtaatctgatgattggccattgttagtttcctgagattttatgagaactgtacacatcatgtgctattgccataaaattttatttggtcaagtgttagcatgactttagatgcaaaacttatgtattttacgagattgtgtccaaaattgaatatgtgtttttaatttttattctccagagcaaattaagag

SEQ ID NO: 104422 - DNA, 750 bp, Mimulus guttatus
  Intron number 1 from transcript mgv1a020870m (locus mgv1a0 20870m.g) derived from phytozome v7.0 (chr-ID scaffold_105 ; pos 473694 to 474443)
ctacatctgctgagatagcaagaactgccgtagaggtctcccttcattattcctcttctttttttttcgttttcttctttaatagtcggtacatttagttatatgttattcgcaaggtagtaaaaagcagtaattgggtcggaggcggttaggcaccgactcacaattaatcggtgcggcggtgataaatcggaaataaatcgtttttcaaaatttaatataatatatatctagatattatttataaatactcaaaacatatataaaaagatatttaaacatagttattctccatcatgtatatatcctaataaaataataaaagtttaataataataagatcgtaatacataaatatcctttaaaatataaataaaaaggcaaatctttaacaataacagttaacataaacaaactagagcataaactcatattttttttattaaaatcccaacttttgttttgaattaaaaaaaaaaacaatttttggccgatttttgccaccgaagtttgacccgctttcaaggtttgaccgcctcagaccgcttcagaccgcttctcaggcaaaacccgatttttcaaacctttacactaaaatcgtaaaggttttggaccgcctccgccgagaccgattaatcggccgcctcggccgatctttagaacactggttattcgtcttgaatatgctatctgatttatgttttttttattataggctaacaacaaggccttactgatattccctagcat

SEQ ID NO: 104423 - DNA, 546 bp, Mimulus guttatus
  Intron number 1 from transcript mgv1a012940m (locus mgv1a0 12940m.g) derived from phytozome v7.0 (chr-ID scaffold_12; pos 2362149 to 2362694 reverse strand)
ccataagtgcgcaattcaatagctcataatcgaaggtttctcctcttcccatttccctaatttatcatgaaattgaatttgtccatgaggttgtcgattttttcttcatccattttttaaattgggttccaactatgctttctctctctaaaaccgtctgtttctttagcagattgccaaaataatatgctcaacaaacaaattcagtttttagttcacaaattcgttcatcctattacgaaatgatgttttgctgttttgtgtagtagctgatttcgtagtgattaaaaaattgatgggtgatgaaacttctcctcttgctgatttgtgcttttcgatatcaaaaaatggatatcaaaattagggtttaatttttgtgagagcgatgaaagggtgactctaatagtatcacttgagcaatttagtatctcctgattccattcgttgttttagattctttaatgcagtacatattgttttcccttatggtatttatttttttgtttcttgtttgtttatttactttcagagagtgtggcaacttca

SEQ ID NO: 104424 - DNA, 497 bp, Mimulus guttatus
  Intron number 3 from transcript mgv1a007823m (locus mgv1a0 07823m.g) derived from phytozome v7.0 (chr-ID scaffold_17; pos 1922030 to 1922526)
cagattgcgaaagtcgctcgggactcgtttgagaggtgcttgtttggaattggcatgttttttgcaattctgttgtgtatttagactgacattgatattaaatggacaacatcgtaatgcattttttatcagtagatattttggctttattctcttgtttgaaccttttcgattgagttttcgaccgagtctgagtaaatctataaatatcatgtgtatttttctctgatggttctcatttcagacttagatgctacatgtaaatgacatatctatatacaatttctgaggagtttatctttgttcatcatcgccatcgtttttacactattcagtattatgaactgaacttgatttacacccttcataattcaggaagatacagtttgatatgattatagtctagccactactaaatgtaaggcacgtaaatttgtgagtaagtctagatgttttttttgcatgttctcagatttaattttaaaaatattttaggg

SEQ ID NO: 104425 - DNA, 632 bp, Mimulus guttatus
  Intron number 1 from transcript mgv1a004524m (locus mgv1a0 04524m.g) derived from phytozome v7.0 (chr-ID scaffold_223 ; pos 87810 to 88441 reverse strand)
ttaatttatctcctcctccttctcttgcacataaggtgtttgttcattttactctgtgatctgtccatcactttttgtaaataatttgtgactgcttatattatttgtttctttctgtcgtggaatttgttatttatgtttactattattgaatttcgatgtggaaatagtgtaatatgagtagctttatggttctttggagctgcgaatttggttcgattttttaggagtttttagtatgaaattaaaaaggtaaagtttttattagattcttgaaatagttggtttatttgtcaggaatgatgcatccattaggggttttgattgtgttaagtaataactattgctacatggaaatttgtggaaggtagttttgtttgtgtaaattctttgaatttcgatgattttcgtttgcttgctggtgctaaattgtgggattttgaatctatttatttgctagctcttttctgcggtaccgattcacaatcttatttgaatctgtttcttttctctttcttttgcttcatcgtttatttgattaacaagttttgatcatcaaaataattggattgataaacttatttcaatggttactaggctggagaattaagtgaaatcgtagtcgaggaatc

SEQ ID NO: 104426 - DNA, 824 bp, Mimulus guttatus
  Intron number 3 from transcript mgv1a005824m (locus mgv1a0 05824m.g) derived from phytozome v7.0 (chr-ID scaffold_76; pos 792678 to 793501 reverse strand)
gtcttaattatcttcacaggttgtgtttattttcaagagtcttttgcttaattagtgtgactacatataattttactctcacatttatgggaccattaactggatccaaataagattaactggttgtgaatcccgagaagggacattgcgttatatatttccacagtccaaaaatcttaaatggcttatcgtgaacagttgcatttcttactatcaaagctatattttgcaaccctgactggaaacaaactctggagaatttgctctcagtatgtagtaagattatccaaagtctggatataatgttgttaatcatatgtttatctattttctgatgattgcgtaggatgtagagataggtgtgtaaatggcggtgacttggtagatttggatgtaatggatcttgggatttctagaagaaatggcttccagttttttccgttttgtttttatattcagataacatggtcttgtttttgggtggaattctttgtgtatatatgataggattttctatgaatttgaaatgctccgtttaattgttaaatctgaattttgtggctgtcttccttgcataaaaatggtgtccatggtgacgaggaacgccggaattttgaaagcaaaatctctatctagctttatttgtgcggagcattttcttgaactctctgtagtaatttaaaagagaaagtagattttctttttgttccagcataaattgcttatttacgtctagaatgtattccaaaagagtttggttaactcttccactattggaattttatgcagtaattggatcgtccaccgagatctaaagccgtcaa

SEQ ID NO: 104427 - DNA, 508 bp, Mimulus guttatus
  Intron number 1 from transcript mgv1a005824m (locus mgv1a0 05824m.g) derived from phytozome v7.0 (chr-ID scaffold_76; pos 793800 to 794307 reverse strand)
acggcgtttcccccaccgcgattcgtgaaattgttatttgcaaaacccccatttttttaatttttttgggtgtttctgcgttttacatgattttctacagcaatgtatgtattattgtataggacacgtatctctgttcgtgctcattttacggggattctctgtttattagaacggctagaataagaaaaaaaatatcatttttcttgtggttgggtctggagtgtgtgtgtgttttaagtgtggtaagaatgatgattcttgttattaccgtgtttttttgtgtgtaattggtcggaagaatttgatgggctcatcgtctctggtgtaggttaatccgtgtttttttgtgtgtccaatttgaattgatcctcttaattttctgttttttttcaagtgtttcttcttgaaatttcttgtctttaactattcccgttccttcctctccttcatatttaatttcgtagtaataagctttcgattatgcagttgcttcgggagatttccc

SEQ ID NO: 104428 - DNA, 968 bp, Mimulus guttatus
  Intron number 1 from transcript mgv1a010954m (locus mgv1a0 10954m.g) derived from phytozome v7.0 (chr-ID scaffold_45; pos 799569 to 800536)
gtttgtaagcatacgagagatacgagagtgtaggcttattcagtgtacctatatggttagctatcgattccttcattactcaaaaacaaaaaaaaaaaagtaatgaatcagttattttcaacacgtgtgtttttcacttgctttgctctctataaactcgaatagttactctaattccgccaattttgaatatgaatgtatccaattatgtaacaatacttctcttcccgaattttgaaagttccgatctccgtttatttacgagtatatattatgtttcaatttccaatctgattttgaattctgaaatcccagtttttctttctaaatattatacttatacaatatattttagtaattcttatattataggcgactgaaaatgaaaaatctcaaatcatgccgaatctaagttgaaaaagttagattttggaactagtttttcgttctataagaatttttccgaaatgtaattggaattggtttctcaattaaaaaaaatcattattttttttttcttttcaaaaaaatatagcaataataatttggagggaaaattacatttttgaacactcgagtttgcactaatttcacatttgacccctcatgatcacaaaaaatacatttggtatctcatgtttcaaaaattaaacacttttagtcatttccgttaattttatgttagtactaacggaatcaactacgtacccactgccttaactatccaactaacggtgaattgacaaaaaaggacaaacgtgttaaattattgaaacatgactagttacatgagggaccaaatgtgttttttctaaacatgagggaccaaatgtgaaatcattgcaaacttaaggggtaaaaactgtaatttacccttaagtcggacaaatgaaaattgggggaagtaatcacatactatgacccccacagtagactatagtgcaccttcttatccgcttcaatcctat

SEQ ID NO: 104429 - DNA, 570 bp, Mimulus guttatus
  Intron number 1 from transcript mgv1a015442m (locus mgv1a0 15442m.g) derived from phytozome v7.0 (chr-ID scaffold_18; pos 1934552 to 1935121)
aaaccgagttccccaccctttttgaactcatatcggtacctcctctatccctcttttgattatttttttttcttcaactttcttttttccttcgtttttttattgaatatttagggttttttcgcaactaacatgagccaatatagggttacaacttacaagggcttatagcccacatataataagtttattgcaattagtactttgttttatattaaattgttaaaaaaaattattttattaaaaaaaatcagcaattagtaaagttgttcaggggcttttgcaaaaaaagaatttagtcatcggggagtttttttcctgataaaataaaatagaataatttttaaccgttcgacagaaaaattggtacttattaattgtaataaaccccacaaataaaacctaatattttattatatttcgaatattatatgtagctttgtgggtcgattaaatttttttaatgtttatataatagtttgcaaattatacgagctatttaacctgtaattggttttatcgtttaatttatcaggcagcaaactacttaaacatcaagagcttgctcga

SEQ ID NO: 104430 - DNA, 1016 bp, Mimulus guttatus
  Intron number 3 from transcript mgv1a003599m (locus mgv1a0 03599m.g) derived from phytozome v7.0 (chr-ID scaffold_1; pos 68261 to 69276 reverse strand)
ccagcatttctctcttggttgtgcctgatgtaagttgtactgcaagcctcttgaatgatagttcaaattaatttttgtctcttaaatgtagtgggaaataatcacttctggatccctgccatttgaagtaactttttggtcataatttattcttggagttaaatccgtaacctgtttctcacgatattagttaactaatattattgctcatataattgtcttttcggagatgaaaattgagacattgaatgtggggttaatttttcatagatcattcattcgtttctctatatagttcattcttagaactttgagttacaacagtgaattgtgtttccaacatcatttttcaattaggacttcctttccattgtcattatattcttttcattctttctgttgttttttattcttttggtatccttgtccattttcttgcatgtgtggttcttaatgcagatatgactcaacactttatgtaatctcccatacttgtttgttggttgataatcgtttttgcatacgatccatgttttgccttgtaggatagtatttcttacttgaactgtgcaagtactaaaaatttgttgtggtgttcaagctaggacttttctgtcatacttgttagtggctattgtcttaacgagaccaggtggatgatcaatgatcatgctgtagatttgttgattgcatctcttagtagtacgtaaatgtgaagaagaggctctcatgatacccttgatttgttttccctgtctaagtagctcttttctcttgagtgtgtagtttgtctctttcctctcttctttatgtatgtttacatgtcatcacaacctcgataaatagtaaaatcttttatggttgccaatgcattgcctgtaaaagccaaatgagggagtgagaatcgacaaactctttagaaagtatgacataagctttaaatgcttgatttcctcttattgttggttactaattttataggatttggacatctcaaatatatctgtgttgtacga

SEQ ID NO: 104431 - DNA, 673 bp, Mimulus guttatus
  Intron number 1 from transcript mgv1a003599m (locus mgv1a0 03599m.g) derived from phytozome v7.0 (chr-ID scaffold_1; pos 69551 to 70223 reverse strand)
ctgttatttttacttttggatcttatcgacttggggtaagcagcttatgttctcagatgtctccaccctctcttaaattttaatttatttgaacttggagcttgaggttgcaattattggtaagagaagtagataactgctgatatagtgatgcctttttggtgaattcatgaaaggattggggttgagttatatgaaatagcctgacttttagcttggaaattttttgaggataattcacaggggttagaaactgttattgaactctgtctgggttgtctttgttttgctgcattgattggatccagactatcgttatccgttcttggaatagaagctatggcaagtggactttgatattatgcttccaagtgtcctctatattgattgtgatggaaaaccatatgaacgtgcttcttattaattccacactgctcatttatctgatataagcaaaggtgttatatatatttttttggtaggtttttttcccatatattttcttagcatgctaactatttcaaaccttgtatggtttctcgtgctggttttcttttcttttaaattctttggttgcacttttctcgtcaatcacgacgtgggctgacgttatctgtatggatgcaaagcttgtactttgtaatactgattgtagatttaattttacaggttc

SEQ ID NO: 104432 - DNA, 388 bp, Mimulus guttatus
  Intron number 1 from transcript mgv1a014631m (locus mgv1a0 14631m.g) derived from phytozome v7.0 (chr-ID scaffold_89; pos 26198 to 26585 reverse strand)
cagttctcatctctctttggatttcagacgttcaggtaaattatgctcgcatattttctattttgatccttttgttttgatctaattgctccgatttatgttactggttaagaaccctaattttagttcttccgaaatccaatttctgttattgcataagaaccctagttttttttttaattttctgttgtgatttgctggtcggcgaattaattaacgaataaataaaaatcaggggaaaaggccgaggcttcctattcaaattgtcaactttgagaaacaaaaaaaaaaaaaaagaagaatcatattatttttacttgtgaattttgattttctgaacctctcatatctagggttccatagggatctggagacggaaaacagaata

SEQ ID NO: 104433 - DNA, 612 bp, Mimulus guttatus
  Intron number 1 from transcript mgv1a003310m (locus mgv1a0 03310m.g) derived from phytozome v7.0 (chr-ID scaffold_13; pos 2287069 to 2287680)
cgacacaattaattccaatcagatgtatgtatatccgtctctatgtgtgtgtgtgtgtgtgtaatatacacatgtttgttttttgtgagcttttcctgtgttttcatgcaaagttgacttgttttttaattagcttgtgttgggttatctggttatgtggtgaagattgagtttggttgcttttgtggatatggattttcatgaattttgtgtttatctgtgttgatgttattgatcctgtttctcaattgctctgggtgtatgttttaatcttcatttttttgttttcttaatctgtttggtgtctgaaactctcaattttgtgtggatcatttcagtttcttgattttcagttttatgtgtaaggaatatattatgatgaacatttcttgtgtgtgagaatgaaataggaaagatcagtgtgtctttttgtaaaacacacacacacatatttggggatgtggttggaaaaattagggtttttttctttttttgaatttgtatctgttttttcgatttcgactttttcgttgctttttttttggtgtttgtgtgcaagcagcattttttaaggtggaatttttttgggttgagtgcttaggctggcaaaag

SEQ ID NO: 104434 - DNA, 775 bp, Mimulus guttatus
  Intron number 1 from transcript mgv1a016664m (locus mgv1a0 16664m.g) derived from phytozome v7.0 (chr-ID scaffold_24; pos 436701 to 437475 reverse strand)
gaagcaatcatcttgctaggtatgtctttctctctcctcctccctctctctctctctagaattttgctttcttcaatttgtgatcgttactagttttcgttcatattcgatcgagttctgattctagggtttgcgttgtctcgatttctgatttcttcatcgccgccgtggcgatcgtggtgttgaaatatacgatcgttgccggaataaaaaaatacgaacttgttttgtagtctgctatttattttagggtttcgtgttgtgatcctgtatatatcaattctctgttctgtatgtgattttgctgattgaatgattcgtgtaattcggaatcgatgttacttaatttcgattatacttgcgtatatatatatatatttttttgtgtttgatttcagttgaaacacattagaacagaaacttgcagctgaggtataattgaaaccagattattgtttttttgcaaattgtgtgagctttcagtttgaaccatcggaaaattgtttcggtattgcttgtaattcgagtttcaagttccgattttttcgcctcaggaacatatcaaaatatggtttaggtatctctagttataactttttcgcctccacatatcagcctagattatttttcgcaatttgtgtgtgatttcaattggatcagattcaaatatggtttaggtattactcgtatttctcgagattctcgagcctgacgattctttaccctatttggcgatgcagatttcagagttttcgagtgcactaaagaaattttc

SEQ ID NO: 104435 - DNA, 694 bp, Mimulus guttatus
  Intron number 1 from transcript mgv1a001055m (locus mgv1a0 01055m.g) derived from phytozome v7.0 (chr-ID scaffold_130 ; pos 324446 to 325139)
tttcatttccgttgttttccaagttcaatttgagggtacgaattttattttctgtgaagatttacacttgttttttttcatgtttattgttgattaatcctgatttttccctcaattcatttgtttcttcaaatgcacttttgattttcgcatgatttaagacgaaacacttgcgtgtatatctatatatatatatgtgtgtgtgtgtgtgtaaccctacatttgcggtgatgatcttgttattgcatctttatttttttgggatttttgtcttccacaaatttccattgaatgtatctgattgttaaggctatatttggttgcattttttgggagtagaataaatgtgttttttttcttttttcgaagatttcgaaaatgggagtaatgttttgtttatgtgttgtaagcaatcgagtcatgtttgctaagtagagcgataacgattaacgattaacgataacgataacgatatttagtgagaagaatttgaaattaagtagggggataaattttttaccatactagtcgagtcaataaatgttggaagattttgtgtttacttttggcagaaataaaacctagagaaatttcaaaatggcaaaacgaacaccgatttatcttttatcgcgctaatctttcacattatcatctcgcagagctcccaacattccatctgcattcttcgactcaa

SEQ ID NO: 104436 - DNA, 485 bp, Mimulus guttatus
  Intron number 1 from transcript mgv1a023892m (locus mgv1a0 23892m.g) derived from phytozome v7.0 (chr-ID scaffold_137 ; pos 37050 to 37534 reverse strand)
ggtggcaacttcctgctcactccttccaggtattattatttattttttaatttttaatttactttttataatcctcgttttactgtgttttggttgaatttttaaaaaataaaatatgggtttctttgattattggaatgcgggttgttgttttaaatgtttgcagttttttcgatgtgtttactgtcgatttgagtagttagtttgtatgtattgtattgaattacgaatgtttcgaaactcgaaaccaagtgaattgaggaaattgaaggtgtagtattggaaatttgagttgagaattaggtcaactttgatctctgcagatatgttgtgtaattcgagatcttcgacttttttcgtgcccttcaatttatattgtctctagtttttacagtgttgagttatattcttcgacagggagtaatttgtaattgcctgtattacatgtaggttgtggctataacggtttttttcctattatcggt

SEQ ID NO: 104437 - DNA, 729 bp, Mimulus guttatus
  Intron number 1 from transcript mgv1a004245m (locus mgv1a0 04245m.g) derived from phytozome v7.0 (chr-ID scaffold_27; pos 1248073 to 1248801)
attttgttctggtaaaaatccaatcttttttttttgttttgccattttttcattttaaatattttttatttttatttttttccattttgaagatagtcattttattttatttttatttgattttttgatataaagtaatgttttttattatgtttatgatgtttcttgtattgttctaggttgtatccggtgagggtttttgttatctggtcggaatttttgttcccttatgtttttttctgtatatctgtattttgactttgccctttttaatctaatgtgtttataaagtactaatcttacactaattactgtattttgacttttttgattgtgtaatcctttgagtgatgctaatacttacgaggttcttttaagctcgatttcgttgtttttgtttcttcttggaaatttcgattggatctttaatagcatcgtgaattccacgtttagtcgggatttcggagttcaatgacgaatgcatttgggttttagttagttttgaccgattaacgtttcttgattttaccgattttcttgaaactttgttcgataatcataaacttaccaagtagatacaagatgtgctagtatcgggtttttttgctatcttatgctaatatcgaaggttcaaatgttgatacacctccaatcgaagttgaagtttttcttacgtgtttgttattaatttggtgcttattgaataggttaaagtaccggtttgggtaa

SEQ ID NO: 104438 - DNA, 687 bp, Mimulus guttatus
  Intron number 3 from transcript mgv1a006906m (locus mgv1a0 06906m.g) derived from phytozome v7.0 (chr-ID scaffold_209 ; pos 133340 to 134026 reverse strand)
aagcttttgaaagtgacgcccgcctattcctgcaagtaataattctccatccaatcatgtctttacgtttgtcactcttttcaactgtacagatcgctgaagattactatttttttttatatatcagaaactaaaatacataagatgaattcagaatactctttcgttcttattgtattcacgtgtctttgaatttactagcgtttcttgattctgaactgctaaatgtcgttccaattttccggacttcaaatatgatattgaccctttttcaatttgaatttgtcaaaagtcagaacaccgaatttggagcccttttagttggctttctaatccaacttcaatcagttagattggatgttgagtgaaagagttatgcttgaatgagttacatcctgaatttcggaaaactcaaaacgtcaaagttgtagccaatattcattcattcatatctctctcaccgaacatccaatcaagctgattcaagttggattaaaaaccaactcaaaggactccaaaatttgatgatctgaactttttataaattccaactgaaaagtagtcaaaaatcacatttgaagtcaaaacagcaccaatgaaaccgaaacaacatttagtacaaaaagtttaatccgacgacaaattatggcaggtggtgcagtgaaatccacgtgggtcccactgggc

SEQ ID NO: 104439 - DNA, 962 bp, Mimulus guttatus
  Intron number 1 from transcript mgv1a006906m (locus mgv1a0 06906m.g) derived from phytozome v7.0 (chr-ID scaffold_209 ; pos 134665 to 135626 reverse strand)
gagttatttgttctaagagtcctccatcggtttcagtaagtattcattcagcctccaagttcacaaattacagtcacacttcttttctctcgtcttacatttgaaatccaattttggtttttttttttttttttttctttttcttaaattggatttatggatgaattggcgaattatgggcacccagtgctgtttgtattgttaatcgtagagcttcataaattctgtattgcttgttttgtttgtgtcttcgtttattttactaattttcagtaggatcgctttgggaggatttttctgtttcacgtgttagataacgtttgattcaaggattaaaagagataataatatacaattatcttgtccaatttttttttttcgaaagtttgatgtttttgctttcttatgtttgttatgtggtgctcttaggtacaaaaaatttacatgaagttatgtacaacttgagctgaaaataaactgagatgatgatgatgatgtcttgatttatcgtcaacctggtgattgattcgttcggtgttatcgtatttgtagtacaggaaaaactagcgtaacctttgtttggactccattaatatctctttccgactttctacttccctgttcttggtgacgttcgttttccgtatctcctagatttttttattgtgtaattatatttctttttggttatcttgtctctggataataattgtgtagttcgtcttgtctttctgctcttttgaagggttgaacaagaaatagattcgtaacctcttttagttcccccgatttgcttctgccatttttgactgcttactactaagtttatatatcgttactacatccattatcttttctattggtgattatcgggtggtgagtgcgtggtatatcaaaatacttgtggcaacagtggataaataactacttaaaatcgatctccgtttttttccttttcagga

SEQ ID NO: 104440 - DNA, 710 bp, Mimulus guttatus
  Intron number 1 from transcript mgv1a009053m (locus mgv1a0 09053m.g) derived from phytozome v7.0 (chr-ID scaffold_168 ; pos 475089 to 475798)
aaatctctggtcgccggtggtgttgctggaggagtgtaagcactgaatttgtttaccatatttatgtttgtgcatgtgaagctgcgttacgatcaaatttatttcgattttcctttttatcttttcgggatatagccggtcaatttttcgattggtttgtttgattggggaatctttccattattcaatcgtacaggtttgctgcaagaaaatgaatctttcttgttggaatttggttatcttagcagtgaattttgagcaaaatgagactgtgattccaaattccctctttttctttttttttttcttttactttcatgtatggaaatgaaggtttttacttggagagagaaggcgaaatatttaaacttttagttgagcacagtgaatcgcatgtcccaatattttttgtttctttttaggttttgttcttctcttttctatagacaagtacatctgaaacttcaatgatgaaggagcatatgggtaatatattttcccctatagtggaggagtatttgagatggaagcatgattaggaaaaaaatgtttagcatttcgtaaaccattgataattgaaaagagcttgtaaaaaccagtgatgcttgttattctagcttttagcttactgatgcaatagacattgataatcgatttgctgaatgtctattgcaggtcacgaactgccgtagctcctctggagcgtctaa

SEQ ID NO: 104441 - DNA, 642 bp, Mimulus guttatus
  Intron number 2 from transcript mgv1a008256m (locus mgv1a0 08256m.g) derived from phytozome v7.0 (chr-ID scaffold_83; pos 1001814 to 1002455)
gctcaatcgcattatcctcgccgcttatctacgacgtacaattccgatcgcctctctctctctctctctctctctctctctctctctctctctctctctctctctctctctctctctctctctctctctctctctctctctctctctctctctctctctctctctctctctctctctctctctctctctctctctctctctctctctctctctctctctctctctctctctctctctctctctctctctctctctgcttcagaaattgttcctgttttacccatttgtaacacgatcattttccattaactctacctcttcttcttctcattagttctgtactttcgattttgtttctgtttcttttatgtttgattatgatactttgggggtttgggggttttactgttggaatcagaagattttcgattctgatttttgaagctaatgttgacgtttcctgttacaatttcgatatgttcttacgagttctccgagttaatgtttgtcgattttctaaattgtattcggactctgtgcaaatgttttccttgctatttttgtattctgccatggaacgctaatgtagtttattcgattacgataggggaatattgcacagtaaatacatttcaaactgct

SEQ ID NO: 104442 - DNA, 521 bp, Mimulus guttatus
  Intron number 2 from transcript mgv1a002128m (locus mgv1a0 02128m.g) derived from phytozome v7.0 (chr-ID scaffold_223 ; pos 307842 to 308362 reverse strand)
tccagcttttccgcggcgacaccatcttaatcaaggttttaatttttttccctttcttgactgtggattgttttttttttcaattgatgtattttattgactctggtaaagttctggggtttcaaaatttaatgggtttacttggttggtggggtttgatagaaaatagtttctaatgcagtaagtgttataacatgattaatttaatattttgggacacaattgtgttgtgtatatgttggttgattacttttggggtttcctccgattgaacgtttgaatgttaatttactgatacaatatgtagaattgtatgatcacaaaccttgttacagccttacaggcattcttgttgaagtaattgttgtgtatgtattgattgaagaagatagtgaaacctctttgttcattaacacagtaaatatttaaaaaacgtaatgtttgtaagtgaacactatttatctgtttgctgatgtgtgattgttattctggtcatagggtaagaaaagaaaagatacaat

SEQ ID NO: 104443 - DNA, 601 bp, Mimulus guttatus
  Intron number 2 from transcript mgv1a015943m (locus mgv1a0 15943m.g) derived from phytozome v7.0 (chr-ID scaffold_1; pos 2716323 to 2716923)
tacttcgaaggtagatttaatatgtttttttgattttttcatcttatttcaattgtgaatgctgttgtagagtatgattattgtgtgaactgtgatggtttgtttgatatgtgcttagttagcggtgctcgtatcgcttgcatttggatctatgtgttaaatcgtttaatttctgtcgtcttaaacagctgttctatgtggtgtttataaatatgataatgggggcctgtaatttgtaatacaatgttgcagcctattttcttttcatatatttcataatcgatacatttcctatgaagctcgaaagctagagatggtattagttcatttttaattgccgtctcgtcatcattttctaattacctgctgtagagtttttttattagcttagaattgaaattttcattatttacttaatccacgatcatctctaaacatatagatacaacgatagcaagactcgcgtgtggtccttttgtggagaaacttgttttttgctatgtatcttaccgaatgaatgatgttcaaactttctgtcattttatagtgcttagcatttcagttaagtaatgtaacttaaactcttttgtgtatacagata

SEQ ID NO: 104444 - DNA, 844 bp, Mimulus guttatus
  Intron number 2 from transcript mgv1a019312m (locus mgv1a0 19312m.g) derived from phytozome v7.0 (chr-ID scaffold_4; pos 3055518 to 3056361)
gtcagaagaagaacgaagagacaatttcaaggtgaaaaactatgtggttttttctctgttctagattaaatttaaaaatctgtatgtgagctcgttttcgtctactcggatctattttaatctcaaacgaagttttgctttggtcaccttttcgagaacagagtcccgatctcaatttgttagatccgcgaggtttcatttgtgattatattttgagcgtatgtgaatttaattgcctgattctctttgctaattttaaaattttgtgatactttatgactaatctctgtgtgcaaagtcattaccagctttacaactacggacgtagaacatggaacctgttaatcgggcattttaattctgtgttatagctgaaagcattgattaagcgaaatagttgggattagaacacatttcagttattcgttaacttctccggtgttatgagttattgtaccgagcattgtgtttaaaaagctcattatgaatgaaactgggaaatatagatactaaatgattttttggatcattatcgtcccgataaatattggaaggtaacagggaacatggcaaatgtgaactatatggtcaatagaagaatggaacttcaaaattgtccgtagtcactttttatttccttttataaaatcatgtggatatctgttccagtggtgagataagttagttaaccagaatatcaatgtcgtttactgtgttcgtttgcttttccttcaattatgacatgtaccagttatgttattaaggttacaagtaatagatagcttagtcagtttctgatgaggttttgttgacagtgtggcttcagagatcaaatcaaatttgg

SEQ ID NO: 104445 - DNA, 577 bp, Mimulus guttatus
  Intron number 1 from transcript mgv1a014387m (locus mgv1a0 14387m.g) derived from phytozome v7.0 (chr-ID scaffold_85; pos 925516 to 926092 reverse strand)
gggaaacaggttttcttttattttttatttatttatttatatttacaaattattaatttgtttttggtttattttattcttctttatgttgttgtatatcaattatgggttcttcaatctttatatatcttgtttgtattcacacttgtgatgatgttttagattcccctttttttcttcatttttttttgggctcaagttggattaaatttaattatatatatatatatatatatatatatatatatatatatatatatatatatatatatatatatatatcaaattgcaaaaagacttcccatttcttaagtattagcaaaaatcccctaatgatgcatttttttagtgcacagctcctaaatgatgtattttaaggggttagtttgctaataaaaatgaattatgggttttttttgataatatttcaatacggtgagtttttttttttaacaattagagtaaacacatgggtgttaaatgcaattgacgctgtatatatatgaatatgtaattttgtttctttttttctctctctctttgtaataatataattgtcgtgataataaacttgtag

SEQ ID NO: 104446 - DNA, 623 bp, Mimulus guttatus
  Intron number 1 from transcript mgv1a017789m (locus mgv1a0 17789m.g) derived from phytozome v7.0 (chr-ID scaffold_113 ; pos 256321 to 256943 reverse strand)
atcaaaactggcttctgtgtgagacacttccttctgctcatcatattctctcacacacacacccacacacgcacacactatttctctgtttctatttgctgttgaaatacttttttcctggagaattgttattttcgttggtaatttctgctggagaattaatttttttgaagaactagatcagaaatcaaaatccccaaattttgtgccctaataaaacgatcttgaatctggaggagatatcgaaataattcacagtaataactcaaattgtgtctaaagttgatgcttggatttaaaatcagttgagttaattccgttcaattgaaggtgtttgggcactggatttaatatttcctcttggttttataactattcagctccaataaatacgaatgatttgaatgtttacgatatagttacccgtgttgccacttgagtttaacttcgaatttcttatttttatgtgcgggctacttgtgcgtttttacgaaccgtgtgcttcttttggtcgatccgatgttcattttcattgtcgttttgtactttgtagtaagtacatgtgtacaaccactttctgctgcagattatttagttgcttatttgttcggatttttgagcag

SEQ ID NO: 104447 - DNA, 770 bp, Mimulus guttatus
  Intron number 3 from transcript mgv1a014944m (locus mgv1a0 14944m.g) derived from phytozome v7.0 (chr-ID scaffold_228 ; pos 156688 to 157457)
tcatttccgaaaaattctggtacatatacttggtggtaagttttctatccctcaacattttagctttgaatgtgatgatggtgttgagaaatggatatattcaacgaaacaagtttacttttagcgttgttgcttttcggtttccgatccctttgttcaaacaaaagtaaagttagatacaaagttcttcttggagcaaacaatacaaattgtttgcagtgtaaattatggtttgttcgacattatgaatattcatacgactgtcgtctaaaattataactgtggagaaatttcgttcatcctgggatcgtctaagtcgaatcaagggttagggtttgatttccacttcctactgagagatattggttcaactcttactttcttgaagttaccacgttttcaaaatttatttcaacaattgaaccacgacaataagtttaataatagaattgaagttatgagatgagggcattgcttgttgtcagtcaagttgtaacttatgccgtcgctgcagattgaaaagatttttcatgaaccgtactgatagctaatatctctgaacaattgcaccatctttgagcttatagttcacttagtgtcccgctgcaaactatttgcatcaagaaatgtacgatataattatgagaaaatccgcatccacacaaaaatattcagtcgtgttgtatggttaatgaagtcaaaattaacttgattggatttcttgatataatccagattccgggatttgcggcatatcaactatttgggct

SEQ ID NO: 104448 - DNA, 829 bp, Mimulus guttatus
  Intron number 1 from transcript mgv1a007883m (locus mgv1a0 07883m.g) derived from phytozome v7.0 (chr-ID scaffold_82; pos 707719 to 708547)
ggccacccctaatcgcgcctcctttttaatttcaggtacctttttcttttttcctcaaaatatgtcgccatttttttttcttaatttttgtatctgtgtgtattctgcgcacgcactcacgcacgcaaaaatggcagttttgtcaatttttacttggacatcgtatcatatcattttattgaaaaataaagttgaaccggaagataaatgttattaatagtttgggtttggtgaatgaatgaaattaatgtagacaaaatctttctgtgaagtgtgtactttggaatttgaggctgaaatcaactgaatatattttaagatgattttaggagtgtaatcagtgattttttggagaaacttgggaagaaatgttcctttgtctgatgattaatattatgattacgagagtggaaataagaataaaatctttaaggaagctggcgtagcgtttcataccacgcaattaccaagattcgttgtttagaggaccaaggaatatgaggcacagttgtcttgtaaaagttagctcctcggttttcttctttttatttattatttgttattttttatgataaagttaaatgttggtttgaactttcagacctcgatgaaacattatattatccaatgttggagtcgtagtgtttcttaggacagtgtaattgcatcaatagatgaaagtattgtggtgactgcaatatctcactgtatctcttttgttctagtggtttcatatctcctttagtttcatatctcataaatataatgtattaatgttttttttgcatttatagcttgaggcttgaaagtttgttctgcattatactgc

SEQ ID NO: 104449 - DNA, 536 bp, Mimulus guttatus
  Intron number 2 from transcript mgv1a008971m (locus mgv1a0 08971m.g) derived from phytozome v7.0 (chr-ID scaffold_85; pos 986922 to 987457)
atcgtgcgaaaggtaaaatcataggaattattttggtgcacgtttttctcgttttttagcacttaattgataagttcatagatactgcatgccgttactgaatttaatttgaattcgaagcaaaactgctaaggagaggttcgatttgttacatatatagaagaagccggtaatcagtttcgatgcatattaatatcttggtaattttctttggcatgtttaactagaaatatttgtgcctgcaaataattgttgtgaattgtgatgttactgctttcagtgtcctgtaatcgaatttaagacgctgtttctgtaactcgattattgtttgtttggtttcaaataacctctttcaacctattcgatgagttctgttagcattatatcttttctattgatcttgtattttaagataagatcagagagtccggacaatactttcggtggtattagtggttctaacatttgaagggtacttctctcgttttcactcaaaaacagatattatttttggcgaggaaggttcaatttcggtg

SEQ ID NO: 104450 - DNA, 573 bp, Mimulus guttatus
  Intron number 3 from transcript mgv1a014404m (locus mgv1a0 14404m.g) derived from phytozome v7.0 (chr-ID scaffold_42; pos 1638433 to 1639005)
caggagtaagcctttgcagatttgggataaagaaggtgggtacttcttcttcgtgacgaatatttcttttcaaattgtccgattagtagatgatacaagcatgtactcttacaatcattctgtctttcttttgctgggctttttgcacatgctaaaattttcgtactttttggctttgacttctcgtgaacttccgattgattatgacagccaacgtcgggattcaaatctcgccctttacttactttcgtatttgtaacaagattagagttttttaaagaaaaaaaaaaaagaagagattgattgagttgatacaagctcaagattgattaggttatttatattaatcgggagcaaaaatcgtccgttttccttagaattggttctagaaaacaagaaacgagtatatatagtttttttttttttttttttttttttttttctgtttatgcagtcaagcaggtacatatttgtcaatatatgcactctcttgcttgtcgttttcttgcaatcttatggttttctcgggaaataatcttgcagttgtcaacggccaagtcaagcggttgcaag

SEQ ID NO: 104451 - DNA, 715 bp, Mimulus guttatus
  Intron number 1 from transcript mgv11b023551m (locus mgv11 b023551m.g) derived from phytozome v7.0 (chr-ID scaffold_1 8; pos 1034633 to 1035347 reverse strand)
ttggattgacaaattggagaatctaaatttgcgaggtaatcgcttcattggtaaatttccgaaatgttcgcttacacggttcattccaaactccatttgaggagcttactccttgcagttgattcgcacttgaggtagtcgcacatgacaccacgtgattcgcacatgacacgcacgtgattctgattgtgataaaatcatcgagtcatcattaaaaactaatgtatgtaaagaagttaatgaaataaaacaataatttcaaccatcatcgtaatcgaacaaaagaagaattcatacaaataggacctcatgtgtaaaatatggtttagttataatgtgtagattttattttatttttctttacatagtttagtgattcaaataattttagttttgtattcctatattaatcatattagcacatgttttttaatttcatttaatatgtattaatttatgaagtatttaaaattatttagctttcatcgactaaaatcattagaatcacgggcgttgcacgtgtcacttactaatacatacaaacatacatgtgcgtgtttgatatatatatatatatatatatatatatatatatatatatatatatatatatatatatatatgtatatgtgtgtgtgtgtgtataatgtttatttttctttttttcttttagatagttgataaaattatatattctacttattagtgttcttct

SEQ ID NO: 104452 - DNA, 622 bp, Mimulus guttatus
  Intron number 1 from transcript mgv1a008133m (locus mgv1a0 08133m.g) derived from phytozome v7.0 (chr-ID scaffold_4; pos 3682000 to 3682621)
gccgacgataaggtactatgcttgtttctctaaaatccctgctacaaaattggattcatatttattcatgaaagattcctggaagatatggtgcattgaatatttttttgtttaatcttttttcctccattattcctcaaaaaattccagatctaactttttgcctttatgaacagttttaattttactattttcttccgaattttagatgagctgtgagaactgagaataccgttataaattgggtgttagattcttaaggttttgccgagtgttggtagcaaaagaggacttggattagggttaagttcttgttccttgtcatctgatctcgtcttcgttctgctttttttccccctttttttttctatatgggtaatcaggtcaataggtctgttggtatattgtattttgatatttatcgaagaaattttgtaatatactaatttgtgattcttgatccgcattaattccattttaacattaccattttaaagagtaacttgtcgcagttcactaattagtgattgttagttgtttaaatgcctttgaacttgctaagagttataatatgggtgggttatggtttcttatatgattatcatctttcttcataaaggag

SEQ ID NO: 104453 - DNA, 981 bp, Mimulus guttatus
  Intron number 4 from transcript mgv1a009758m (locus mgv1a0 09758m.g) derived from phytozome v7.0 (chr-ID scaffold_18; pos 219947 to 220927 reverse strand)
cggccggatacacctgtccagcctgttcaactccggtacgtaatcatttgcccattaacatttgcttcaattactttctcgtgatttaatcaaaaccttgttatgaaatgtagtgtacttcttaatctgctttgttgtgatcctgcacttctcatgccattggtatcccgggacttgctaactggagattttaagttttgtagtacttatacacgacatttgcttaagaattttggttgaaataggagtcgttttctttttctttttcctttgcttaacctattataatcgggatttagttgaatattttgatgaattttgctaatgatactagtcatggtaataccaaataaccagattggtatgagatacgagtgttgatagctaatggcattgatgcttctgtggcatcttacagaattatggaagtatgtaccattttgcttaaaacttatccacctagtcaatttaggcctcgtttggttggggggattagccatgattaacaaaatagttggactttgtttgatgtttggtatcccaaataacttgtcgggtcgacccgcaaatattatgttatcatggcttatcttgccttttaagcatgttttttgttggaccttccaagttccaattaaacaattgggtttcattagattatttagtgttatcttggctaatcttatcttgacaaccaaacggggccttaagatactctaaattgtttgtgcttggtttgcagaagtattatcggtacttcagagtttatatgaagcattgttcttttataaggcttaatcttcgttatagatgaagcattccatcttttataaagtatttaagctccgaaatttataaaccaactcataatatatctttcatggatgtattggtccagtgccaagacctttgaatgacattaataccttcgcttattcttctggtgcatgtttaattcacgagtgattaatttttgcagat

SEQ ID NO: 104454 - DNA, 525 bp, Mimulus guttatus
  Intron number 1 from transcript mgv1a022115m (locus mgv1a0 22115m.g) derived from phytozome v7.0 (chr-ID scaffold_113 ; pos 855704 to 856228 reverse strand)
attactatcgcatcgccgataatcttctcaaacaggtagttactcgcaacgaggattcttatttatttcatcaggagaaacgattagaatgaaacacgtttttaatgaatgcattttggggaattatatttttactaaacctaattcagcagattgcatgttgtcttatctcttaagctgagttgaattttgctggatatgtttgtgtttcgagttatttcttctgttgtatcagtttttgatacttgtcacttatattgttgcctctgttttgctgtaattttctgctttcagttgatttgagtcagctgatttccttagtattttattcgtttttttttttgctgtctggggcgtctaatgacttaataatatgttctcgtttcatatacaatgtgtttgtatttatatgatgttctacgaattagtgtagaagggcagttaaatatctgaaaattaatagttgattttgttatgggatgactgattctttgccattctttttgcaggcaaatatttataggg

SEQ ID NO: 104455 - DNA, 329 bp, Mimulus guttatus
  Intron number 1 from transcript mgv1a024262m (locus mgv1a0 24262m.g) derived from phytozome v7.0 (chr-ID scaffold_311 ; pos 96012 to 96340 reverse strand)
tcctggtaattggagagctgttcctactaataccggtattacttcttgtctttatatatatatatatatatgtgtgtgtgtgtgtgtgtgtgtgttttggatgaatacttgaaaaaaaacacacacacacacaccatatatattttgaagattattcgggttttgggttttgggtttcgggttttgggttttcgggttctggttttagtgatttttatactagtcttgatattcgaaaaactcgacttttttttttaatttttttatattttgtttttgaattttctttttaaggtttgttgaggtgcagcaagagttgcaggctgagg

SEQ ID NO: 104456 - DNA, 912 bp, Mimulus guttatus
  Intron number 1 from transcript mgv1a000418m (locus mgv1a0 00418m.g) derived from phytozome v7.0 (chr-ID scaffold_37; pos 48623 to 49534)
catcggtttacgacttcagaatcgataaatttcaggtcgagtttatgaattaaaattcacgcattatcctgtggaagcttcaaaaggataaatttattgtcctggttaagcatgccgactctgcacactacttacttgtatgtattggcgctattccccattagcaacttatgtgtttgcgtaaatgtctaacccaataaccttgggctttagtgaagaaagtagtaaattaaagcatttcttgccacgcctttctccggaaaggaaacctctctgaaaagatttatatgtattattataacaaacataaattaattaatgtacattcattgcctgacgatgacactatgcccggaagttagaaagtgatgcaaaccagctgtaattgatatatttcaaggttattttcctccattagagaaaactagataccaggtggtcgtagatgtcaagcactttcttgaagtgataaattagaggttctggttttgtagttgtgcgaatttttagctgtattttttttattagttttgattgcaaggatatggtagtagttaatgtatgtgatgtaccgaatatataggtggtgggagtagttattgacgcttcttttgaataacatgcgaagtatatatttttgtatgtaagtccacataatcatgtgcctggaaatggagtttttgagtggagaagtccacataagatgtcagttctattcattgactacacttcgttaataaaacatgaggtacatacgatcatctctcttatgagcatatgattacactctgtacgttatggattgactgcttatcacaacatcattcattttaaatgcatgtacaatacattgaagtttattttttgttttctgtagcgatcgtcgattcaagcatttttgagaggttcttc

SEQ ID NO: 104457 - DNA, 944 bp, Mimulus guttatus
  Intron number 1 from transcript mgv1a013870m (locus mgv1a0 13870m.g) derived from phytozome v7.0 (chr-ID scaffold_126 ; pos 471443 to 472386 reverse strand)
tacgataaatttgacaacacttatcaggtgcgcaaatcaattttcccctgagcttatatttattttattttttatttatttttttggaattttgttttgttatgcttgaggtgtacggatctgatcattagtacgttcgattaatctgcagttatatttttgtttgcgataattgttttatccttgttggctcactgcacgctcaatttcatgctagaattgatatttagaattttgttttcgctagtgatttgatgtgaaagacgattcattgtagtaatcgatgatcgtattcgtacattagcaattccacgctgcagtagtaatttgattttttatttttttattttttttaattttgatgatcttgtgctttatttgtttcgttgtaatctctcaaatgaagttagttgatatttaactgatttgaatttggaaatgtgaaggagttaatttgcgacgacgtagttttaaagaaggtttttagtacgttcgattaatttgcagttttctttgtttgcggatattgtttttcctcgctagctcactgtccagtgtccagctcaatatcaagctagaatggatttttagaaaaaaaaaattgctagtgatttaatgtgaaagacgattcgttatagttatcgatgatcgtattcttacattagcaattccacgctgcagtagtaatttgatttttttttttttaaattttgaagtctgatgatcatatggtttattcgtttttttgttgtaatctctcaaatgaagttagtcaatttttaactgatttaaattcggaaacgtgaagagttaatctgcgacgacggagttttaaagaagttttttaggaacgagggaaagtgggttgagaacttacatccctgttcttttgattttttttcttttcaggctacaataggtattgatttcctctcgaagactat

SEQ ID NO: 104458 - DNA, 976 bp, Mimulus guttatus
  Intron number 2 from transcript mgv1a003421m (locus mgv1a0 03421m.g) derived from phytozome v7.0 (chr-ID scaffold_165 ; pos 222364 to 223339)
tgcatctgttcacagaatcttgttcagaacaaaaggtacaattttttattttttttcgttctttataaaatatgttaattcattttaaattacattaaaaatatttcttaatgaaaatataaactgtaaattataatgtaaaattaccaattagttaatcaagaatattgcaatttgtttttaagttttgagcctattaattaaatattaaaacaatttaaaaaaaaaaagaacatgtacattagaacaaaatttggagtaaattaaaatgtgatgtatatatagagagaaatttattgtaattgtttaaatacctatagattcttatatttaaatcttctcattaattattttttaatttattattattactattattattttatttaaaatcatgaatgtttatgttttttaaatatttttgtaatacctattatacccctatccccaagtaaaatttggatcaaattatggtcatttagttaaaaaaaatgtgactagttgtcgcaattaatgtatttattacaagcttatttcaaataactgataaattgttgtatcttatttttagaattaatttttaaagtgtttgattaatgatcttataagctatgtttactttttataaaaattagaacaaaaatgtgggatgaacgtatttaaaaaaaaaaaaaatcttatttgctctccagtaacttattttttgaattttgaatttttttaaaataaatactttgaaatagcttataagttcgtaaacatcatataaactttttttaacagcttataagttttatccaaataccacctcagtgttaagactttgtttttgtatcatttagattttcaataaatgtttgtttatgctaattaaataaaactaattcaaaacaattaaactaataaactaagaacaataataataataataataattaatttgtcaatttaaaagggaagaagaggccattagcac

SEQ ID NO: 104459 - DNA, 462 bp, Mimulus guttatus
  Intron number 1 from transcript mgv1a008896m (locus mgv1a0 08896m.g) derived from phytozome v7.0 (chr-ID scaffold_8; pos 1962547 to 1963008)
cctcctttttaatttcggtggtggtggtgggtggggtaagattcatttctgttacatcatatgtttggatttttctctggatgataagcgctacttttactgtgtgcgctttaattgtgtgttagaattgctttttccatcttcataaaagtggaaaagttcattgaatgggggaaataatgcgaaatgttttaattgagattcatcccataattacacgtttaaaagttggtagattctttccctaattggggttttttttcttttttcggggagaccacatgtttaaatacaggtttcttcagaacagaataaacctcatctgctgttcatgtgtttgtaatatttcttatgctttttttttcattttaatttgagtttattttggtgaataattaatgatttttgcatttttttttcttcgtaggaagtgattcgataatcggtggagtcaaggctgaa

SEQ ID NO: 104460 - DNA, 816 bp, Mimulus guttatus
  Intron number 3 from transcript mgv1a023660m (locus mgv1a0 23660m.g) derived from phytozome v7.0 (chr-ID scaffold_327 ; pos 23737 to 24552 reverse strand)
cgactgctgctggagtagctcctatagatggagaccacaacttaaacttttgtttttgctataacgtttcttttcaaataatgatttcgtactctgtgaaagggtgtttggctaagtctattttaaacatgtgatatgttctgacatttgataagctgtttgaagagctgataagttgctacgtctttttttaatatcttatagaatgtccatcaacttataatttgaatctttaatatcttttagaaaaacattaccaaacttataagatatttttacccttataagcttagccaaacaccctcttagcgacaaaaggaaaatttctaaatgtacattaatgtgtataactacttggaaactctttcaaattacaactcataatatacaactagaatgttttattttccctaatgatttgtattatgcaccgaggtaattcggtattcgagaaacaaacattgtttctgagaaatcatcgttttggaaatacgaagattcttctttacacggaactccatattcgaatattgtccgtttttccaccgcctccttaactctcatctcgagatcttcatcttagcttaaaatttatccaattttccaccattatcttatgcctcggtattattctcccttgaagcgaataactgaaaaacatattggattatcagaagtcagtattcaataatcggaacctacaaatttccattacctcggaaactcaatgagctcatctctcctcaatgctgcaagccataaaaaagtaataaggattaatactactgtattggtttaatttccgtgaaaggtccc

SEQ ID NO: 104461 - DNA, 365 bp, Mimulus guttatus
  Intron number 1 from transcript mgv1a015823m (locus mgv1a0 15823m.g) derived from phytozome v7.0 (chr-ID scaffold_161 ; pos 111258 to 111622)
aaaagtatgattcttttataagaacaccttttttttttaatgttatgcattttatattgcttgtaccactcgagagaatacacgtctatataaaaatttcaatgtgatatgttttattcttcgaggttatcttatttggtttcacattcttgaattcaatgtcttaatcaataaagcgtcatttagttcaaccagcttgaacaattaatcttggttttgcgtttgtatcaacataaattaaattttagccaattttgttaaatcatttcgaattttgaaaaaaatgtatattacagtaaaatgctgttttgattttttttgcttttttttttaaaccagtttaaaatttttgtcttttattcaga

SEQ ID NO: 104462 - DNA, 537 bp, Mimulus guttatus
  Intron number 1 from transcript mgv1a019628m (locus mgv1a0 19628m.g) derived from phytozome v7.0 (chr-ID scaffold_11; pos 395948 to 396484)
tttcttgttttcttgcgccacctttacttcaataggtaaacccttgctcctctttttttttttttttttttttttctgtttcctatttaaattttggcattacgcaattgtttgtgtatttggtcgaatgggttctgaaaatttatgaagaattgatgcaattgtttgcctaattgaatgggtccgattcgatcgtgaaaaagttcggatctttatgaatagttgcatgcttggtaaacccgaaattcttgattttatttatgttttgttgagatgaatggggtgtttttaatttgatttctgccctgtttcgaacagacatatttttttattgggtagaaatagttcatcaacttagtaattatcaccaccaaatttcctaaattgtccctcttccaagagtctacactctagagcataaataaattgagcaacaccacaagatttttgatgatttatcttaatccattcttgtttttatcttcaccattttttttttcagaagcctacgacgcgctcgatcccaacggaaatatc

SEQ ID NO: 104463 - DNA, 770 bp, Mimulus guttatus
  Intron number 1 from transcript mgv1a000720m (locus mgv1a0 00720m.g) derived from phytozome v7.0 (chr-ID scaffold_2; pos 540818 to 541587 reverse strand)
gggaactccttcatcggccggaagtgcaggaattcgtatgttctactaacttctgatatgttcgatttggtatttttgtgtttttggtattgagagtgcgcctgattatttttcagttcagtatatgaccaaatatgatattttcccccaattgttaaagatgtcgatgccttgagttgatttgagtaccatatgtgctactttatggttggaaaaatgaatggtccaggttttgatatttgtagcatttggcttgttttacttttgcttttctttctgaagattactggtgaaagaattattcaggggagtaggaaatcagagttgatttgtttattcaggctgtttatattatgaaaagctagagatggacactgtatcgtatttactggattatctcagatattagatgtggcatttatgttaaatgagtgcatgctaatctgtttgaggtttgtaggttttgtgggttgagtgacacttaactggtctatatccatgtttctatgttggattttgagtttgcgggattaagatataattttattgaagaattgtctttcaatcaatttaacttcccttttaacgtttcttgaaaagaaaagaaaaaagaagaagtagcaaagctgttcagtacttcatattgctgccaaggccttttgaaatgacaaaaaccttgaaattaatttctcatgtgtattcttcgattcagagaagtttttgacatttaagcatgtatcccattgcaggtttggcaggggctacagccg

SEQ ID NO: 104464 - DNA, 559 bp, Mimulus guttatus
  Intron number 1 from transcript mgv1a012923m (locus mgv1a0 12923m.g) derived from phytozome v7.0 (chr-ID scaffold_55; pos 589269 to 589827 reverse strand)
ctgaggtaattactaattttttcacacacacacacactggaattttgcaaatatatctggattaattattgtttttatttaattttgggaattgataaattaggttattttcttcgttcgattttttattccccttttttgcctttgtagatcaatcaaaaaaatcctttgaattaatttatttattttccttgaattaattggtttgtgttcttagattatgagtaaaacagggattaattaacttaaaaaaaaaaaaaaaaaaaaaagacaagctatttagaaaattcctatggttgttctgtaaagggtaaattcccaattagagaagtgttcttgtacttgattaaaaccaaagtcattttcactgcctttgtttcttttatcatatattattggcacttggatcaaaagctgttggaatataatcttcttcttttttatttttccttttttgtggtaacaactttctattggtggaatgatagtttgtctaaaaattgcaattatcttcaaaactttaggaccaactccctgaaactaaggagcctcgcaactg

SEQ ID NO: 104465 - DNA, 718 bp, Mimulus guttatus
  Intron number 2 from transcript mgv1a009001m (locus mgv1a0 09001m.g) derived from phytozome v7.0 (chr-ID scaffold_197 ; pos 478670 to 479387 reverse strand)
gtgtttgcgaggttaattaattactctccatacttcttcatcttcgtctctccctttctctgtgtgtgtgtgtgtgtgtgtgtgttggatttctgttttgtctctttgaatttgggggttcaattgattttggatttttgattattgacttgttctactgttttgcttcttctctgattgacatgaaaaatcgctggaaaaaacaactggtttccggttttcgcgtttcgatttttgggatgctacacacaccaacatggatgtgtgtgtgtttatgtgtgaatgaataaacagtgatgatagttaggtagttaattggtcagagttaggctttaattctacattttaattaacctaagatttttttttttttttttggtattttgggcagtggttattgtttgattgactgtttctgcactaacattccacactcttgcctttgattatggtgatcatggtttttatttatttattattatttttaattttatgttatttgatgactagtattgcagcccctttttaataccttttcgctgattttgagattttgagattttgagatttagcacgagtctcagatctgatttaagttttttaaatcattaagttgtcaaattgcagatttttttaattttatttttcgataaataaattgcagaagttgactgctaaccataaactataatatattttttttccgaactgcaggagt

SEQ ID NO: 104466 - DNA, 687 bp, Mimulus guttatus
  Intron number 2 from transcript mgv1a011854m (locus mgv1a0 11854m.g) derived from phytozome v7.0 (chr-ID scaffold_11; pos 1027407 to 1028093 reverse strand)
acctcatctgcaaattaaatcgcctgcatctctaggtattttctatttccatggacttcaataaaaaaaaaagatatcggaagtggtcaagtaattttggctgaaaattatgtatcctctagtgtatttatctcgttatctataactccaatgttcgtatgcggtgcgaaaaacgagtttcttaaatatgttttcttgtttcgttgatatagagttgaacacgtaatgttggctagtaatccttaaattgtttcgtatatgatggtggccgattgaagaattaagtaatgtgtttcgtcacagggatcttattagctattatattattttggattgaccttctactcgtcaaattgtcacattgttaaccagttgatttgattaggttaattaaacatttgatcactttggtcgctatcggtcctttgtcctctcttggcacaccaattttatgtgttaaaaaattagtctaagtcgattgtttttggaaacttacaatggtgggatccttacaaagtcgggtgaactataatgtagttgtaataatatcagcttggattatgaagactcgcatacgatgattttgtacaattaaccatgaatttattttctgttagacggcatgtttctgaccatggaattcttgatataggcctccaccatttccacctttcttctgcatcaaca

SEQ ID NO: 104467 - DNA, 911 bp, Mimulus guttatus
  Intron number 1 from transcript mgv1a013597m (locus mgv1a0 13597m.g) derived from phytozome v7.0 (chr-ID scaffold_4; pos 3755893 to 3756803 reverse strand)
cctccttaaagtgtacgccaccaaatcgtgctcaggttacgcattttcccctcaatttgatgacttattttgttgcatttaagctgccctattatagtttaattgatccgagtgacgctgaacttaacttgtattggttgaaatttgctgttatttgttcatgtatactgttatcagaatctggaatcgcatagattagggttacgttttgttggcataacgatgtttgtatgggtactgaatgcactttatattattgcattgcgcatatggtgtctagcatattaatttgcagctccgatttttcttttttggaagtgttcgtggtgatgtaaattgttattaatattgaaaaacatggtggattgggaatttgggatatgccttccattttgcattgtgtttcatttggaccttttttctggtgggattaaaatccatttcctgctgctcctgatttcatctaaaatacagtgcacacgcttgtaggtatgtttacaatgtggattttcatatgtatttgtgaatatacatatgtccatcatgtgaatatgcagatgagggcctgtaagttatttgagaggcatggtctgcataaaatgggaaacccggttttttaatattgtcgtctctggcatatagctatcgcttttcaagtttctaaaatagaatgcagccatacgtgtttaccttaactctgaagtctgaactgttttcaaatagagttctaccaaatggccacatgtgacagttagctagttttcattaaattgtttttttttttgagttctaatatgcttcaatggtaaatgggtgcttgaagaattctgatgtataatataataaatgcaactaacggccttatattctgatcagggatttccttaaagactcaggaattgtacggaatt

SEQ ID NO: 104468 - DNA, 621 bp, Mimulus guttatus
  Intron number 1 from transcript mgv1a008317m (locus mgv1a0 08317m.g) derived from phytozome v7.0 (chr-ID scaffold_8; pos 3432820 to 3433440 reverse strand)
caagcttagttattcgccagcgaagaattaaaaaggtgagaaaaccctaattttgtacctgtcggggttttagagaagtcgatcgctgaaactttcgtgtttattaggtgaaaagggggaaactaaatacagattcatttgattgtttcgaattttgcatcgtttttggtttgtgcttttcgtatcatgcttaattttcgatatttttatggctttatggatttgatgttttgattcgtgctgtttgttatcgttcgagcaattccctgatgattaattaaagcctgagtggtgttataaatgctaatttatattttatcttcagttatgagtctttcggtacgttattaatatttttggtgatcatttaatgttgaatcaaaatcgatcagcgatgaatttgcaggagaaaaggagaagataacaatgaaaatttggttttcaatatttactttttgaatgatgatttccagttgtattaataaaagcaaaagtgggtagcataattcgtataaaattcgactaaatcaattatgcttgattgcttatccatatttcatactattttgcgtgcctgattgaacagactgaattttccggtgaaagttggtggttgaggac

SEQ ID NO: 104469 - DNA, 969 bp, Mimulus guttatus
  Intron number 1 from transcript mgv1a000159m (locus mgv1a0 00159m.g) derived from phytozome v7.0 (chr-ID scaffold_39; pos 435213 to 436181 reverse strand)
tgaggagccaggggtcgagttcaaactcggatgtacgtagtagatgactgaaacgactcctccgctgccgttttgatgtgtgcttggacttgctttgatttcgttttgactgaggtttagtcaatttgagtcaatagaaaatcatactcgatttttcagcagctgctggataacctgtgctattttttagctatttttagtattaaatgccaatgattgttattgaagcattcgccgttttgtagttaattgttcttagcttcaattgaaatgtattgatggctctatttgttaacaactccccctgttacagaatacattcttgagcagccctagacaattaatcaattctcttgtataaagctgttgatatacaactcaggtttagtaaaataggtttagaaataggtttccagcactgttgagattttagtatagctttggcattacattcctgatagcaattagattgggaactttaaaaatcgtagtatagctttgttgtcaccaagaaaaatcatagcaagaagctgaggtttggggactgttgtcttagattatagcaaatccttcaaaatttggcattaaaagttattttctgtactaatatccaatttactcgattcaaatagataggcgttgcatgctaatgagtgagattaatttagtcttaagggatgagttcatttcttaatttgttttgctctccacagagcactctattttcaagttgagatttcccctcttttttttggtagcctatatttgcggatgggaacattgaacatgaaaaaagtttgtatgttgtagcagtttcttgtttcctcttctatatattgaatgaagatatttctgacagttagtttgtgtactgatgattgtttgtttaatttttaatgacatttctaacgatttctttctcgtgtatcattttgcaggcatcatctgtcaacattattgttggttctc

SEQ ID NO: 104470 - DNA, 404 bp, Mimulus guttatus
  Intron number 2 from transcript mgv1a024513m (locus mgv1a0 24513m.g) derived from phytozome v7.0 (chr-ID scaffold_7; pos 2690570 to 2690973 reverse strand)
ctgtgtaagtatttttaaaaactcaagcaattatcattgcatatgaatatgcaataatgaatttaacgagcgttcttaaaaataattgcgcagggggttaattctcattatagtagcagctgtaatgcttgggctggctttactcggtttctgtaagtctatgccgattctttcacccgtgatacttaaaaatcaaaattacattttgataaatttatcaattttttttcttcttaatttattgcagtgttgtctattacgggcctgcagtgtctcgtgtacatgtgagtgcattctaaggacattatcttttgtgggtattttatttatttatttattattgtaaattcttacgtgaattgtttgcagattggtcgtccttggttggattctcgttgcaatca

SEQ ID NO: 104471 - DNA, 606 bp, Mimulus guttatus
  Intron number 1 from transcript mgv1a008702m (locus mgv1a0 08702m.g) derived from phytozome v7.0 (chr-ID scaffold_108 ; pos 371551 to 372156 reverse strand)
cattacagccaacatttaattatctcccctctctcgtacgtataactgatctctctctctctctctctctctctctctctctctctctcagtgtgtgtagtatagagtaatatattacaaaaacaaggtccgttttcttttcttcatatgtacttattacacagatgcttatgcatatatggttgatggttcgccggaccggcgaatcatcgtccgccgccaaccgtacacggttctctgtactcatgaacttaatttatatgtattttcttttttttgtttttttggtaattttgtctagtaaatcaaattggctgtttttttaattgtattattggtgaattctttatgtattgaaaacttcgtccatgtgaactcataaagacagatttcgactatctgttttcgattttattgatgcagctgtcctgataatactttactatgaacatttttttatttttttgttacatatatttaatttgcataattgggattttttattaccttaattcttgtccttatttttatcgatcgagataattctaactgtttttttttttcttttcatgttcagttgtatttttcgaatcgtgaagacgactc

SEQ ID NO: 104472 - DNA, 578 bp, Mimulus guttatus
  Intron number 1 from transcript mgv1a004654m (locus mgv1a0 04654m.g) derived from phytozome v7.0 (chr-ID scaffold_127 ; pos 385845 to 386422)
tgctattaggaatattggaagcttgactgccggaggttcgtctctcttgatcctttgctatcatatttactaaaccatactagtaatctgagttttaacttttgtgtcacagaagcttttatttgtatttgaaattttatttgaaaactttcttgcacgactaaaaattcgtcttgtattcttttataaaattggttttagtatattttcttactccctcttttgggactgctaaatcactcatttgttctttgttacaatcaaagttttcttcatcatttatgagtacaaattctagtatagacatgtgtatgtcttgtttgcttgctgtatcaatcagactcaccattttgcttcttgtgatggaaactctataaaccaatgaatcattaactttgcgttcgtttgaaaagagtagtttgttataagtggtaataggaattaagtttcatagatcaggattagcatgttctgtacttaggcaatgaattaggacacaacacgtattcggaattgaatgtctaactatgaatgtgggaacaggtttaggtccaggaacacttgtggggtctgctgca

SEQ ID NO: 104473 - DNA, 425 bp, Mimulus guttatus
  Intron number 1 from transcript mgv1a019630m (locus mgv1a0 19630m.g) derived from phytozome v7.0 (chr-ID scaffold_235 ; pos 76326 to 76750 reverse strand)
taacttttggatttagtgaggtgagttcttttatttatttattaattatgggcatcaccccctaaattttctattttttgcactttacccctcaaaattttaaaaactgaatgtccccctttaaaatattatttttgttgcgcattgccccgatagcaaaatttcaataaattattcatcggcatttgagtattttgttgcacattgctcatttaaaatgttatcaatgcccaccaaaaattggcttctggggcaaagtgcaaccaaaataatattttgaagggggattatccagtttttgagtttttagtgaggaaagtgcgaaaatggaaaatttgaagagggtgaagtgcattttgtcctttatttattaatgaacaaacttttttccatatttatttaattattttacggttcagtagatc

SEQ ID NO: 104474 - DNA, 943 bp, Mimulus guttatus
  Intron number 1 from transcript mgv1a003847m (locus mgv1a0 03851m.g) derived from phytozome v7.0 (chr-ID scaffold_69; pos 494097 to 495039 reverse strand)
ggcggatcttcgcgacaaatcgcaagtgctcaaaggtcttatttccggcattagcttttgctactgagcctcactttctcctcgttattttttcccttcatctgcttctttgcaaatgttgactgtgtaatactgcggttttgtgtagttgatgtggtttcacttgtgtttgcacgcggtcggtgtatcttctctatgttaatagtaggtttggtttcgtttggtttgcgttttcgtatcaagtatacagttacgtttatgctttgtttgattatgtaatgaaccaattgaacaagcttaaatcaagagaacaagaaattaactctacatattccttaccatgacagaaatacaagaaatcgtgaacaaggaatgatgatgtttgataccctcgattacttttttcaatttatagggtttatactttataacagatgggttggattacacatttcgttcctacatttaatggaagtctgctgtagctttgtagccaataagacagcttataagagcagaagtagaatatgcttattaagattctgtaacgagattcagtctgatggattgtgtgtttatttgtatcatatttcacatgtagcttctggattgcattatttttatgatctttcataatattatgctgagcatatgtatttctttgttgtccgtagtttgttgggggtggggaactgggggtattcaacatttgtgacaaatcaaggaacaaagaaacgcttccaaaatggaagtggatacatttgagatgctgacggtctaagaattagaaaaaaaaaaagaaaaaaaaatgaagatggtggggttgagtgtcattgtccattttcagttaatagttaaggtcaatttaacctgacttaggcatttaacatactgctagacgttttgtactgtagcttgcaaaggagccgaggttgtctttcat

SEQ ID NO: 104475 - DNA, 1025 bp, Mimulus guttatus
  Intron number 1 from transcript mgv1a024242m (locus mgv1a0 24242m.g) derived from phytozome v7.0 (chr-ID scaffold_278 ; pos 142962 to 143986)
ctaccattgggtcgccacactgttcggtcctcccggtacggtaccctcccccttttcacatttgtaattgtagttgtaccttgtgctcgaagagttgtaccttcatatcgccgccgcattttacctgtagaattttaatttgtagattagaggatgtgtttataattttcttttgaaattgctggagaattttcaattaattaacctagttcagaaattttaggtatgacatttcgtcacaatactattttcaaaatttcctcaagttgaatcgaaagctttggcgcgtttctccgtagtcgagttttggggccagtgagatattcttgttggtaatgttgcgcatttctcgcattaactttgtgcactttgacaggtttagtactttgacttgagaatccatggtaccttgtgcataatatattgtattttgatgtatttctcgactgcgtagtatgttgggtttacaacgtagttaagttgttcgttttgttaatcatagacgatgtaagtgatggctgttatatgatgaactcaaattcttttttttcgtttgagtgtgtgtggtctgaattcgttttccttttatcgaagaattcgttttccttttatcgaaaatgctgaggttgtcttcagagcatgagtgagtgagtgagtgagtgaatccgcgtttaatcgtatggaagaagtctttgcttcctgatttcacttttttttcgttttctggccactttttcgccttcctttggcataacgagaaacgatcgaaggaattaatgcttattactattttcagtagagagtgaaaattgcaaatttaaaattgatatcaaagaaattcatatgcggttcaattcaacccaaaacgtgatgaaaatcatgggggcccacgtctttccatcaattttaattattaaattgtttctcgaaatgcgataaatgagaatatgcagaagcactttcttttggcaagtctaatggatctctaaccgaaaattatgtctatgtttttgtagggacacctt

SEQ ID NO: 104476 - DNA, 663 bp, Mimulus guttatus
  Intron number 1 from transcript mgv1a021758m (locus mgv1a0 21758m.g) derived from phytozome v7.0 (chr-ID scaffold_255 ; pos 37703 to 38365)
gcagtgagttcttggtggataagtataatatcgaggtttggatattattattattttttattattattattattattattattattattattattattattgcacctacatcctgagataaagtcaaattacgaaaaaccctttatattttgacaattacaaatacccttcgactatgaattttcttacacgtccaccctaaattatggtgtcaaattcaacataatcttcttgatttcgtgaaatgttttccagtttgtactcgttttgtgttaaaaaaaaggcagtttcatatgcacgtacaatctgatattaacaaggcaatatacacatattatgatcatcctgtttctaaatgttgagctaaaatgggagtaaaacgggtagaactgaaaaatattccacataatctagaagattccactaaattcgacactgcaaatgttgacatgtaaaaaatttcacagttgattcgtggttgtaattatccaaacatgaaggggtttttggtaatttgacattgggtcgctgtgatttaccctattattatcattattttaatatgtgtattttataaaattctcacgtttaattcagcttttattatttttattctaaaaataaatagaaaaggtacgaggaattcaaaaactctgtagcaaa

SEQ ID NO: 104477 - DNA, 850 bp, Mimulus guttatus
  Intron number 2 from transcript mgv1a014332m (locus mgv1a0 14332m.g) derived from phytozome v7.0 (chr-ID scaffold_190 ; pos 226617 to 227466)
aacacaggttttttttttttaatttcttttttaatcgaattctatttacaattcataattgtcaaatttaaggggtaaataaaaatacaattattcagtaattttttcttttatggaatcattaaataagttaattagtattttgaattaattaggtttcaatcataagtttattagctctgtttctggttgtcttcggattttgaatccagagaaccttttcgtttgaatttgctattgaagataccgtaaaacgagtaaattcatccgcgagcctgtttattcaatttcgacagaacgaataaacggaacgagtatatccattttcgagttctaaatctgtgcgtttgaacgagcctttgataatttaattactatattaattgctataagtttatgccgagataaaaaaacaccgatcgaaatagcaataatgtaagtggaaataaagattttagctcgtttacaagacttcgttcgagttggaatagcttttgaagtaccgacggaaccaactgataattttatttgcaaaattcgttgtgggagctctatttcagaactatgtaaatcttaaagatttacgttagatttttttttatttaacgtatattataacagacgtacggaaaaacgaagagaatcgggtatataatgtagtagtgcaaacaatattatgatcatgggaaaaattatgatacaagaagcaaattgccatttcagcacttgaccaaaaattgtaacaactctttgtgttgatagtaataagtagatgaattgatttttgtctgtattttgtttttatttttttgcaggttgtttttagaagggctacacaaatacgggaagg

SEQ ID NO: 104478 - DNA, 1001 bp, Mimulus guttatus
  Intron number 1 from transcript mgv1a026286m (locus mgv1a0 26286m.g) derived from phytozome v7.0 (chr-ID scaffold_7; pos 3249803 to 3250803)
ctaaaaccaaggtaatttctttgatcgaggcccattttcttggatctcgaaagtttgtacagtatgtgttcggctaagcttattttaaattgctgataaactcttacgtctgataagatgttttaagtgctgataagctggtacctcttatttttaagattaatttttagaatgtttgaataatgagcttatttcctatttttactcattataagatcttaaataaaaaggtggggtagatgtacttttttaaaatatcttatttgctctccaatagcttatttaaaaaaaaaattaagatctttttttaaaaaattaccaaacactttggaataacttataagctctaaaacatcttataagctccttttaacatcttataagcttagccaaacaccctctaattcttggattcggtctaaatctggtacattattgctactgctatattattgatttcgaaacctgaaagctgatttaaagagatcttagtgaatacttttttttttattgattttgaaacctgaaagctgataatagagtaaacctatgggctcgagtgggtcggcatcttcttcccatgtatcattctagacatgctcgctatattccttctcgtaattatattttgcttcttttgatgtttattaattattaatctctcgcaacagcctgcagctactgctacaccagctggtaatcccacttcaacagctgcagcttcgccactggagccgtaagttgtaaatatcagaatatatatatatatatatatatatatatatatatttataattccgatgtctgaagtgaaatgaattctgcttttttcttacagggtccctaatagcagcggattagcttctgtccctccgacaagaaagtatggattcgttagtgatcccatgattccgtagatatttttatggctctgtagtcttattaaaggattttacaagaatcgttgtatattttttgttgcagtgagccttccgattctt

SEQ ID NO: 104479 - DNA, 1029 bp, Mimulus guttatus
  Intron number 1 from transcript mgv1a007694m (locus mgv1a0 07694m.g) derived from phytozome v7.0 (chr-ID scaffold_1; pos 480269 to 481297 reverse strand)
aaattgagctgaaaaaagcagctgattcgcttaaagtaagcgattcattttcctctttttttttcttttttttttttttttttctaattttttaatatatatttctgttatgtgccttgattgtggaatcgagctctctaaattagacttggtgaaaaatgtcaacaaatttgaattgtagggcttcaaattgttgatacctaatagatgaataaatctatcctattatatattgcatgaaaatgtgttgctaaaccgtaatgcagatgatatcgaaaagccagagatatcatctttaaagatgctagcatctttttaaatcatacctgttttccttgatcaaattaatcgagaatgagaagctgaaaactgttgagaattgagatataaacaactgaatactaaaatttgcaggatagaagtttgtaaatgtaccagtcaactcaaatatgaaaattacttccatttgtatattcttcctatccgcctcgttttgataaactggtgctaatatttcgtttcatgggaagctaatttcctttcagttcaacggtgtgtaaagttagagttcgtctttggtggaaatggcttcttataaatccatgaaatctgaatccagtttgtttacgatctatcccttgacataatactaccctccccaccccaataccactcgggcaatgccttcgcggtagtttgtttactatctgtcatcaacttgagctgagggttattactttcgtatgttgattaaaaattcaaagataatgaagcatcaaatgctgtgaagtgttattacatgcccccagatttggtgtctcgaaatagttttcaacaagatctttgtctggttgagaaaatgaagaattgattatagttatttcacttaggtgtttgactgtcgtgttcaattgttgtttctccctaatctataagttgggtggcgaatgaagtgatgtcaatcaaccacttaactgaagaatgtgtgaatatggactaatttttcgaactacgttttttgatgcagtc

SEQ ID NO: 104480 - DNA, 949 bp, Mimulus guttatus
  Intron number 1 from transcript mgv1a015772m (locus mgv1a0 15772m.g) derived from phytozome v7.0 (chr-ID scaffold_9; pos 3297249 to 3298197)
tctttccgcggtggaggaggggtcagtttctcttttttttttttttttttttttctgtatttcttattccgatttaattacgattttatgatctttagttgtttgcctgatcagagttgatttctgttggtatttgctttaattgaatttttattatagtttttgctttgtaaaactgggttgtgtgaagaattagaactgaaattaggttattttgattgaagctaaaattaatttaatttggggattccttggtaatttggtagatggtggcatggagtttgcgattatacaatatacaatagggtttgattgtgcaataaatttcaatttcttgtgtcagtaaaaatccatgatggctttgttttcggagttgatcatttttaatatttaatttcatgctgtctggttcttattatttctattaaatttggaattaaaaaataaataaaaaatacttgtagcaaaaacctgaatcattgcataaacaccctcagtgttgtttcttacagtattgtgtgtgtgtgtgtgtgtgttaaaatcgaaacgagtttctataagaagcatcgtcttttcttataagcttgtacaatttttgtcatgctgagtattgcccgtgatcaatgttatcgagtttattgtatttagtccctgtgctattgttattagcaaaagcgcccctataatttggcacacaaaccactaaatggtgaggtttaacataatttgctaaaaaagcaattgtattatagggggagttttgctaatattaaataacacgagagcttctttaacaattagagtaaacatatggatgctgaatgcaataaaccccaatattatcatgtataatagttatattggatagtctgaccattttttctttatcggaacgtagtctcattgaccatatgtatatatatatttgtgaaatattaattccagacga

SEQ ID NO: 104481 - DNA, 683 bp, Mimulus guttatus
  Intron number 1 from transcript mgv1a007746m (locus mgv1a0 07746m.g) derived from phytozome v7.0 (chr-ID scaffold_181 ; pos 287737 to 288419 reverse strand)
tttcttctccggtgagctatatatatatactatattaatttattctaaatttttttattcattgtacgtaataatatttatgattaattaataagcatgattagataatgaattaggttttagaggtggatttttttggtttagtttaaatatttgaggatatttatcgttcaatttggttggtgttgaaataaatcaaaatattgaaatagataacatttaatatgtggagtacaagctacctatatctaattaataatgcaaatattcaaaatcctgtgccttgactatatatattaattaaaaatatattttaattgaataagaaaaagtatattctagaatgcttgattatgcgttccgaataaattaaaacaatcttccattttcaaataattccttcttgatttttcattttcaattaccccacgtgtctccatcgatgttgaattgtcactagtcgttaagtccagatagtgtatatttacccagcatacctacatagttggctgagggttccttaaaaaaaaaaaaaaaaaaaaaaaaaaaccgatgttgaatttttatactgcacaaaatttaattaatcatatatggtaactccaaatatttcaagtgtttgatttttctttcaattttgtaatattttttttttggataaataataaaattaaaataggcaa

SEQ ID NO: 104482 - DNA, 962 bp, Mimulus guttatus
  Intron number 1 from transcript mgv1a009096m (locus mgv1a0 09096m.g) derived from phytozome v7.0 (chr-ID scaffold_7; pos 2222214 to 2223175 reverse strand)
gtttcttccttgttagtgcaagcaagggtgagtgttcgtatttttcgattaaatgtttttttttaattgttattgttgtttaatggtggcattgttgttgtcttcttgggtttgtttcgagtatccataattggaattatcttgatcactgttgatgctagtgtggctaggtgaaaaatcgaatgcttcgcctcgtttatgtgaattatgttcacttataagataaaccccgtttgaataacttcacactacggcctcgtttggttgggagattaaccattattaactaactaaataattggactttgtttggtgttttggtatccccaataacttatcgggtcggcccgtcttatcttgccttttagagggatttttttgttggacgtcccgggttcaataaaataattgggttttcataagattatttaatcttatcttggcaaccgaacgaggcctacgtgtatatgcagttgtttagatatttagtctgattcttggactatgttgttgcaagtgacttcgaaaacggaagtcacggagaaggctaaagtgactgtatatacgaaatttgctgtcttttccaattagttcacgaactttgatttgttcgttagcttttatgaagcctctaaaactttttcaaacacgagatgtatcatcatgtagatgatatctatgaaccaaaatgtaggttatattggggcatattattttatttttgtgcgttgtttgtgtagatgtagcaatcaaggttcaaatatctcactgctgaattgaatcgaactgttgcctccgtatcatttacatattgggcatgaactgtatatctatccttagcaccttatatggacagttaacggtgtatctccaaatgctataaacattaaaattttactaaagtatatgctataaacattaaaatttaatgaacttcccttatctttgtagactcaacaccc

SEQ ID NO: 104483 - DNA, 596 bp, Mimulus guttatus
  Intron number 1 from transcript mgv1a012666m (locus mgv1a0 12666m.g) derived from phytozome v7.0 (chr-ID scaffold_63; pos 739484 to 740079 reverse strand)
cgccaccaaacccgacaaacgtctcatcctcgtcggtaatttctttctcccttcttcaattctgcctcctacttcttatttccattcctcgctgttcgttttgtttttcgtaattgggtttagggtttgtcgaattggaatttagatgaaacaagggggtgggtgatttggttcaattttggagtatttttcgactattttaatttttaaagtatacaatttttcttattaatttttttattttatttatgtacatcttaaatttctatttgcaaaattttcccaatacttgcaggctgctacacatacttttgaaattggatcacaatcatatttaataaaccatgatattattatctcttgtcagattatttattaccagaagtagttcgagaatttcttcgaattatagaatgtcgaacaaacggatgaatttaagaatgtactaccggacagatatttcagttactagtttttttttaaaactatttttctatagataattttgtgtttcgggtttttctgattctttctattcgcattattattattattttacaggtccaccgggatcaggaaaaggtacccaatcaccg

SEQ ID NO: 104484 - DNA, 590 bp, Mimulus guttatus
  Intron number 1 from transcript mgv1a010879m (locus mgv1a0 10879m.g) derived from phytozome v7.0 (chr-ID scaffold_1; pos 1564529 to 1565118 reverse strand)
cacgattatctacctgttgtcggagtttttactaggtaactttttttttttgggtgtattttgtcttgatgttaatcatggggtttatttataggcgaatattggtgtgtgtgtgtgtgtgtgtgtgtgtaaattttcaagtgatttagtttatctgtaattggtttatctttatatgctattattgttcagattaatacaaataatttagggtatgtttgttagagacacaattataatcaaattgattaatggaaagagaaaaaaagatgaagctgtagtggaaaccaaattttctttgcctgatacctgattaattaggcaagcagaaaaagtgaagcgcgagctagctatcaaaggaaagtgttctccgatttcaaaattttaattggaatctatggtggtattaatttgcttatatggtgcttcacaagttcgggttcggcatatttgtcgttcgttttaaataagtagtatatgggtcgtattatgtttcgaaatttcattgcccgagatttaccttgacatgtttattccggtcccgaatctctatagggagacactccctgctcattactacagagggaaga

SEQ ID NO: 104485 - DNA, 686 bp, Mimulus guttatus
  Intron number 1 from transcript mgv1a006752m (locus mgv1a0 06752m.g) derived from phytozome v7.0 (chr-ID scaffold_123 ; pos 662329 to 663014)
cggtttgttttcttaaattgattgatttttttttttaaattcataatctccattaaaatttgatttcaaattctctgcaacaaaaaaatttttggagcagaaattgatgccgtttcatggagtaattaattactgtttaatttattcgaatttctctgtccaataaattaatcagttggggttttgctttccgttttggggtactcatcattttctacagcagcatgtttatcccaccaaaataacaataaaaaatattatttatatccattaatttcagatttgtcgtttaagatttttaaagatctattaagattagtcactttatctatctagtctattaattaaattaatagacgccgtctattaatttaattaatacgattggactagctaaaattgacaaaacatgctgaggaagaacataatacaaatatccggccttggcctagagttgaagccatcacacaacctaagtttggagaaattacatccagctccgtctagtttgtaaatttcttacacccacccctacaaaagggtgttaatgtatgaaatctacaaattacagggagtggatgtaattatagaaacatgaggggtttgtaatttacctttcttgagaatttcaaccaaatgaaaattgctaacagatacatttcatcatcaaaatatgcagacaatta

SEQ ID NO: 104486 - DNA, 605 bp, Mimulus guttatus
  Intron number 1 from transcript mgv1a009751m (locus mgv1a0 09751m.g) derived from phytozome v7.0 (chr-ID scaffold_26; pos 162329 to 162933 reverse strand)
agaaccagttcgcgttctagtcaccggcgccgccggtacatctccactctctctttcttatagctcgccgtgaatttctggatctgtttcttttttgcgtttgtgctttttctgtattattactatgattgtcggagcaatttttttcatttgatttaacttactggatcttcgttctatcgatttgactttagaactgcttgtaatcagtgttcgaaacgacttcgtgattgaaccagacagtaattactccgactggaaaaaaatgtttattttattttattttatataatttcggaataaggacgatgagattcatctagtgcctagtggtattgatttgaatcgtcggaggaatcatctagctagttaactaatttctcactcaatattgtgtttatgcttgttggaatttgttcgagtttcgattcggaacaagacaatttggattaagtcgataaacattgatattcgtaaatgctgtttgtgctgtggctattactctgttttccgtcgaaaataaaactgattcatatctgtgctaattggatttagtccggttggcggttactgagcagtcgtttgttttacaggacaaatcggat

SEQ ID NO: 104487 - DNA, 502 bp, Mimulus guttatus
  Intron number 3 from transcript mgv1a003815m (locus mgv1a0 03815m.g) derived from phytozome v7.0 (chr-ID scaffold_419 ; pos 14072 to 14573 reverse strand)
ccaaaggtaacaaagcttttgccctctccttttttgtccagctttgaggataatgactcgtaaactacatctcatctacgtttgcatcgataatatctttttatcatccacgacataagctagaatacagagtcgaggatttgaataattttatgtttctgatacctcctttaaatgatcttctagatgttatattgaaatgaaaaaaggaaattagaaaaggtttgtgtgatgagaaaaataaaagtaaatacaagccattcgggctagttaatgcttcaactgtatccaattcaaattttgtactatttggtttgccttttcgagtcatatacgttttgttgataagttgttgttgacctggccttgaaaatatcattaacctggtaaactgctgatacacattccacaaattttggatgaaatggtgtattcgacttctgatagttttaactatttttttccactttctttttagttaagaaacaagcctttcagacga

SEQ ID NO: 104488 - DNA, 587 bp, Mimulus guttatus
  Intron number 2 from transcript mgv1a006224m (locus mgv1a0 06224m.g) derived from phytozome v7.0 (chr-ID scaffold_57; pos 757322 to 757908)
catcgaagggggcaaggttgttcaggtattattagattgagctcatgtttctacgtgataaatatttgaatttagatatgcatgtcgttggcgtgtaaatgatgtatttgaattccccttctgtttgtgtgtgttacatatcagtggattgtgttttacctatgatagtgacagataaattggaatatggatttgattgatgatattttacctgggatgcaaatggcaatgattcagattggaataatggtagctgcaaataatattttagaaggtacaaacactggattgggatatgaaagacttgtgattaaaatatctgagtgcagggaagtgactcttgatgcataaattgacaattgtactcggtaattaaaagaaaatgatttgtattggtagataatgagacggtagtgtaaaacacttggttggttagaggtggccggttgttcactcgttgaaaaaatatgaatggtggtttgcgtaaatctatatgagtttctttttgtatgcataaaacgagagctcttcattcgttcaattacatgtttgattttctggtgttaggttgtggctgttgttaagtc

SEQ ID NO: 104489 - DNA, 438 bp, Mimulus guttatus
  Intron number 1 from transcript mgv1a026488m (locus mgv1a0 26488m.g) derived from phytozome v7.0 (chr-ID scaffold_204 ; pos 393835 to 394272 reverse strand)
gatattttatcacaaggttatttgagttagagattttttactatttgtggagggcaaagctgcattacatggatcttttgatgtcctagaatcgatccccgtaagtagctccatttcatctcgattttcttaacctctactcttattcttcttcgtatagtcaaatatttccacttcggtcaaacaggccaacaggtaaatgtgtttgtgtttgtgtgtggatgtgagcaatttactgtttttttgttattgggtaaaaataatgcagtttgtctctaagtttatatgttgcaactaatcagtttaattgattttaaccaatacgctagggccccgtttggttggcaagataaaattagccaagataagattaaataatctaatgaaatccaattattttattggagctccgaaaatatctgttagatacgcctggag

SEQ ID NO: 104490 - DNA, 780 bp, Mimulus guttatus
  Intron number 1 from transcript mgv1a009684m (locus mgv1a0 09684m.g) derived from phytozome v7.0 (chr-ID scaffold_46; pos 1129638 to 1130417)
ccggctgaagcttctgaagaacaaaagggtttgtattgtgaatcacttgagagaagatgtctctgagcttctcaaacacggacaccatcttaccgccttcgaaagggtaatacgcgttcatcgttctttctactgtgcgtgtgcgtgcgtgtatacatcatatatgtatgtatatgatatatataagtttttgtttttcaaacttttattcaggctgagcaggttatcatggatgagagttgggttcaaatatatgatcttctccaccacttttctgaatttatacttcttaattttcgttatattcgtaagcacaggtattcctctcactctctctctctctctctctctctctctctctctctctctctctctctatgaaaatacagttatgtttatgaaacttgaataattaatgtttttaactttgtaaggaactgcccgaatgatattaatgaagcaatatcaactctgatcttctcatcagcaagattcggacagttgcccgagcttgtatctattcgtaagctgtttggagagcgttacggtgacaaattcgtaacgaccgcaatcgaattacttcccggaaatcttgtgaatagtcaggtttaatatttcgaatattagcatcaatatcaaagttttaatatttgaatattgattgaggagtgtacttggtttcatgattttggcagataaaagagaagctttacattaaaaaggtgtctgatgatgctaaatacaaattactggatgaaataggtcgtagtttcgttcagc

SEQ ID NO: 104491 - DNA, 925 bp, Mimulus guttatus
  Intron number 1 from transcript mgv1a014046m (locus mgv1a0 14046m.g) derived from phytozome v7.0 (chr-ID scaffold_316 ; pos 22769 to 23693)
gccggcgtagcgaatctcgaatctgcgcttctacggtgagtttctctccattttcctgcaattacatttccactcttctccaatttctcttcatctgctttctctttcactaatcagccgtagaaatcgttattcgtatgattgttcgaacaatttttcttcgtgcttgttgctgtttttctctccggcgattttactgtatgcgatgtcgattgaatcgcatttgattttatttcgagaattttcaataactcggaggaaaaattgaatgacgatagattttttttaatttttaattatgcaatcgctcctgtattttcagcgatttttgagagatttgaaacctgtaacggataaaattagaacagaatttaatcaggaaagtatatgattcagattcagtagagctttgtgattgaaatatttgggaattgcaaccttttgttgttattattaataacaaaccaaatgtttgatgaacttcctcttgttatcaattcgatcggaattgtttgaaattgatgagattagatctgaaatttcctcatattgatctattaatttccatctccattcgattttagaaaagtctataacgttatctcgaaggattgacagacaatgtgtggctgtatgttttgttattttattttttatttttagaattagttcaatttatggattttgacttctcatcaaatctcaaaagaaaatatcactagatctaaagttaatttgcttatccttttcgatgaaaatctattttcgtcgctgaatttactggaagaactcttgacctgaaacatgattctgattggttgatgagaatatatactgattgttttgcgatagctatgcataattgtacttgtgcatcatacgtttgatggctcatttacacttgttattgcacaacgaacaggct

SEQ ID NO: 104492 - DNA, 539 bp, Mimulus guttatus
  Intron number 1 from transcript mgv1a025124m (locus mgv1a0 25124m.g) derived from phytozome v7.0 (chr-ID scaffold_87; pos 305441 to 305979 reverse strand)
atttcgtgtgcttccttccgtactgggaaagaagggtatgattctcaattctcgtagttgctgcacttttgccattgcaatagaataatcaattcgagaatggaaaggagtcaaattatctttcttgatggcggaaattctgcgtcgctttactggcgtcttgtttattcattcggttctgtatttgacacagtatatgatgatgcacgtggaatttttctgtagaattttctgttaaataggcggggatttttctgattggctgaaaactaaagtttgattagtatttaactgtgtcttgtgctctactccacatgttcttttatgtagacataataaagaaaacgacttttaattgcatgctgtatctttctatggcaatgtgcagtgtcgttagtaaattataaatagcatctactgtgccgttttattgccatatagttcgcattgtcttctttctatttttttttaatctattttaactcgctggtaatggatttacagagagaacgtctacgtaaggaacgtgaagctgcctc

SEQ ID NO: 104493 - DNA, 245 bp, Mimulus guttatus
  Intron number 3 from transcript mgv1a013370m (locus mgv1a0 13370m.g) derived from phytozome v7.0 (chr-ID scaffold_16; pos 659529 to 659773 reverse strand)
gacaggtaataataattcttttaaacttcataggattatgttatcttttattcaagtaattgttctttattttattttattttgcttttgatttcaccattatccatgactcgttttcgtttagaaattataatgaacatgaagaaaaagagggttcggtttcatattatgttaactttatgatggtgttgatattttgtttggtggtagttgactgtttcgaacaaaggaggacttgttgaaga

SEQ ID NO: 104494 - DNA, 712 bp, Mimulus guttatus
  Intron number 1 from transcript mgv11b014792m (locus mgv11 b014792m.g) derived from phytozome v7.0 (chr-ID scaffold_3 06; pos 262943 to 263654 reverse strand)
tttttttacatgtacgtttgtgcatgtccatttgtgcgagtgtgtttgtgcatgtttgttgatttgtattaatgtcctaggattgtagtttgtgttttcatgaacctttttgcgaatgcagttttgcgtgagtacttttgtgcatgattttgtacttttacttatgtgtgtatctttttgcagcgagtgtttttgtgcacgtttcttgatgcgcatgcgagtcctcgaactgtagcgggtattttcatgatcgcttttggaatccaattttgaccatgttcgagtccgaatttggaaatttgacattagacaagaattgtagccagctcaaatagctttctaatgccgccataaccagttgatttggagtccggatgagaaagttatgctcgacttcgtggacactaccgaagatgttgagggatcctctcttctaatttgattttattttcctaattgcaactattttcttactctttgattatttttgcttcatggacacctcattatcaatttgtacatatagaatactaaatccaccaattaaaacagaaatataaattaatccataaaaaattccacgtaaacgtaaacgttgagtgttatttctacactccactgtatcttttgtatctagtgttcttgctgttgtttggttacgcgtattaaagtcctagtgttgtatttcgtgtttgtaaaaacgttgttgcga

SEQ ID NO: 104495 - DNA, 745 bp, Mimulus guttatus
  Intron number 2 from transcript mgv1a017601m (locus mgv1a0 17601m.g) derived from phytozome v7.0 (chr-ID scaffold_48; pos 663097 to 663841)
tccgcagtaactccaaggaaattggcttcatcaaggtttgttttttactctatttttttatatttaaaaattaatccccaaaagatttattgtatgaatattgaagtttgatttattgtataacttaatgtttttcagggtttgattcagtttgaatatttttaattagttttaggttgacctgatttgataatttggaggctttggtatcaaattcataataatacttgtttgattatattcgattgttatgctttgtgcatttcgtaatattcattttgtgtaattgtttagtcctcctagtttggggttattagaaattcacattgtcatttgaaatcctcgtcttccctttaatccagtttccgtttatccaaattgaaatgatttgtacaaattgtcgtacctactcaaatccttcccattaggatagatgtttgttgattgtcactgtgggttttcccgtgtttcttatgggagatgtagtatgtaatatttggggtaaatgaagcttaagaatttgcggagttagttaattcgatttttacgtttcgatttgggagatgtagtatgtataatatttggggttttaccatgtttttggtataacttaatatttgtggagatagttaattcggcttttatgtttcgatttgatgtcttttatatctggtcatctgaaatgtgcaaatgaaatgtgcaaatgctgatattgtattctgttttgtatcttgcagtaccgtta

SEQ ID NO: 104496 - DNA, 519 bp, Mimulus guttatus
  Intron number 3 from transcript mgv1a002309m (locus mgv1a0 02309m.g) derived from phytozome v7.0 (chr-ID scaffold_4; pos 3413935 to 3414453)
cacccaaccaagacggttggctgtgcaggtatgatcctttttttttcttagtgtattacaagtttgtcaacacacatggaataaaagggataaattactatagtgtaggagggtatgccatttttttctcgcatgcaagggttttgtttgctaagaattttggtttctcggtatgcttttaggtttcaaatcaaaacctacgtataagttcatctctgctttgggttgttctctcttagtttctttacttctatgtttgaattatcttatggaataaaaattggcgtcttctttttattttgctcgggctaaactcaacagtgattaagaaacttatgtttttacttgtagttttggtggtttttactccttatcgaccatgatattagacatgtagcctaactaattgcactgtcataggtatttttctgattttatgtttttcttactttattgtaacttattattcaccttgaagttattttgcaatagagtgttgcttcaagagttgctgaagag

SEQ ID NO: 104497 - DNA, 736 bp, Mimulus guttatus
  Intron number 3 from transcript mgv1a015327m (locus mgv1a0 15327m.g) derived from phytozome v7.0 (chr-ID scaffold_115 ; pos 262319 to 263054 reverse strand)
tgcgtgcctttcactggtttgctgttgccaacactgtaagttttctttttatgctttatgctgtgatgaagcaggtgcatctgaataaggctctagtcctgttgattacctcttgaaaaactcgtcttgttaggtctacgaaatagtttagtatttgatcaatggcaatcccatttctagacgcataactttggaggagcaagtgttatagcatatcttcataatatgggataagtaataatacagagccatggtcatttcaaaatttgaccttggataaattccatggagatttaccaatcacttaattatcgttctgcaaacaccactgtttagtattgtggctagcttaatatgttatttgctatttctcgaaacatctaacaaggggctagtaggtcttctgtcttttcgttaaactgctatgaagcttatgtttttagccttatttgtcaaactgaattttgaagaagagaaccattactgaacataccttttcaatttctgaatgagacggcttaaatgttcgctgaaattttttatgttaaaaatgtggtaggctgatgctggtcattcataatgctgaatagttttatgaattagtctttttctttcttgttagtatttgactgttaggcaggattaaatgatatctatatgtgatataccccatggttaaatattgtgtttgcgaattgcagctgcaccgaacagtcactgctgaagacctggaatc

SEQ ID NO: 104498 - DNA, 747 bp, Mimulus guttatus
  Intron number 2 from transcript mgv1a025939m (locus mgv1a0 25939m.g) derived from phytozome v7.0 (chr-ID scaffold_138 ; pos 520433 to 521179)
tagaagatcagtttatagcaagaggaaggagaagacatgcagaattgggcaagatgggggagaagaagacatgcagcataattaataataaaattatatatgcagaataaaattactacggatcagttaaaggcgcatttccattacgcgctttccggagtattacgtttttattagtagcggctatcatcagcacacgtgtcagaataagagaggaagagtaggaaagttaattgttaagaaacgtaatcatgcttatgtttatcaatagcactttctaattatagagataatataaatagggaaggtttgagctgggagaggcagctgattttaggttaagaacttctaggttagagcgtttgggacttgattctcgaagcttttcttgtgtttaagcttcccgattcaacctctgttatctgtaatttccgtttatcaatatatatatatatatatatatatatatatatatatatatatatatatatatatatatatatatatatatatatatatatatatatatatatatatatatatatatatatatatatatatatatatatatatatatatatatatatatatatatatatatatatatatatatatatatatatatatatatatatatatatatatatatatatatatatatatatatatatatatatatattttgtgttgctatcaaaatgctcgatgtcagttgtcatttcgataaagaatccgaaaatcaagact

SEQ ID NO: 104499 - DNA, 590 bp, Mimulus guttatus
  Intron number 2 from transcript mgv1a005088m (locus mgv1a0 05088m.g) derived from phytozome v7.0 (chr-ID scaffold_13; pos 242421 to 243010)
tctgtatctgccccacaagagagttagccattcaggtacgtctagttacgatgattctcttcgtcttttgtttttttgctatgtggagctatctttattagcatatttctctcggtttgatggacaaaatgaaaattgggtcgaagattagaattgccggtgcatggaaatatgactacatctattcatgtaatcccgtccagttttgaaccgcctgtgatttgattgtttgtagttttacattgtgacattagtcatactatttacgaattacgctccttatgctggattgttgattcgtttgcaagtttttgataggtatttgaaccatggatgatgctctaaaacacttgagattttttttagctaatattagtacatcttttaaagataaaagtagagtaatcgttgtttgttagaaagttggtcgtgccagtatgacttatgaatgtaatgtattggtcaatctatcatctgtgaggttaaatacttatgaaactgttaacatgtatattgctgtatgatatggtttgataagaaataagaaaaaaacggaataaatggtgcagaatttggaagtgcttctgaag

SEQ ID NO: 104500 - DNA, 820 bp, Mimulus guttatus
  Intron number 1 from transcript mgv1a023334m (locus mgv1a0 23334m.g) derived from phytozome v7.0 (chr-ID scaffold_32; pos 1136755 to 1137574 reverse strand)
atttctccagcttcgttcgccaactcaatatctatgtgagcttctcttttatttatttatttattttcctgaatatcttaaattttttgtttctatgtggtgcttagggttcatatttgtgtgtgtgtgtgtgtgtgtgtgtgttttcatggggaatttttgcaagtatctgtgcttctctatactcagtatattgtacctttgaccagaacaccattgattttgactatttgcatgaattagtgcaatgttgggaaactatttgtagtgtgattaattatggtggaatttggagtcggttttacgggatgattgatttcgtgattttgtggatagagagccaaacaacatctccaatgggggtattgaagacattacccacatgatttcaaagtcgaaatacggagatatagacatcgttgtggattttatgttcgtttctcgagaatcttcttgctactgaagttaaaatagttctcggtgtttctcttaccgattaccatcactaagattatttttttttccgtagtatagttcagttagcattattgagtctttcgcctttatttgctcgactcaacattcgtaagtttttatgttcgtttgttatgcgtaaactcgtgtttttctgtcgattagttttactccgtgattgctgattctacaatttgtgtgagcgtgttttttcgttatataatcacccaaaaagggatcttctaattagtcgaaacgagactaaaaaaaatcgaagattttgttaatgtccattaacttcccttcgaatatcaatccagggtttcaagaaaatcgatacagacca

SEQ ID NO: 104501 - DNA, 496 bp, Mimulus guttatus
  Intron number 2 from transcript mgv1a003061m (locus mgv1a0 03061m.g) derived from phytozome v7.0 (chr-ID scaffold_24; pos 134776 to 135271 reverse strand)
gcttcttctgaatcgagtactaatttttaaattatttgtcattttagaattccgatcatatgaaatattgattacatttttttttcttccaattttgcccttatataaattactcttgatttattcaaagataattaactgagaaacaattattgacaagggtattttagtaattttcatatatattccataaatattttttcttgatttgtgcgcaacaatccaaaacgatttattggtgtgatttcaattaataattttgcaggttctaaaaaagggaacaaagtagttctcatagttagcttgacatcggtgatcggagtaatacttattacgtgcctattcatctttctacgctttcgaaagacgaagaatgctcgaaagattggaaaagaaggtaaaaaaaacgagcacgtctaatttaattgatatatgaagaaaaaacgaggaattaatttaaatttcaaagttttttcatatgttgtaggaaatatta

SEQ ID NO: 104502 - DNA, 443 bp, Mimulus guttatus
  Intron number 1 from transcript mgv1a021167m (locus mgv1a0 21167m.g) derived from phytozome v7.0 (chr-ID scaffold_26; pos 909507 to 909949)
caggtacaattttccaggagttttgtgtattttgagaattaggattgtagaattaattttccaggatttttgtgtaaattgagaattaggattgtaaaattaattgcgagaatttaattttattttgattcatgaaacttcccagcccataaaattcggcccagcttcaatagtcaatccccaagtccacttcaatctccaaaacatcgtcgtcttcttcttctttcccaattttttgtaaaggaatcaacaaacaccctgcctgcaatgtgttctcccttttgtctgagagagtatttttatggttagagtattaattaacatgggaaaaaggcagttacactattttttgaattatttatttcatcagactttcctatataacctgatggcacaacatggttggcttactgtgtttgatttttttaattttcagctttcaa

SEQ ID NO: 104503 - DNA, 652 bp, Mimulus guttatus
  Intron number 2 from transcript mgv1a014256m (locus mgv1a0 14256m.g) derived from phytozome v7.0 (chr-ID scaffold_130 ; pos 168304 to 168955 reverse strand)
cccgaaggaatttgtttcctttgaaaaactcggtatgcttactttgaattttttaataatcgagacttaattttcatttataattaaataaacctaatgctccgcatggtgtttctggaagatcgttgctgccaacttgtttaatcgagacgtaattaatatttataatatatgtgcatactgctaaagatttattcaaattttcttggaaggggataatgatgactagggttggaaattggaacgggaattttggattccgccgattccgatctgaatttttccgattttgcactatgttttcttacggtttccgatttccgatttttttttggaatggaattggaacatattagattccgtttttcaatcctattttaatttctgaaaatatttccaaatttcggacttttttttaatggtaattacactaattattttgtactgtaggtgttaaaaagttggaattttccaaattttgccggttcttatcctaaaatttctgattttctcattccaatatccgaaattcctatttcggattttcctgatttcttttagcaaaagtggaattagttttgcatgtttgagcaatctaagttcagctgctttgcaaatattgtagagctcggtgtgcttagctggaagttag

SEQ ID NO: 104504 - DNA, 584 bp, Mimulus guttatus
  Intron number 1 from transcript mgv1a014256m (locus mgv1a0 14256m.g) derived from phytozome v7.0 (chr-ID scaffold_130 ; pos 169035 to 169618 reverse strand)
ggttctcttagcaaggtaaatcttactttatgttgttttaattcgtatggttttctcttgattgtagcaattttatttgcttagatgaatgtaaactttacccccaaaattttttttaggtcaattatttactgattgtataattaatttagttattattgcaaaaaagttcgattgaatatgctggacagttcttaattgctgtttttttggttaattattcattattttaaccataatatgtaagggccaagcttttgtttgattatgtccagatattcagtaactttgttatctgctgtgtgtatctattgtatgtatagaattaggcaaatgatatgttggattatgtcagagtgaaaagaaaaaaccgagattccgtgggtttggtcatttcgaaagtgataatagatgtgaattttcaactcggtagaagtagctagttccgatgacaaaattccagttagttatctgctcgttaggagttcgatctcgtttttccactttgttcgtttgcgtgagaaaacaatatacggaaaaaaaaggaagtattttaccgaagtggaaaatttgtttaatgcagg

SEQ ID NO: 104505 - DNA, 906 bp, Mimulus guttatus
  Intron number 1 from transcript mgv1a009332m (locus mgv1a0 09332m.g) derived from phytozome v7.0 (chr-ID scaffold_37; pos 998026 to 998931 reverse strand)
tctgttaattgattcagaagttgtaattttatctggtgagtttttgaaatctagggtttggctatttgtcgtgattcttatatttagctttcctggatctgtaaattgagttaattttgagttatgtcatgtctgaatttgattttaaaataggctatttatgattttctatgttgatttgtaaatctagggttagggtttttttggaatttgggggttttcttgattgaaggattttgtaattaaattgaaagtattgatattaaattttctaatctgtgaatgttttgcctctgtaaaaataaagctttagtgaatctgatgtagcttaaaagtctttataggcttgttaaggacaactctgtatgtttggttgtaatgataataattttcgaataacactgttatctggttttgattttggctgaattatcggctagttaattgaatttgattggcttatctgttagttaatttattatgtttcgctaacggaatactaataaagtgatttattgctttctcgtgcttgtacttcaacgtggcagcttttacattaactcattaggttacgtggtctatgtgcgatggtcgcaaaattttatcttcactttgactatatatgatttttatccttccctttgtgaactgatgctgccagaatatttgggtgtatacacgtgtcacataatcataataacaattactatttgtgcgtttcttatcctgcaaagtcgtgcttgtacgtaagagaatacacagaagcacttaggtgcgtattataagtgcagacttgtatttatttattgctatatcgcattccacatcgttgctgcttgtattgaatgcctttaaaaatgatatttactcatattaattgttttgctttgtcctgcaatacagaag

SEQ ID NO: 104506 - DNA, 1043 bp, Mimulus guttatus
  Intron number 3 from transcript mgv1a010115m (locus mgv1a0 10115m.g) derived from phytozome v7.0 (chr-ID scaffold_41; pos 1524464 to 1525506 reverse strand)
agaagccgtgaacgaggcgaaggaattggcccaaggtgtgtctaatgtctatatatgtgtatatatgtatatacatatatatatctacttgcttgcaacgttgatgatggtgttcgttgagatttgtttcaatctagatatttgtgtcaacataccatttcagccctcgtaaaatgcatgccagagtaatcgacatatagctaaatatgtgatccgatacgtgtgcattacagggttctattttaaagtctgcctcttagggttttagaaaaactatcgtacactcatgctgacgtgctgattgctatagctattggatgtttataattgtaatatacagttggttcggttcacaaggcacaattccacgtgtagtaccttgatcgttgaggctaacattgatttcttttaagcttggaaagtgcaaaatgtgaaaactgtagcaattatcttgtcatcggacgagaagaaattcctcattggttccataattgcactgccataaaaaaaatgaaatggatggactttatatgtaatttaactactataactgcatgagtgatagcatggtggttgtaccgagatatatgtaataattagccgtattttgcttctttgatattattttgtctcagaaactaccattcttgttcaagcatttgtaacacatttcccgagtcatttttaccatctcgattctcaagcatccaatattgtgatgtgtagattggagaagggttgtcgagaatctggttaaaaacatcttgtacttcaatgtttttcttttcaaagttaaatatgtttcttttcttggtttcctaggtaaaaagtggaactgtgattaacccaagtaatcatttccgtctaacaggatatgttacagttttcaccataactccatacttttattaggtgggagctgtgtttagatcagttgaattttttaatttttttggtattaaacgtgactcggtcattacatccataatgaagccgtttttgttgtaggttcaaccttatctttgattgggcactcagcgggt

SEQ ID NO: 104507 - DNA, 715 bp, Mimulus guttatus
  Intron number 1 from transcript mgv1a020141m (locus mgv1a0 20141m.g) derived from phytozome v7.0 (chr-ID scaffold_107 ; pos 314136 to 314850)
gcgaaagaagacgtcgcctgcaagaagaatttttaacgaaaagaaaaatagagaaatggcctagagaagaagacgtgggcggcggatagagaaaaaacaggggaagagaagagggtgaggctgtgagcggcggaagaagaagaggaagaaaattagggttttgatatttaatgtttagtccttcaaaattgtaaatatagagtttggtgacttagtagtttgctaaatgggctccaggcctattctttttaaatatgagatgggctttttcgaaattgaagtagttaatggaaaacaaaactacaatataattaataaatagcaataatttcggaaaaaatcggaaaatttcggaaatattgtcggaaaattcggaattatattcggatcggaattcggaaattccgaatattttgtatacaattccgattccgatccaatttttttcggaaaattcggaaatcggaatttcggaaatcggacttcaaaaactctttccaaattcggaaataatcggatcggaaccggcggaaatcggaaatttcgttccgatttccacccctaacaaggccacataatctctttcgttaacctaaccctaaagctatctcgcttcaaagggcttctccttcaccttcgcccacctcgatttcatccaccactaaatctcccaatctcagcccgcagaaaccgacatcttcgccggagctatagc

SEQ ID NO: 104508 - DNA, 187 bp, Mimulus guttatus
  Intron number 1 from transcript mgv1a020173m (locus mgv1a0 20173m.g) derived from phytozome v7.0 (chr-ID scaffold_108 ; pos 533269 to 533455)
gcttatcgggtttgtttcttttcgacttttaaattatttttccttcacatttttaatcacatgcaaggataatatcaaatttcatttgtgatcatgttttttataagatgattgtatacaaattttgttttttttattctttttctttcgattttgttgaaaagtataggagcgtcttaagctgttt

SEQ ID NO: 104509 - DNA, 844 bp, Mimulus guttatus
  Intron number 2 from transcript mgv1a019959m (locus mgv1a0 19959m.g) derived from phytozome v7.0 (chr-ID scaffold_13; pos 2101263 to 2102106 reverse strand)
ggggccccactctccgtttactttgttcaggttctctatttcttgcattttccttcttttttctttcgaaaattaaaaatgttcattttaatttgtggctctcaaaattaggtgtcggtgcctgattttttattattaatataacggcaaattacggacgtccatgttgtacggttaaattacgaaaaaaaactcattttatttgggtgattacagccaccacttattttaaatatgttttcataaaacttgtgtaattcgtatttaccgaaccaaatcgtgtattcaattcagtaaaaggtataaaatgttggtgtatcgaattttcgattcagttttttaccgatttaacatccctgaatttacgtctgaatgagtaatttcgtaagataatatatagttgaggagtacggctttaattacccgaacaagagtgaaggttttacataatttgaccgtagctctagggttaccgtaatttacccttaatataatactgggactatggtatcgtggcctgtgcaacatttaatgctccatccaattttgtcctccaagtgctaattttaaattaatcaataaatttgaaatcaagcttagatcgtgttcaaaaaaataaatcacaagttacaagatttttttatttcttttctatttattattattttttttttactttcagatgattctggggagattttaattcaattttaaatctcaacaaaaaacttcaattttattttatagtcattttaaatctttaccagtttatttcatcaaattcaaatttttaccaactaactaattaattagctcatccaatataaatatgtgcaggaataca

SEQ ID NO: 104510 - DNA, 750 bp, Mimulus guttatus
  Intron number 1 from transcript mgv1a013254m (locus mgv1a0 13254m.g) derived from phytozome v7.0 (chr-ID scaffold_11; pos 1664365 to 1665114)
aagatattccccgtcgattcttcgcggttttgccggtaattcatgtttagaatctctctctctctctctctctctctctctctctctctctctctctcatgtgatttgaacaaaattgtttctttctcacagaaaatcaccggattttatcaagttatcgtgtcttttctctgtgtgtgtgtggatttaatcaattagccctaattctgatttactgattcagcctccaactattactgatgactggaacactgtatagttggtttgaatgaaaattgaagatcatgcagaaattaggttaacttcaaattgcattaatttcatagtacaaactccactttggtatgcgctgtgcagtttcttcctcgtgtgttttcttgttgggctcaatcaatcaaatcctgaccgttgatcgcagagtctaaaaattcttttggagttaataggttgaccaaaaaggattgcctctgtcacatgaagttttgagtgattttgcagatacgatttcgatttctcatgtcaatgtttatcaattttgttattaaaaccatgacagagttgttccgtagtgctcgtttaatgcttctctcggtggaagttaatcaaatatccaattggatcgcctccttttgctgcaatttttggtgatttttttacgttagctaattttatggacaatttgtggaatagaatggtgaaactctctcttctgcttaaaaaaaaaaacaggaaaaacaatttttaggagta

SEQ ID NO: 104511 - DNA, 718 bp, Mimulus guttatus
  Intron number 1 from transcript mgv1a006809m (locus mgv1a0 06809m.g) derived from phytozome v7.0 (chr-ID scaffold_205 ; pos 206010 to 206727 reverse strand)
aagtatgtaattccttaactgccactgatattttttttgcttcagattatataaaccctaagaatataaggggatgaacttatgatataatgttgttataatgattttaattatttagcttgtctgaatcattgttggtttgctagtgaattaagagttttatgctgttctagtaggagaaaaatcaatccgcaattaaaaatttgaaaatcgagcagtgattgaagcgtagcaaatctagaattggtaccgagtgaaagtttctggattgcgtacttatatgttctcgattaccagttgtctatggtgctatcttcacattcttatagtgcagcgggatacagtgagggatcacgactaatatataatttgattttaccgttcccgttagataatttggttttacaaaatcatacaatttagggaacttgtatcggcatttgggcacatttcacatattttgacatccactgcaatgcatttgaagaagagagaagacgagccgagccgacacttgcatgatgtgcataacctatgttgatgtattatatatatagctaaaccattggctcttgttgttcaatgctgtatcatcgtcttacacaaatgctgaatttcttttgctggttttttttttcgttacgagtacaaatttgtggtagtttctataacgctatctatctctctctctggtttatgcaggaagaggaagatcaat

SEQ ID NO: 104512 - DNA, 491 bp, Mimulus guttatus
  Intron number 1 from transcript mgv1a002605m (locus mgv1a0 02605m.g) derived from phytozome v7.0 (chr-ID scaffold_106 ; pos 520705 to 521195 reverse strand)
gagaactccggttagtgccatgctgtattaattccttttttttttcttcctcttgatgttaatttttttttttggaatttacggaatttatgctatttggttgttcgtttgaacaaaatattcttgcggatggttgaattgtatacatgtaatatattttctgttgattgcttacaattgtttgcttttaggggttttttttttttttttttttgctgttggagtgattaatttttcttcagggtgattttgaatttgagccagtttttagttttataattgagaggtattctagtgaaaagtgtttgtttagggaaaaaggtgattttccctcttccttgaattgcttacttgagattgtgattttcacgataaaaccagttctgactaatgaatttgttaatttaagatggggctgaagtaactagtagaggtgtttttttgtggtctgtgcagggagccatccagaggtggtggtaccgccagtcgag

SEQ ID NO: 104513 - DNA, 770 bp, Mimulus guttatus
  Intron number 1 from transcript mgv11b016592m (locus mgv11 b016592m.g) derived from phytozome v7.0 (chr-ID scaffold_3 1; pos 1852563 to 1853332)
agattggacgaacaattggtgagggcacattcgcaaaagtgaaacttgctagaattccaagatggctgaacatgtggccctcaagcacaaaattgctgatcaggttattctttttaaataaacttgaattcatcaactatttagcattaatgcttggcatggtcaactaacattcttgtctggttatggttatggatttcacagattagacgggaaatagctacaaggaaactaataaaacataccactgttgttcagttgtacgaggtaccaaagattcaatctttctagctaatagcaatgctatttatttatttatttatttatattacttcactataaagtgaagcaacggagggaatatatctatatgtttctctgttgcccttatttatcaacgacaatctcgaaggggttgtatttgtatctcatatttggatgtctgaattgtaaacatttagtacagaaattgccagcagatgcatttaacatcttcacatatgtccatgtagcatagtcttaatatcttatttatctaaatttatttatttttctgctgatgataattagtgatcagttcttccgttattctcttattatttttgaagaactattcttatttaaagatgcattttcgttaaatacttgggatctattgattggacagtttatttgatttttatggccttgtgtaattgattttctaccttttcccgtttcttcgtgttgtgctagggagcatcgactgttacaggcgtaaatttcgatcc

SEQ ID NO: 104514 - DNA, 508 bp, Mimulus guttatus
  Intron number 2 from transcript mgv11b016592m (locus mgv11 b016592m.g) derived from phytozome v7.0 (chr-ID scaffold_3 1; pos 1853418 to 1853925)
caagtgccactgtaacatcatatttcctagaaactgtaagctttaataaattactctaaacattataatactgggcggcgtctgccgcttccgacgttaacggacatcgacggcgccgcttccgacgttgacgggcatcgacgccgccgctcctgccaactacgcgaacgctcgtaatttgatctccaatattctatctctttcttgagccgacgctgctggtaaatccctccccaatattatttttcagattttctgtttgccaatttcctgggaaacgacgccgctgtttctactaaaaaaatccccagtaatttcttttccatttatttttaacccgttcgaaacttttcggccattctggtaggcggggggggggggggggggggggggcatatgcgtttttcgttttgattttcctttttatctcaatagagcctgttcttcccccgccggtgtcgcctccatcgtaggtttcaatacagcgggagctggagttggtggggac

SEQ ID NO: 104515 - DNA, 1042 bp, Mimulus guttatus
  Intron number 3 from transcript mgv1a020414m (locus mgv1a0 20414m.g) derived from phytozome v7.0 (chr-ID scaffold_75; pos 553434 to 554475)
cattggctcgaggcgaactagtgagaagaatcttcgttagaagacgagcatcgttaaaagaatatgccattttttctcaagagctcaatgtaagtatttttttttcctcatcaatcaatcaattcaatccctcatatttgaagtagaaaacgtcgtctcattttgttccctttttttttttccggatagattcactcgaataaaaaattctcgaatcgggatttaagctcgttttcgatcgaagcggttactaaaaaggactgcatgaagaaaagggtaactttgatattctagttattggagatattaatattaaatgatacatttcactaacagcttaagcttttggttgagatggtcattcaacatggtatcagagccaggccaaatgaaaggtcctgagttcgaatcccacagccacccatttaaaaaaatatttcaagtgcaaggcctcaaatgtaattcgcctgcacttgagggggcgtattggagatattaatattaaatgattcatttcactaacagcttaggcaatgtttggaaccgttttggatcttattttgaggaaatatgttttgggggaataatttgagaatgaaagtaatgtttgtttgtattttggaaggagacaaaatacactgtagaagtcaaatcatgtttaaaggtgttagaaaaagatatttttgaagaagaaaattgaaaggtgaagtgatgtttatttgttttttagtgaagacatagcagtcacatcatgtctggaggagagagaaacttttgaaattgttttgagaaaatgatttgaaaagtgtaataaatcccattttgttttggggaaacaatgagaacaaaataaaaacagttccaaacattgccttaagcttttggttgagatggtcattcaacactagtacgtgctgctatacatatgaccaacactagtacgtgctgctatacatatatgctatagtatcttattttccgatgatttcttgatttttcggttgaaggaaaggagtaagcgatttgatcgtgaagaaacgga

SEQ ID NO: 104516 - DNA, 693 bp, Mimulus guttatus
  Intron number 1 from transcript mgv1a006749m (locus mgv1a0 06749m.g) derived from phytozome v7.0 (chr-ID scaffold_2; pos 4080740 to 4081432 reverse strand)
agctgttactgctgtcaaagatcagggcagttgcggtacgaaaaacgtccttcttttaccgtttatatatgtatgttcgatttttttgataataactaatgatatgtatctgcatttgaggtagtatatcctgttttcgactcgtaaagattagttttttgtttactgcgaatcgtatttaggtggtgtttgcgaaagcttttagaaatagattatgagtttttttttcttcagataatctgtttttaaggtgtatgcaaaaccggattttgcttttggttctcttaaaataagctgctttaagctataattttaaaagcaccaatgtacctgctttttctatttaaattgattttccagatttttcgcaaacacccccaacttttagaattaagcacttaatattaacttaactcgcaatcactaacttatgtttttaataagcttttgcaaacaccaccttagtgtggttggttggattatgaaatggatgatttttcgttctggttttcgaattatctatttaggtgtgttgtctttaattctgaatttcggattctttggcatgaaacaagaattggggattattaacatttcgtactgcaattaaaagaaaagaaacggtaataaaagttcgctcgtgtgtttttttgcgaaggcgcgtgctggtcgttctctgctactggagcagtt

SEQ ID NO: 104517 - DNA, 540 bp, Mimulus guttatus
  Intron number 1 from transcript mgv1a002119m (locus mgv1a0 02119m.g) derived from phytozome v7.0 (chr-ID scaffold_11; pos 35910 to 36449)
aacttcccaatcttctgcacacaaaaaaaaaaggtttgatttcaatttattttgtttccctccagttaacttcatttttcatttttcaaagcttcttctcttctcaatattactgtttctagattaggttttttttttttttttttttttcaagtcaaatctccttccatcaatatctatgccgacatcattttacattaatggtggcagcacgtgctacacttttttttttttttttttaattgcgataaactaattcagctacacgcaactcaataattcgctgattttgccactacttgttgcaattgcatcatcggattcgttgatttggtagtaatcgagctacctttgttagtgaattgtggaagcaaaaactttgacctgaaattgtataaagggggaaaaagagttgggtttttttttttttttttttttttttaaaattgaaactttgctgaagttatgggctttacttatgttagaattttggccagttctatgcttattgtatagctacatgatattttacagttggag

SEQ ID NO: 104518 - DNA, 759 bp, Mimulus guttatus
  Intron number 1 from transcript mgv1a005667m (locus mgv1a0 05667m.g) derived from phytozome v7.0 (chr-ID scaffold_2; pos 3467886 to 3468644)
cgatctccgccgtaacggcgtttcctgtattcaaggtttgtttctacgttttctctagttagcagtatgaaattaactaactttattactcgcgattcccaattgaaatttatgagatggagattttctggaatgcattttgttcatgtaattttcagatagggtttttggtttcttagatttatggtgaatctgctatcaattaactacaattattcctgttttgtggattggaaattatttttgctacagatgatttttcggattttgaggacttgctaaaacagaagatattagaaactcaaattgaagctttatgttcaattatacagggaataaaggatccggattaggtttgtaattgtgtatcgtttgttatttcttaaaatagaaaccattatttctactcttcatcggtgattctattaggcctcgtttgggattgttgatgggattggttaggattacgttgtccatgataatatgatatgtgattatcttatgtttgacatttgtgatcatacaatccttgcattcagtagtatctatcatcggattgtgtgacaataggggttgactttggactaaattgttgataaaccccaaacatttgacaaaacttgattgatgttgtctatcgaacctatttaaaattcccaaacaaatccttattatttcagctattagcttcaataaatcagtttacacgaaaacgtatgtactttttaggggacatttccaagaagcaagacgttgaaa

SEQ ID NO: 104519 - DNA, 1031 bp, Mimulus guttatus
  Intron number 1 from transcript mgv1a016825m (locus mgv1a0 16825m.g) derived from phytozome v7.0 (chr-ID scaffold_2; pos 713766 to 714796 reverse strand)
agattgcgaaaagggtggagcttatcaaagagaaggtaattagttctagcttccctcgatttaattactatatatgtaattcatttattcggaaaatttgtcgttaattgcgtcagtgtatttgtcgtcgcacgaaattatcgtatgtgctctttcttcattggtcgggttatgcaaaaggggaaaatttgatcatgaattgcgtcaatatatttgtcgttgcacggaaatgtcacatgtgttctttcgtcattggttggtatgcaaaagggtagtgcgttgagtcgttaaaagttatatttttgtcgttagtagattttattcattcggaacagtggccaagcggccatcattttatctttgagggggcaaatataatactcgagaaaatgacaaatctttatatttaaattaaaaaaaacaagtttttttccaaaaacggtggggggccgtggccccctcttgccttatgctgcgctatcgctactgatttcgaccattttgacgaagggttgagttaaaaggttacgtttggaatattttatttttaacttcatcgtagagttggtatattgtctgtgttttattacatcgtggtgcgtggaaacttaaggctgacaatcttgaaatgcataatcagattagaattctgatttgttcgtttcttcgaattaggtgtgatcagattaaaatgtagcaaagatattcatcgtacttcatataccgtctctgttttcctcacattgtggtttatacaggccgtatatatatacgttatatgcatgatagttattaaattttctttagataacttttgcatttcccacgctaatctaacatgcaccgaacttctgcatgtattataccttctttcacaaccttcgatagaaaatcgaaatctttacccaaaaatcttgatttctcgagcaaacatcatatcatgaatcttgtatatatatgcccgatttttataatcgatactatcgtctcgtgcaggttatcttatcgcaggagaagaacatcaacaaact

SEQ ID NO: 104520 - DNA, 835 bp, Mimulus guttatus
  Intron number 2 from transcript mgv1a015678m (locus mgv1a0 15678m.g) derived from phytozome v7.0 (chr-ID scaffold_109 ; pos 110827 to 111661)
gtgtcgataaaggtgtcacctctgttgtcatcaaggtattctttccactccattaatttggtttatttgtatttttttcaggttttaattggaaattagaagttattcctaaattaatccttcatttggcaaactagtgtattccactattcaaatctccatttgacatgttttcttctaacgaattttttctccgttgattgaatccttatacccccgtacagcagttattaacaattgccggttcaattttatgtttgcgcgtagtaatgtgtgactgaaaagtattaagtgcctgtagatctcgacatttgtagaatgtcgaactgagtagtgagtaattagattctctgcaaaggaatcgagtttcttatgcttccatttacttcttgtgcatctgaatcatttattacttttagtataacctttccatgtatcgatatgagaagtttctcaaggatatctactgagttgcatttttgtgtttgatagtttgtggcgattatgtcaagtaactttgtttgaagctattgcttccggttaagtgtatgcttttccatgtccctttgattttttttgattcatcgtatactcataattaatgagatggtttagaatagaactttgtttccaatacgtgatgaaagcatatctctcagtatttgagaaaggagaaactttgtgaattcctacagataattgcttttgctgcttattagtgctccagatggatctagggattatcgtaaactagtggttgaagcaatgtgctgtctcaaatatgtcgaatttgtttacagggattggctgaccacaaggattcactgggtgcccc

SEQ ID NO: 104521 - DNA, 753 bp, Mimulus guttatus
  Intron number 1 from transcript mgv1a001365m (locus mgv1a0 01365m.g) derived from phytozome v7.0 (chr-ID scaffold_37; pos 802990 to 803742)
aaggaatcacaattaccctgttccacctgcaccaggtaatttttattttatttctttaatctcttttttttcacttttgctcagaacccttttgaaatgcttgagcaatatcacagtgtaatgaaatttattctgaaattaaagactgaaagagtaaataaaaattgaatctttaatgcagaagtggagaaaaattgaatctttaatgttttattagctgaagtggagaaaaattgaatctttaatgttttattagcagaagtggagaagagagtggtttgtcaccctaaagaaaatggaagaaagattgttagtgatgcaaataaaaaacaattccaagttgcaagaagaccagattccggcggaatcgaaggcaagccgataaccctcctagccaatcatttcctagtcgaattcgacccgtctcaaaagatcttccactacgacatcgaaatccatccaaacccatcgaaagaattcgcaagaatgatcaaacagaaacttgtcgaacaaaattcgtcccttctctccaatgcagtacccgtattcgacggccggagaaccatttacagccctatcgaattccaagaaaagaatctcgatctctacattagcctcccgatatctcctcttacgccgtcgaaggttttccgcgtaaatatcaagctcgtatcgaaattcgacggaaaagcccctagcaattacctaaacaatggagtcgaatacgattcgacccctcttcctcaagagtac

SEQ ID NO: 104522 - DNA, 915 bp, Mimulus guttatus
  Intron number 1 from transcript mgv1a021805m (locus mgv1a0 21805m.g) derived from phytozome v7.0 (chr-ID scaffold_26; pos 133452 to 134366)
aaactttgcaaggtctttttcgtcccaccatcatacctatttaatattattatattgctcccttatattcctttatttactacaattgttaattttgtgcatgcatatagctgtttactatattttcttttactatattttttttctaaaagaaagataatcgttaattactgtttctccaattcttctccaattgactcgaacctatgattaaataggtcttaagtgtaaagtgtttatcgacatgctactttatcttgtcatgtgtatagttggtgtaacacactcatgattagtgtataaaatatagtagggaatctaaaaaatgtgttttgtatgtaatttttgaagtttttttagcaattgaaaaattataaaagttgaaatttctatgatttttcgatgcgcaaatacagacggaaaaattgtaattttattcctctaaattggtccgcttaggaattcaatcttctaagttgcgcaaagtttcaatttttcatgcaataactttgtgaaatcagtatattttcgtcaattttttttttaattttttttttcattctcttggttgattagtaaaatttcaaaaaaaaaaacccctcgatttatttcttcttcttatatttgtccacaaaaaaatgattttgcacatttacattgattttgcaacttaaaaggcaaatttgtaatttgtaagtatcatataatcaaattttgaagagtttgtttgtcatatctataattaatagtggaaaataaaaacttttgcacaataggattaaaaatgctaaatctataaagttaatgcaaaaattgaaatgtgtataaatagaggactaaatatcgaattaaccgaaactttaatattccgtcaatgcaggaaaagtacatagtaccggcaaggcccggagtccg

SEQ ID NO: 104523 - DNA, 949 bp, Mimulus guttatus
  Intron number 1 from transcript mgv1a017840m (locus mgv1a0 17840m.g) derived from phytozome v7.0 (chr-ID scaffold_168 ; pos 368553 to 369501)
tcctcatttcttacttcccactcaattttcagctggtatacatgcattactttgatgctaatttacaatttggcgaagcttgcaaaaaaatctcacgagagctctaaaactgaattgatttgatttttatttttttccccctgaaaggataagatctgatgtgtttatcgctcaaattaaagtagacgagtacgaagtttgatttaattttggtttttctattttctgttcaagcttggatatgttatgatatgtacgtgggcaatttttggaaatttgtacttaagttcgggatatttatttctctgccaaatttgtggaaatggaggattattgaactgaaatttgagttaaatttgacatgattagatgtgatttgctactcactgttctgctgagagctgtatcttatctttcaatatgactgtgagatgatttcgagtgtgatagtggatattgttagcctaatatgttatctacaatgagtgaatctgttcagaagttttcactgtattgtaatgctggtttggcttcagacttaagatttgaattagttttcttcatttaaagtttaaatttcaagaggttgtgttagatcactattgcgttgtcagaacctggattggttctgttcttccaaattattggtgtttgactcacagtaaaagttgatgctacataatggtttttttggttaaatttgttcctcagactcaactgtgtttttaacagtactacatctcgtttttttatggagcacgagagatcgtgccaggaaataaaaatatatatcctaatttgaaaatttgcttgaaatagacattattttgatgattgcataaacatacagccttctctcttctcctttctcttggatatttagtttacaagcctgtttatatgattgccttgctccatcagtttattttgattctaaatgtgaacaggt

SEQ ID NO: 104524 - DNA, 723 bp, Mimulus guttatus
  Intron number 1 from transcript mgv1a017767m (locus mgv1a0 17767m.g) derived from phytozome v7.0 (chr-ID scaffold_71; pos 828089 to 828811 reverse strand)
attgagagttgctcattccccaaataccctttaatctttattcgattacaggttttatccctattactcatatgtccaaaaaaaacaaaaaataaaaaataaaaaattatatatatataataacttagggtactataaatatatcaagttaaaaggggactaatctgaaaatcagtaaaatatatacaccttatcttttgggagggtggactcaagtccgccctcaatttactaatccctcccatattatacctatatatctattaaacccacccaagttttattaattagctcactcaaaatccaaattaatacaaaaaaaaaacccaattattattaattagtccacccaaaattcaaattaatgcaaaaaagctccttttctttttttgattttcttctttttattatcatattttctgattttgtcaccaaaaaattctaaatttttttcgggaactctgcccctgaacctccgaaaaatttaaagttcaccctgtaaaacattcctagactcgccactggcctaaaaagtcaacaaacccctttccactttctttgccccaatttctcacacagtcagtcagtcacattttttttttgtaaaggattaaataatttattttaattaaattttgcacccccttgacttaaaacatggattcatgcaagaaaaaatgaaatacagggaggttttacgcaataaaaagaacacagggggat

SEQ ID NO: 104525 - DNA, 469 bp, Mimulus guttatus
  Intron number 2 from transcript mgv1a014507m (locus mgv1a0 14507m.g) derived from phytozome v7.0 (chr-ID scaffold_108 ; pos 23200 to 23668)
agggcttgtgctcttcttcttttcctcgtttgttggtatgctacttttattaagtatagggaaaaatacacttctaatccctcgatttcacatttcgttcttcttttatttaccaaaaagaaaagataaaaataggttcagtccctcgtgcttcaagaaatttatcacttctggtaatttctgtcaatttttcgttagtacttaattacggaatcaaaaatgtgttgatcactgtaaattgacggaaatgacctaaagtgttaaattattgaaacatgaggaactaaatctgtattctgcgaacaagggagaccaaatgtgaaattgaagtaaacttcagggacgagaagtgtttttctttttttccaataaattgtttaaatgaatatagaaaaatgaaaatatttgtgtttgtttgatatgcttatatgtagggtgacatttatcatagcggagatttgtttgttgg

SEQ ID NO: 104526 - DNA, 587 bp, Mimulus guttatus
  Intron number 3 from transcript mgv1a002992m (locus mgv1a0 02992m.g) derived from phytozome v7.0 (chr-ID scaffold_9; pos 3228557 to 3229143 reverse strand)
gagcagataaatatattgctttaattgctgatgtaagtttcgctctcttgaatcattatcaactgcatgcatcaaacctgatttcggttgataattgtgctactctagctttcgagatcaagtaataatcacgcgaaactatatatgtttctctagggccttgtttgggagttatgagtaggcttgattaggggtgtaaattggacggatcggatcggattggaattagcactttcggggaaaaaaaatcaactttttttgtgagtgaaaatctaattccaaatcaaattctaatatgtattacaattctgttcccaaaaagattaaaaaaatggaatttcggaattcaaaatgaaaatattatttcattatcggaaatatatggaacacatgataaacaaaaagggcccggattttaatcaagtttattaagtatatttagtccaaactcagccccctattattacacaatcctacaaatcccaaaaataagacattattaaattatcatcgacatgtattctaataaccgaagttcaagaagacctccattttctttttatctctgacaattcttcaacacgcag

SEQ ID NO: 104527 - DNA, 917 bp, Mimulus guttatus
  Intron number 1 from transcript mgv1a024470m (locus mgv1a0 24470m.g) derived from phytozome v7.0 (chr-ID scaffold_70; pos 372946 to 373862 reverse strand)
gattttggtggtgagtttctgggcagagaaattataacatcttccgctacgggacaagcgatcaggaataataataataataataataataataataataataatggagatgagaatgatgatttgatgagaagatggagaagaagtaatgatgaagaaaaattgagatagtgggttttgatgggaaaataaacactagtagagattcgcatcagcatatataaattagtggctacaatttgaatcttgcagacaaaggtatggagaacaatgctacctgcttcttcttcttctgtggctcaacaaggtactgtttcatcatggatttgtccttctcttatttaactctattattttcttttcttttcttttcttttttctctctcttttttgttttctttttaatcattatcgtttgtttgtagtatatggtatatgtatacattttctttctttcttttgtgtgtagttttatggccccctttttttttttaattttcttttgatttaatttcttcataattttgttttgttgtattaaatacttttttttatggaggtttgtcatatttattcattcatatataagttggtatgtagaatatataatttagagcaactccaatggtaaatataagaattgagttatcgaatactttttcgatatttgagataatattttaatatttatttaaaatttatatacttcaactatagttatcatatcaattggaagtttttgatttattttatttataattgtcacatgtaaatttctaattcaatgtttaggtggttaattttttgataactcaatttccatcaagtatttttagatataaagatgtgaaatattaaaaatacttactcattgcggatttcttttttaattttggaaatcaaatagtagttaagag

SEQ ID NO: 104528 - DNA, 861 bp, Mimulus guttatus
  Intron number 4 from transcript mgv1a006764m (locus mgv1a0 06764m.g) derived from phytozome v7.0 (chr-ID scaffold_195 ; pos 66102 to 66962)
agtacgtacaattgtgattgcactttatttcttgtctaaacaagcacaatttttttttaatatatttttattctatttctttccccaactctgcgcaccatattttttggtttttatatgtcttatgttctcctctttatctttttggagtataattcgcaaaccacccaatctttattggagatgatgtaaataagtttcaagtagatccatatcgaggatcctgtttgtttgtatcttgtctaccatggttctttttctttttttcttttttagttttataatatcatggactcctctcgaaaacatcatcgctatagcaacgaaatatatttaatgtaaaagatcttcttgtttaagatttgtagccaccacttgcaatctattgattgaatctagtcattgattgtgaccgattttttaaagaaaaaagagaaggattcatgatacagattaatgggtattacatccttagtatttcacttaggaatcctcttgtagaatttatcatttgaagttgttaatagtatttctctaataagctaagtattgaaatgatatccagtgaatcaaactacaacacagtgtcatacttgtagagagatttaaccattcgttggttcatggcctgtaattttcttgtggcatcaatcgtgatacttgactgccatgctgcccgtgtatgttcaatttaatatattttgttttttatagttctgaaataaccatttaaaaacactatagtttgttgtcagtatgattattttcttgctttatacaccgagggatctaaaatagttatttcatgcatgattgttcaatcaagtaacgtgtggagaaatacatctgaggaaaagagag

SEQ ID NO: 104529 - DNA, 505 bp, Mimulus guttatus
  Intron number 1 from transcript mgv1a006832m (locus mgv1a0 06832m.g) derived from phytozome v7.0 (chr-ID scaffold_19; pos 1150379 to 1150883)
tcttcgctgtaagctattgcatctaattcatctttttttcctgtaattgcaccttttcctattttgcaacactcttttttttagcacattttttttagtactgatgcaaaaaggtgtattgaatttctaggcaaaaggaggcaagatgcttccttttcttttctaaatttatgtgcagcatttgtgtttattttttatcagttgactttaattcaccctctattggtccgttgaatttgatgcagaagactttggttttattgcaacttcatgtaacgacattgtcgatgtattgtcctggagtcaagttttaatgaagtatatatgtttagtttgaattgtttgtttctatttgcgtacattcggctaaggttgaagcatggttactgctttgggttgtgaaaaaaagttgggttaacttttttttttagatcacttgtttcaaattgtggttgggaatttaatctaattgaggctgctctggtttggggatcagggtttggag

SEQ ID NO: 104530 - DNA, 523 bp, Mimulus guttatus
  Intron number 1 from transcript mgv1a013382m (locus mgv1a0 13382m.g) derived from phytozome v7.0 (chr-ID scaffold_13; pos 286657 to 287179 reverse strand)
ttcaaaaatttctggtaatcatccccctttttacaatctctgttcttccttcagttgatttaattttacattttttttttgccttttttcgatgaaaatgaaacgcttcgaggtcaattaatctaggcttgtagtcactgatatgaattaatatggtatgattactgtgagtcactgatatgaattaatatggtatgatgattgtgtgggttattcgattttgtcagatatagggcgaattcgattctgctgtcttcatatatactattaaacaatcaggatagacagttggttgattgaattaatttgaattgcctccgtaattggcagagatgacctaattttgatgatttttgcgtttttgggtcatattaaaattggctgtaagaaattaattaggagctttcgttcttcgtttcctgtattgttttttggcgtaacgtatggagatgtaattttcttggtatgaattggatttatgtcgataggggctcccaggagcagcaaggtcagcccacagaat

SEQ ID NO: 104531 - DNA, 511 bp, Mimulus guttatus
  Intron number 2 from transcript mgv1a003557m (locus mgv1a0 03557m.g) derived from phytozome v7.0 (chr-ID scaffold_51; pos 393385 to 393895)
aagctcgcaagaggtcatcaagtggaggctccaaggtatgcagatttatagagatgattgtagtttgttcaacttcaaattacttggtttagatggttatttacactgtatgtccatctaatataagagcttgaaatactagaattgcattacatgctttattggcacacaattcatgcatcaaaactggaaagttgaggagttcgttttcttctcacagacacctcgcagattatgaatactaggtcccaattctgtatattgcactgcagtaacaagaatcttaaatcccttgttttcatttatattccccccattttgaggagtagtttttttattttttataatgttgtaattaaaatgtgcttgcatcagtttttttttaatgttaaaagatactgggaactgtattggagccgatgttgtctgtcgtgattacgctttcctatatttgaacccttttctttttctcctttcgttttcacatttgttttatgacactttctgcagc

SEQ ID NO: 104532 - DNA, 363 bp, Mimulus guttatus
  Intron number 1 from transcript mgv1a002919m (locus mgv1a0 02919m.g) derived from phytozome v7.0 (chr-ID scaffold_75; pos 1015601 to 1015963 reverse strand)
caaagcgttgaccgtacctcatctcattaccattggtaaacaaacaaaccaccatttctttagatatttaattttgattttttgaatgtttttcttcaatgtttggtgtttggtatatagtttgatgtcattcagaaatgcattaatatttataatcaattaattaccttctcttgtttgttgctttgatccttgtaaaatgtttcggaaaatcggaaaatcgttttagaaattaagggtctctgatattttattgatgttttgagttggatataatttaactataagatttttttttcattttttttatgggttgaattatttgtaggagttggttcgacaattggttcgggggtttatatt

SEQ ID NO: 104533 - DNA, 1008 bp, Mimulus guttatus
  Intron number 1 from transcript mgv1a009742m (locus mgv1a0 09742m.g) derived from phytozome v7.0 (chr-ID scaffold_344 ; pos 12041 to 13048)
ttatttacaacgaaccgcccgagattctcaacaaagtaataacgagacaacttttttttaattaaattaattaatcaagttaatctctcatttgatttgcaaactattgtgcatgaaagtatggattatttctttattaatctctcaacaaagactagtaggaatatttagtatgaatattttctttgtgggactttttggatagaaagaaaaaataattgggatgctttggatgtagaattttttaattaggactttttagtaattttcccatgaactagtaactatatatataattccatattagtgacatcaaataacttgaaataacaaattttgcaccatttaaaaatgcatcaacaattccctcaaaacgagaatatttgttttaattgcatcaaaaatactcttctatgtataattctaaacgagaaaaatatagttttcatcccttaagtttccccagattttatatttggttgcccatgttcacgaaaaacacatttggttccttatatttcaaaaagttaatatttttagtcatttcggtcaattttccgcttgtactatcggaatcaagcatgtgtacattaatgccttacctaacatattaacggtaaattgacggaaatgaccaaatgtgttaaattattgaaacgtgaaggactacatatattttttagaaacatggaggactaaatgtgaaaccattgaaaccttgaggggggaaaactgtaattttctcaattttaaaacacctagttaggaataaaacaaaacggcgccaaacatatatcgcggaaaacatttcttcccatcgttatttttcctttcttctgctgcgttttttttcctccttcctgaatcccccaaaaaatcctccgattggcttctaaaattgtaagaattagctgcttgagacatagacagaggttttgtggagaaaatcgttatctttcttacaaataattttgtcaattttattcctacagaagctcaatttggtta

SEQ ID NO: 104534 - DNA, 517 bp, Mimulus guttatus
  Intron number 1 from transcript mgv1a012969m (locus mgv1a0 12969m.g) derived from phytozome v7.0 (chr-ID scaffold_98; pos 455800 to 456316)
attagggttagggtatagtaaattgaagaagagaagaagatgatggaaaaagatttatattttaattaaagaagacgatcgtttttaatgataagtaatgatcgaatcttacttattaatttttaatacttttatttttggaaaagtcattaatatttaatatttaattaagttttagttttaagggtatttatgtaattttaataataacccatgcttcgtacttttttaaactggattcgtactaatcatacgtgtcacattcttattggctgatattcaatcgtttgggtccgagtagtacagaccctctcggaccctagacaaccccaaataaatattaaaccgaaaccaaaaaaccgaaaacgaaaatgtcaaaacgaatacatttgatttgattctcttctcttttctttttttaacaaaacacatttgattaagtatattatgttcaaaacaatatgtattaatcttgattttagagtcttgttgacgactactacaaagacatatattg

SEQ ID NO: 104535 - DNA, 613 bp, Mimulus guttatus
  Intron number 2 from transcript mgv1a012969m (locus mgv1a0 12969m.g) derived from phytozome v7.0 (chr-ID scaffold_98; pos 456607 to 457219)
tcaaatcgaagccccgcccacgaacacttacgctggtaaattatctattttatacagtgaaaaatgaaattaatttgaattaattgttttgtttattggtttgtggtcggaagttagtttgaatttttctcctgatgtacttttatgctgatgttgtcgaatgattcaactttgctgcatttggtatatcaaaattatctgatttagttgtagaagatgttcaagcaaattgtccgaaatcgaagggttttccgtttttatcttatttttgttcctctactattacaatcgaagtattcgaaatttaggggaaacgaaaagaagtaattgatggaattgaacttttctatacagttgatttgtttggaacatgatagacattcttatacttgaaatatagtaaagaaaatcgtttactcgaaggtttggagttcaaagccaatggaaaaaaatatagttccgagtcgttaggtcctaatgcacacataaacaatggtcacacatgtatacgcagtacactacgttgatttatataatatatgtcagataattagacttcaatatttttactctctcaggttgcatcaacgaagcagagttttacttcgtttgc

SEQ ID NO: 104536 - DNA, 475 bp, Mimulus guttatus
  Intron number 1 from transcript mgv1a001497m (locus mgv1a0 01497m.g) derived from phytozome v7.0 (chr-ID scaffold_79; pos 316542 to 317016 reverse strand)
cattttgcattcagtcggtattcatatcggtcgtgagaatttcacgattttccagtttttaagtttgaaataaatgtccattagtcgattatttaagcaatccgtttgagttttcgtgtctgcggactcaattacttttggttttagctttaggttcttaaaattcttctgcctcacaatatttcatttaggtacaattgcttttgcacaagatattaattctgtattcaggtgctttgtgacaacaaaaactgtaataccttcagcatccagaatttgatttgggattagttgatgttgattaacttgggataattccagaaacttagatgtacaagatgctaacattgtttgtagcaaaagcctcttgttatttattggtttggtgcgattgttctgagtcttcatttaattgtttttttttttttttttctgtctaggatcattattggatattctgcacaattcatacgtg

SEQ ID NO: 104537 - DNA, 384 bp, Mimulus guttatus
  Intron number 1 from transcript mgv1a004474m (locus mgv1a0 04474m.g) derived from phytozome v7.0 (chr-ID scaffold_1; pos 544067 to 544450 reverse strand)
ctcatcttcaaccctcgtcttcttcttcttctctggtaaaacccccattttctctaacttcaattttttttcttacagtgcgatgaattcgaatctaactatctagctttctcatctactgtgttcgtcttcgtttatggatcctgtgttctgatggatcactgtttcatttgatttcaatttgttaccatctttgattttttgtttttgttttgataattatgcatctgcttgcaatttgataagcctgggatagttgattaaatttcaagttgcttatatgtattatatgtataatgtatgtatctgttatatccattggttgatgggcttattttggataaaatgcattctcacagttaagtttctgaaaatctcagctaa

SEQ ID NO: 104538 - DNA, 600 bp, Mimulus guttatus
  Intron number 2 from transcript mgv11b002847m (locus mgv11 b002847m.g) derived from phytozome v7.0 (chr-ID scaffold_9 6; pos 259154 to 259753)
caaggtctgcttgagtacacttgtttcaactgtctattgcctttgtttttttgggattggtcgttaaatttgtacgtctacgatgatatataaattgaactgttggaaatgaaaaaaaaaatgaaattgaaactaatagtgtgctgagattgaggcaaggaaacaacgatatcaataaattttcccaaaaaatcaaaacttgtgctttgcgaatgatcttgacaggtttggggtatgtattcaaaaccacactcgccccattttctaacgggcaggcatcattcgtcaaatcggggcgggacggattgtgattaacctcctttgcaacctcgtacttcagtaaaaccacaatataacatcaaaatataatgggtgtactcgttaaattcattgggtttttaagagatgggctcaattgccatcgcaagatgggtatacagtgagatggtatcatataggatgttaataatatataaattctgatttgtttgtaagtaatggatgctccccgtggtttgcagcgtgtaaattttttgactgatcattcatcttcgttttctggttcatacatgctgatgcattctttttttgggttcagat

SEQ ID NO: 104539 - DNA, 705 bp, Mimulus guttatus
  Intron number 1 from transcript mgv1a000686m (locus mgv1a0 00686m.g) derived from phytozome v7.0 (chr-ID scaffold_36; pos 1292939 to 1293643)
ctgttgtccgattggaaatcgtcaagctcggctgggtgagtttctgattcttcctttcgattttaatttcttatttgtcaattcaattttggaaaatgacattcgaataagttcttcgttttccccctcatttgaataactccgtggtgttattaggaggcgcatgagtttgggaccctaatttaagatggaatttaatttgagatttctgagtctggtttgcttttttaatcttttcattcaattttttttttactgttttaccttttcgttgagttgagttgttttctccattgacttgttcaattgcccgtttgatttgccctcagaatatcgaatttttaaattatttgcttgggtaaggtgagtttcaaaaaatatatcaattttttatcggcctttactctcaatccagaacattttttgggcattggataggaaattaggtggttcccctcttattttcttgtttcgtttgatttctttctccaaaggggataatgattttctaattttcttgacgattgatttattgagataatatctgaactaagtattgaagaaagtgggtcgttcccgagtgattgttcatgctagttattgcttgcatatctgcatttttatttgtacacatcctgacatttgtgttgtttgacttccatactcttagtcattgatttcatactggattgggacggtgcctac

SEQ ID NO: 104540 - DNA, 932 bp, Mimulus guttatus
  Intron number 2 from transcript mgv1a012092m (locus mgv1a0 12092m.g) derived from phytozome v7.0 (chr-ID scaffold_104 ; pos 639628 to 640559)
ttcagtctaggtatggatttgctagaatgaattacctatctttacgccgcgtctctgtttgtataggtgttgcacagtaaaaatagaaacaaaaataaaatggacaattttttcgattctagccatgtttacctcgtgtttcaaggcattacatgtagaccaatcataacttatttttgtgtgcaaattaagatgtattatttccctatttccctgttaatatgtagtctgttattacgtagcgtttaagcctcttccgtctgcttctaagattcatctccatccccttaaaaaaaaatttagacgtttgtgcacatgtctgatgataaatgttgggagcatgtctcgttctgatattttctcttcttgaaacttcagtatttataatattacttttgtgaaacttcatagacatttattgaaatagctatggaaatatcacagtattggttaaagagcaccttatcgcaaagaacgatgatgccaaactgcaataactccttcagctttctacttactttttaatagtgagagctactcccgtagtcatggtgggaagaatgcagatggattttctaaattctgaaaaatatttgcagagctagttgtgaaaataaatctacttagaagtatgtgatttaaaccctttcgacacattcaaaacttgtgtttgcatctataaatattattcttttccgatggtgtggattaaggaaatagttaagattgtgaaatcaagggaagctaaataattgaaccagcaaactaatgcttgtgatgtactaaaatattacaaacttcaagctaaaatttatcttgctggatgcattatgcctaatatatgtcgtccatgattgaaaatctcaacccagcatttcaataatgtttaaatgtcatgttaatgttaatttcctggttgcggcaattacagc

SEQ ID NO: 104541 - DNA, 901 bp, Mimulus guttatus
  Intron number 1 from transcript mgv1a010890m (locus mgv1a0 10890m.g) derived from phytozome v7.0 (chr-ID scaffold_3; pos 4340646 to 4341546)
acttcgctgtccctgatatttctctcactcgcaaggtacttaattaattactctatctattacttagtaattactactctattttcggtttttattattaatcatgttccaagtttcaaccttcatgcggtgtggtgtggtgtggtgtggtgtggtgtggtgtgggccccctcctccttttcatcactttttgctctactcaatttctttgtgaactagtagtatgcattcacacatgacacaactggaattacacaattaattaattaactaattaaacctgatatttatgtatataattccataatgaatgtgcattgcgagtagatggatctatctatatattcgttaacaataagaaaagaaaaacgaaatagaccatatatattaaattgaagtgattactatgtttttaattaatttatattaataaagcatatatactctcacttaaaatcgtgctagtaattaactatttgaaatttataagtattaaccatgcagtaattaattatcaataccaagctgaattaattatttgtataagtgtttcagaattggcagtggaagatgcctttttggttggaaattggaattattattgaactatttttgactcttacggtttaggcatcttcttgtcaagcattatcaacattttgttgtatctgtttcctacgaatcttcttgtcggggcataaagcaatacccttcatttttattgaactatgcactcaatgattgaacatgtatttcacataaacttgatcaccgtaccatatattagcaaatatgaatttggtgaaatagtttatagtagacatgagaggaattggtagaatctaataaaaagtaattaagtgcagctgggagcggagtttgttgggacattcatactgat

SEQ ID NO: 104542 - DNA, 619 bp, Mimulus guttatus
  Intron number 3 from transcript mgv1a011779m (locus mgv1a0 11779m.g) derived from phytozome v7.0 (chr-ID scaffold_104 ; pos 771828 to 772446 reverse strand)
atccgcagggtgcagagactgcagttcttctttcggtatccttctcaatcccctcaagtctttctatatgtcaccttgtagcatgaaatcacttgaccaagtatggtatttacaaggaaacactataaaatgtgcttttttttaatttctcacaagtgagatctgctgtacactttcatggatatggtgtgtgattgatatatcagaaactgtctggactagctgctgggaagttatttcttccatgattcttatttgattaatcagtagaggttttctgggagcctagcctattaagatttttcctttcaaatatcctttaattttgtaggtaaataagcaactaatccttattgagaataaaactcataatcaatttctctgatctaatgttttcttttatactcttgtttctctttgttgtatcttttgattgaatgttgtttgtttatcttcattttatttttgctattttggttaacatacagaaagagaagtaaaaataaagtagaagagttttacttattccgacaccatttctgattctgaaattcttaggcttttgccctttcattattttgcagggagctacaattgttgaccagtcagttaatattgc

SEQ ID NO: 104543 - DNA, 945 bp, Mimulus guttatus
  Intron number 1 from transcript mgv1a008990m (locus mgv1a0 08990m.g) derived from phytozome v7.0 (chr-ID scaffold_51; pos 1249653 to 1250597 reverse strand)
ttccttttaatcgccccgcccacagagagctgcaggtatgtcaatgtcaatgatttctttctactctctgttcatgcattttatacgtagcaaagtgcgaccttttgtttattttttttgggggtgataactgctagtgagctttcagtaaatttatcgaattttcggagaaccctagcgcgtttttttttctagtgtgaacgcagaaacagtgatttcgtttggggaaaaacatatattctgtttcaaggtatgaattacgatcttttacaagcaatggaagcgtaatttcaacgctgtgatattgtaggcgatgtttgaactaattattttctgagaaacttggaatattttatgactaaaatccatggagtctattggttctggctttttcttctttcgtcatcaatttgttttagtaatcagtaattgattacagtgaatatttatttcttacttgactttcgactttcgactttcactctgtttttttttttctcttgtaaaataaatggtaaccaagcaaatttgatttattggacgtcgattcgattattctctctgtttcaagaaggaaagagttttaattattgttgaagatagcgtaaagattctcctgctctttctgtgttatattttctagccttttacttgaactggttttttattgttttccttttctttcacttagattccttcaataacttcttccgcctattcttattccttttctttcagttagattctctctgttatattgtgttagcaattcttgttatcaagacatttttattcttcactttgatctgtatattttgttggtttaggtgctggtctctaattcttaaccttttatttttcctagtttcgaacttcggttttgttttggtgtgaatgtttgatttggtttatcttggcaatcagagactgagaaacggataatat

SEQ ID NO: 104544 - DNA, 424 bp, Mimulus guttatus
  Intron number 3 from transcript mgv1a014318m (locus mgv1a0 14318m.g) derived from phytozome v7.0 (chr-ID scaffold_233 ; pos 222619 to 223042 reverse strand)
cggtagcacaaacggagaagctattgatccaaaaggtataatgaaactaaatactttttatgtttacttctcttataaaattacctcaataatttaatgaagttgtttattagtgataagtggattaaccaaagacatgcaaccgcgtcggaaaaaaacattgatttcctatgccattgaatcatgatatttgattttgggctgtactataaatagtattcgcgtactttcttaaggataaataccggaaataaagacacatgttgacaggtgtgtattctttatcgataaagtgggatttcggacataattcatttgcctttcatatttaagctagaatcttcatcatccgagcaattttttaccgttggatcatttatttattttttcatttctttttgttttgatggtgcaggtaatccag

SEQ ID NO: 104545 - DNA, 772 bp, Mimulus guttatus
  Intron number 1 from transcript mgv1a010335m (locus mgv1a0 10335m.g) derived from phytozome v7.0 (chr-ID scaffold_13; pos 1293277 to 1294048)
gcctcgtaggccaagctgttgaagctgctatcaaggtgcgtgtgtttttaggtgttcgtatataaatgtatgtacatcttcctgccagcatttctcttcagcttcatttaatttgtttgcaagtgatgatatgaaatgtttgtggtcctttttttttagaattttaatgtaagttatgtgcggaatatctgtaaattgagtttttctttttccttggctgtaaaaatcaaattgagatttgaggttatacgaatgaaggacaacaccgcgcacgttgatcactctgcagattatctttgtttgttgatgcaacgtaattttctgatatagtttattagtataatatctttttaatttactttatttatcctcaaattttttaaaattgagtggatttggtttccagttattttgatttgcctcttcaatttcctttactaagtgaggatcgaactggaatactggatgcttctgccctattaattaatatgtgatggcggtttgagatttgcttccgaccaatttaatttttgaacggcctatgataatcattatactttttctgtcaataatgaaattagcctaagaaaatgaagaatactgactgtaataaccactaggaaatatgctactgctactgtacattagtcgttgacttgtatctcgtagttcatgcagttttaggcctttattagaacaacaccactgatcagttacttgtactttcctgattgcagagtggataccgtcacattgactgtgctcgagctta

SEQ ID NO: 104546 - DNA, 308 bp, Mimulus guttatus
  Intron number 4 from transcript mgv1a012576m (locus mgv1a0 12576m.g) derived from phytozome v7.0 (chr-ID scaffold_4; pos 1991265 to 1991572 reverse strand)
ggttaacttcttcttctctggatttgtagcaggtttgttttccattccttattttcttgtttattctcgtccttacgtattgccatcttgatgtgcatttatagctgagttcgcagttatagattggcttctatagattatgttaccattcgaattattggaaccttttgatactgaaattaaatgtcatgtatcgtcggttccctttttggatatccatatattaacaagattacaaggctgacattattcgatgcacattttcttttccagcaaagattccgtttccgcttactcagagattcagg

SEQ ID NO: 104547 - DNA, 650 bp, Mimulus guttatus
  Intron number 1 from transcript mgv1a000024m (locus mgv1a0 00024m.g) derived from phytozome v7.0 (chr-ID scaffold_27; pos 1863695 to 1864344 reverse strand)
aaacttcgagcagtaagtccgaactctattgcttttccttttttcccgacttgtgttattattttgattttttctgttaagaattaagatggtgtattttgagagccactgtttcgtttaactaaattagaactgaaaccttcgagttagatttatggagctggaatatttcggatgatccagatgaaattcgacgcattagatcattaaatatattctccatctccccttcgatcgatacttagtgtactggagtttctatggtgtttgaaatgtgaagaatggcaaactattgctaatcctctctttcactctcaatccaccccccccccccccccccaaacaactcacacacacacacacacacacactcttctcatgttacatgatgcggaaccttttaattaggttgacttatatactgataataaccatcctatgtatttcataccttaatatgaaacacatgtttatgctatctatttaggttggagttaaatgcatttagccacctaatgagtgctttctttacttctggcaacctgcaatttacgtccacccaccttccctctctctctttctctatagaatatgaacttatttactgagattcaggttctttttgttggagccagactgctatactcgtg

SEQ ID NO: 104548 - DNA, 497 bp, Mimulus guttatus
  Intron number 1 from transcript mgv1a025502m (locus mgv1a0 25502m.g) derived from phytozome v7.0 (chr-ID scaffold_244 ; pos 20636 to 21132)
gagggaagcgagtcgccaagtttcaaaccaagaaggtgagttctctccaaaaaccaaattaattaattattttttcttttctttttcttcaatctgaaccgattgagtgtttctttttggggaattatcagaattatttattccttgattgctactatttgtttcttcaatctgtaatatacatatgaatgggtttgtgattatgcccatggcagaattgggccacattcgataatatgtagatcaacggatcaaatccacccaatgtaaataacgagatgtagcatctaaccgcatacgtgtcttcttgtgttatgccgtttcttcatgccttctcaaaattggaccgtaaacagtttgtgtgcagatctatggtgtgtgattatatggtgtatttcaccggatgtagaatcacaaaagccccggagtgttataacttatatatctttcttttttttttctttccctatagcgtgtcgaggtagtttacggcgacg

SEQ ID NO: 104549 - DNA, 637 bp, Mimulus guttatus
  Intron number 1 from transcript mgv1a013241m (locus mgv1a0 13241m.g) derived from phytozome v7.0 (chr-ID scaffold_4; pos 1672103 to 1672739 reverse strand)
ggaaaatcctgaagctctagcaagggagacagtatgtatgtcatcttatcacttgaattttgtcattttttgtgaagtgtaagtcaataataatgctacaatatttcttcacatttttgtttccctttttcttttgaaatatctttgttgggaattttggatatgggggaaaatacatagagaaatacaagaataaatcagcatgcactctatatcctgatttttttccacgttgaaaagagaggtagcagaagatgcatcttatttggttgttttttatgaaaaaaaatgattgcgaatcttctctctttgtctcttttgtgatttaattatttactccttttgagttgctcagttttcctgtttttaagattcttttgtttcatttatgtaatgcggacaaatattaaattcaagagggtaatgaaaactcattctggcaccaactacgtttatgtaaaataaaagaaagattggtttggtaaattgcataagtagcatcttgcagtttgtattagtttttcgatcctacattttcccagtcaagctctatgtttactgccaagtaactccttttttttttgtttacctcattgatgctgtgacgcagttagtgttagtgaaattgaagcattat

SEQ ID NO: 104550 - DNA, 846 bp, Mimulus guttatus
  Intron number 1 from transcript mgv1a002215m (locus mgv1a0 02215m.g) derived from phytozome v7.0 (chr-ID scaffold_24; pos 1010196 to 1011041 reverse strand)
tctttcttcgggagcttatcagtaactcatctgatgtaagctctcttccataacctcttttagcatttatctgttgtagatccagatttgatttgaatattctgcagtcgtatgagtttgtttgagatcggtgttcacgactgtgcgtattctgagttttgattctctctcaaatgaagttgtattttttactgttatgtgtttggatcgtccttgttggttaattgtgaatggtaatttgcttgctcttagatattagggttgatgcgtttgaaaacttcgatgttacagaaattgattcactgagtgtataaggatgtggtaaatggccaacctgagatcacggattttgtgctatgatatggttattctgtatgtttttgttcaatagtgtaatcagataatttaggatgtttatgtgattgcatgaatttgctcacatttagtagttatttgggtttcaaatcaatagttacttttgtgatgaactgtagaaggaagatatcaaatcttctaactgcataaaaacagatgattatgatcttgatttgtacttctacgttctgtcatgttccatgcttgtatttttgtacatattcaatccgaagtagatgtttatgaccttgacttgtatttcactgtgtataatgcctggtctattattttcagttgtgtatggtgctgatttttttattgttgtgctgtagtaaacatgttattgtgttctatgatttaatgggaaagttttctgttacatttgaactcaacgctactactgtttccttaatttgttcttccattttgtgtttaggccttggacaagatccgattcgaaagtttgaccga

SEQ ID NO: 104551 - DNA, 793 bp, Mimulus guttatus
  Intron number 3 from transcript mgv1a008619m (locus mgv1a0 08619m.g) derived from phytozome v7.0 (chr-ID scaffold_116 ; pos 329905 to 330697 reverse strand)
acaatccaaccgaacaaagtaagaggttttacttattcctggatgtagtgtttaactatcttcttggcttggatgaagaaatgattttgtgacatttcttagatgatgatgaatcatatttttttcttggcttgcttatatgatgattccccgttctaccgtaaattgatctatcaatacgtagattagtataaatatattttttttttcttagtacttggcttgttagaactatactaaggcctgatttggttgggaagattagccatgattaacgaaataattggaccttgtttgatgtttggtatatccaataacttcccgggtcgacccgtaaatattatgttatcatggcttatattgcctttttcggagcctttttttattggaccttccatggtccaatagttttaggccccgtttggttgccaagataagccatgattaactaaatagttggacttaatttgatgtttggtatccttaataaattgccacgttgacccccaaaaattatataatcatggcttatcttgccttatcttggcttatcttgccttctaatgagttttttttgttggacgtttcaagctccaataaaatagttgggtttcattagattatttaatcttattctggctaatcttatgttgccaaccaaacggggccttattagattatttaatcttatcttggcaaccaaacgaggcctaagactgattaattttgacatttctctcgttttttggattgagtagctgtggcaaagcttgggaatacgtgtttagcagct

SEQ ID NO: 104552 - DNA, 761 bp, Mimulus guttatus
  Intron number 1 from transcript mgv1a001833m (locus mgv1a0 01833m.g) derived from phytozome v7.0 (chr-ID scaffold_55; pos 260261 to 261021)
cttcaatcaaatctgactacattgcccgccaacaggttcgcttttttcgcttctaggttatataaattctgcaaattttcgatgaattatcctttatttttccacagtaactactcgggtttgtattcatatgccacatttctattcagtcatgtaaaatctaggttttgggaattgagatatttggggattgggatttggagatattatgtatgggcaattttataattgggattgcaattttctaatttttcattctggatttaaattactacttgaaagattatactccctccattccattttaattgtctttctagagaatttttttcatttcaaaataattgtcacgtaaggattccaatgaagtatttattgtgttttctcaactatgcccttattactattaagataattaatggttaaacattaaacatttaataaaattggttttttagtcattttactatgatttttctagaatccatgcacatttattagctttcttaatatgtgtgaattaacccaaaaagacaattaaaatggaatggagggagtaaactaatatttctgaggtagcctttctttaacaatcaccacttgtttctatttttttgttaggtagtaggaggttggtcttctggtaattttgatttcagctactgtgattttttttttaaacttttaccacattacagtgaagaatagttatatactcggtgatgaacatttttgtttattttcttggtattaggcgaacg

SEQ ID NO: 104553 - DNA, 1043 bp, Mimulus guttatus
  Intron number 1 from transcript mgv11b019660m (locus mgv11 b019660m.g) derived from phytozome v7.0 (chr-ID scaffold_6 ; pos 1728038 to 1729080)
gtgcgtggtttccacaaccatctggtgagcatatttcattgtcttcttttttgaatatatatatatatatatatatatatatatatatatatatatatatatatatataatatactatacatattccactgtttgaaagttttagtaaaatgtggtagcttaatttcgttacatggtaattggtatgtgaaactgcttctgttagattttttttttataaaagtttaggcaatgtttggaagcgttttggatcttattttgatttcattttgaggaaatattttttgggggaataatttgagaatgaaagtaatgtttgtttgtattttttggaaggagacaaaatacactgtagcagtcaaatcatgtttaaaggtgttagaaaaatgtattttttaagaaaaaaattgaaagatgaagtgatgtttatttgttttttagtgaagacattttttactgtagcagtcaaatcattttactgcagcagtcacatcatgtctgaaggagagataaacttttgaaattgttttgagaaaatgatttgaaaagtgtaataaatttcattttgttttggggaaacaatgaaaacaaaataaaaatggttccaaacattgcttaagttttcgtctggggtttctcgaaccgtgagattagcggccttacaaagtcataatttatacaagattacgtgcggaaattatatattatatgtatatcatataatatatatgattttttttcttgggatatatagttacatattagctcgagctcctatactataccactaaaacgattatcgaccctgtaattataaaatgaatagtggttcatatggatacctatcttttgcacttttcgacatataattagaggtataatatgatgacgaaaaaaatgtaattatcccggtttttcttcgttgaagagatgactgcacttttgtaattgcttggttgaatcatcaaatcccaaatataacctatcattgttttgcttgtaataaagaacctgccatcatctttctgtgagaagctaaaaga

SEQ ID NO: 104554 - DNA, 634 bp, Mimulus guttatus
  Intron number 1 from transcript mgv1a016770m (locus mgv1a0 16770m.g) derived from phytozome v7.0 (chr-ID scaffold_13; pos 710778 to 711411)
aaagaaaagaaatcggaatcgagaaaaggaagaaagtaagaaatcgatcagaatttcttttcgaaaagatgcttattggaaaaaaaaataaaacagaaaagaagagtcggaaaaaaaaaagagagagagacgatggagagcgagatacgagatatagaggaagagagagatgatagattagatatatagagagatatacgtgaggttggagagaaattgagagtgatatatgggatttactttctttttaattaagggtgttttatgtaaatgtactaattattttattttatttatattattttattttgtcaaaggacctagacctatactcatctaacaattaggatccccacctatataagtccagaataaggggttcccctaattgtaaacaacaaaaatatgaaattggaaaaaagaaaataaatagaaagaaattggtggaatgggctagaaacccaaaaaacttcaatactattgggctgttaaaagaataatcaaccaacttaaattaaaaaagtcaaaagtccaatttaagttcagccccctttcacagtccctataaaaatccgtaaccctaattttcttaattgaagaagactcgagctccatttccactaccggcagccga

SEQ ID NO: 104555 - DNA, 299 bp, Mimulus guttatus
  Intron number 1 from transcript mgv1a005514m (locus mgv1a0 05514m.g) derived from phytozome v7.0 (chr-ID scaffold_11; pos 187369 to 187667)
gcagccagggaaggttagtgacgattacatccgacgtatttgaattatcacgtaactaaatactgtgagtttgttgcttcttttggtttgattggcaactgaactgagtgtgtgttttttttcgaacttcagcttttcaaccataacgtctgctggtcataagaaaatcaggcgaaaggtgagcatttttaaccgaatttctgttaattgaagacaaattatgccctatgataggtgatatttaatgcgtttccacatctgcagagcaccgagtcatctgggaaccgtatcaaacggca

SEQ ID NO: 104556 - DNA, 1054 bp, Mimulus guttatus
  Intron number 2 from transcript mgv1a005657m (locus mgv1a0 05657m.g) derived from phytozome v7.0 (chr-ID scaffold_106 ; pos 506362 to 507415 reverse strand)
agtgctgtcgccggtgctgtcaattcagagttcgggtaagttattctttactattgttattattatatgtgatttgactgactgcatttgtacaatttgctaaaacgagggtttcatgtacaattattatttttttatatgaggataagtatatatagtaagattcacaatgtgtgacgacactaactaactaatatagaatttttgtaatatttttcaccatcatcctaaattagatgctacacatggttaatctttgaacagttcaaattttgttaatataagtacccaaattatttataaataactaggtgtagtatttaatttctcctactatatgtattagtactttcttcgtttcgttttacaatatctgtagttttttttcgcacatattgagaaataatatggtgtaattaatgtttggaaaaacacattagaaatactaaaataaactgtatagtttaatgggaaattaaatgggttgataatatgatagacttggattaataaggtaaactattaaaaaatgcactactagaactagagtggcaaataatatgaagaaaaaaaataataataatcatttaaagcaagaaataatttgaaatagatgaagtaaaatagtttccggtatacactcattgcaactagtttctgctgtttaattttgtgtgtgtgtgtgtgtgtgtgtgtgagagagagagagagagagagagagagagagagagagagatttaaaaaagagatgaaaagagtgtatgattgttgcatgggctttttctctacccaaaaaaaaaagaaaaaagaagagaaaaaaaaggtttctttttgagttgaagtagttttgcatattgggattcagtatattttttatttgaaaaagctaaatctttttttctgcttttctttatctcaaagcactcctttcttcctttatgatcctgatcatgtgcctaatctttttttctcgtgtttgttgtcttctctctttttcctcgtacgccacgccatcacagaaccgccggaaaatcatcagattcctcaactgcaa

SEQ ID NO: 104557 - DNA, 625 bp, Mimulus guttatus
  Intron number 1 from transcript mgv1a005347m (locus mgv1a0 05347m.g) derived from phytozome v7.0 (chr-ID scaffold_87; pos 145501 to 146125 reverse strand)
taattctctgcattgtcttgtaataataatattctgtaagtgcccttctcctccttcaaccttttcatgtttgaattattattatttttttttttaaagtatagcaaacttccaaagatcagttttttattgattattttttcctattttcttttcttgttactggattttgttgttgtaattaaaaaaataaataaaaaatggactcttttttttttttttttttttttttttttgtgtgtgtgtaaattgatgaatgtttgttggttatttcttgatatattcacttgtggcatgcattaaacgtggtaatcagtgaggaagattgcttgcttaaattatcagctatttttttttttttgtggtgacagtatgtaataattttatttatacaagaaaatactgcaattcagttaaattatcagctaattttcaatgtaagaatctatgtaattccattaatagaatgaaatgagtaataaaaattgagtctttatcatttggggttacttttagtgcatatagagttagttatacgttgttgcattgtcatcaagctctgattttgatcttgatttaatgttcgattcaacagaaaaagaaaaaaaaaagttgggctaaatta

SEQ ID NO: 104558 - DNA, 916 bp, Mimulus guttatus
  Intron number 1 from transcript mgv1a015452m (locus mgv1a0 15452m.g) derived from phytozome v7.0 (chr-ID scaffold_143 ; pos 255249 to 256164)
tctagggtaagattgaaattacaagagaaaaatattttcatgtttctccaggatatatgaatttcgtttctgattttggaagtcgagtgtttgttttgttgagggaaaggaacaaatgtgaaaaagggatgtcttagtgttgtgtcgtcccctcttgtcattcacaactgctcttctgcaatacttttatcattgtcctgatcttggcttctggcgattcaacagcgagtgtgtaattcattaccagcttgttttccgtaatcatttgtgtttcgtgtaacatgagaacgccataattgttgatgaataggaggtttaatcagaagaaattttgtgtgtttaatttggtgatgttatttttgttatcagtaatcgagttaagccttccagtcgtcaattacctaagttgtgtcaacgagtagaaatgtctctaagtaggtctggcaagtattgtattatatttcttctaaccgagaagagcgcaatcagaataaatcagtttcttgcaagtcacaaaattttctgatggtatcttcatatggatcctgaatgatagatcacatttgaaaaaaaaaaaaaaaaaaaaaaaaaaaaagccgactgataatctgatacagtgctggatactattctacatgatttgaatgttgttttcttccaaattatggtttgtaatcatttatatatttatctcaatatctttaaagacttgaagatagcagcggcacagaaaattggcttctacgtccagttggagaaagtaatctgcagctatttgccctggtttcgttatgggtatcgagcaaagtaagtaaatgttatttactattccagattcaatatccatctttcttaacctaccataattcactgttttgcaggcacataatacacctcccctatctgttaaaacctt

SEQ ID NO: 104559 - DNA, 408 bp, Mimulus guttatus
  Intron number 2 from transcript mgv1a018334m (locus mgv1a0 18334m.g) derived from phytozome v7.0 (chr-ID scaffold_235 ; pos 38151 to 38558 reverse strand)
gtgcctaatgtagcggcatcgattatgcaaacgctcgaaaatcttggcattacagacaccgatggtgccgagctaaggaatgtgacttttggattcaatgaggtaatataatttgtttcttgattcttttcaaacttttggattttttgttgaatatgtataatgtatatataattagaaagaaaaacatttgtaattttggtcatctatgttggtctatttagggatttactcatgtgagttatattatatttcagtttcgcatgcaataaaattgcaaatttagcatttcatgatgtggcatttgatggattttgctggggagttggatgctatacctggttatttatatcgggtggatttaaactgtagatttgattaaatgttacccactaatcgcacatagac

SEQ ID NO: 104560 - DNA, 677 bp, Mimulus guttatus
  Intron number 1 from transcript mgv1a002882m (locus mgv1a0 02882m.g) derived from phytozome v7.0 (chr-ID scaffold_126 ; pos 452656 to 453332 reverse strand)
gttcaacaaggtaaaaattaagagatcgcgaagcttttcagttaattttgaccggattttgatctgtgagatctgaattatgttgattacttggtttgatgatgcagattcgacagctgacttgtttttaatgtttatttttggagttgcttaattttgttgttgctgtttgtatttgtgcacaagtttaattcagtgattattgtgaaatgtgaagtatgtggcctgctagtgcgtatattggaaagaaaagcaaaactagttggtattttcatgtgaaattaagaggacatgaatgtatagtagggaaataatttgaacatcggcaagtgcgttagattaattaatatcggcaagaaagtttttcggctttaacgtaaaaagtaaagtaactgtgcataatccttaatccagattccatgtttgttctcatagtccacggaaaatactgttaagcattatgactttcttggatttaatcggatcagagttatactgtcgattaaataaagccaacttaaccttattccaacgtcacatggcaaattaagatttcttctgtcaacaacattgtattttcggcacttttgtttattttttctctttttatgaggtaagtcaacatttcaaaagattagttcacattttatgttccattatagggaactgcattttcg

SEQ ID NO: 104561 - DNA, 400 bp, Mimulus guttatus
  Intron number 2 from transcript mgv1a008073m (locus mgv1a0 08073m.g) derived from phytozome v7.0 (chr-ID scaffold_75; pos 440938 to 441337 reverse strand)
catgtaatttttttttaccacacgtgtatctatctgtttgtttacttactgatgacttataatttcattgtccaagatttaatttcctcttattagcagttcaatttgcgagttatttcgtaaacaaactatgttagtatgccagagttagcatttaaattctaagggggtcgttttacaaaaaaaacatactggccttgtggaatgtttggggtttaaccggctggattggttttgaaaatgaagtttctaaattttcttcacttgctggaaattacttgatttattaacctccttagttcttgttaacgtccgaagatctgtgcttttaaaaccatacttgcttgattagttcttttgatttgagaatgagatctctgcttattcatgttgtgcagag

SEQ ID NO: 104562 - DNA, 474 bp, Mimulus guttatus
  Intron number 1 from transcript mgv1a008073m (locus mgv1a0 08073m.g) derived from phytozome v7.0 (chr-ID scaffold_75; pos 441405 to 441878 reverse strand)
tctccgacctcgtcgtcgaagttcgcgacgcccgcgtaagaatcgccggatgtttacattgttttgtggtttcaatttttgcatcaagcttactaagtgtttgattatatgttgcagtgagtgagcttagtctaacgtgagtgattgttacaatgattcaatcatattttttattcttttcaggttgtcgaatttcgaagtcaatttcatgtacagcttgaatgagtgttgaagctttatttgttatgttaacaaagctttcacgaatgatatggcgataattaaccttgaatcatgattaacatgttccttctttcaagcatttgtttatctgaataaacgaatagggtgttcgactaaattaactcatacattgtagatacagttcgaccaattctttgttattgttttcttattcttgtttggcaacattttgtagataccattgtcatctgcaaaccaagaattgcagag

SEQ ID NO: 104563 - DNA, 579 bp, Mimulus guttatus
  Intron number 1 from transcript mgv1a002295m (locus mgv1a0 02295m.g) derived from phytozome v7.0 (chr-ID scaffold_197 ; pos 452225 to 452803 reverse strand)
gcaagggtatgcatattagataaattcgaatccgttttctaagtgatgatttcgtatctcttagagcaactccaatgctaaacatcaaaattggattatcaaatactcatttgataattaagataatattttaatatttatttacaatttatctactccaaccatggttatctaaatcaataatcaattggaagttttttagtggttttatttgtaattgccacgtgtcattttgtgattgggtgtttaggtagttatttttttgataactcaatttccgggatgtatttttacattcaaagaggtagaatatcaaaatacttacccactttgatactcccattggagtggaaaattttaattttggaatatcaaaaaggtggtttatggatttgataatccatttgatactcccattggagttgctcttagtatggttggttaagggttaagttgactaccgttcccaaaaaagaagccttttttatgtcattaatatctgtgcatgttggaaatatatgaaggaagagaatttgaaattgtttgatataatgcagatactacatcaactacaaacta

SEQ ID NO: 104564 - DNA, 1019 bp, Mimulus guttatus
  Intron number 1 from transcript mgv1a003339m (locus mgv1a0 03339m.g) derived from phytozome v7.0 (chr-ID scaffold_40; pos 1262843 to 1263861 reverse strand)
caactcgtcaccccctggaccgtctccgttgctaggtacctacaatataataataatatatgatgctacactgattcttttttttttttttttttttaccgcttcgtttttatagttaccagtgttgaccttttctgtttgttgcaacaatacagcatgaaatcaagctatattttttgattttttttactttctgtttttttcaatggttttaaccgtctaattgattgattatgatatatggctgtagcctttggttcttttttagttgtgtttattttggcatttgtcagcatttaatttttaagctagaattattaggttgttttgagataactgatggagtttctcattatcggagcccggattttaagagggtgtttggctaagcttaaaatttattttaaactgctgataagacgtaatacgtctgataagatggtttaagagctgataagctgttacatcttattttaggattaatttttagagtatttggataatgagcttatttcctatttttactcatcgtaagatcttaaataaaaaggtgggtagatgtatttttttttaagatcttatttgctgttcatcaacttattttataaaaaattaagatttttttttttttaattaccaaacactttggaagaacttataagctctaaaacatcttataagcaccttttaacatcttataagcttagccaaacacccgctagggggccgcgcgaatgcattaaaaacattatgagaggggccgttattgccactgcacacaccaaaaaaatatatttctatataaattaatggtgatttaaggaaatgttgggggggggggggcgggggcgcatggcccccacccctatgctggctctgctactattgaaccattgatctaagtttatattagatttggatttgagatagatgaaccattaattggttaactactttgaggttaaaatgatcatcttcttaagtttgccgatttttgttaataaaatagcggttatact

SEQ ID NO: 104565 - DNA, 800 bp, Mimulus guttatus
  Intron number 1 from transcript mgv1a015228m (locus mgv1a0 15228m.g) derived from phytozome v7.0 (chr-ID scaffold_89; pos 640390 to 641189)
gacgtagattattgaaaacttttacggtgcgtataaatttctaaaccttttattttcatattctattaaatataaaggtttctaatatttttacacttttctaaaaattctaaaatcaaaattaaaatgggtaaattatacccaaccctgaggtatgctaaaataacttcaaggtccctctagtaccgataattacaattattcttgaaacattgttagaaactctaacggaataatgcatttgataagttattccgttagagttctaatgaactattaatttcaggctgtggtggaggcaacatagagttaggggtgacatggttctcctaacatttcttaaatctttattatttcatataagatttataaattttcgtctaggatagatattaacggccccgcgagaaacaaatatagtgcatatcagcccccatgacataaaatcttggttccggtaattgttttaagggtgtgactgtaattaccaaataacacataaaccttaaaattaattattttagcatatcataggggtgtaagtgtaatttactcaattaaaaatagtacattttagcaactctaatatgattagacttcttgcacaaccccaacactcatacttatcttctaatctaaaaattccaatatgtatcttttattatttttaaatatatatatatatatatatatatatatatatatatatatatgtatatatatatatataaaagtgttttgctttgttgctaaccctaaaattcgatcaaaagaattactgatgaagaaaaccacactct

SEQ ID NO: 104566 - DNA, 831 bp, Mimulus guttatus
  Intron number 1 from transcript mgv1a016530m (locus mgv1a0 16530m.g) derived from phytozome v7.0 (chr-ID scaffold_211 ; pos 290077 to 290907 reverse strand)
ccctagttaagcttggaatctcaggtaaaaaagttttcttattaatttgcacatatttatttatttatatatgcttctgttcttcttaattcaactttttgatttctgtactctgttgcaagattgtggttaagcaaattttgaattatatttctgtttgtgctttctttgtttatcttttgtcgttttgtgcttggttaatacttgcagagttatgtaattcagcctaagtttcttctgcaatgtttttttttctttttatgtctgagtagtgaaattctagcccccttctgcaatagtcaaattcaacagaatcttctagattccgtggaatatttcttgtgcaaaaatgctgtttgtgatgcaacacaatctgatatttacaagcccagaaacacattttatatgatcatcttgtttcaaaatgtggtgttcgaatggagtaaaacgggtacaaacttgagaaaaattcgcataatctagaagattccactaaattggacaccgtatggatggacttgtaagaagatttatagttgagggggtggctgtaattatccaaacatgagggattattttcataatttgaccttacttcagagtggtcgtaatttaccctatttttttttacaattatctcagattaattatctactcaatagctttgacgtgtagtctttttgtgtaagtgcagcttcttttctatacaagttctcgattttttccttgtttgattttgcataaatttttttcaatgcttgtgattttccaacactagttttatttcggaatgcagaaacgtgacttcgtaaaattaagacttggcgaaaa

SEQ ID NO: 104567 - DNA, 697 bp, Mimulus guttatus
  Intron number 1 from transcript mgv1a017473m (locus mgv1a0 17385m.g) derived from phytozome v7.0 (chr-ID scaffold_336 ; pos 77693 to 78389)
ccgtactcgtttacaaaggcatcgtcaaagattttgtcagtttccccttttctcttacgatgatatcattgattgattctattttccatctgtttgtgcactaaccgattgattgaatcaacgcttttttctgctattttattttgattttggctactgaacaatgtatcagctgctgtgatttggaattgattatatagctgttgtgttcttcgtctccgttgtaatagattaagctcgaatgcgaattatgcgactttttcgaagtagtacaattagatagtatagtgccaccaattatatcttgtattattaatccaatttatttcaattatcaagtgtttatcatgtgtttctgaatcagtaatttgattctagtttgctcgacttgacagatattaaacctctataaattaaattatcgagataataatttagtacgttttttcgagttgggtccgtaagaaattattatttaaacgagggttattaatatatcgagtttctactgtagttcatcaaatgatggttgtacacttgtacttgtatcgatgcttcttcactttaattattttttggacctttgatcttgatcgtgtagataataagatctacactgcgtatgtgtttgtttgtgcgtatttaaatttacaaatttgatcaagtattcatccgacggtaattttcgttgcagcac

SEQ ID NO: 104568 - DNA, 825 bp, Mimulus guttatus
  Intron number 1 from transcript mgv1a008782m (locus mgv1a0 08782m.g) derived from phytozome v7.0 (chr-ID scaffold_225 ; pos 295440 to 296264)
cgcaggtatttcttcccacttctttttccgaattcgaaccttttcatttcaaaattcgactcaccatctaaatgtttcatgttagagcgcttgcttcttttttttttttttttttttttttttcttttcgataaattgttagagcgcttgaattcgcaacaatggagtctttttatgcttcgaaacattgcgttgttatttcattaagttaaccaatttttgtttttttcaaattttcttagtagcaattggggatattggcatgaatggaaatgcagcaacataaaaaaaaaaaaaccctgctttattcgtttttttgcaattaattttcatgtagaaaaaagtttctaattcggcgatctttcgtgtaatatgccattatgccatttatgaggacatttgacaaaagaacaaatacttgaaaaaattatttatggctctaagcttctactacttctgtggtgtagttctccccgataattatttatcgatcagtcattgaaatttgaaaaggttatttgtctctaagcttgaacgacttatgtggtactgtcttctccgtctagcggttacagacaaatttatcttactatttctgttatgatggttttcttgttactctgataaatggtaactacgcttttgctgattctaatttttatttactggtcactgttacaattcacttttactattatcgaaagatgtttgcctgggaactgagatatatttctgtgcagctaaagaatcaactgatcacgaaccatttttctttatttttttttcgggatgtttgacagatctgaaggttatcgtgaagttgtg

SEQ ID NO: 104569 - DNA, 807 bp, Mimulus guttatus
  Intron number 1 from transcript mgv1a018844m (locus mgv1a0 18844m.g) derived from phytozome v7.0 (chr-ID scaffold_7; pos 252213 to 253019 reverse strand)
tattttgaaaacataggggaccaaatgtcaaaaaattgtaaatttaagggatggaaaatcttttcctaatgacgtgtttgggctttcaattcaaaaacatgctttaaaactaaacgacgtaggatccaattaagtttttctttaacctaatttcagaagttgaatcgacatgaaattgttcgtctttctcgctaattcagattggtaacgtacctaatgtcaaaagtttgaggcctgttgagcacaattcagttgaatttccgacataattttcatattgtatatttataacagcaattgattatttttctttttttattcgaagctgataaaaatgtcatcttttgccacattaattcaccgaggcttgtgattaagatggagacgaagaagcataaacaggaggtttgttgggaatttttatttttattttcgaaattgcagctgtggttatatttatttagtttgataattttttttttcatgcagtgtaacctcgatattaattgcttaaatactaatttctcatagtcgcgactcggtaaaaacgtattaaattactacttcgataatttttttgctaaataaatagtattttgcaagttccgactatattaatttatatacgtagtgttgaagactaatagaatttgtaaatttttaccatgtacattgttcctgggattgataagttgcatgatgaagactaatagaatttgtaaattttaatcatgtagattggtactgggattgataagttgcatgatgatattctgattgccgttctgtcttgtatgagcctcaagg

SEQ ID NO: 104570 - DNA, 526 bp, Mimulus guttatus
  Intron number 3 from transcript mgv1a003066m (locus mgv1a0 03066m.g) derived from phytozome v7.0 (chr-ID scaffold_30; pos 1217387 to 1217912)
acgagctaacacacgagcttcaacttagtgtaacggtaggtaaaagtacttatttgaattttgaattttgtagaagcattgatgcttaaaccataacaattctgtttctttcttgctaattttgttgaagaacgacattgtgactgcagcagattattgattctgacttctccaaatgggcttttgtgtactaaacctctgttatattgagaaaccaaactcatgcttaatgaatctaaagttcttccaagtgttttctgaatgatttggtcaactcgatatttgcttttgagattaaaacctacggttttcaaaggtcgtgatttttttttcatttcattatatgtaaggcttgtgttatccttggattctgggcattctgcgatcgttaattttcacatattttttgtttatatcacttgacgaagtgtatgctgaaatcgcatcctgtagttacctgatgttagtttctattgttgccttcgtaacaggaggaagtgagatccaaaatattgtctttggagac

SEQ ID NO: 104571 - DNA, 598 bp, Mimulus guttatus; identical to SEQ ID NO: 103719
  Intron number 1 from transcript mgv1a016622m (locus mgv1a0 16618m.g) derived from phytozome v7.0 (chr-ID scaffold_129 ; pos 238483 to 239080 reverse strand)

SEQ ID NO: 104572 - DNA, 792 bp, Mimulus guttatus
  Intron number 2 from transcript mgv1a015297m (locus mgv1a0 15297m.g) derived from phytozome v7.0 (chr-ID scaffold_98; pos 229594 to 230385)
accgagagctccgtggcaagcttcatgtctgttcatctctctctctctctaaatatatatgtttttgtgtttgagatattttttatttgtaattggggtgaaataattagggtttggcaaagttttgttcattggattagttgaactaacattcgttgggatttattgaattcatgttaaggtttctttcttatttatttttctctgtgatttttttcactcaattaaagaactgtcctgctggaatttgtagtaatagtcactgaacttttaacaacgaagtttgtttacgagttcttttgtcgatcggttgatttgaacttggcgatttcagccgagcaagttaattaaaaatgcaactcaatgtcactaataatcatagacctacttgaactttgcttacgtgtctgaaagatcaaactagtgattcgtgttcaaatttcagttgatattttccgacacagaatttcgaagaatcgatgaagttgttatgtcatataggttgaaacaaagttcgactaggtttagaagctctgatttgtctgaatagatggaatttgattgtccagtagtacgccagatgttgtatatgcatacagtatataatatacacatgtgtgcgtaatgaacaaagtccgagtacaattattctctctaatgtttgttcatttacgctttctttacccgtttgaatgttttaatagttgactaccctgttacagattgtcatttttggacttaatatttcattttttgtacgtgaatttgcaggcgtacgatcagcatctaaat

SEQ ID NO: 104573 - DNA, 824 bp, Mimulus guttatus
  Intron number 3 from transcript mgv1a000253m (locus mgv1a0 00253m.g) derived from phytozome v7.0 (chr-ID scaffold_170 ; pos 203388 to 204211)
aagaaaaaggagtcccagtttacagcattattcaggtattgttttagtaattttgaactaaacaacagatactctctgtcatagtgggatttagtagacattgtattagtattcttgaaattggttatagctgtttttggcagttggtttgttttgcattttaatgaaatcaaactttaatgaattcaaagtatagatctatgtaaattctatctaacagatattttatggtttgttgctgcactttaccctggatttcctcatttctttttcccagttcagtttttttaatctgattcttgtctttgaacttaagatggtgagggggcaatgtaaatctcaattttagttcagtttatccgtcgcgcttcataaatgagcttttgcatagctagatccagggagaatttaggcagatgggttccttgtattgcgtaaatgttagttgattatatctgatcataagcgactataaacagttgaaaatttgttcaaaatttgctgtcagattaagaataatattgaacagatcttaacttgctacttaactgagttgtagcatcttggcttatcatattgcctgtaatcgtgtgtccatagtcattttataagatccctgttcatgtctatttatactttaacctctttgtttttcaatattttgaggaacttttaaatattgcagaaatagaactgttaacttttacgatctgtagtgatcctttacttcttacccttgtgatgtgctatgcatatacactgctttaattatatcatttgccttggcaggagcctggaaactttgtcatcacttttcccaggtc

SEQ ID NO: 104574 - DNA, 589 bp, Mimulus guttatus
  Intron number 2 from transcript mgv11b003028m (locus mgv11 b003028m.g) derived from phytozome v7.0 (chr-ID scaffold_1 81; pos 96470 to 97058)
ttggttgaaattcagcagagagatcctttttttaggtatttcttaaatgcacagaatcgatttcgtaattcgctgcgattgtgggaatatgttgtttcgttgggaaatgatttttccttcttgttgttgatgaatatgaagatccttttattttttcgtttcctaagttatttagcttcaattactatacgagacttgttttccgtctttaattgagcagtggcaattagggctacacgatgtctctttgcaaaataatatttcttttttcgtgttgatgtataggaagacccttttatgccttattgaatttctggtaacgattcttgtggtggacactttgattatgtagcttcagttattatgcaaaactgttttttcatcttttattcagcaaaaagtcgtcttactttgagttgatcagttaatttttttccgttttagctagtatattccttctggttctttattgtatttgaaactccgcagataagtgattttatttgtataagcaatctattagtccgacaatgtatacacgtttggttttatatgtgcttagtttcattttcttatgttattggtagaa

SEQ ID NO: 104575 - DNA, 405 bp, Mimulus guttatus
  Intron number 2 from transcript mgv1a018069m (locus mgv1a0 18069m.g) derived from phytozome v7.0 (chr-ID scaffold_299 3; pos 656 to 1060)
agaaatcttactgtaagttttattctccttctaggttcttcctccaatatcggttatgtttttcacttgacttcccaaattctacttgattcccccctttttgttgttttgttcgaaaatggattttattactatcgctatttatcatatgaactatatcaactggaaggagattcctcggtcatgaactcaattgcatgacttttatcaaattgtgtttatgttatgctacaaattttcgggagcttatttgattaggtttggcaccttggcgcctcaatttacactcgtagaatgcagaatagttggtcttctatcttatttgcttctgaattatttaaatactgacgacttcatttcaactatttttgcagtctatttcagagagcgtgcacgttacaagtg

SEQ ID NO: 104576 - DNA, 679 bp, Mimulus guttatus
  Intron number 1 from transcript mgv1a000633m (locus mgv1a0 00633m.g) derived from phytozome v7.0 (chr-ID scaffold_16; pos 1692518 to 1693196 reverse strand)
gttgtaagctcttgtaatcttgctatttgttttaactctttttttttttaatttctttcaattcagcttcgtgtatgttatggaactttgaaatgattgcatccgtgctgagaaatgattttagaatgagtaaaaagtgaactctgctgaactggttagtttggaattttgcatctttctccactgattcgagttccacaaatggcacaatttgatgttttgcgagcctgccgctgctggataaaatcgagcggtggaggaaatattgtcaagctttgtattgaaattaaagaacattaagtatcttctattcatctggaactgttaaggaactttatctcaaagagagagaaacagataattcaagattctagggcctttgtttcttgtgtgcacaatattcagttgattttctctccctttattcatgcctccttgctacacttcgtcagtacattttgtttcaagtaatttattgctgaaccatagatttttttggctttgttctaggaggtattacatcacgaaagttccgttttcccacttttgttttgtcgatgattgctccaataattttttttggggaattgaaattatgataaatgatttttaactatcttaagttaaagtaatattaatagatcatgcattttttttttctcttttgtccaggggattt

SEQ ID NO: 104577 - DNA, 457 bp, Mimulus guttatus
  Intron number 1 from transcript mgv1a020522m (locus mgv1a0 20522m.g) derived from phytozome v7.0 (chr-ID scaffold_140 ; pos 572203 to 572659 reverse strand)
tatttgtcaaaaatttgcctcaactattcgaccacgttagtgctttgctattgctcccgattttcctagaacaaaacactcttctcccattccatgtcgaattggtagatgagaaacgattcgatttacccatttccataagaaaataaactaagaaaatagtcaaagtggttgagcttcaaaaacgccagtttcaaatccaccagcttttcctcccatttaaaaaaaaaaaaaactagtttataaggtccaaaacacatcctcaaccataacatcaacaatttttaacttgtcgattttcccaaaaacgaaccaatcaaaaagatacgacgatggctcattcatacctgagtgcaacactagttgcactaatcgtgctaattatatcatcagtgctacttttcggagcaaaagcacagcagataataagcacaccgtgcacgagttcagtgataac

SEQ ID NO: 104578 - DNA, 720 bp, Mimulus guttatus
  Intron number 2 from transcript mgv1a021733m (locus mgv1a0 21733m.g) derived from phytozome v7.0 (chr-ID scaffold_313 ; pos 124921 to 125640 reverse strand)
acttggtaaggactactttattactcgttttttttctttcaaaatcgtgcatgaattgattgttggaaattttgagtgttagactcgatttttgttgattatttaagtgtattaaatttagtttctcaaaattaattttaatgaatgagaaattaataaaatcacttaatataatatatggaaaatgaagaagtgaaatgccaccattgaaaattttggagggtttaatcacctattaaatgaaataggtgtttaattaatgagaaaatgtgtgataacttttcatgaaattattaatctaagagctgcgagttgcggtcataacctttgaaaatctataaatagattctaaaatccaccatttgaataattcatttttcacatggaattcaattcataaattgaattcacttctcatcatagcatctcattgcgtattgttgcatttatcaagtccatttcttataaagtccaaagctctcgttttgttcgcctgtacatcgagccttgttatgctgcaaactcgaatacccacaagtcgttgtatcttgagaacaattggctagaaccgttagcactaatacgagtcaataatgtcttatggagaaagaatctaattcttgtctcgacttcttttttcgttcattaaactctgtccaattgcatttcgaaatatgcctcacatagtgtatatatttaccaattaaatagggagtggaa

SEQ ID NO: 104579 - DNA, 717 bp, Mimulus guttatus
  Intron number 3 from transcript mgv1a003856m (locus mgv1a0 03856m.g) derived from phytozome v7.0 (chr-ID scaffold_12; pos 1437263 to 1437979 reverse strand)
cacaagggtgagggcttcgttgttatcgtttatttctttggtaataaattataaatctgtgaactagagacaaggacttcaaacttggaaattgaaatttctgtgatgaatttatgtatgcctgaggttgtttaataaactttcttgtatgtggtaggtgctcacaatttgattatacatatgaatacaagtctgctgaatgccagtttctccctttggatttcgtgtttttacttattttattcatttctcattccttctttatagacttcatgttgacagaaaatattaaaaaaaatcatttttcctgaagcagcagaaaggtactctagagtctctggttcttatagatagaaaccgaattctaatgtatggttgtttatgctattttcttctgaacttgccgtacagaaaaattaaatagataaacgaaggaactttttttttccttttgttgattggtagactttcgaagctcatattactgatttcaatcatgtaaactagtatatgagcagaatacctattgaaagattctatttgttgatatattaagtgcaagaatacttggccgtaaaattatagtagcatacactcggtagaaaagcttttttcctggtttagattgtgtccttaaaagcaatcataacattaacccttcttttatgtgcttttggtatagtgctaagcttgttgatagtgctcttgatactggaa

SEQ ID NO: 104580 - DNA, 443 bp, Mimulus guttatus
  Intron number 2 from transcript mgv1a002786m (locus mgv1a0 02786m.g) derived from phytozome v7.0 (chr-ID scaffold_11; pos 2864710 to 2865152 reverse strand)
gaagcgctggtttgtttcttcttatcgatttacacatttttgtttttccttttaatttgcgaacttttttactgatgcaattgaaaaatatgttttttgtatcaattttaagagtgaattttgaagtctctgcattttgaggtctaaaagctctttatttgatatcgattactctcgagattttcggagaaattagccctagagtgtttttaatccatacaagttaagtagttaagtaactctgtaatgagtgtttgaagctaacagcttttatatgaatcggatcgattcgcttcatggttaattgctttttatcctactgaaacaggaacttgtcttgctgtacatttaacaattcggaattaacgaatacctttgtaggcataattactgtgttatccctaatttttttatttttgtaggtttggcacttataacagcaa

SEQ ID NO: 104581 - DNA, 1008 bp, Mimulus guttatus
  Intron number 1 from transcript mgv1a015373m (locus mgv1a0 15373m.g) derived from phytozome v7.0 (chr-ID scaffold_4; pos 3365498 to 3366505)
cgtacgttattctatttctaagatttactgtttatttatgatttaatattgacctaggatctgttttcgtgttgggtgaggggcgctgcgtgaaaacgacgcatgtttattggcctattttgttgtggattgcgagcaattttttttctgaattgttgtagttgaattcattttacttttgtgtgaaatgatttactggagtagtgtttgttgccgctgtttctggtttgagatttgaaaattggggattgggaatcgaatacagagagaaatctcagagttgtaaaacctaaaatcttaattacataatcccgaacacatcatttcaatttaagtgaattattgttttttgccatgtttctattgaaaggagtgttgattacagtttggttctatggattgtctattttcgagggtcttttttaacatatatggatgataaatttacaaacttacggataagattaatggaaagatattgcagaaattaaatgagtaactgggaaatgatagataaattgaaagaatatgagggaattttgtgaaggaagagagtgatacttgaggaggaagcaaaattagtatttcatcatggtaaataattccgtatccgatataagagattagaaatctgcagcagcctacttaacaagatattttattgttcaaggattggacattcgtaagccattagctgcctttgatcttttttaaggtccattaatattatatgtctttcctcctcgattcccacatggaaaacaaccctatcctgcctcacacttgttaatttgtgattgttggtccagtcagcaaacgtagcatgagcacatgtggagagagattgggggtgagggtgtgtgcaaagagggatttgtttaatttatctgcctatctggaatattgtttggcattattttattaaccaacggaatctcattttcttcctctccttttttggttgtaaatacagtggctggtacctcttctcgtcctcgcactttcaga

SEQ ID NO: 104582 - DNA, 810 bp, Mimulus guttatus
  Intron number 2 from transcript mgv1a021472m (locus mgv1a0 21472m.g) derived from phytozome v7.0 (chr-ID scaffold_14; pos 739536 to 740345)
cttaagaggtaattttttcttgacccgtacgttcgtgtttatttttgttttcgttcgaatccgaaaccaccatagggcaaatgcaactttgagaaaatagtattatgcgatatccttcctaaattcatttttcgctttcacttatagtttcctcttgccatttctgttattttctagtttgttctattcattttgttgaaccgtcccagtgacacgagcctagaaatttgttacagggtggacttcaatttttgggggttcaggggcagcgcctccgagattgttttaagacctttttgtgaaaaattaggaaataggacaaaaaaaagattgaagagtttttttttcgggaaaaatacagtttttgtccatcaagtttgcaccgatttcacatttggtctcctatgttcacaaaaaacacatttggtctcttatgtttcaaaacatcaacatttttagtcatttccgtcaattttccgttaaaactaacggaatcaagcgtgtgcccatcactgcctgaactaatggactaataacggtaaattgacggaaatgaccaaaagtgttaaattattggaacacaagggactaaatgtgtttttttgtgaacatggggaccaaatgtgaaatcggtgcaaatttgcaggacaaaaactgtattttaccatatatgtatatgaaaaaatatgtagttgttttcttagtgtaaggcatttagtaaagaattcacatggccttatgaattgtttctttataaaaaaatgtgttattgcagcgcgactggagtcaaaacatccacttgattggcca

SEQ ID NO: 104583 - DNA, 591 bp, Mimulus guttatus
  Intron number 1 from transcript mgv1a022018m (locus mgv1a0 22018m.g) derived from phytozome v7.0 (chr-ID scaffold_636 ; pos 14011 to 14601 reverse strand)
atgtttccttggcacatttgttttcgacactgtcgtccagttcgcgattggagactcttcgtctgacgatgtttcaatcacgggttgattttttatttttgttaaaaaaaaaaaaatcgggtgcactacttaactaattttttgattgatttcgcatgcagggaatgcacgagctccacaatctttctctactgcctaaactgaagaagatggtcatagaatatattgacaagggccgcaaaactattttccaactctacgatttgataagggcatcccctttcttggaggaatttgttttgaaggtacgtttttttttacgatatacagttaaacctctataaattaaacctctataaattaatacagtctcaagactagtagaattctattaatatagcaagattctaataatttaatatatttttcaccgagtccgaaccagaaaatatatatatatatatatatatatatatatatatatatatattcaagcgaggttattaatttatcaaacttcttctgtatgtgatttttttttttctccctaacgcagtatcaaagtgggtgtattccgaggacagataacga

SEQ ID NO: 104584 - DNA, 156 bp, Mimulus guttatus
  Intron number 2 from transcript mgv1a013483m (locus mgv1a0 13483m.g) derived from phytozome v7.0 (chr-ID scaffold_8; pos 1337879 to 1338034 reverse strand)
gcctcgattttcacaaggatcaccgccttattcaggtcaattattcaaaaaaaaaaaaaaaaaaaacaatttacccaatttttcttcatttaattaatctccagtaattcaaaaaatgtgtttaattttggttgcagatacggagatcatcgtacc

SEQ ID NO: 104585 - DNA, 734 bp, Mimulus guttatus
  Intron number 1 from transcript mgv1a020913m (locus mgv1a0 20913m.g) derived from phytozome v7.0 (chr-ID scaffold_3; pos 121847 to 122580 reverse strand)
acttctccagcttcattaggcaactcaatacttatgtaagctttttttttttctcgatttttttttttaatctcgatttcaagctatttttcttgtttgctatctctatttgagtcactgtttgatgtttttgagtagcttatctgttgaaactcttaggcctcgtttggtttcgtttggttggggagattagttgttattaactaaataataggactttgtttgatgttgggtcgatcggcaaatattatcttggtttatcgccttcccggcatgtttcttgttggattttccaaaatccaataacacaattgggttccattagattatttaatcttatcttgacaaccaaacgaggccttagtttttgaattgacatataatgtatttcaagaattgtggaaaattaagcattcctgaattagaggtttagaggattaactgaatgaagtttgtcttcacttttgtcggtttttgttgtctcggtttgaagctctgtatttgttgtttgctttctctatatgtgtagctactcattctgtgttcaatagcaaatttgttttagtggaaaatatgtattcgatgagatgttttgaggattaagtaagtgatgaataaaacatatatgtagttggaactcgattcgggccttttgatttataacgtagtaattcctaagattattattggttttcttgaaatttgtagggtttcagaaagattgatcccgatca

SEQ ID NO: 104586 - DNA, 842 bp, Mimulus guttatus
  Intron number 2 from transcript mgv1a011042m (locus mgv1a0 11042m.g) derived from phytozome v7.0 (chr-ID scaffold_69; pos 883654 to 884495)
gtcgacgacgctccggtcagcggcggtggacttaggtgatcctcttccccatctatttgctgtttcgtgtttttaattgttgattcggcagacatatgtattcaatttgttgtttttctaattaaattatttgattttgtaccttttctttggtttatgcattaatagctgctaatgaggatccttgatttgcatttttactcttcattcattggcggcgtaaagtttccgaattctatgttgtgattggtcaaactttgtcgctgttttccgggttgactgtgcatatataaatgagcgaaaaaaaatgtttttgttttcaatcattaaagaacttttggtcgaatcacaaaatttccgtagcttacgcacgacaacggaagtttctgcgcaatccatttttgtcgtaatgtgcgtctttatgaatatagtatataggacacaaaaagccttcgaaatgttgtttgtcacattccccaaacgaccggttattcccggtgaatcacagggttatatataaccgcacatatgtatatatttattatacatcttatgcacatccattgtatatgcgttgattatgtttaattctgttgtgtaatgccatggtatatttcatccgatgtagcatctacccatagattttctagttatgagtaatttggtctaacatatcttacgtaacattcaaaacaagttttggtttatgtcttgaataattgtgatgtatgtcttgagttaaaactagtaattagaagaattatttcatgtggttcagtctaactaacatctggtgtatcaaatcaaattactcgtatgcagtcaggacggaaaattcagct

SEQ ID NO: 104587 - DNA, 684 bp, Mimulus guttatus
  Intron number 1 from transcript mgv1a006828m (locus mgv1a0 06828m.g) derived from phytozome v7.0 (chr-ID scaffold_17; pos 1668339 to 1669022)
aactcactgtcaagaacattaacattctcctcctcgtaagtaattattagtaaattatttgtcgttttaactgacgcagtacgaaagcaccgattccaccgaaaagtttgaacccaccagaaaatggagttttttttttttttttattgaaattcataagttctttaaaattaaattgggagctatttatactaataaaattaaaaattctaattaaattaggaaaataataaataacaaaaaaaagcaaaaaaatgagttagagcatgattctagtagatgtcgtaattttgtgaacaatccagtttacggaatctcaatttgattcttctatgatttgatattatttttttctaaaacttgcttaaaatagcaaaaaaaaaaaagaatttttagcagtctaaacgacactggattaatgaggtctaacgtgattcatgaatttcgctcacgagttttgtttcttggcccatttcgcttgagataaagttcgttttagtttcacactcaaatagaatttgtatttgtaaaaaaacctttattttcccataatttatttcgttatttccaccgatgcccattagtagtcattctcctaattaaatagttactatgaaattataatccaatttgacagtccgtatgagaaatattcaaaaataatataatgtatatatacaggaa

SEQ ID NO: 104588 - DNA, 1042 bp, Mimulus guttatus
  Intron number 1 from transcript mgv1a012334m (locus mgv1a0 12334m.g) derived from phytozome v7.0 (chr-ID scaffold_123 ; pos 722668 to 723709)
ctttcctccctcattacctccgcagaatagtcaaggttttgtttccttgtttatttcttctttaattttcgtacgaattatcacgtatcttcaatagtgtttggaatttgttgctgaagtttacagatctgatctcgatcgtctgttctaaaaaaaaaattattggattttttccgctcaattattgcctcattgtgttgcgatggggaatttgttgcttgattatgtgtttctgctttgctgatttttttttttgtctgtggagaaaatataccagtcgaataaatggagtgcgaaaatggtgttcgtgtgatttacattgagttttcctctttgtagttggggtgacacttttgactttgaaacgaatttttggggaaattgagctggcagctattgattctgtagaatcgttgttaattgttatcggacgatatggaaaactcaaattgataagtattgacatttgatatctgattggagagaattaaataacattgtaataagccgacacccgagcttatgttagatttcctcatatggctaaagttcactaactcgcaagttgaacagattataggttatctaagtttgttttggtttgtccgctgttctgcattacgggatacgttactgctgaaaatttacattctcggtatattatgcgtaaattggttatttattaggaattcacctctcttttccgagatttgattggattcattatttcatgtaattgatgctagttttccagttcgtagttattaatggtgcaaaatggcgcatgcttggctagagacgcacttgacgcatgtccagcagcaccattttttgacgaacgtgtacatgagtagaacttgctatcactgttattttattttttcaaaattgtacaaattccgagaaacctgactgagaaacagggtttcgtgtttttgtctaatgtctacttattaacctgtaggtgcgattgtttcatttattattttctctgagtgacaccagttttttttttttggatggtttaatgcagtggcaacaa

SEQ ID NO: 104589 - DNA, 1025 bp, Mimulus guttatus
  Intron number 1 from transcript mgv1a018945m (locus mgv1a0 18945m.g) derived from phytozome v7.0 (chr-ID scaffold_4; pos 2446127 to 2447151 reverse strand)
attataacatacaaaaggactcttatcttcatctcgttacgaggcaccctggcgcctgatcttattcaactcattaattaattaattatcatcaaattcatggttaattacatacatttcttattattaattataatgtgatggatgattaatcgatttgtgtgtgagggttgggttctcacgtgtgaataaatatacacgtgtaattgtgcgtgtatgtgggacccacaccgcctctttgcgtttgctttgtcaaatgaaattttcggttgtttatgtgatgtgttttttttccacatatgttattttaatcataataataaattgattgaacttgcttgagttaaatcaatttaaattacaaccatccctcaactatcaatcttcttacacgttcacacttgtggtatcaaatttagtggaatattctccactttctactagatttactctattcgagctctacattttggaacaagatgatcataatatgtgtctcttggcttgtaaatatcagattgtggtgcatcgaaaactgtatttttgcacaaaattaaaggtgaacatttaagaagattcttagttgaggagatagtcgtaattaccaaaataagaaggatttttccgtaatttgaaattaactcatgagaggccgtaatttacccaaaaatttaacagagttgtttgaaaactctaattacattttaatttagtaaaatgattttttttttttaatttagttgacttatatattgtttataagcatgaagacatgatttaccaattcagtacagagcttggtaaatgaacgacgtgtacaccagcatgaatcaggaaatagtctctaataattctctagtgctgaatttacaaagacttgtctattaattgacttatatataaactttatcttcttcatttgagatctgtacgtatcaacgatctgctgctaattacattcctgccattaattgctgcgcacaatgaatatttccgttgagactctcgccggagaaaccatcacc

SEQ ID NO: 104590 - DNA, 639 bp, Mimulus guttatus
  Intron number 1 from transcript mgv1a012266m (locus mgv1a0 12266m.g) derived from phytozome v7.0 (chr-ID scaffold_85; pos 232974 to 233612)
cgacggccgcaccctccatcagtgccgccctgcatgtgagttttccatttttttattttttaatttttgcaatttttttgtatgatatgtatgctattgagttgattgaatggtgccgtatttgatctaatgaactccgcgtatgaaattgtggactgaagaattgtactgtgcaattttgttggtcctgattggttatcgattttggttttgtttgttggttatatgtataactgctggcgctatgtataataatcgtatactaagtttcatgtaatgtgttaactttcctagcagttgtttttatttgatttgaggaatcattagttagtcatacttattaaacataactatgccgatagaaaacaatgccgattgttccgtgttttcgcggaagagtggatgcagagagtcgatttctaagcacatggaaatggcccttaataattaattatgttgaaattctatatccctaatatcgttaaactaattgcatattatttaggtgggacgagcttgagtttatagtccatttagagagtactatggttgacatgacactcttatgaaatcgattgttaatttttttttttaaatcttgcagttctaaggactggggccgtaaattctgcttcaggg

SEQ ID NO: 104591 - DNA, 651 bp, Mimulus guttatus
  Intron number 1 from transcript mgv1a009513m (locus mgv1a0 09513m.g) derived from phytozome v7.0 (chr-ID scaffold_1; pos 1726514 to 1727164)
gggagcaagacattggagccgcattagtcttctctgtaatctctctctctctctctctctctctctctctctctctctctctcttgatttatatatttgtgtataagcatttgcttcagtcatgcatttctagttatgcttatatgttttatctttgtgggccaagattaaatatttttcgtatggatttcagtacttaaaaataactgaagaatgtggtttttttttttttgttggattcgagaacaaattcgattttttttcctgcaatgtggtccgttgatttttggattggattttttgtgacatggttatattatcttgacatgattttgagataaaaaattgagttatatcgtatatgattacaagtgattgcatttgttttagcgtcgtttcacttttgcaaacgcaatcgtgttcggttttcgtgtttttcttcctaaaaaggggcaatgcggaatacttgtactttgattgtaatttatcgcttcttattaatgtaaatagtgttcgaaaaacgacacttgttgcacatgttgattattaatcattttgtatctttgtgttctttttttgttttatcttataataatttttcgttgttgcattgtagttttttcgttgagaaatcgaaggacagtttagaat

SEQ ID NO: 104592 - DNA, 1002 bp, Mimulus guttatus
  Intron number 1 from transcript mgv1a009540m (locus mgv1a0 09540m.g) derived from phytozome v7.0 (chr-ID scaffold_21; pos 1732172 to 1733173)
catcttgtttttgcagctcgaacggtataatacaggtacaaactgagaatattccacataatctacaagattccactaaatttgacaccgcaagcgtgaactaaaaaaaattcataattgagaggatgattgtaattacttaaatatgagggatttttcgtaatttaaccgtatcttggagggttggccgtaatttatccttaaaaaaagaaaaagtttgaagtcgatttctgattcccaatttgattttgaaacatttaggcctcgtttgcttagtgctattaacctctattaactaaatagtaggggttagtaagatgtttggttgacgagattcgtatttagtcaagcccgctattacacttaaagcccgcaattaagtgctattatttggttaaattagtagcacccttccccctgcgattaattttgtagggggtgattaaaagaggaaaatacaattttatccttacttaaatacttaatctaatgaatatttttttaattaaaatattttttagacaattcacattaaataccagaatttaacaaatttaatacaagatttaatctaatgaatcaaacatcttactgactaaataattaattagtcagtggggtattaatccaatctcacctaattcattgtaatccgatataggtaagtaaacgaggccttaatgtacaacccgaacccaaaaagcgaaggccattttgattcttgaatttcttttagtcccgaaattacccctcccccgtatggccgtaacattaataaaagcaagcctcctgtcttcgtcaacattcccccctctctctctctaaacattaaatccttctctctcttctctctctatctctctctatctctctctatactttttaggcttgggaaattgggacccacaaaggtcgccgaaattctcataattatatcttcagaaggaagcagacccatcactcaaagcacttgaccacactcactcactctcactcactact

SEQ ID NO: 104593 - DNA, 722 bp, Mimulus guttatus
  Intron number 3 from transcript mgv1a001303m (locus mgv1a0 01303m.g) derived from phytozome v7.0 (chr-ID scaffold_39; pos 52292 to 53013)
tcatcaactacaccaaggcaggtacttattgtgtatggcaattggatcgataaaacagtttcctttctgtttgatatgctatcccgatgctgttagaatctgtaaattattgttaagtcaatacagcttatagtttcaccactagtgtgggttatcaatgtcagctaaatttttaagaaattttgtataaggtttgtgcgagctaagttactattctccgagaaatatccaaaagggagtaagggacttgtaagtagcacatagtgttcatttgttgtaagctggtggattggggacggtaacatattactaggttgctgattattgttttagccttaggtctatttacgaaaacttgactgccaaaaatagaggttttttatcgctgcagcctgcatgactggatgcaaaatttcattggagctttctttttttaccaattttttaatgttcttgaaccataaatgggttcctgttatgttccatgagggacggatttcaagaattccgaccatcttccaaacacctcatttctttttgtttctaaactcgatagcttacattaaatatgatccgcacgttttcaacgtgtgcagtttctgatgtaggctacccatacatatatgaaattgttgtcacttattttacgttatcatagtgtaaaggtttatttctcttggttctcaggaaatattgcaaatcatctgaagcttttggaagtt

SEQ ID NO: 104594 - DNA, 586 bp, Mimulus guttatus
  Intron number 1 from transcript mgv1a024906m (locus mgv1a0 24906m.g) derived from phytozome v7.0 (chr-ID scaffold_3; pos 3583676 to 3584261)
tcaaggctgtgctattggtaattcaaaaaaaaaaacaaattgtcatagattttatttgtgtttttgcatttagtatatatgtctatgttatcttttctaattgttaaaaaacataaaactcaccatctttttttattggcacacaacccctaaatggttagtttttaggggtagcctggtaaaaaaaatgaattataggggattttttgtcaataagataacatttggggttaattaacaattataaaaaagtacaagggtgccaattgcagtaaatcctattttatttaccatgacaattgtggctcatattgatatctatcaaggtgacagtaattttgtttttcaattgctatgtgataattagtaacacatgtttattcaattacattataattggtgaggtttaccaattaatatgcaattatacatatttaaatagctaatatatattttatatgcatctatatacctatgtcatatttttttgataaattaaacttatgaagtatatcaaaattatgatttatatcttcttttaattttccaaggacttgctagtagctggattggacacgtcagcaac

SEQ ID NO: 104595 - DNA, 860 bp, Mimulus guttatus
  Intron number 2 from transcript mgv1a004242m (locus mgv1a0 04242m.g) derived from phytozome v7.0 (chr-ID scaffold_228 ; pos 348296 to 349155 reverse strand)
ctctgcagccattaaagcccaccgaagaaattgaggtttgaatttcagtccctcaactttttacactacgaaaaaaactaatttgtagggtttatcttctggttattacttttgagtcttgtcacactactttcaaattgtacctcaatttattacactacttcaattgttactctttctgtactttacggtcgaattagatatctgttttgcatgttcatgtgagtctagactctgaagaaagcatgaaggaatacaatattaggctttgtcttttgaactagttttcttggtcctgtgcgaatatcgttgacctaaatatcgtaaaatttggtccaaaatagaccaaattttttgtactgtacagaaattgaggtaccgatttttttatactttacttcaaattgtgcaacaaaagcagggaagacgaaaaagaactaatccgtagcgtttgtttatcttgatctggttgttattcttggtactcggtgagtttctttggtttaatgatgtctaaacatgtattgtgagtgagttgaaagtaagaaaacgttagaatatggtcgaatcagatttctggtttgaaaagtttgtgtggctctgaagtaattttccttatcaaagtgcagaaattaattgtctaccaaataatacatcttacaccaaagtatgtagaggattaagtttatactatatgttgatttcgatgaaaattatactttgtgattcgctgttttatgtgtacacagccttctctttgaagtaacataacatgttttgtgtatctctgtttatatcaatttcaacacgacatttaatttcatcttgttttgttaccatctcaggatcaagtaacagct

SEQ ID NO: 104596 - DNA, 726 bp, Mimulus guttatus
  Intron number 1 from transcript mgv1a018033m (locus mgv1a0 18033m.g) derived from phytozome v7.0 (chr-ID scaffold_251 2; pos 2499 to 3224)
tggtgtcaacggcactgccacccctgctttccctagtaagtttccaatcaaggctaaaaccgtcatttaaatatgtcacaaaaaactattatatatgtagtgtaacttaaaccaacccctgaggtatggtcaaattacaaaaaaaacccctcatatttggataattacaattatccctaattatgaatcttcttacacgtcccattatggtgccaaattcaacctaatcttctagattcaatggaatgatctctagttcgtactcgttttgcaaaaaatcagtgtttttatgtaccacgatctaatatatacaagtcaaaaaacacatcttattatcatcttgcttcaaaatgtggagctcgaacgagataaaacggatataaaattgaaaatatttcatataatctagatgattccattaaatctgacaccgcaaagctgaacatgtaaaaaaatttatagttaggggtggttgtaattatctaaacataaatatttttttttcttcataatttgaccacatcagaggtggttgtaatttagacctatatgtatatatatttttatataaaaagaatattattttatgagtaatatattatttaatttatttcataaataaaaaattcgagtttacatatccatgcatgtgattttgtgagacaaacaaattaaattaataagataataaattgaaacatgatttaataattaatataattgcag

SEQ ID NO: 104597 - DNA, 704 bp, Mimulus guttatus
  Intron number 1 from transcript mgv1a024445m (locus mgv1a0 24445m.g) derived from phytozome v7.0 (chr-ID scaffold_23; pos 27099 to 27802)
ttctcaaatagaggtagattttttattttttattttttattattatttttttgtaaccacttaattggtttattttagagagcattatatctaacttagtgaaatttatatatgtggcaaggtttaaaaattcgattaattagtttttcgactttttgtaaagctaacaggttgatgctgagagaaagttgaaatggagatttatggaagattgtaataaaaaactctgtcctgtctcaattcttcaagaaacaaaagagggctcaccatttcatgacggtgagtatatttttttcaagaaacttcgtacagtagaacttcgataaattaatataataacctcgtttaaataataaattcttttggtccatcttagcgagaatgtgctgaattattaattcgataatttagtattccgctaaattaacagaattttcctaattcctactgtattaatttataaaggtttaactctacataatttttttacatgaataaaaaataaaaataaaaactaattattcttttggtacaaaatctacagaaggggaatcttcaactacctcgttttcgcaaatcaagtcaaagcggacggcgacacaatattattacactagtgtcgaagaagagttgcaagaactcgcggatgtttcgagttcttacagccagttcattataaacaagagggccttgcagcaaaataa

SEQ ID NO: 104598 - DNA, 462 bp, Mimulus guttatus
  Intron number 1 from transcript mgv1a024305m (locus mgv1a0 24305m.g) derived from phytozome v7.0 (chr-ID scaffold_66; pos 1245376 to 1245837)
tgtcgaatctgcccctgaaccagttcaaaagaaaggtaagtgtttgatcttcgtgcattttatgagccttgcttttatatttcttattttattttacaagtatttgcaaatgtgggattatatattatgtgggtttttttgtaggtacctacacattttctgtaatcggcattggagcttcagttgctgctgttcttggtttagttgcctatttttcactctccagcaaaggttgttttattaagtcttggattcaattattagagttaacttagcagatgagtgtgtaaccgagatccaattcgcgatccagttttaagttatctggttcgaattgctagtttgatatatatatatttttattatgcttcatcaggttttggttttcggctcagaagtccgtttgatgctatacgtggatcgtcagtgccacaatcgactattacgagtgacattaaaaac

SEQ ID NO: 104599 - DNA, 939 bp, Mimulus guttatus
  Intron number 2 from transcript mgv1a002825m (locus mgv1a0 02825m.g) derived from phytozome v7.0 (chr-ID scaffold_18; pos 2001340 to 2002278)
gaaataaatctaagtcctaatagaagtatataagaataggactctaataaattccaaaataaatatggaaaacaaatctttgccaatcttttaattccaaaacttggcggatttcctcgatcttcaataaccgaaaatatggcgccaacagtgtagaatctcgataaattaataatctgttttaaataatatatttttccggtcccgattcaagaacaacatgctaaaaatacatttcatacttgatgatgttcaaatcatccaaattattggagatgataaattgttcaaattatgtgacgtaaccttgtaaaatcgaaaattccagttggttttttttactagagtttttggagaattggaatctgcaacgtactatagaatctctttcaatttgaatttttttatacagatgacttttgtagatttccattgcatatttgagcattgtaggcataataatttatttaattagacttgttgagtttataaaattcaattattaaaccattaatttaactagactttgattgagcctgtatctcaccacttgttttatttaattagattcttgatcaatcactcagtaccattctttttttgataagccaatcactcagtacctttgcatttggcaattaattttttttttttgtacaactttttaaaagttctatattatgcaataacaaatttttgtagaggaagcagtaacttctggaccaataacatcttaaataatgcaataactatataataattaataatctgaattttacaaaaaaaattaaaaaataataataatattaatgacatcacgagtcacgactggattgaaattacagagaaatcatttaaaatatgcgaaaacacaaataatagaattatttatttcgaccatcagatctcagtttcgtgtttgctctgcccatcatccgt

SEQ ID NO: 104600 - DNA, 837 bp, Mimulus guttatus
  Intron number 1 from transcript mgv1a019743m (locus mgv1a0 19743m.g) derived from phytozome v7.0 (chr-ID scaffold_124 ; pos 130031 to 130867 reverse strand)
gattcgaaggtttgaactaactcgacttttttaatttttcattaatatgtttctgtttttcttgattttgtttcttcgatttgtttggttcaaaagtttgaaactttacaccatgttgagatatcttatgtgggtagggtttgcgattattttgtgtagcttagttaggtttttgtttcgattctgtgtatgtttaatgtggtgttccttttatctgctgttgttattcgacgagtctttagaactcgatttttcgtttccttcaaagattgtccgaaaatggcggaattgttgatcgaaatattacacttccttttccggacaatagtttttagttcgtttgcttccttgataaggttaatgattatcttgtaatgaggatcatgatttgtgttgttccacgtgtgttcgtttcttttgtttatttattgtcgttggctgaactaaagtgatccatctcgcacgtatatcaaatagtttgatacgaaattaatgtccaaatgggattacattctaaagttgccgcgtgtttttcatatttttttctttctgtttttacttttggcggttacccaaaaataccgacacgtttctcacgagattatgccgattctcgtgtggctatactgtaatagtaccgccacgtgttcctcccatgaatcgtatttgctgccacattgaaacaaaaatcactgcatttgttgttttgcaattatttatctacgttgtccgatctcgagtttcttgtaacttacgcaaacttattgtccagaatttaattttaacttggcaaactttacagactagtgaagcggaagctgcatcgctgagtcagca

SEQ ID NO: 104601 - DNA, 694 bp, Mimulus guttatus
  Intron number 2 from transcript mgv1a008415m (locus mgv1a0 08415m.g) derived from phytozome v7.0 (chr-ID scaffold_64; pos 1121647 to 1122340 reverse strand)
cttcaagggtccaaatctccaattgaagtctctatgtatcaacaattgtaaaggtgtaaataggatagagtttgatgctagtagtctcgtcttattcgagttttctggtcgtgaaatggttgactttatattcgagcacgttcctcagctgcagagtatatctctttatacatttaaggaaaataacgtgccttacgcttgttcgcgacttgcaaaagatttgcctcgtctgaaatcattgacttttgttgctagaggcgatcattttcaggtattggaagggtcgtctatttttctatttgtcgatttctcgattgtgcaattttttgctatatgattttttcttgaatttgagcttcttgattattagggaagcgttaaatctatggggattaacatgttcaacaaccttaggcgattagatctcagcctatactcgggatcgcaaattgatcttcttttgctgacttcgtttttgcgcagttgtcccctcctacaggaatttcacttgaatgtaagtcttttcaagacaatttcttcgattttctttattattacttttaaataattttttgttgacgtttctcgtaaatgattaaaagatggatttcctttggttttttggttgtagacaaattttgtggatattattggaccagaggtgaagaaacaagaggaagtaataatccactcc

SEQ ID NO: 104602 - DNA, 535 bp, Mimulus guttatus
  Intron number 1 from transcript mgv1a008279m (locus mgv1a0 08279m.g) derived from phytozome v7.0 (chr-ID scaffold_37; pos 1251407 to 1251941 reverse strand)
tagtgttaccattattttaattgagaaaaacaaaagtaaatttgatgctgattgctgtttttttgggacttttcttgctcctttttttaccccgaattgagaatgagaataaacagaaaaaagaaagaaaaaaaaatgcaagaacaaaaaagtaaatgaaattgaagaagagagaaattaaaaaaagaatatatataatgaattgttgctgcccaggatcgaactggagaccttcagtgtgtaagactgacgtgataaccactacaccacagcaacatgatatgaattttatactgatgtcattatttgactgtaatacaataaataacaaaataaaaaaaattaaaagtgatgttgctgcccaggatcgaactggagaccttcagtgtgtaagactgacgtgataaccactacaccacagcaactgggatattaatatatttacataaaaattatgtaaagctaatgtacagaataatcatttaaagactaccgccacgcgccacctgtaatagtcgaatcgagcgagcgacag

SEQ ID NO: 104603 - DNA, 953 bp, Mimulus guttatus
  Intron number 2 from transcript mgv1a011523m (locus mgv1a0 11523m.g) derived from phytozome v7.0 (chr-ID scaffold_366 ; pos 73859 to 74811 reverse strand)
agtgttattgtgtcacctgtttccattgatttctcgtaagcgcttctaattcgtcgcattcatgatttatttgaaatgcattataattgattcgaaactgcgtaattggcaaatgtatttcgtttcattctaaattattaagctacaattggtccttttatgcaagggtaaatatgtccgtcggagtggctaatttaaattcggtagtagtccagaagagtgagtaaaagtttgatatggataggtagaaatataatgaatttcccgaattctgtataaaatcagtgttttcagttttcactcgtttgtatctataatttgatttgtagtctatgaaattatgtggtgccatcaagagaaagaaagataaacaggacttgaattagattcgaagctcgtatatttattttttcttgtgtgtgtttttctcactaccacgcaactaccacgcaagacaagcataaacgagcatttgattatggggatatagatagtatataatttcagtaaggggactatgaaattttcgtcttttgaacaagattactgggatgatgactggaaagtgtataactgacataccaatcggaaaactgtatttcttataattcctaatcttaaataaaatctcgtattgagaaaaaatgtattcccaaattgctctcatgaatctagaaaagaatcatctatcttctttggcagtggttaatcggctcatactgccaaaaattcgattcatcgaacgtcaaatgcgaaagcagcataccttttattttttttcatcttgttgtaatttccacataatcgtagaacaatacatgtttctgaaaaatatgcatgcacacacggccccctttatgacattatgtaaagttgaataatacgtcatgatattcgacaaaaaaaaattattttcaggattgaggcattcggaggagctgaggaggtgggag

SEQ ID NO: 104604 - DNA, 861 bp, Mimulus guttatus
  Intron number 1 from transcript mgv1a016267m (locus mgv1a0 16267m.g) derived from phytozome v7.0 (chr-ID scaffold_1; pos 390637 to 391497)
ctacctctctacttctcttgctagttatcttgacagtaagtcatatatatacatatgtatatgtatattgatgtatataatgccttagtttttatggttattagaaatttgaagggatgcatatttgtttatgggtttttttttttgaactgtggcattggttcttgagtgtttggtgggatttttatgcagtgggtctctgaaattctgtagtttgagttaaatgtgccacgtggattgaactatacttgattgagaaaagatggtttttcgacaaaaaaatccagtgaatactgttagatgcttgatgcctttcgagtcaggaatgggtctcgttgtaaaattttgggattgtagaaatcgataggaaaatcttttcgttgtcaactgtgaaagtagtgccttttttttctcattgttcgtgtaaatgtcatagctttaagagtttatacgaacacttaatccgtaagtgatatgccgctaatgtttatgcacggtcgtttcgcttgtcatggttgaaactttagctatcttgtaaattaagctattcatttttagcgattttagaaatgtcgaccaacgatagtatcttgttcccttacaaaagtcctaagcatcagtttgacttattggtgtaaatattttctcttacaactactaattttcgtttaaaatgcttcaaggtggagtctttaacgattttcgttttctgaggttcggctgtagtcttctttttcttgataacaattaattcgtgggtttttcatttttttttgttgctgcaacttgcactttgaattgagatgtttgttatttttttcgccagagaaacttcttgtattacttcgagacggccggaaa

SEQ ID NO: 104605 - DNA, 813 bp, Mimulus guttatus
  Intron number 1 from transcript mgv11b015559m (locus mgv11 b015559m.g) derived from phytozome v7.0 (chr-ID scaffold_3 14; pos 10077 to 10889 reverse strand)
ttactccgccgcctggttttgtgtgcccgccgctggtctgaacgacgtcgttttcaactagggtttatggggtttttttttttttttttttttttgcttttctttttttgtaatgagtagtttaattttggttggtgcttttaaattgtgcttctcttggtacagattcaggggaatgtgccatgggcttcaataataactaatgtgctaatgaatgtggaattgtgaaaaataaaataaatgtaatgtttatttgtgttttttttttactgcacatcttgtgctatggttaataaaatttattttccgatcaaaaaataattgggctattttttttttttggaattataagtgatatgggctagtttgacaagtaacaaataagcataagcccattagggtaagcccaatatgataggcccataatgaagaacccatgatgtcttagctcggtactatgagcgaagccgtcgtatggcgcgaacctcggaactacgtgggagtaccttaactcgctagcccaataccaaaacggggtaaggcgagcccaggacaataccggcccaagatacatgacttgggggaaaagagaaaccctaaaaaaggaaagccttgaaggccaagctttcctcatctataaataagagaatcaacacacgcacacacacacgagaaatatatacactaattactattacattacacgtttttccctttattccgatcactgacttgatcgtcggagctttcccgccgggaacccctcccggcgttgcaggtctatccaccggagtacggacgaagctggcttga

SEQ ID NO: 104606 - DNA, 711 bp, Mimulus guttatus
  Intron number 1 from transcript mgv1a004993m (locus mgv1a0 04993m.g) derived from phytozome v7.0 (chr-ID scaffold_24; pos 654973 to 655683)
ccactgattttatttgctctgaggttagtttatatcgattttcgtgatctgggttttttttttttttttttttttttttgtttttgattgttaaagattggatctttagggtttattggatcttgattttgttttttagttcattaaatatgcaattaatagattttggatgtatgatcttgtgaaaggatttggaatctttttgtttcttgtatggaaagttttttaactgaattttttttttttggattgttataatttctgccggtgaaaattcgtgtggggtctcaagtttaatgtgatcggaactacgcgatcgaagctaattaattgtccgtaatctggtttcaaatgagaacagcattccttcctttttgtgctgtgtttgaaaatatagtagaagaataattggcaaattaagaaaaaaaatggctcgacaaagaatcgagcatggccactcttttggagagtttcgcctatccggggttttgatgcttaacacgaaaaattcaaatgtaactattttaaacgcctttaagtttggttagtggcgtattgtggtagatcaaataatacattgcattgtgtactgcagaatgaattattgatttgaattacgtgaatttttattcgtgatcttagctcgacgttcatgaaactggtttatcattttcagtggatcgaagagccaactatattagtcactcgttt

SEQ ID NO: 104607 - DNA, 842 bp, Mimulus guttatus
  Intron number 1 from transcript mgv1a001012m (locus mgv1a0 01012m.g) derived from phytozome v7.0 (chr-ID scaffold_6; pos 753580 to 754421 reverse strand)
aactcatcgtttcttctttccacttcccgctaaaggtacgcctatcccgctgcatttctccctgtgttttttttcttttcttctgtgtttataaatttcgtgttgatcgtacatgcaaccgtgttttgtatattttttccgcttgtgggtttcttcggtaatgaatgtatgttgccattatgaatatgatgctctgtttttcttttttttttttttttttttcagtttgaatgtattattaaattttcttgagcgtattcatttgtcagacggtttcaagattcagtttatatatctttgtttgtgttgtaatcaccgtcgttaatgtacatttggccggtcgactttggacgtgatattggtaggtctctcgtttggttgggaagataagccatgattaactaaataattggtaatttgataattgaactctgtttgatgtttggtgttcccaattatctcgtcttttagggagctcttttgtcggacaacccaaagttcgataaaacaatcgagtttttgttagatttatctaattttatcttgaataatcttattttggtagccaaacgtggccttatgtttttcttaatgttcctggtacaatctcttggtggaattaactgtttaaaacgaaagaaatatgaaccataaaagtatgatatcggcgtttatgtttttcgattgttttggatttgtttggttgagtaatgtcatgaaagttccatatatgttgtgtatctcataatttgttttcttggttcattaaatgccgatcatattaatctcttactttccgatttttgttttctgacagaatctctcgagaggtatatctaaca

SEQ ID NO: 104608 - DNA, 752 bp, Mimulus guttatus
  Intron number 2 from transcript mgv1a024667m (locus mgv1a0 24667m.g) derived from phytozome v7.0 (chr-ID scaffold_44; pos 1538120 to 1538871 reverse strand)
attacttgagtcgcgattgccaccaacacttgaaggtacaaatctcattgcgcgttgtccaataagaaatagttgcatgtttacgtatttgatttgtttcttgtgaacacgggttttatgagttaaaccatgatgcttcttgtcttgttattttaagtgagaagtaactcaaattatttattgaaaaaaaattaaaaagtgatatatattgtgtgatagtgagagagaatatatataaaaaaaaataatgaactaaaaaaaatatatatatttaagagttatatatataatgtattgatttcttaaaaaatatcgatagagtgttttttttttttttggtccgccaccaataaaaagttatttattgaaaaaatatccaccgcacgataatatttttatattttaaaatatagtatttttcaatagaatttttttgttgtataatttatttatttttttagttcttcctttcaacaaaacaagttttttcggtgtttatatttaaaatacaaataaaattgtgcgcgaggggggtgagtgtgacaaatgatactttaagggggtgagagtgacagagtgtatacttttgggatatatatatatatatatatatatatatatatatatatatatatatatatatatatatatatatatatatatatatatatatatatatatatatatatatataatattacatgcatgcatgtgtaggttgatttaaagctaaaagaaagctctgataagct

SEQ ID NO: 104609 - DNA, 807 bp, Mimulus guttatus
  Intron number 1 from transcript mgv1a018569m (locus mgv1a0 18569m.g) derived from phytozome v7.0 (chr-ID scaffold_273 ; pos 27955 to 28761 reverse strand)
ctggttcgattcattatccaagaagcactcctgatgtaagtattctgtatctatatctctcacacactttcttctgtgtgtgtatgtgtgtgtgtttttttttgtttcttgattcattggtttgatgaaatatttccaaggatttcacggttttatctatcctacacccggtgaaggttacaccgggtgatttttcaccgttgatctacacacaccaatgtgggtgtgtgtgtgattgtgtgtatattaatggtaaagatctacccggtgtatttcacccggtgtaggatctcaaaagccggatttcacatatgtcattatccttaattaaagaaaagattagcacaattagataccatatttaattaatgatttctataattgcttttttccaacttaataaaaagcgtgtcccccccaaaaaaaaaagaacttttatttcattgcatgtaaaagcacgactttaatactttggcctacaaataattaatttgaatttattgctgctggtaaaggtgatatattctgtaaaatttgtgatccccttattaattgtcaccttcttaaaaatgtacacatcacatgcaatgaagtttcgatttatcagattagccctcgtttggttgcaaagattagctaagattaactgaataattggacctcgtttgctgtttcgtaaacccaataacttcccgggccagacccgaaaatattacattatcatgaattatcttggtttttaaggatatatatatatatatattgtaaaaataattgagttttcattagattgattaactttcgcag

SEQ ID NO: 104610 - DNA, 984 bp, Mimulus guttatus
  Intron number 1 from transcript mgv1a023281m (locus mgv1a0 23281m.g) derived from phytozome v7.0 (chr-ID scaffold_96; pos 609876 to 610859)
ccgccggtgaggaatctaggacgataattaaaagggtaaaatgctatctccctatatgaatttctatgctacaacggattatttacaaacctccaattattcatcgtagatctgcatataatcacacacacccatttttaccgtagaacttcgataaattaataacctcgttgaaaaaataattaattccggtccctactcggtaaaaaaatactaaatttttagttcgataatttaatattcgctaaattaataagattttactagtcccgaccgactgtattaatttatagaggtttaactctatacgtgcttagtgtgttcacggctatttcgaccttacacccggtgataaacaccgaatggaacttttgctgacacgtgtatttttttgtatttttctaaaacacctacagattaacacaagtgggggaatatataaatataacatctgtcggtacaagactcatccgatgtttatctcctggtgtaggatcgaaagaaccgtgggtccacggttaataaatattttaaatccccctcaaatctttccatccaggagagtttctagcaattaaagaagcacaatagaattttgttattcgtcaaagaaactgttaaaatttagcttggaatgaaaaataataaaaattaataaagacaatttaattttttttttagaaaaataagaaatattttggaaatattgagaagtaaaatgtgccagaaaagaattaaatatatttctaaatattgaagttctgaattattgtaaaattattttcagtgttttatagttttctgcaaaatttgaattattttgaaaaaaagaagggcatctatttcttattgcctataaattatttgcatgcttatatagtagcttcacaaaagaaattagttgtgcacaattgtttctaatcatcaggtgcaactgttttaacgacaggatccaacaatcaggcgagacagagttgtaggttt

SEQ ID NO: 104611 - DNA, 638 bp, Mimulus guttatus
  Intron number 1 from transcript mgv11b006449m (locus mgv11 b006449m.g) derived from phytozome v7.0 (chr-ID scaffold_1 93; pos 303042 to 303679)
cccggtggaccggttgctttgttcaaggacaattggtaagaagaataacaattttgttttttttcaattggatgtattatttaatttacgttgtttttcgtattatgttaataataagccaattaaacgaaaaatttcttctccgaagtatagtcgtaaaagatgttatatgtatggatttgattctgaaattagtgtgtgtatgatgttcgttccatgatgtatcaatcgatggctcgtaactagtgatatttgtggtgctatgttcatgtgttgtaattgagtagcttatgttgaccttttttttaccacccgtttaaagattcgaaagttcatgaaattattaaaaaaagaataaaggatgtggtaataattgcgaatattgctcgatttggtctactctggtttgactttagagattgagctggcccgtgattgatcttttttataattgctcttcggaagtagggtttcgggtttcgggtttctttcatctcgtataattgaaggttctggtgttatgattagtttcttccttcccgagattaatatttttaatatgctgtaattttgctgaacgtgttttttccacggcattaacaggacaggaggaactgcttccggcatcgtacattcca

SEQ ID NO: 104612 - DNA, 916 bp, Mimulus guttatus
  Intron number 2 from transcript mgv1a016335m (locus mgv1a0 16335m.g) derived from phytozome v7.0 (chr-ID scaffold_66; pos 496318 to 497233)
atcgtttttgctgcgagaaacgatcaaggtttatcatctttatctttgattttatcgatttattacaagtttatgtcctgttctagtgtgtgtgtgtgtgtgtgtgtgtgtgtgtgtgtgtgtgtgtgtgtgtttgcgtgtgtagttgcgaatttgatagatttttatttgggtttttctttctttcctttctatgttatgataactgcaatttgggatatcggcaaagttatgcacgcttgtttagtgttatgttgtaagagaaatgatgttgatttggaaatgtttcgagcagtagttacattatgagatattctcatacgaaggcgtaaacgagttcttacatgtgtcaatgtattagaatctttcatcttcaaagcttgtttctcgactgtaaacatgcctactccgatcttttgatttgaaagccgtactttttgacattgttttatttctgatggtgtactttttggcaatgcattagaatcttgtgattcgaaattataatctgtaatttattttttgtgtattttctatgtttagtgtaaggggatttcataagctcacgacacacatagtggaaggttttatcgatcatgtgattttctttttcttcaattttgggttttttcacataaaacttcttgcatcaaatctttactcgtgtactttattgttgaaattcttggtttgattggtctctatggcaagacatgcttccccgtttttagctacataagaacgatgttacatgatacgatccttattagcaagcattgaatttatgtttatctttaggtttctatcaatgagcaacattgaatttcttgtcgtataatactcaaacactgataaaattggtttttttttttttctgttagtggacctggtgaaagacgggaatacccttgtccta

SEQ ID NO: 104613 - DNA, 973 bp, Mimulus guttatus
  Intron number 1 from transcript mgv1a006932m (locus mgv1a0 06932m.g) derived from phytozome v7.0 (chr-ID scaffold_27; pos 158635 to 159607 reverse strand)
gtctatcttcactcgctgcttcccagatatttccggtattttatcgactctttgttatcgatttttggagttgggttatatttttatgctgatcggattgtattaattggtaatatctacttggggattgtgttcatatggaattttttattggagggtgaaatgatgcttcctgatggaaggagaaactttaaatttcttatagaaaatatttccgcggatcgatgttatcaattttttagccgtaaaagggtggttgcatgggttttcttgatattatttgggggagttagtctgttcgtcgactatagcttaatattccacataaattgaaatattgtggtattttactgtgtcatattcttctttcagctgaatcctgaactaatatgctatttacttgacggtcatcgtgttgaaactatcattcgttcacgtgcttcatctttgttcttatttcctagttcctgattttgacttgcgtcagtcttctaacgttttgttgtcaaaaagatcttagattctgaagaactgtaattcttcatcgttccatacgaatatatgtgaaaaagtagttatttaagagagtttgttggagaatggatatccagcttcatttcgtattggagctggatagattaatcagagtaagaaatgtgtgcattccgaagcagttgatccctatgtctcagtagatttaactatttatgaccttttttccgttccataaattgatgtaaacttctcatggttaagtgtagagattaaatattttatcgcagctcctctcggttagtaccaagtatagagtttctcctttcacaccccctccccctttcctcctcaaacaaaaattcccacaataataatatgctacgtgtagatatatacacttcctcgtttttatcttagttaaaccctaatgcagttattgcttcttcacttattgcagtaaaaactgcatctcgagaca

SEQ ID NO: 104614 - DNA, 745 bp, Mimulus guttatus
  Intron number 1 from transcript mgv1a010384m (locus mgv1a0 10384m.g) derived from phytozome v7.0 (chr-ID scaffold_160 ; pos 419152 to 419896)
ctgcaccgataaagtctcgcgatcaacggccgcaggtatttatctcatcatctgcttatcattttcattgccaattatttaatcatgtaaaatgaagttatttctaaaaattgcttatttttaagaaaatttatccccttgatattcttatttaccatttccagggtgttttgactcctgcacaatacatacttttcgttatttcactacaaatgcattttatttcttttgtcattatttgaaatggggcaaacaaaatattatcgttgtctgaattgaagcaatttcactgtccttccatttctgcccattgtttatgtgatgtcttcttattgggctggtatggtatatcgttttatgaaattatgtactaaatgagtagtttgtgaagttggagaacctcttgatggaggagcttctattgccacattgctttccatatctgctgtaaaagcaaaacaatcagagaagctatatgaattccggtagaataaaatgttggtcggtcatggacttttttatgtggaatttcttcctgttgacccatattttaacgttatttttagggcatttatgtttgggatacgttatctttgctcttctgtttaatgcaatactatcattgtgtttatattgagataactgcttatagcttgtgatttagcatccttggatgcatatgatatctttacgattaactgaggctgtatattcttgtatgatatgaataaaggaggagtggggt

SEQ ID NO: 104615 - DNA, 431 bp, Mimulus guttatus
  Intron number 1 from transcript mgv1a016056m (locus mgv1a0 16056m.g) derived from phytozome v7.0 (chr-ID scaffold_29; pos 1213540 to 1213970)
tctctctctaaaaccccccttctctctcttaacaggtaacttcttcttcttcatttcatacatttgttttctattcatattttcttccatttttattcttcatttttcacttccgccaaacacgatcttaagatcgagtcccaagtaaagcagcaccttcaattttttttttttttttttttaattaaatgatcgttcttgtatgatttgtcgattttttttccctttgttgtttgtatgatttgtatgtttattttatttatttaattctcttcgtctatttgtgtttactattttgatgctgcttcctttcaattgattttcagccactttttttttttttggggggaaaaatgacctaattatttagttctatgtcatatgtttgattttaatttgtaatttttttttggttacagcttactgtaaaa

SEQ ID NO: 104616 - DNA, 556 bp, Mimulus guttatus
  Intron number 1 from transcript mgv1a007357m (locus mgv1a0 07357m.g) derived from phytozome v7.0 (chr-ID scaffold_102 ; pos 523640 to 524195)
gcgtcgcagttttcactcatcctcgttgttctccggtaaatttctttttttttttttcgaaaatgaatgtatttaatcagcttgaaatgaagaatttggaaattcgggctttggtgaagaaatcatatgggctgtgattttagttcagttagtagaaatcatatgggctgtgaaatgaatttttttttaatggttttgatgttgtttaaaattgtaatggcaaattgtaaacgtggacgaggtaatcagaaatgttttaataatgtgcttgctattttaatgtataaagctaatgcctgtatttcagtatatgattttcttttgtagaattaagtgtgcatttgatctaattttgggtcgaacttgagtgtatctgttaaagtatactgacgaactaatcacaaatcgttttcttacggtttttttttttatcatggcgaacagttaacatcaacattaaccccgtcaataactgtgttgtttctcatatttacatgtatgaaaatctgattagcatgtcacataattcttggttctcatgtgaaatttgcaggga

SEQ ID NO: 104617 - DNA, 899 bp, Mimulus guttatus
  Intron number 1 from transcript mgv1a014610m (locus mgv1a0 14610m.g) derived from phytozome v7.0 (chr-ID scaffold_53; pos 1417381 to 1418279)
caatctctctactgataccaacgcctgcaagactggtatgtgtgtgtgtatatattatatatctatatatttacattcattttttattttatttttttaatttcgaggttgaattttatattattttggttgttttggggtttaatcctgagaatttttggaattgtggtccaaaagattgaaatactgctttgcaatttgaagattaggtgggtgactcggttgactcggaattcatgatagtacatcacgagtttcacttttttctctcgtcttaaaattgaataattatttttttggttaaattacacctaggtatgcaaaaataactgtaaggtacatgtagtattggtaataacaacaacatttgtgaaacaattactgaatccacattttcatgttgtagctagggatcaatatgcaccatatttgttttgcgcggggccttaaatggtatcatagacgaaaatttataaatattatataaaataataagaatttaagaaatagtaaaagagccgagttctgtcaccccctaactctatgttgtgtccagcaccgtctgaaactaataatccgtcaggaccctaatagaataagttatccaatgcattattctgttagggtttctaacaatgtttgaggtgtgattgtaattactggtactgcaaagaccttacaattattttaggatactttgggggtttagatgtaatttaccctaattttttttttggaatgaaatgttttttttttcttcataatattgaaaaatagatttgcagtaattaaaaaaaaaaaaaaacatttggaacattggatgaactaataatatataatgatattggtctttttcatcaacagctttgtctccacgatcatcacctccagctcctcca

SEQ ID NO: 104618 - DNA, 729 bp, Mimulus guttatus
  Intron number 1 from transcript mgv1a009180m (locus mgv1a0 09180m.g) derived from phytozome v7.0 (chr-ID scaffold_4; pos 1492744 to 1493472 reverse strand)
cgctgctccgagaaggaattcgaagcgacccaagtgtaaattcctttcctttaatccaccctaaacaatttttaaataggtttgcgtttgttgactttttttttttttttttttcaaattttggaattcagatacggaatgtttattgcttaaaatggtatgcatatggttgattgtctatgtttttgtttgtgagataccgatatggaatgtttgtggctttaagtagtatgaatattgtttagttgtctgtttaattaactagtcttcaattggaaaattaaaggaaatgatctgtttttgggtggaggagtttactaattgaagaaatgcttttgtactttggggcaccgcttcttttaatcatttcgatgatttgtatgtattgtatgtgaatcaaacaaattaaagtttaagaattgacttttgaacggggagcacttttgtttaaacaacccgattttccattggagcttcttaaattagagtattggaaaacaatgttaagattgtgagtttgaactatgcaatctgcttgattcttgtttaataatgttgaccaatttcttttgtcgtctttcaaatgcattgattggcttacttatcaggattatttagcatcaatctattcagatatatgattggaccgaggctgtgaattgagtttattttttcttttgaattgtgttctcagattcaaggtttactcagcaggaacttcccgcctgc

SEQ ID NO: 104619 - DNA, 834 bp, Mimulus guttatus
  Intron number 1 from transcript mgv1a011846m (locus mgv1a0 11846m.g) derived from phytozome v7.0 (chr-ID scaffold_75; pos 676372 to 677205 reverse strand)
cgccacttctaaagacacccctgctctgcgcgcaggtaatttacacacacacacacacacacacacacacacacacacacacacacacacacacacacacagatattatgaattattatatgctaattggttcaattttgtggttgctaatgttgattccacagtttagtgaatagtggtttatagggtttttcgattgggggttatgcttggttcttaaatcttaatgtggattttagggatttaattttgcattttgctgctgtggccttcaattgggggaaatgggaagataaaatcaaatcatctctaagaagggaagaatgaacggtttttcgtaacacgtaaaatttggttccgaatccgattattattattattattcagaagagcaattctgatagttgttattcaacatagcaatgaagcttgagggatttattatgtgtagctaattcgactctatataactaactggcttagctacttctgtgaaaggttttaaaattcgataaatgtcttctcgttgacatcgtagagaaacttacgtaaacgtcaaagatatagtgaagtaaaacagaaattaacatgattagaaggttctactcttctaaattgttgtgagtggtgtgtgactcagttaacaaagaggtccttaatcctatctttttaagtttcttgattagatctttgaaaaactcttagatcacacccgtaaaccttatttagatggctgccaaaaaaataaatcaaatatttgtttctgtattacttgtgtactttgtaacttgtgtatatgcttatgaaagctgtgaatctagtttgtttcaggaa

SEQ ID NO: 104620 - DNA, 797 bp, Mimulus guttatus
  Intron number 1 from transcript mgv1a003575m (locus mgv1a0 03575m.g) derived from phytozome v7.0 (chr-ID scaffold_240 ; pos 290195 to 290991)
actcaggttatataatcctcctacctttcgaaattgacgaaaaattgtatttgttttctgtgttgatttcattggccggcctttgtttttggagatgacagaatttccaatagattaattaatttaaatttcgtgttcatgaaaagtaagattgcatacgttctgagatattattagttattgtgtacacttaggtcgcttttggttggggagattagccgtttgtttggtgtttggtatcccagtaacttgctggctcgacccgcaaatattatgtgcaaatattatgttatcacggcttatcttgccttctactagattatttaatcttatcttggttaattttatcttggcaaccaaacgaggcctaagaaagaatgaaacaggaatgttaggaaatcgtagtttgtatttacataaggttttcccttgttgtttcttttgttactgagtggattgtgtacgtattgtctcgtagtgtgttcgtcttaatttaatcctgatttcctgtcgaatttaactctgtactatcttattagttaaatacgaagaaggagtcgaatcaaactcaggttttgctataatttgcatttcatacagcattaaaattacatggaagcatctttttccacctccaatttctacgccaatcgtagctactcaaaatttccttacagctcgtgttagtgaatattagaacttgttattaatcagtagttagttaattaattaatttatttatttgtgtgttgggcgatgaagatccaagctagaggaattccaccacttttagaagg

SEQ ID NO: 104621 - DNA, 1005 bp, Mimulus guttatus
  Intron number 1 from transcript mgv1a017873m (locus mgv1a0 17873m.g) derived from phytozome v7.0 (chr-ID scaffold_89; pos 893869 to 894873 reverse strand)
cacgaggccacttaaagaatatcaggtgatttctctatgcataactagtatgtacgtttgttaattaagttgattgatgattgatgtttagtggttgacaatatatttagttccatcttctatgcatccttttcgttttaatccgtctttctttctttctcgagtttctacttgcgtttctgtctatactgatttctatttgattggagttgtgacctgaatttttgtcagttgagttttctatgcagcaaacaaagtataaatgataattcaagtaattattatgtatcgattgtgctttaccatttccgaaatccggtatctgaagggctctttctttggcccagttcaatcgactatattgagaatgtttgcagatcttaaattaagaatcctattatatgcattgggcagattaaattttgcatgtaaattattgtttgagaatttcctcgtgaattaggctttctgaactccaaaatcgaagttcataaaagctctaagaaatcacaaattgtagccagtgaaataaatttggagtacttagccacttacgtttgtgaaaattttgctttttgtgcaactcactgtttcaaatttcaatttgaagtgtggagattaagtagacctagatgcgtggataagcgtagtagtttcccatacttgagaatttgggaagaggttggttctcgattgctattctgttaaaaccacctccaactctagtataacctcgtttaccgtgtcttaattcttctcctcgtcgtatgcaaacttcagacttgttattattccaacttttagctcatcattgaattttgcctagcttatatttatgggaatacacgtgtggcttgtgctgccgacacacgcccttttggacacattaatcatcacttccgatcatacttgattcttgattttgctaatcaatctgctaaacagcttcaatgataatgctaatttatttattttatttttttcgtttcgtttgtggtgttaggc

SEQ ID NO: 104622 - DNA, 450 bp, Mimulus guttatus
  Intron number 2 from transcript mgv1a002365m (locus mgv1a0 02365m.g) derived from phytozome v7.0 (chr-ID scaffold_102 ; pos 218434 to 218883 reverse strand)
atgtaagcactgcctgttgagaatgataatgtttttggacatttgactatatattctatatatagtagttatttatcaacatgccttaatttagtgcactgtacgcttttatatgctctttctttgttgaatctatagtagctacacgaatttgtctttatcaatagatatatcgggctatatttgccttatcctatgtcagtgagaattgccaaaagcttttgtttttgaggtttttaggatgtttgctacttacgaaggcttagaattcctattcccttttcttcatttgttgttagcctctttcattttgtaatttattaatttctctccccttctgatttactgcttctgactaccaattttgcgtttttcttttcttccgtttcttagttggtgctaacttacgtgaagtctatgttgttgcagcaagatttttttcagaagctg

SEQ ID NO: 104623 - DNA, 665 bp, Mimulus guttatus
  Intron number 2 from transcript mgv1a026438m (locus mgv1a0 26438m.g) derived from phytozome v7.0 (chr-ID scaffold_151 ; pos 498699 to 499363 reverse strand)
acaaaccaagctgctgctcccaattataattcgtacacacacacacacacacatgtatatatatatatatatatatatatatatatatatatatatatatatatatatatatcttttgattattactttctgatctgatcctgaaattcttacccgtcaatgtatcctggttacttataaaccctagctagagatctaaattttgttgtcaatgaaaatggttcttcttcttgtatatataatatatatattgaaaaaccctatttttaatatacacatatatataagtagtgtgtgtgtggagttaatgtatatatggtgcatgaacattgttaatagtgtgatggactattgtgaagtctgagaaggactagtgctgcttccactatgtgtgtgtgtgtgtgtgtgtgcgtgcactcagtcatatcaacgtgtacggtgtatgtatatatgtatcggagatttttttgcatgtgatcgatcgatcaatcgatctcatttttctgatgatatatatgtatgttatatataattaatatatattcatgcctcgatctaattgtatttaattgattaattaaatagttttggtgtttattaaaaatgttgattgattaattaatgaattaggtggaggaattcatcatcggcatcggggggttcgt

SEQ ID NO: 104624 - DNA, 925 bp, Mimulus guttatus
  Intron number 1 from transcript mgv1a018302m (locus mgv1a0 18302m.g) derived from phytozome v7.0 (chr-ID scaffold_12; pos 2696754 to 2697678)
cagcgatcagagaaacgccatgtgaattcctttctctctctcttccccctttcaattccatcacgaatttgatttttgtcttggtgtcgttcaattttagatgatagtgttgtattcgttttgcttcggtatttttttttatcgatgaatcaaatccccaattatgtggagctattctgttcgagaatctgggtagaaaccctagacgggaaatttgttgttcaaattggtttccacaatcttatggtacaatttttttttgtatacgacactgaatttcatacatttttcaataatctgtgtagtttcatttagagaaagttcgtttctaattttacccatttaatgttcaaagttagtctcacaattgccacataatatgaaaaccagagaatgtaggctgttaaactacaatatgagtgggttttactatacttgtaatgtaggcgtcatccgagtttaattgagggtttgcagtaaatagttcatatattttcccaatattcattatttttatattttttttttcatattttgggatgtaccttagatgggatttaggcccaaaaatgttcgtgtaacctcgtattggcatgttaatatgatgtctctgaactggggaatgaaccacaatctaagcttggtctatgatcctttttcgaaggggaaattaatcgagtagaagaagaaagagtttgtttcttgttatgagagcctatctgtaagattagttagataaattctgataattaatgtataatagccatatttgataattaattcggttatattccggtggactttgcatttcttgattctattgccatgattggcaagatttaaaaattttatgtggcagatctgactgaatttattctggattattgtagggagaatctattgcaagaaggggtgtgacggtgac

SEQ ID NO: 104625 - DNA, 690 bp, Mimulus guttatus
  Intron number 1 from transcript mgv1a002858m (locus mgv1a0 02858m.g) derived from phytozome v7.0 (chr-ID scaffold_18; pos 227955 to 228644 reverse strand)
gcaacaacataaggtcagatctttttttttttactaattaatcatcttctaagtgttttcgttgattaatatctttcaattttctttaatccaaaaaaaaaataaggataaaaaagctgtctttaactctgtatttatgttagttagtgatgttttagtagtccccacttttatcctttgtctctatcatgaagtgtcaaatcttgagctgagttgatgtggatggatagtaaaatacgaaaatcgagaagtttatttttcatttatttcactaattattttgatgtttcgttatttccatctgagaaacaaacattttaacgacgataccatcttgataaatgatcttatatattagtataacgagcaggatttgttgtcttgtgataaactcgttgaagtgaatggtcttactcgaagaaacttctgtcctcggaaattaatcggtttttgtcgttctatcttttcgtgcttacaagcttttttaggatgaaaaatctaccttcccaatttagcattatatccatcttgtatgcaatttcagatagtgtatgttttcgttttcggaattcactaaacaaaaaccgttgggctactactttggttcacccctcaactaaagttaaaaataagttgtttattaagtttgtttttactccaacagatacgtagctagtgagctggcaacag

SEQ ID NO: 104626 - DNA, 854 bp, Mimulus guttatus
  Intron number 2 from transcript mgv1a007260m (locus mgv1a0 07260m.g) derived from phytozome v7.0 (chr-ID scaffold_1; pos 4199619 to 4200472)
tagagtccgctgaaaagacgtggaaagagttatcggtatgaattggaaaatgaatattatcttctcagatgagttgttttcgttacgtgctatttattttgagtagttcgtgtttgatgtcaattttggtttgaaattttgatgcattttcaggattattgtttttgtatgcaatgaaatgcgaaatttagttcaatttggtcagtgattttgaaaaataattatggtattgattattgttaagtttagcatatctcgatctcataaattatttctagaaatgattgtgaaagtggctgaaaatacaacgattacttggaagttaactgggggcacgtagaagttataaatcttatcaactagttataaaatgtggagtattagctcgatatttgggaaattttaagctggatttctcggtttgaactgattaagaacacatagaaaccacatgtaatttgcgtctttcctatgcaagtctcagtttagggtggtccatcagttttgggtgacgatcaagtcgggatgcctcggtataaggtacatgagggggcacacaacccaatgagaaccatcatcagccgcactatcatttttagattttgcatttcgtgaagacagcctcatttatgttacattgctatatctatgtggaaatatctttaaatcaccagaaatttattcttattggatagtagagtattgtcttaaatagtgatgtctgcattggtagtttccacttgattcattctactttttttgcttttatcgtttggaaaacaactttgaaaattcaaggaaactaatttacttgcacgacaaacccaaactttaggttaaactgggtgatcctg

SEQ ID NO: 104627 - DNA, 952 bp, Mimulus guttatus
  Intron number 1 from transcript mgv1a007644m (locus mgv1a0 07644m.g) derived from phytozome v7.0 (chr-ID scaffold_102 ; pos 879078 to 880029 reverse strand)
gaaggtgtttgatgaaagaaatggagggaaatatttgcaatttctttttttagtgtagtcaattgcaaaatttttaaatactattttaaatcattatttagattaagctctaaaatctaaatcaagaaattttatataataataaagcatttcaattcaataataaattttaggctataaaatattaagatagtatagtatttaagtcattagcatatatatagaattgacattgtatcgcttactttgagtaattgatgtgaaatgcgagacatcggtcactacagacgagtgggtaattattaaattcgttactacgtagaaaattgacgaagtatatattgaataataattaattggcgcattggatccacccaaaaaaactcatatctaggttactaattcttgttaagttactagtacagtaattagtgaataatgcgagacattacgaacaaatgattattgaatttgttattacgtaaaaaactgacgactgatattgattaataattaatgagctcattggatcgatccaaataaatatatatccagaatactgttttattttatatctcatatctttttacatgatttaataaattcaattaaaaaaacaattgttttgaagtactaattcttgtgatttattggttaattaaggttgtaaagatgaaataaaaaaaatatatatttattttcatttaaaaataaaaaatggaaaggcagtggatttgtttaagcccaataagttgttttcatttggttaaggcccaatatattgggctatctggtagaaccacgagtttaatcaaaaatcgctgaagtccagataaatcgtgttttgcaagagcgacaataaaaaggccaagaacagagttttaatacaagataaatgagtacaacataataaatagtaaaatacgcatacgcctgtggaagtggaaatcag

SEQ ID NO: 104628 - DNA, 433 bp, Mimulus guttatus
  Intron number 1 from transcript mgv1a003381m (locus mgv1a0 03381m.g) derived from phytozome v7.0 (chr-ID scaffold_293 ; pos 168283 to 168715)
acatcactgcttctccgcttggtgttcctcaacaggttaaataattatttcttcatttttttcaatttttcaattttcatccgttcactgtgtgtttgtgtgttttttttttttgtttttctgttttggttattggtgaatttaggatttatcgaatttgattctgtttttgacttgtgcggatttgtgacttctcaattttgtaaaacttgattttgattatggataaacactagcagtaaattctatgcagattttattctattccctttcggtttcgattttgatttacattaatttggtgttcttccaaactagtagtatttttctttgttacttattatttgataattcatttttatttatttatttaatatttgcatcagattgtaattatacacaatgcattcccttttccaggtaatagcagtca

SEQ ID NO: 104629 - DNA, 917 bp, Mimulus guttatus
  Intron number 1 from transcript mgv1a010408m (locus mgv1a0 10408m.g) derived from phytozome v7.0 (chr-ID scaffold_24; pos 536996 to 537912)
atctgcgcgaaagcgcactgctggagctctcaaaggttttgtgttattttccgttaattaattgtttttatttattttggttgattttttttttttataggatttttcgtgcagaaactttacctttggggaatgattttttcagtaaattatatgtgttcattgagctgtattaatatactggaattaattgattttcaaccgattagattggtatgatcagtggattttttcatgtatttgagtttgtaatagatatgatattattttaattaaaattgcactctgcaataactaaattattaactcgtcaattaattattctcttcatgtaatagatttttatggcctcaggtttattaatttatatctggttgtagttttttggtgattccaatggattttgcttgatcatctttcaatgaactaaaaattagtgcaaaaatcccttaagcatttcctgagcgtgtgtccgcgcggtttattctatgctgtacgtggacaagttcaccgggtatatatattgtcatacacatgtattatgtaactacatgttttacacacatccacatgtatgtgtgtgtgtgtgattgtgtgcagatcaacgatgaaaatgtactaccccgatgtagcatagataagtccgtgtgagcgctcacacaacaaccaaccaaaaaaaggcttatatattatctgaactgcgtgtgcaactttcatgttttgctttcaaattccctgtctttcctctaatatggttctttagtaacaaagttgtgtcgtccaattggcttttaagtcttgttctttttccgtttgtttggcgaagctgattcttgcttagataatctttttattcaactgttaattcttgtatatcttatcgactttcttgttttacattctaatagaagagagaa

SEQ ID NO: 104630 - DNA, 576 bp, Mimulus guttatus
  Intron number 1 from transcript mgv1a007621m (locus mgv1a0 07621m.g) derived from phytozome v7.0 (chr-ID scaffold_106 ; pos 557934 to 558509)
gctccattgtaagcatccatcattctctatttttcccaccctttaattaaaattaattttaatccatttttatcatataatttagggtaaattacgaccacccctgaggtaatgttaaattactaaaaacctcctcctgttttaagtaattacaattacccctcaacgatgaatcttcttgacctcgttaaatttagtggaatcttctagattatatggaatattctcaagtttgtacccgttttatcccattcgagctccatattttgaagcaagatgaccgttagatgtgttttttggcttgtatataccagattgttgtgcatcagaaactgcatttttgcacaaaactagttcaaactagagttcaaactagagaacattctacgaaatctagaagattatattgtatttaagttgtaattacccaaacatgaggggttttttcataatttgatcttacctcagaggtggttgtaatttaccctgtaaattttgtgtgcatttcaaatatttaatccattgtcttaaacttaaataggaagcctccacggcaaagtacatagtgcaacaata

SEQ ID NO: 104631 - DNA, 589 bp, Mimulus guttatus
  Intron number 2 from transcript mgv1a001460m (locus mgv1a0 01460m.g) derived from phytozome v7.0 (chr-ID scaffold_11; pos 245907 to 246495 reverse strand)
aactatagtcctcagggttttaagcaaccagagtaccaatatctcaaacagagagatgaatttcagcctaatgttttctcttgctcaactgagaaaaacccctgcattgacttttcaggtagtaattaatgtgtcgtaactgtcgtctattatcttcttttggtttttttatggggtgaaaatttatgattggtgagattgccaagaattaaaggtgattctgaatgagacacgtgtaaatgcatggatatcgatgttttgtttatggcttgatgaagataaatagtatgtgaaaatggagatattgacttcaatgaagaaaaatgattggggttttcattcttatgcaggtcatgaattaaaagacactttatggcttcccgggaatacatcaaattccgtatctgatggcattcaaaggtgctagtttaaaaaatgatgaaattttattaggttacctatgtacagttgtagcaataacctcggatcatcaataagtacataataattctgttattcttcttggatatgtagcatttattttcttgatgtgctatttttgtattaatccagagattgttcccccggg

SEQ ID NO: 104632 - DNA, 552 bp, Mimulus guttatus
  Intron number 3 from transcript mgv1a009653m (locus mgv1a0 09653m.g) derived from phytozome v7.0 (chr-ID scaffold_17; pos 2103738 to 2104289)
cattctcgagtacgtgtctctgcattttaatcaaataatcgggttttgctgatgtcctattttgtgtactcattttttgtttacccaattatagttttattgttggtttcgttttacagaaatgaaagagagaatatttttgattttgtattttctttgtatttaggtaaaatatatactggatactttcggtcgttaaattcaaacggtcttaattaatctcaacctggcattgctcaaaattcatatccattgaactgctgttgcttctatttaagttgtctgtttgcatcctaaactctgtggtaatattacctgaaattattcgaaaatgtatgtaaagttcttgctgttaattgcaagtcagaaatgtttgaaagttggatcatgttatcttctacgagttagtgtagttactggtgagtccaagagttagaaaaaaactatttcaattatacgctatattcttttgagtaaaaaataaaacgggggttgaacagaaacttgtaatacaatgcacgagacaggtgccaaagaagctccagttgtccg

SEQ ID NO: 104633 - DNA, 864 bp, Mimulus guttatus
  Intron number 1 from transcript mgv1a008875m (locus mgv1a0 08875m.g) derived from phytozome v7.0 (chr-ID scaffold_102 ; pos 87436 to 88299)
agcccatatctatcaacctctctcgttgtgaatctgtatgtatcgattcttgatcttgacctaattttgtgttcctgttggtttgagttcttaattcccaatttaatctgctacttccccagtgaaaattttccttttaattttggattcatgattttggtgttttctctgtgaagtttgttgctttcttgtcctgcttttattttatcgaaagtgggcttcgttctatatatctctgttagttaatcttctttttatgtgttgttcatgatccaatttttaactgctttttatatggtgtgcgttgatgcatgtgttattatccttttttttgaattctgcttcgactgttatgctattgtgcgaattatggtttccccgtcatgctgttatctgttggttaggttatatagtgagaacttgatctgggttttttttttaattcaattagttgagcttagaatcatgaaaatagtattcctaatctgaatatgcaaaacttcatctaatttcaggaaaaaaaaaaagttttgatattcaattgttaattggacttcgattcgtctattttcacgtggattaggaaattggaaaaagaaatataaaaattgaacatgcacttagatattatcatattttgggatgaacttctactccatatttggtttgacctgatcttatccagtcaccgcctaccatgtttaattatacttgccttggagagtgattatatgtagtgtaaatctacctcatttgcttgctatgtttggatttactttcggtcgtgatatgggtcacatcctaacaagatttattatcttgtaatcaggctctgagctgctcaacaagtgaacacactaccac

SEQ ID NO: 104634 - DNA, 857 bp, Mimulus guttatus
  Intron number 1 from transcript mgv1a009055m (locus mgv1a0 09055m.g) derived from phytozome v7.0 (chr-ID scaffold_64; pos 176363 to 177219)
gccttttccgttaaacctgatcgtcctccaattcagtaagtgctggatcatttcctgcgtttttttaattctccaatcagtttgttatattatagtgcatattttcatctattttttgttatgttgtcaattcaagctattcaattgtaagcttattaacgtaattttcgcctttaagattccacattttatactcaattacggtacattatctagttctaatgatcatgtatctgtcatcagttattgaatgaaaaggttatagagaaatggcagttagatgctgtaatggatagaggggaatggctgagcgtagtatcaaatttgttttttcgttaatatttgatcattaattcggaattctgaatcaagtctgaattttatgtccagtgtatcaaactcttagtcagaggaaaattattgaattgtatcaattcaagcacaatcacgggctgaaattttcattctataaagcaagagggtggttgaatttgtggatactggccgaggaaaagaaaataaataattaggttaataaatttgataaagtcaaaacttacagctttacagtattactatctacttcttttttcggcaaatgtattcagtgctaaatctggaatctggttacactaattccaacaatgtaatagtcacattaattccatgatgtgtttttggccttatctttctctttctgtgtgagcttgatttgtaaaggttcttcccatgtgtactttatattgatgtttgcttatttatcgtcttttgattttttcaaatctttgcgtattcttgttcttcctgaaaaggttttcttctctgtgtttctcgttttaggttttcatcacaaaaat

SEQ ID NO: 104635 - DNA, 477 bp, Mimulus guttatus
  Intron number 2 from transcript mgv1a014218m (locus mgv1a0 14218m.g) derived from phytozome v7.0 (chr-ID scaffold_37; pos 400068 to 400544 reverse strand)
ctcgagttcttatcaggcaaagacatatcaggtatacatctatgtagattcccctatagacgttttagctaattagaatgcgtatttcaatgaatcgaaattttgtctggatggcacctctgtgtatggaattttctctcttcgattgtgccattagaaatagaaaaatctatggagaccctctagtaatgctgttttttcttgtaattattagcttcacctgtattaaaaacggtactagtctagattcggctatgcgtagatccaatgtggtttgaaattttatcttttatgtggagtgcctttctcaaaggtgttggaattcaccctctagtaacgccattgtttcttgtgattaattttgttttctttcgtcaatctttgcgttccgatacaggagtctatctatatttccattatattgttgtatttatatttgcagggttggaaggcaagttgtaaacgtgccctcgttca

SEQ ID NO: 104636 - DNA, 473 bp, Mimulus guttatus
  Intron number 1 from transcript mgv1a014218m (locus mgv1a0 14218m.g) derived from phytozome v7.0 (chr-ID scaffold_37; pos 400896 to 401368 reverse strand)
gtccacgtctgcttttaccgcaactgtaagtgccctagcttttcttcgattaatgcatctgcatatattctgtaatatatatatatataattgtgaattgtgattactgtacgtcgtaattgttaaatttccacgttttatatgttttttcttcctcttctgctgaatatccgatcgattttaaggtgtgaagttccggtttcatttgagatatcactgatttttatattaattattcttaaatttaaaaattctgtgcctgcgttatatgattttcgatttaattcctgaaagtattaaacttttctcgttaacgagatcggagattttctcagtgggatgtttgttcattttgtagctgataaatcaaattttgtttgatgcctacaattaagtaattgttaccgtaagtaaacgaaatgtatgcaaatcatgcacgaactaacaattgaattgatatctgtgtgtgccag

SEQ ID NO: 104637 - DNA, 736 bp, Mimulus guttatus
  Intron number 1 from transcript mgv1a005744m (locus mgv1a0 05744m.g) derived from phytozome v7.0 (chr-ID scaffold_66; pos 903066 to 903801 reverse strand)
gcggcggtctccatctccctcctctctattttcctgtaaatttctcgttgcctttttcttcggaatgtcaattttgttttgtaaatgggtagttaattcatatatacagcagctgttttgtgttgtcatttttgtttaattagtattatactcgattattttccttgggcagttacttctttgttgatccggagtgggctttcctttgataagtaatttatgtgaacaatttcgtttattttaatggaaattggagctgtgatttgatttttttttttgtgtggtttttgaggatttggtgctgaatttagtttacacagagtgattcaatatgcaaattcacagagattcctttcggtgataattgcatttcattttcgagaaaccttgatttgggggaaaattttataatgaaagtaacgttttgtttatatttcgggggagacgaatcactgtaccagtcaaatcgtgtttaaaaaaattaagtgttttaacagacgaatttgaaaaataaagtgacgtttgtttgttttttaagtaaaaaaaatcgagagaaattttccgaattgttttggggaaagtttttttggaagaaaatgaaatgctacgaaacattgcataaagcttaatcttcttctcgggggtctcgaaataatttgctagttaccagtggttaattcgtggggattaattgcgtgcaggcttatcggaaaggctgttgcgcctcatctaatcc

SEQ ID NO: 104638 - DNA, 590 bp, Mimulus guttatus
  Intron number 2 from transcript mgv1a012978m (locus mgv1a0 12978m.g) derived from phytozome v7.0 (chr-ID scaffold_164 ; pos 486564 to 487153 reverse strand)
cgaaaatagaggtggattcgtttcgaacttgccaggtaccacggaaattctattaatttagcgaattattaaattatcgagttaataatttaacacgttttcaccgagtcgggttttcaccgagtcaggaccgagagaaactattatctaatcgaggttattatttaatcgagtattaatttatcgaggttctactgtattacatagtttgattttattaatttatttactatttattttaagtcgcatgtgtttggctgtcgcattcggtagcaattgttggagcgacgtgtatttctgattttttaatttttttaaatgtttcttattgaacatttcgtgagttctttttagtagttgtttccgtcgtttttgggttttttggcatgactaattgctcgtacgagagaggtcattttccatctagccatttatcgtagcacgatttctcgatttatcattcaccttttcttcccttctactttttcttgaaatattttttgctccaattattttaatattatataaaattgttttcggtatatattttatcaggagacgttgcgagagtgaacgggcaattggcagtt

SEQ ID NO: 104639 - DNA, 689 bp, Mimulus guttatus
  Intron number 1 from transcript mgv1a000492m (locus mgv1a0 00492m.g) derived from phytozome v7.0 (chr-ID scaffold_9; pos 3188595 to 3189283 reverse strand)
tcggccgtttttcagctcactccaactcgaactaggtatatgattgaactacttaattttgtactttttttttttaggtggactaatttgttttggcttttatttgagttgatttgaatgcctgtgtgtgtgtttttcagttttttggtgatagttgatgacgtgtaattaatcattctcaggttttggctgtttgggtagtgttttttttttgtgtcgtattgtttgggaattttgtcctgcgtttgcattcattatgtagaactttaattaaagctctcttcgcttttacgtattagtatattctgtatttgtaccataaatagaagtacatagtgaatgttcgtttgtcttttaaatgttcgaatatcggaaagacggattcccgagatttcacttttcatcagttgatcgtttgtgaaaagttatatacatgttgatgaatagaaaaacacgaatgcgcaaaatagtggttatatccttgacgacatgtgaaattgctttttttcttttgactatttttaaaatgttctgtacgtatggtgaatatggtcttcatttaatgttgtcggaagcaccgacatagttgagacaaaatgtcccgtagtaatttaagtttccatctgaaattttgaatttctagtctgacagtattccaattatcaggtgtgatttaatcatcatagcaa

SEQ ID NO: 104640 - DNA, 831 bp, Mimulus guttatus
  Intron number 1 from transcript mgv1a015556m (locus mgv1a0 15556m.g) derived from phytozome v7.0 (chr-ID scaffold_2; pos 818501 to 819331 reverse strand)
gaaacccttgtttctagatccgatctccactctctgtaagccttcatttcactctttacccataaattctgtttattattttgtgtaatctgtacgaactctttgttaattgattcgctgaattttgtttttctctgtatttgaattccaaatctctagctgattataattctttgtcgcgcgcatgtgtaggcatcagtaagttgatacatgaattcagccttgaattattttaattttcgactcattaattgaaattgattgtagtatagcgttttgagggatttaaatgtttgtataattttaagtttgagggtcgatctgcaaattgttcctgaatttatatttatattttttgttttttttgttttttaatttaaatcttgtttgtatgatttgagtacaataatggatatgctgcgtcgtagaattttggtttttcgtttaacaatagaattgctgcactttgctcgttttctcgacattgtttgctctgacatcctcgtattatacagtcttgaatgttgttgaataatttacggagcttcgagtgaagtgcaaatagcaattggcttgcccttctcataatgctccaaacatttaaccgctttgttgattggcgaatggacgatcgctattcgttcgttttttttgtatcttcaacaaggcgaacataaccgaatctactttcatttatatactcttgaagcacttatttggtttcttctgattctgatataattcgatttgatttgatatcgatgtattatgatgttgtacttgcacgaaactaaaattcctaaaaatcccgtttttttttaataggagaac

SEQ ID NO: 104641 - DNA, 869 bp, Mimulus guttatus
  Intron number 1 from transcript mgv1a015853m (locus mgv1a0 15853m.g) derived from phytozome v7.0 (chr-ID scaffold_30; pos 1646307 to 1647175 reverse strand)
cctcacccgcacgcaacaacaggtttgcatatctctctctctctctctctctctctgtgtatggatttgaatctgtacggtttttttttttttttttttttgtagtttgtgcaaaatattttctgatttgtagccctcgatttgatcgcgatttaattttgtctatgaatttcaagagagaggatgcaattagggtgttttaattgtgttttggatgattctctctctctctctctctctctctctctctcttataattatgctgtcaattatctcaaattaagcttgaattgccattgaagattttataaaaatacttatgaggatcattgattatgatccatactatataatatatgttcattctctatttggttacatcagttattttgaagtgacaaatttggataaaggtttcggtttggtttcagtttcgattcggtttcggttgtgaatcatgggtacatattgaatgcaactatatcctatgtaatcacatccttcgtatcaaacaggaccttataagattagtgatgctcggataatggaatttccttcatttgtagtatatgcctttagaaccacattttaatcttctcatagggcatccttcatttgtacacgacgataatttgttaaaacgctaggcgatgtaccttttctattcatagtacttgtaaaccataggggatgtgttgaaatctgttatcttgagtcattggcaaatcgagattagtggaaaatttgaattcttgagacgaacgcattttgcttccttctccctaacaaatccctgaccgttgcatcgttttctgttctatgtctgttgaacagtgttcctttgttgagcatcggaactacaaagtcgt

SEQ ID NO: 104642 - DNA, 699 bp, Mimulus guttatus
  Intron number 2 from transcript mgv1a000125m (locus mgv1a0 00125m.g) derived from phytozome v7.0 (chr-ID scaffold_4; pos 3267518 to 3268216 reverse strand)
tgaactgcctcctggtgcattcggtgcacctataggtacatttattttatgttattgattatatcttgaacatcgacattgtgttttggctgtgaggtttagaagaccagcgttgtttatattaatgtaactggttctctttgaaaaaaaatgaaaataaaaaccaaaggactttgataattttatggttttcgaaggatattagctctatctcaaatctgatttgaaaaagggtcaagtcaacaatttcattgtacttcataatccatcaatattaatggtgtctttggtgtaaatctgggagtcattcaaggttaagagattctgccactttctctgagtggctggtggactattaactcgtgtaggcttgcttctatttgttgttaattttgatcaagaatatgaaaaaataaaaactaagatgtatgagaaaattttcttttcagtaaattatcaaattgtataaacaaaaagagcagaaattcgtcggaccaggtcaatgcgggtataaagctaaaacggtcatatactccaaaatgatttgggacttcaccggtggtttgatgtttctgttttttttctttctcaagttgcatcttgtgtttgttgggaatccctcatataaactattaacgtgtctctctatttttttacataacagtgcagagagaacaacaagatagatacagacattct

SEQ ID NO: 104643 - DNA, 855 bp, Mimulus guttatus
  Intron number 1 from transcript mgv11b012697m (locus mgv11 b012697m.g) derived from phytozome v7.0 (chr-ID scaffold_9 1; pos 324818 to 325672 reverse strand)
ttctcctctctggatttgcctcacagctcgcagaggtaattaccgatttgcctcctctgttcttgctctctctccatgtgcacaccttcatctgcttttttttcgcatcaaattttcattttttgagtatattaaattcataatttgagattttttttagcatacatgtatttgtgcatctgctggtagaaatgatacagcttcggtattgggtttgtgctttattatttagatttagttgaatttaacgtctcatttcgatttcgtggcttaatttctgaatttccagaacgcttagggttttttttttttttttttttttttttttttttttaaattttggttagcttttaatatagagaaattcgggtgttgtgtttttttgggttttgtatttcttaaattgggataaaatgggttggcttatgctaggaatcgaggcagtttttatggttaatcggatctatttgcttcgttcacgtaacgaactgctattaatatgcatcttttagtaaaatattgtttagcttttgaatttccgtttcttgtttcggataaatgtaagttctttaagttaaacctggaaaatcattataccggactttcatttaaaacgtgtttttattcggtaattagaacttctcacatggaattcgctattgtggaaaatcattttcttttcagatttaaatgtaagtgtgtattgaacatgtgaagaagaaaatatttatcttgcttcatactatatgaaaatacgaaaaagctcagtagaaattgaagaaaccgaactttttaaaaaatgtccgacttcttaatcgagttatttttcatctctctaacaatttctgttgacag

SEQ ID NO: 104644 - DNA, 755 bp, Mimulus guttatus
  Intron number 1 from transcript mgv1a016285m (locus mgv1a0 16285m.g) derived from phytozome v7.0 (chr-ID scaffold_89; pos 1041449 to 1042203)
gcatctcctgtactcgcacgtcactacatccattggtaagatttctaaacaaaaaaagatcacattttacatcaatataggtacgtaagatttctaaaaaacaaaatctttgaaagcttaatgaaatatgttttaagtcgtacattagttccgatccatagtttcgtcatcgacaattattatattccacaattgtgatgtgatatcttggatattctagtatttcctatcaaacgtcgaacgattgaaacacacaaaaaactatttaaagataagaaaaactctattattcttctatcattttttttttaatatagaatcctattctaatgaaataaattttaaatataagaatcgtaacattgcacccctattaaatcaaccttgtcctcaaggttcgatgaaataatcttcttctttgtccataaacatgcaatcaactcagtgcacctatataattggttgcgggttcctgtagaaaaaaaaaatcgactattcttcacaatctaaactcaattatgtattcaagtaatctaacttacaataaataagtagattgtacaaggttcttgtaatctatcaactaagaaaatctaataaagtaatcatgaacaacaaatctatataaaggtggcttggttcatctcaaatcatacacaagccaagaaacacagtttgagaaaatttagtaaaaaaaaaattcaaaaaaaaaaatgtcccaagagaaaaatattgtaataatgttggtggcagtt

SEQ ID NO: 104645 - DNA, 808 bp, Mimulus guttatus
  Intron number 2 from transcript mgv1a015980m (locus mgv1a0 15980m.g) derived from phytozome v7.0 (chr-ID scaffold_45; pos 956823 to 957630 reverse strand)
aagacaccgaaaatcttgctcgtaagttgaaatctgtgttggttgtggcactcagttgtattagttagattctgcgattgggtgataaccattaacatttgatgtttaataattgctttaattgtgtaatatgatttatcattcagtataagccttacactctcggtttatctattgtcataaaagcaagaaattaactaaatgctgagtaccactagttgcatttatgactttgtttgctctagacatttgttttcgtgtagaaaactacatttatgaaaaggattgtgcctacattgatgaacaaccttgtatactttttttttaaatatgtatgcatctctctatcatttctctcaaatgatcgtctctatatgtgtgttctaatccatccacataaccaactacatgtttgctctgtttttactatgtgctgttcaactggaactgagcctttcggtacttgtcaaaaaaaaaaaataatactaaacataagctattgatctacataaactatgtatgcgattgatgttgggtatgcgtaattgagctataactcttcgtgagttgttttgagctggtaatttcgtcgtagtttataatcgggtagctacttaagttatgtttcttcagcattataagaatgtttgtgtatctatttttctttttttagtaagatttttcttgtatctatattcggttcttggatgttgtgactatctgtaagtgagatagtttgagggctttgttctaatgtagtctcactatcacagacgagaaggttccaacggagttgaaaaaggcaatc

SEQ ID NO: 104646 - DNA, 705 bp, Mimulus guttatus
  Intron number 1 from transcript mgv1a015980m (locus mgv1a0 15980m.g) derived from phytozome v7.0 (chr-ID scaffold_45; pos 957691 to 958395 reverse strand)
ccgcgccggagctgagatcgaaaccattaggaagtgtgagttatttacgttctctgattcaaattttttttttcttttcattacttcatttgtttgtgcgtttccaatttatttttttcgaattgtgtcttccgtcaccattttgttttgccctaatttgcaattattctggaaaattattgatattattgcgactcgatttaggttttttttttttgttattaataataaatgattttccaatattcatatatctttatgcagttactagtagtgaaatatgaggttttgtgtatggattttgtggctgctggtatagatgttttatctttgattagttcaaaatctggcggttgtctttgtgtaaatgtaatagactcttgatcctaaaactatattcatgaacttcacatacaagcttgattttagtagctatcttttccgcaaacacttcgtgttttaactgtaaaaatgaaaccattcagaaacaaatcggaagcgccgtatagaatttttttacctgtctgcagaatgtggcaaaaataaataaaattttccaatcggaaccccaatgaccgttttcggctatgttgtattttaactttatagatattttgttagatttttaccattttcttgtgatctaattggggctgtatcatatagtttgtgttgattgtacgattatgtgttcttatgcagcta

SEQ ID NO: 104647 - DNA, 709 bp, Mimulus guttatus
  Intron number 1 from transcript mgv1a022380m (locus mgv1a0 22380m.g) derived from phytozome v7.0 (chr-ID scaffold_47; pos 71558 to 72266 reverse strand)
tcaagagttgcatttcgctcttgtcaagctcccaggtaataaataaatttgggttcgttaattagttgtgattagggtttgttcaccggtaattagattatgggatgtaccataagttttggatattagggttttcatatttttgtttacatatatactgacaactttttattttgtttttcgatccttttacgaaagttatcgacttctcgacgttctcgatctttttatcgagtttattgagtttgattagttataaattttcttcttgttggttgattaattttctaatttttttcttttttatgttatataatttgactgataaattttggtagatatttattgttcttcttttctttcacgtacatcggtacgttaaatagaatttatagttgacattaatttgcataaatataatgtttatactatacaatttttttattttattttatttttttaaacaatcaaccactaattcaccatcacaaaaaacattattcgttttcttaattagcaattataataatacgtgatatatatatatatatatatatatatatatatatatatatatatatatatatatatatatatatatatatatatatatatatatatatatatatatatatatatatatatcaccacttataagtcaagtagagcagattattgcagattccatcaggcctcacgtgccatacgc

SEQ ID NO: 104648 - DNA, 383 bp, Mimulus guttatus
  Intron number 2 from transcript mgv1a005325m (locus mgv1a0 05325m.g) derived from phytozome v7.0 (chr-ID scaffold_4; pos 593531 to 593913 reverse strand)
gctgcgctccgctgctgcctgattttctggataaggtacgaacgttttctcgtttgttagatgatcgaaggatccgatgattttaaatcgaatcctgcatttttttttctctgcttccaattattatttcgagcagtgattggataaggcatattttttttcttcatgtttattggcggatctgttagatttgtcgttttgaataattattcgattgtgcgggatcaatgttaaattctattggtattctaatcggaattgaattgtacgatcaattcgagatgcaattgttaatcgtctctgtttgcatttgctctctttgtttttttggtggagaattgttgagccttgaagtaaaaattggaatgtgaattgcagaaaag

SEQ ID NO: 104649 - DNA, 669 bp, Mimulus guttatus
  Intron number 1 from transcript mgv1a013625m (locus mgv1a0 13625m.g) derived from phytozome v7.0 (chr-ID scaffold_69; pos 50006 to 50674)
gagctcatcaaatacggctttcccgaagacatttggtactttttttttttttttttttaatttaatggatttttctttttcttctcatttcaactctttaattcgatggatagatcttgaatttttttattggagttgatttgagctatttttttggagaattgcggttccctatgtttttgtgctctagaatgaagaaagttgcaattacggattaatattttttttttctaaattattattctgaagaacctcaatcgtatatagattttaatggagaatttctggttgggaatttgttgaatttgatttggaaggcacgctgtttgtttagattaaacacgaattaggttgtttgtttgcgtttggtgaagggaattgctctttgccagagagtaaagttcattaaataatcatatttcatagatgaaatattcaattttggttgtaagtttagagttttatctccgcattgcaaattcaattgagttggcaattgaatctttaagaatagcttggtttgttgaatttcatctattgagcatgactgttaaatgaattttaagcctgaccacggtgatttgcggagaagttaaatacctaaatatacttctgtaaggttaacccctgttacaacttacgtaacaggaatgatttcgtgcaggttcc

SEQ ID NO: 104650 - DNA, 292 bp, Mimulus guttatus
  Intron number 1 from transcript mgv1a001236m (locus mgv1a0 01236m.g) derived from phytozome v7.0 (chr-ID scaffold_11; pos 326065 to 326356 reverse strand)
gagttgcctttatttcatcaaacaatcatttgaatgtaagtgtgtttgctctgtttctactttctactgtattctgttttgtgtacttttttcttcttcttttttttcgcagtagttgccgcaaacccgaataattagacaagacttaatatcctagttttttggaaatgccgtattgccgtgtctgtgcatcgtaggttagaaacttacctctgcatgtatgatgatctgataatcttttgaatttgttgaaccaggttgctttcttgtgcttaaaggaacacctgcaaat

SEQ ID NO: 104651 - DNA, 967 bp, Mimulus guttatus
  Intron number 1 from transcript mgv1a009537m (locus mgv1a0 09537m.g) derived from phytozome v7.0 (chr-ID scaffold_136 ; pos 635177 to 636143)
ccaaacatcgcagaaaatcgaccgtctttctaaccgtaagctgcctgccctagttcttccaattttttttatttttttatttatgatttttagtcgatcaattggggtatttgaagactcggagtgattgagttcgatgtgatttggatgaaatttagtatcaactgggtctagcaattgatttatgatgctataggcaacaatcttcctaaaatcgtggtgccattctcagttatttttccgattttgatttactcaaggataaatgttgagtaaatggtcgtggtgcaactccgagcttcttcttttttttcttttttggtcttacataaaatcagaattgaatactatttatacggtacctatgctgaagaattgtcaatattaaatactagtccttgtttagtatctcatacagcaaagaagccgtatcccgatatttcaatatacattgttgtttctgacagggcaacgatcgagtatgcagtgaagttagaatctggtcctgccacactctcattattccagaattattgaactaaaatcttaaactctctttgaagttatgttccctcatgcttagtcatatttaagttgtgtgaattcaacactaaatgctctactgaaaacacccctcgttttggtcatttgctgcttttgccttgctaatttgttttcgttctgctataagacgtactttggccctctcacatacatgatttagaaatagtttctttccaaaattttgttgtgtttttcttttcattgagtacatgcattttatgttgtcctgtctcatgtcgactcctttaatatacccttttagagaatacctgatactagactatgtgatagtaataaacgttccaatgagtattagattattgcctttcttttatcagtgctgccctcatgtttctaatacacatgctcatgggtacagtgaccaaaaggtcatctattttcg

SEQ ID NO: 104652 - DNA, 627 bp, Mimulus guttatus
  Intron number 1 from transcript mgv1a018476m (locus mgv1a0 18476m.g) derived from phytozome v7.0 (chr-ID scaffold_129 ; pos 233673 to 234299 reverse strand)
caagggtggagaagtcggctgggcagcacaacccagtaagcttcattcaattgctttcttattcttcttctcttctttttttaggttaatttcagacattttttaaagcatcgattgaccattacttgttggaatgcctgatggataattaggattagagctttaaataatcaattattggtgcaatttgttggatgtaacaaattaggggcaaaaaataatttatttttcagttaaatatttggaaccctaacatttgcttaaaagctttgattaacaaggcatttctggtagagcttgctttattggtttagttttcgatgtgtttttggtttcttcaatttgttaggtgttctttgccttgatgtatgaactagggtctccatgatttgagttgcttaattgtttatgcatttttctttgattttaggataaacgggaagtgttatagttgtaatgggctatataacatggttttcttctgggatcggttgcaatttattccatcattaagttaaaaaaagatcctgcttattactaacggttgttctttaatcaccatcttattacaattgattgaatttctgacatttgcgtttggttgaaaaaaaatgtcagtttgggcgg

SEQ ID NO: 104653 - DNA, 146 bp, Mimulus guttatus
  Intron number 3 from transcript mgv1a001445m (locus mgv1a0 01445m.g) derived from phytozome v7.0 (chr-ID scaffold_196 ; pos 5149 to 5294)
ttgctgacgtaattattatgttcttgttccatttatttaattatttatttattttgaattacatacatgaacgatcttcttgaaaaaaaataaaaattcgtttttttgtttttccgtatctgtttagttgcttagagagcaccaag

SEQ ID NO: 104654 - DNA, 732 bp, Mimulus guttatus
  Intron number 2 from transcript mgv1a010227m (locus mgv1a0 10227m.g) derived from phytozome v7.0 (chr-ID scaffold_79; pos 972511 to 973242)
tgggtaggcgatcctgtaaaattgctggcagaaaggtatttacttgtcattttttttttcaattttttttttggagctaagctctttagaatgtgggattgctgtcaaattcaagattcttgattgaagtaaaaatgctaaaatagccctggtagctacaggggattatggcccctgaatctggggtttcggttttggtttcggtttcggtaatgtgcaggtgcgaattcatgtatcccgattcggagggtccaattcattctagaaatgtgtattggatattaactgcttcgatttcttcgtctgctgaaatgaacggtggttattctccagcgctgttttatagcgtggcaggtggatttaaagttgcgttaattcgggatgtaaatagtctgaaaatgtcgtatgcagtttcatcttgaccaataatcatatagaagcttctttttcaccagcttacaactcttccgagggacaagataaacttatccgatttttagtttatgttattctcattagtagaaccggttttctttacaagaacaattcaaacagaggcattgcatgttattcattctgattgaataggcattgtaggtagcatcgttgagtggatcgagagtacaagactatgtttgtccgattagattcttttcatattgtgtgttcttgatacacgagactttagtttctcatagtctagatcacttcttttgatgcagactgctcagg

SEQ ID NO: 104655 - DNA, 998 bp, Mimulus guttatus
  Intron number 1 from transcript mgv1a006334m (locus mgv1a0 06334m.g) derived from phytozome v7.0 (chr-ID scaffold_4; pos 1461955 to 1462952 reverse strand)
aggtgacatacattaattcagaaaggtaagctttgacggaaactatggtacttaagacacttgcatgacctatagcctgtcttttattgtgatatacttggttcttttctgcttttaaaattttattggattttagccaaacagtttcctgtaattttctctagtttctagtgtaccttttgagttctcatttatctgttgatggtctcgtttttacagagatggtgaagatttggctgacactgaagcgagttcatcagacaaactttcaagggtatgcaaatgaatgctcaaaatatgaataactttgtgttagcttcagtactttcagtttaattactctgtgcttttcgcaactttatgaaacgaattggttggaaatgacaacaccagtctacgccatactctagttcctttgtctttattttttcttacaaaaaccaatgtctgagattgtctatgaaacaggaaagtttgaggccacacccaattcaagctagagacagcaatcaaacattaaagaagagtaggtttttggcctttcttgtcattgcaataataaatattgatataaagctttcgttgaaattgtcattctcttttcttgacagcaactatcaagaaaactattcagtccagcactaatgagccaaggaccaaattacaagggcgtagctcttcgattgcatttgcaactggaaggtatgccccatagtttctgtattattaaacaagaaatttcaaattgcttcactaatttgttgattttcagttattttatcctcttatattttttaatcgaagaaaccttcttccttttcttttcttccaggaaatcattcattagaaatcctcttcatctgacaaggttaggatatgcatcttacttttctagttaatttgttaagtgtaaatgattcccgttgccatttgactttttatattgtttatggtgacttgaaggaaatctttaccggtactaaggcaggccagtgggt

SEQ ID NO: 104656 - DNA, 577 bp, Mimulus guttatus
  Intron number 1 from transcript mgv1a009412m (locus mgv1a0 09412m.g) derived from phytozome v7.0 (chr-ID scaffold_121 ; pos 455235 to 455811)
aaggtatattaatcaaacttaattatctttggatcttttaatttatatatatgtataataattagtagcaaaaataatgaaattaattggagttgtattgctacatcaaaattaaatttgattgttatgaagtcgtcttcgtaacgactatatttttaatttaaatttttatttcgcgccaaaattttaatcgacgtcatctttacgttttcttattatatcacataaacagaaaaccgttaaatacattttgatgaaaaatcgctctttatattgacaagatcgccaaaattttatgatccgttctgtcgtttattgcatgttttcgtacgttaaactagtattttataattaagattttgtttatgcatgttttatttttaatctgtcctaattttgtttgattaattacactaatgacatgtttcttgttcatttatacagatcgaatatataattaatatctcttgaactttttttttcttttctaaaattgtcgagataattaattactttatcgatttttttttcttctctttcagttactccggttaagcttgcatcaagcgcgctatcg

SEQ ID NO: 104657 - DNA, 869 bp, Mimulus guttatus
  Intron number 1 from transcript mgv1a020826m (locus mgv1a0 20826m.g) derived from phytozome v7.0 (chr-ID scaffold_54; pos 1267719 to 1268587)
taccttaaagtaagtttttgtttcatcgcaccttgtctttttgtttttttaagtgaaaatagtcgtcgtacgacaacttatgatcgatacatggatcgcatctagccagacacaattggctaatgcgattcatcgatgttaggttgaacacgaaattaagaacaagaagatatagataaaacaagagttataggtagaagctaagaaggccttttaatttgccttgtagaaacctaaatttctcctttatggttcacaaaaatggaataaagttggaaccttgtaaagtagcaaaaaagggcctttaatttggaggtatattgacaagaactttatgtgttgtcacaagcactagattctttagcaaaaaagtatagtcaattcattttctaaataataggagctggtaagacgttcaattaacaagatttttatttatttaaactagctacagaagttaaatttaagtccacaattaaatactattatcgattgaatttgtagcatccctcatccctccatcccgagagggtttgactaaacaacgatagtgttattttatcctttaaattccatattagttttcttaaatgagaggtaagatttactagaattgaacagagttagagggtgtttggctaagcttattttaaacaactgacaagctgttacatcttattttttatatgattaatttttagagtttttagataatgaaatagaaataacataccatatgtaatggtttggaagctattgaacgagatcgtagatttacccggggcacctatataattgctttcgcgggttcgttcgttatttcaatcttggcaggcacatccagaggtgtcgaaacaggatcgaaaaac

SEQ ID NO: 104658 - DNA, 690 bp, Mimulus guttatus
  Intron number 1 from transcript mgv1a011569m (locus mgv1a0 11569m.g) derived from phytozome v7.0 (chr-ID scaffold_75; pos 896990 to 897679 reverse strand)
gtggatccaccaagacactcggaaacttcgtcaaggtccaacttttatttctgcattcgattttaagtttctattcttttattgctatttcatattcaattataaatgctgtatagtttattttgtctattgtttgattttatttatttagtttatgatgttggtaacgagctttacagtttgcctattttgttctgtgttaattatgttactgtttaatgttatgtggcttatgtaaaattgttgttagatgatattgtgatttggtatgttgggctcgatgatgtttcttgatcgaatcattttagctctcgtgataattaatcggctgtttcttgattactccttaagatgatgttttgttccgattacacttttcgatgattgttgtcttgattacatttatgttgattactctttaggatgatgttttgttgtgattgctcactaagatgatgtctcaactcttgcaatccttatatttagctgatctgtttgtgtttcggcaatgatatatacagtgttcgtctctcaattatttctgggtaatgataatgtagcgtattagtggcgttctcttcgtggattctaacgatcttgtctgaaattaagtccgaaatgcggaagctcacatatcaactcttatttttgtgactaatccaagcttctatacttgcaggcaacattcga

SEQ ID NO: 104659 - DNA, 833 bp, Mimulus guttatus
  Intron number 1 from transcript mgv1a016384m (locus mgv1a0 16384m.g) derived from phytozome v7.0 (chr-ID scaffold_22; pos 1311344 to 1312176)
cgcttaagttcagtcaggtaacaccatttctctacgtttttgtatattattttgcatagaccactcacacagagatgtatataatcatcaaactgtctgcgatttgttcaattactttcgttatgttccttgatttgatctagggtttcattggttgtcttcctttggtttctgttgattcatactatattggttgaaacgtacggtgggatgtagtggaactaactagtagatggtgatgcaaggctactgctattattaattgattgcataaataataccttgcttgaattaagtcttcagttattttttaataatttatgaagactcagtttccgagtatatatgatttatctcatcgctgaaaaccctatttgctgatttggttgtcgagcatatgctgtgtattgttggcaatggaattgtggagtcaaatcgttgttaatgatgagttatactgcagcgagcaagatgctttgtcttaattagttgacctgatatctaaatacacagattcattccccaatcatgttaatgcccttttcattcagttgaataatctcaatctgctgctataagaattggattagaccagaagttgcatatttgctcacttaatttagatctgcttttaggggatctaaatatttgatgctgtatgtttactgttacagttttcttgtttactatgcaaatactgttcaatgctccaattggtagttgtatatctaaatttttttctcgtcatttgcgtaactgaaattgattccaatgttttgtgttcatgattaatgttttaaataattatcatatggcatatttttggtgaacag

SEQ ID NO: 104660 - DNA, 512 bp, Mimulus guttatus
  Intron number 1 from transcript mgv1a007562m (locus mgv1a0 07562m.g) derived from phytozome v7.0 (chr-ID scaffold_24; pos 561016 to 561527)
tcacaaatcatcgaacaaaactctcagatttttcggtaagcttcttcctctgtggtttatttcttactcaatttaacatttgtgtatatatatgtatgtatctgtgtatgtattttgatttttctgcaattcatttttcgcttggcttctcttatcttatccattatttaggtctcttgaatttagattattatgcgtaaattctggaaaaataaataaaaaatcgcatgatttttggtaaattgaggaacaataattatttttattcaataattagaacaaaagattggatctttatggctatgatttttgtgtgaagatatatctatatgtgtatgtatactgtaaattggaagatttgatttcaaaagggtttgttcatagggattttaactttttatcgtgtatagtttttgtattatttttccctattttattcaatcgaaacgcgtttttcttcgacattctgaatcgagtttttaatatttgattaggttgttttgttgttcgta

SEQ ID NO: 104661 - DNA, 736 bp, Mimulus guttatus
  Intron number 1 from transcript mgv1a015808m (locus mgv1a0 15808m.g) derived from phytozome v7.0 (chr-ID scaffold_104 ; pos 629057 to 629792)
aaagcaggggttgctggttggtctattttttctccgtaagttctctggttttctttcaatttgttgaaatactcttaattaattcggtttatatggagaaaggtgtttctgctgtgcgtgatttttgcatggaggattcttagcagctaacttttttgtacggatctggtcttttttcttgtgcgtatgatttagattgatgtttgaaatggaagtgtgtatccctaaaatagtgtaatcgagtgaaaaagctttattgatttattttctgtaaaaaagaaaaaaattaggtcagaaggttatcaacaggacgtttccagtatgtttcgtgtatctactgcgtgcagtttgtggttatcataaaatcaaggattaattcaattattgtattgacgttttgctttacagatctctgtagcttgagaaaattctgtctctatattttattatttcatgagtttgtgtcagaggaaaccatggaaaggggtgaattggatgatgagtgggaaaaaaaattctcgaaacttcacggattaacgtttcgttgttcaaaattgcaattcagaaggtttcaattggttttaattggagaagctttataccaaatcgaaaattatccatagtttctcagttcccttcgaaacgagtttttcccttcaaagttcaaaacctaatacttccctcttgttttgggtctgcagagcatctgattgggagtgtggtgattctttgaagg

SEQ ID NO: 104662 - DNA, 758 bp, Mimulus guttatus
  Intron number 1 from transcript mgv1a016327m (locus mgv1a0 16327m.g) derived from phytozome v7.0 (chr-ID scaffold_127 ; pos 379109 to 379866)
ctactttctccaaaaggttttttcttttttcttttttcttttttcttttattatttggatttgttctcacattttcaattttattgttctaaatgagatgtctgcattcttattgtcgataaattgattctagtacaaattaaatcaattagaaatgaatttgctttcatttcatttctagcaaaacatgaattcattctaaacgatctgggaatgtgaaaatgtgcctgaaaaagaagatatctataatatgttattggcttagttatatttgtttataaatgttttatttttggtttactttgaaaccaaattaatgaatttgttttttcaacctccaaatagagtctttaggagtactaagaaatttaggaatcagagtctgctgacaccactttgacttaagtattgattctgatgaaccctcgtatttcttgattgcatcttcaacatgaaatagtcagtctttgtgtttgttcgcttgtctcttcaaaatcaaagttagtttgccttcactggtttttgaccaaatgcattgtcacaaagtgtaatgtgtagtaataaatagctgatgagttgaattttccatatcttacttcattttcatttcatcaagtatagaaattgcttatcaagctaccagtatttggcttgtgttcttataataaacttgtagtcaagttttgttcattttcaaagaagtgatttgtaagtgtgttgcaggtacctcaagtatttgacaaagaaatacttgaaga

SEQ ID NO: 104663 - DNA, 869 bp, Mimulus guttatus
  Intron number 1 from transcript mgv1a026150m (locus mgv1a0 26150m.g) derived from phytozome v7.0 (chr-ID scaffold_148 ; pos 337490 to 338358 reverse strand)
gatttataagctcaacactcttaaaacttgctccggtaatcatcattcattaatttttttttgttttttttttcttacatctttttcgggttaatctatactgttcttattttttttttttttatttatttctttttattgagtgatggatatattttggataaagttatgagatctttgactgaaaattatgtgcttgtgttttttttttttataaattattggattggtttttcatgtgaaaattgattttatttatttattatttttctattgttattatttatttattaattaattaatgtgttcttttttatgtttttgtgaattaggaatagcaagacagatatgattttgttggcagataaaagtttgagtctagcaaattttagtttttagcaataccatttcccattgatttggttgaatgattctcgaaagacgtcgatttagacaccacgctatttttttcgattttattgaaattaagaatgtcatacttgaagatgaatgcaaattgaagactatattcaagataactagaattccgacaagaatatatgtagtctgaaagatttatcgtcttttcgtaaactcgatgaaactcaccattgagatttcaatattaaatatttatagggcggtccatttggattcgaatggaagaattttgagcgaaacgtttcaaatccattgagcttgtttagattgattcattcgataatgtatttcaaatccaatatatctcgactggattgatttatttattatttattttttttgtccttaaagaacattaatatatatccacttttacattttactggtttatagggctctcgttgaagactcaagaccttacggcgata

SEQ ID NO: 104664 - DNA, 947 bp, Mimulus guttatus
  Intron number 1 from transcript mgv1a001085m (locus mgv1a0 01085m.g) derived from phytozome v7.0 (chr-ID scaffold_327 ; pos 95897 to 96843)
acaattatctcgcttttatcttcgcgcacgccgaggttgttgtttttcttttttttgtttgtttttgtgccctagttatattgaattgacttggaagtggttgtgattgaagtttgagtttttgcttagtgattttgttggtagttgttttacttgtttagtacaaaaatcaatgtgcttatcgagtttcggtgattgttttctgatatatggtgaaaaggctaattttggaagtctgtgtcagttatcattcagttggattgttggttttaggacaatgttaagtgagtttcggtgttttggtattaaaaataattatgtttccagtattcatatgaatttggagcaagtgacatggccaagttaagaatgagttgtatgagtagacgaacttaatcatgttccttttaacctaattttccactaattttgttcattttgatttttacgtaaacattctgctacattgagcaagttgttgttgctacattaaagggaatttgtatgggattgttatgaagtatgtgttatggaggcttttatgaaacctattagcatttgcagattgatatgacgtgacaaagaaatggaaagccattttcatgggaagaaaaaaaaaactgatggtaatcaatacaagcttggctgtgagtacttaattgtggtatgaatgagcgtgcaatgtgacgtaatatgtatcacactattagttggtgggatgggtgaacttgtttgaaattctgcaatcatccgggaactattcgactgtaaactaattagtttgaccttgtcatattgctgttttatttaaagatgcactatactaaaatatcaatgtctgtaaacgagtctgtgtagtgaacttttgggctattttggtcaactgactattttgtgaatgtgatataaaaggggatatcagtggaggttaggcaagcagcaggttt

SEQ ID NO: 104665 - DNA, 503 bp, Mimulus guttatus
  Intron number 2 from transcript mgv1a005753m (locus mgv1a0 05753m.g) derived from phytozome v7.0 (chr-ID scaffold_109 ; pos 289610 to 290112 reverse strand)
gaaacatttatcttgacccggtgaccttctcaaattttcgcctactctaatttttttgttttattcttcatgctgtcatttttttttttttttaattatttgattttttttcttccgatgttgatacttataatctgtcgttgttttgtgaaatttcatctccctaattcagtgtccgtaactactaatgatgtggtatggtgaagtttagttgtttgaatctggctgtttttttgcactaggttttttttactactcgtgaaatagggttttggtgttttagctgattgattgtggtgaaatattgtaaaatgtggtgtagatgtctaaataggtgactatagtgtggagatatcttcctatgtttctgatttgcatgtttcagtggcttctctttggtattttaacgactcgtccaaatttgaagtagattgtgaattaattcatggatgatctatttatttgcagatatttttgaaattcattgacacggagcagtttca

SEQ ID NO: 104666 - DNA, 867 bp, Mimulus guttatus
  Intron number 3 from transcript mgv1a010270m (locus mgv1a0 10270m.g) derived from phytozome v7.0 (chr-ID scaffold_110 ; pos 297715 to 298581)
aggctctccttcaggaaagtgttgcaggtactttgacagttttcgggttgtgttatatttccccttttttgctcttgaaataaattgcatatgttatcaaaattaatgtaaaaactcaagaaaagattactggccaaattcaaagcattattttattcattactccatatgggagacagtgaagataacacatgtttgtggatgcccactactgttttgagctacgcttttggaccttgaaacgatttgcatgtcatttctgttgtctttgtaggaatatgtatctttatgtatgaacttccgattatttacctaaaccgcagtaaatcgtctacttaataaacacttctgcatcaaagctgaaagtccgctgattttgtatggtatattgaattatgaaattctgctaattcttttaaattctttttctgctaatataaagctcttagaacaaactttggtaaagtcgcctgttgcaccttcttgtccatcgatatgtaatacaaacctttagatggcctaccttgatgctgctctattgtttctttagtttcaagtaatgatgttcctcagctctgtagatgctgaacaaattgatatataaatattaggaagttagtattagttttatataaattttatttccttgtttagtttttagggagatttgaataaataacttgtgtgaatttctggagcattgtcctctccatacgaacagcctacttggtggattttatgtttaagattctggcattaaatctacctttgtgtatcttttattctagtttgagtgtttatctctatttcctttcttagtatctatcgcacaatgttggtttcatttatactttggtttctttgtag

SEQ ID NO: 104667 - DNA, 599 bp, Mimulus guttatus
  Intron number 2 from transcript mgv1a005008m (locus mgv1a0 05008m.g) derived from phytozome v7.0 (chr-ID scaffold_80; pos 68194 to 68792 reverse strand)
ccttatacatacaagtcagtcactactacctacaaaaccttattaataacaacttatgatattcttatgcctcgtctggttgccaataactgtattaattgaacgatgggagatccagtaaaacaactccctaaaaaggcaagataagcaatgataaaataatatttgcggtcgaccctgtgaaagttattggatataccaaacaatcaaacaaattccaattatccgcacgtccgaaaattttccgacccgaaaaaaaataataaaaattacgaggacgtatgaaattgaattgggcacggtggttgtcgggaccgtttggtcagatttcgagaattgcttcgaaaacatcgggagcgactagtttgggcaaggcagtcccgcacaccggcccagccacataattttgtatcctcgtttagttaattaaatgtatccttgggtgttatttcatgtttttgtaattagtctaataacttttcagaattctttggtcctaataagattgcaattatttaaaaaaagaaaagaaaaaacacgaataattgaatggatgaaaaataggtgggggacccgaacaacgatcaccgttgctggga

SEQ ID NO: 104668 - DNA, 431 bp, Mimulus guttatus
  Intron number 1 from transcript mgv1a005920m (locus mgv1a0 05920m.g) derived from phytozome v7.0 (chr-ID scaffold_8; pos 2739273 to 2739703)
atcgttttggcgtcaaattggttcacgctccaaaggtaaattcagttttcaggcactcctttatattttgttaaattcgtagaaaatttgaaggtgtagaattttaaccttgtacaaatgtttttgtgtaaaattgttttatagaaaacaatttttgtttattggtactcgaactatatatttattttattttctaggtttttaagagagagttttactgaccttgtgtctacaggaattttcggcaatgtttttaaatcattcattgcactttagtttttgattgctgataaatgataacaataattctttggtaactgtagaatcgggagaggaatatttcttcagtataatgttaatgtttaattttttttattttattttctggtttatgttttgatttgacaggtggtgcatctgtataaaaggaa

SEQ ID NO: 104669 - DNA, 507 bp, Mimulus guttatus
  Intron number 1 from transcript mgv1a011635m (locus mgv1a0 11635m.g) derived from phytozome v7.0 (chr-ID scaffold_75; pos 969775 to 970281 reverse strand)
ttcttacctcggaaacttcatcaaggtcaatcatttcctgctgcattcaattaattctccttctattgtgtttgttatattcgaagtagcattgcgtattctttttcttatgttgtcaatggttcctttttgtctgttagatgctcatttaatttgtttgttatattcgaagatgatgttttgcatgccttgatttatctttaatattaagatgatgttttatcgggattgctattttagatgatgttttcccttggttactctctacgattaagatgatggtttatttcgattactctctaagatgatgtttaactgattgatatatgcttattttgtctaccaatccctgtatcaggttgttatatttgtattgcttagttgatccgtttgtgtttcctcaatcatatatatctcaaggttcttgaatttgtttggatatatatatatatatagatcgaattctaatagttgtttgcaattttgattttgaatgtataatcaggt

SEQ ID NO: 104670 - DNA, 758 bp, Mimulus guttatus
  Intron number 2 from transcript mgv1a008920m (locus mgv1a0 08920m.g) derived from phytozome v7.0 (chr-ID scaffold_20; pos 1646443 to 1647200 reverse strand)
actacaaggtaagtctcatgagaattattataggtgtgaaagttggaatgaaatttctattttctgccgattatgatctgaaaagtttcgattttggaacaattttttttttaattccaatatgaatcttatcaattcttctatttgtgaaaataagatggggtcatgtgcataatgaccaaactacaagggggttatgtgcaatttactttttaaaatataagaattatcatatgagtattttttagttttatgattttatgcaagtgagagttcttatttttgaaaatttatgaaagtttctgaaactttttagaaaaatttaaaacccacttccgaaatttcatagattttggaattggaatatgatgaatttctaaattttgaaaattctgaaattgaaattaattttgtatttttgaaaaaaaaataaaattttccaaaatggttaagttcgatccgttctatccgactttgacttctaaaaattatgaatgattgacgccatcttttttggaaattatccgaatttaatgaaataatggatgtttgaaattgcttcaatttcatagaatcaagaatcaaggtgaaattattgctgatctgatatcatgcacattttatggaatctattttatgatttgattttatacaaaatctgatacctttgatcaccctaaatcactactaataatcaacaccaaattaaaattgaattttattttttaattttaattttatttttattttttggcaga

SEQ ID NO: 104671 - DNA, 591 bp, Mimulus guttatus
  Intron number 2 from transcript mgv1a016370m (locus mgv1a0 16370m.g) derived from phytozome v7.0 (chr-ID scaffold_58; pos 493903 to 494493 reverse strand)
taagctgactcctcaccaggtttctgagctttcaagtaagtttcagttttgatcctttttttttttcttttctgttatcggcttactttctctattcgatttttttcagttgtgaccaatgaccatgattaatttgttctccctgatttatatgtactttgttgttgcgtttcggtagttattcagattgttttgtgcctgtgaacatgaaaaaaattctcatttagtttcccattcaagatttttcaatcacttgcaacaaacacatattttcatattaatattgtttcttgatcatatttaaatctgtatgtagaatgcttttatacaaactggagttaaacattcagtttttccatgtatccttttgcatatcattgttttgttgccacttttcttctttgattgataccttctaaaatctccgtttttggatcaatgtttataactatgctaattgctaagccactgtgtgcacaaggattcgactaatatttatttattgcagatgttttatatatgaacatgatttttatatattgattgtttttggcagaacaaccgggtgttcttcaggttgtaccaagtcaa

SEQ ID NO: 104672 - DNA, 672 bp, Mimulus guttatus
  Intron number 1 from transcript mgv1a016008m (locus mgv1a0 16029m.g) derived from phytozome v7.0 (chr-ID scaffold_1; pos 3345466 to 3346137 reverse strand)
tagatccgttcgctctgtgttgtctaattttcgaggtgcttctgtttttttcatctacgatttggtttatttttgtttcaatttttttattttttttttcttcagtagggattttgttgatgcttggtgcgtttgatgtttgggatttgtttattggtttgtcggttactgattttaccaccttataagccagatctgttgttcaatttgacggctacctagggttttgtttcctaatttggttttttagggctcgtccttgcgagtggtgaaaggaaaccggaggattatgaaacatataaattgaacgaacggagatttgttttaaggttaacagatttaatttctgaggttaaaaggtggaaaaaattagcgagtaaaagaaagatgaataatttagagagtaatagcgttttccctttgttaagatgagaaacacatgatgggttaacactgacgaggacatttaatacagcaactaaacacaaaagcaatttttttcgtgtatatgtgtgcgtgtattttgtaaaataaaaattacttcttttgaaatgattgggtaaattgtgtctctgtggcacttgggtcttgggtttcttgggttagtttgttttttgttttaatgattttttttttttttttttttgaaatattagctaaaagaagggaaga

SEQ ID NO: 104673 - DNA, 577 bp, Mimulus guttatus
  Intron number 2 from transcript mgv1a004593m (locus mgv1a0 04593m.g) derived from phytozome v7.0 (chr-ID scaffold_69; pos 841728 to 842304 reverse strand)
accaattttgctgctacctctactttcatagctcggttagtctactttcctaactttctcgtaccattgtgttatatgtaccagttgtttctgtgataatgcaaagcatattctttgattgttaggaatgtgcgtatttgttgtaactgattcgttaaaacttagttgtgttcatatagtataggcttaaattggtttcttctgtgcacacatgacttcagtttaatgaactttgcggaatgtggaaaataaggttactcgttgtgccttaaacctttgtaaaatgcataaaatcccgttgtgtgtttcaaacaaattgcagaaagaaaaaccttttgcctgttgtaattgcgggttattaactcttacgaacttaaaatctcagctattggactgcgtataaagttccaatagccgtaataacttatgaatcctatcaattgttatacctcatattcaattttttcggaagaataaacccccccccccccccccccccccatcatatatcagttcagcaaaatattctgacaaaaatcttgatctccgttttcctagggaggttgctaaaggatta

SEQ ID NO: 104674 - DNA, 422 bp, Mimulus guttatus
  Intron number 2 from transcript mgv1a006642m (locus mgv1a0 06642m.g) derived from phytozome v7.0 (chr-ID scaffold_75; pos 52023 to 52444)
aaattgctgaggtatattgagtattctcaattaacattcaatcccaaagcttaaacaataggatctatatggaacttacccatgcagtacatatgtcccactgtatttgtttttttttctgttttgcatcatcttccatgcttatttttcctatcttcaatagttaaatgcggtaataggctcatcaccaaaaaataaaaaatagaaacctttccgttttgtatatttggttttgcagtatcttccatgcttaattttcctatcttcaaaagttagccctaacaggctcatcaccaaaacctttaaatatataggaacctttctcaataatgcaaaaaaacaaaaaaacaaaaaaaaaaaacatattttggttgcgtagttctcttacgtacggtctctgatattattttacgatttctaga

SEQ ID NO: 104675 - DNA, 390 bp, Mimulus guttatus
  Intron number 3 from transcript mgv1a014445m (locus mgv1a0 14445m.g) derived from phytozome v7.0 (chr-ID scaffold_7; pos 1442026 to 1442415 reverse strand)
cagctcttcaccagcttgtttctccatttgggaaggtaaatataaataaataatctcttcattttaccatttatatatcaagcataaatatttataaatatatagttaattattaattaatattatttattatagcatatgttttgatttttctaacatataaaaactataaaaaggaataataataattcattctagcaggattagtaagtctctttttcttcatgactttatcatgcatatctgactgtagctttactttttttttttcaaataattaaataaatacttcgagaaaaaataaaataaaattaaagattttttgaggtttttgtgaaatgtttctcttttgcagactgacacagcttctgtcttgtcagaagcaattgg

SEQ ID NO: 104676 - DNA, 405 bp, Mimulus guttatus
  Intron number 1 from transcript mgv1a007492m (locus mgv1a0 07501m.g) derived from phytozome v7.0 (chr-ID scaffold_109 ; pos 570362 to 570766)
catcatcagattctagagctcgattcttcaattaggtaattaatacccacattgtcggaatactgctgtttttatcttcagatttgtttttttctttttttgaaatgattcatccttttgttgtgcgcgcgcgtgtgtttgagctgccatgtttttttttctttcgtaagcgtagattaattagtagttgagactctactctgtgactgatctatatacatttattactacttgttcatgttttttgtcttaattgattttcattaccagattcaaatttcataatcccctgtttcatgatttatatttgggtatcttttattatatatacatattatgatttgacaaataatcagatactgatatgtagagtggccatctcctccaaagattctgacaaaacaa

SEQ ID NO: 104677 - DNA, 735 bp, Mimulus guttatus
  Intron number 2 from transcript mgv1a017983m (locus mgv1a0 17983m.g) derived from phytozome v7.0 (chr-ID scaffold_100 ; pos 646167 to 646901 reverse strand)
ccaaacttggaaataggtatttttctttttcttcttctttttttttttttttattattattattattattattattattattattattattattattattattattattattattattattattatttatttaatataatattattattttttacctattctttttataaaaaaaatcaaccaaagtttgtgggctgtggcagacattattccaatttttttactcgtgctatatatcccatcattatattttcccactttttgcaattttgtttatatgctaattacaaccacctccctgatttaagattcatttacgaaaaaatcttttatatttgagacgttgcaactagccctcttataatttgtaaatttcttacgtccaagcccctataaaagggtgtcaatttaagaaatctacaaatttaagggtttcgatgtaataatggaaatggaaacacaaggttcttttttttaataaatcttactcaggggcgattgtaattcataatattatttttatttaccacattacactctaaaaatttgcaaatttaaggtgctaaaatatgctttatggtggattttaataatataaatttgatataatacatgaagaattaatgcaattttttgtattttttattttttgtaattttttatatttataaatatgatactaaaggcatgggaatttaaaaaaaaaaaagctaaaatatttaaaatatttggcag

SEQ ID NO: 104678 - DNA, 626 bp, Mimulus guttatus
  Intron number 4 from transcript mgv1a002721m (locus mgv1a0 02721m.g) derived from phytozome v7.0 (chr-ID scaffold_164 ; pos 578046 to 578671 reverse strand)
aaagcttgctaacttggacccccagtttggactatgtaagtataccatcatttcttttcttggtttattgcgtttagcacccctgtgtttactctaattatcataaaactccctacgtaaaaaaatattagcaaaatctcccctggaattcacttttactagcaaactacccctaaaaaacacgccatttagggggatcgcgtgctataaaagaatgcattgtagaggtttttagctaatctttttaacacgaggagttttttagcaattcgatataatacaagggtaataaacacaatcatgaaaatatatatatattattcaaaaatatatatatatatatatatatatatatatatttttttttttcgaataaaaaaatgagagtatacagttaaacctctataaattaatatagtcgggactagcaaaattctattaatttagcgaaatattaaattgtcgaactaattaataatttagtacgttttcaccgagccgggatcgaaataaattattatttaagcgaggttatcaatgttgtactgtaatattttttatttatttttgtgtgtgtgtgtggggtttgaattttgcagacagtagttttgttccgccgttgattt

SEQ ID NO: 104679 - DNA, 394 bp, Mimulus guttatus
  Intron number 1 from transcript mgv1a008027m (locus mgv1a0 08027m.g) derived from phytozome v7.0 (chr-ID scaffold_27; pos 560322 to 560715 reverse strand)
atttctgagcttctgcaaagaactgattaatcaaggtaagtaatcggattttcatttttttctagtaaactgtaaagatcgccagttaattttgatccgatgcatgtttttgcagttgaatccatcaatttatctcatcttcgtcgcaattttattttcgttttgttcagaaagaacaagcattatacgagttgattttttgagatttaatgtcggaaaatctaggttattaattattgctcgctatttattcatctgctggacttatttgtggttaaaacgcggctgatttcgatgtatcctatacatttttccgtatttgagagtgtttatttattttctgatctgtgcgtagaagagttacatacaaaatttgttgctgttgcagagggaa

SEQ ID NO: 104680 - DNA, 675 bp, Mimulus guttatus
  Intron number 1 from transcript mgv1a001439m (locus mgv1a0 01439m.g) derived from phytozome v7.0 (chr-ID scaffold_37; pos 1268231 to 1268905)
gacgtaaccacccctcccgaacgttggggcccctggttcgtaatttctgatttgaattttacataattttatgtgcttgctgtgtttcgatttgggtagaaacgatcttctgtaattgtgcatgttcgacatggcttttaattgagccggaattttcaatctatcgttgaattgttggaagggacaaattgacaaacaccttgtagtatatgccgatgacatatgtagaatgcagctttcttttatggggaaattatgaaaactctcctaaacttgggctaaataacgaaaaacagccccatctatccgtaatgactaaaatccccctttgattaactgatcgagttttttaacagaaaataaatgtgtatggtctatttataccttcggttaaataggtgaggaataaaagaaaatatctgaaattgtgtaaagtctattccttgaaataaaaaaaaaatccgtgaaaagtcacactggaaggggttggtgtaagacggaaacaaacctcagggggtttttggtaattagaaatagatgggggtgtttttcgttatttaccctaagttcagaggagttttcgtaatttagccttattttaaatggaaggacttatagagtgataatgcggtttattgttcgttgacatattgcaattaataggttgtattacca

SEQ ID NO: 104681 - DNA, 913 bp, Mimulus guttatus
  Intron number 1 from transcript mgv1a011616m (locus mgv1a0 11616m.g) derived from phytozome v7.0 (chr-ID scaffold_66; pos 595648 to 596560 reverse strand)
ctctctctctcttcgtcgtaatttgcaggaatcaggtataacttttgttttcaagttctaactgatgggtgatagttcataaatttttcatcgattgatccaacaaattgtgcgaactgctctagctaatgcatttggaaaatctaattaaaaaaaaaatcagtttttaagtattttaccatctgtggtttggtacatgtatgtatgtgtatggatgctggtattgagaatttgcagatattcattcacgccgtagaaattcagtttctacctttcgttgactcgttaatggcacgaattgattgtttacgccttagttaggttatgtgttattgttaatagctttttacagtttactctgcaattaaattcgactagttaactcgaaccataggctctcttctgtaattcaacactttctagctgttatagtcaaaactctcttcaaaaatctcaaaggaattttttgatctgagatgagatcagatccatttttcattgtatctaataataccttgatatgtaatccaatcccgtaaaatttcgatcgaagctcctacttcgagtttaccagtgatttacaaagcataatttagaaatattttccattgagaactcaaaattttcgatatttgtgaccaattttcttttagacttccgagatagataatcatggttttcgatttggatttcattttatttcctataatctatgtaatgatttgaaaaggctgattgtgtaaagctgcggctaattttcttgcagacactttacatcgataatttcacatgaataatccttgttgattatgaacatccatgtttggattttaccgaaaaagattatatggttctttatgttgttatcaggttattctggctttacattccagcacttctatttgaagtactt

SEQ ID NO: 104682 - DNA, 881 bp, Mimulus guttatus
  Intron number 1 from transcript mgv1a004815m (locus mgv1a0 04815m.g) derived from phytozome v7.0 (chr-ID scaffold_75; pos 1026235 to 1027115 reverse strand)
cgtctcgtgctccggtcaagtgaaggaaatcaaaggtaattaatttttactcagcccgaggtctggatagggttattcttcggattttcttcttcagggtgtcttcgaattggttttgatttgatttctgtaaaactaggttttgttgccagtattatttctactgatcatagtattggattctgaaatttttcgtatgtaatgctgcgtgcgaagtaagctacaatgtaattcaggcgattaagcgtgtgaagtaagcagtttcgaattgttaactttgtttgcattgtggtacagtttgagttttgggatttcatatgataagtacttcgtttgtttatatgttttttgttgttggtaattactttggagaaatataacaaaattcagattctgctgccggttttatgggatttagggttagatacactctagttcattcttactgttcgtgcttgattggaatgtagccagacctttctggtgcttttggaaatggtgaaggatttcttttcattcattttatgccgtctgaaatcctttttttttgtgagcatatctgcgggacttggcgttatatgagctcacttttgagttaatgaacattacaccattaaagctctagagactgtagaagaatggatgattttggttctttaatttcagattcagaaaaggctggttacttctgatatttggcaaatttattgttgatgtaaaaagcataattgtttttttctgagtagttagtgttgaaaacataaactagtcaatttctataaactaatattattggtgtttgttgttcgtatccattaaatgttacctgatgtttcttgtcaaactttcaggaggtgacgtaaaaaatcgtcaagtagtga

SEQ ID NO: 104683 - DNA, 968 bp, Mimulus guttatus
  Intron number 1 from transcript mgv1a003772m (locus mgv1a0 03772m.g) derived from phytozome v7.0 (chr-ID scaffold_7; pos 134569 to 135536)
tttgggatcgccagactatattccgcgaccacgaggtacttgtgctattgtttacgattttgtaatattctgcatccatttgaaactggatacgaaaagatcaattttttcgtttagacttttgatatggatggaaaattatctatgtatatttgataattttgtaataggcttttttgggcccctagctagcttccactgtcctccttggcctcctcttgttctcaatttaatgtttgtggtggtgttgacaatgggtacttgaaacgaatttaggcatttttgtttttgtagtgaatgcattgacgaaactgaaagcttccattttggcatggaagtagtttcctacgctgatgtagagcatgttagatgaaaagaatgtcgaggcttttcattttccatgtaatcaagttcacaattgactaattctcaagaagttatctgataaagctgtttgcatgctgaatttacatcgattttaatctggttggatcatataaaaggatgtcatttcttttgtcactcagttctgatggtatataatacaagtcaaaggtatttaatttttaatgcgaacctccagtgagactgaaggcctgagaatcaatatactatcggcaatgtggttattgctaaaaaaaaaaagaccttcatggtggctgtttggtttcaagataaatatctatcttttctgtgctgtgtaccataccgttgctaccttttctttatccaaatgtcttatgtagttatgattgcataaatagatgccagtattagaaaggaaaatagatgtgtggagttgctttctactatctaccgcattaatgtgtattaaaggttatatggaaacttatattcatggatctttttggtaatatttcagttcttagatcaaagaatgagttactagtcattgttacttacaagttattctgctgttatgcaggaagaggtggaaaaattgaaaa

SEQ ID NO: 104684 - DNA, 927 bp, Mimulus guttatus
  Intron number 1 from transcript mgv1a005380m (locus mgv1a0 05380m.g) derived from phytozome v7.0 (chr-ID scaffold_22; pos 1223038 to 1223964 reverse strand)
ccttctatttcaaggtccgcattcccccactcaaggtacaattttacttctctgatggggtgcgcaaagctttgtctggatgattttattttgtatcctgtgaaattgtgtttcatggtgtgttttttgtttctatggttcttgattttcgagttatatgtaaagtttgaaactttggtagtgtagttgattttcgaattttgttgcagttatttatgttcctgagaaatgccttaaagttcaaaatcaagaatgccaattgccaaacatgtcacatacaccacctactctaagtgtgtgaataagcactaggctagaaatgaatggctgttgaagttgggagctttgtagtttgtgacatggaacttgcagtcgtgtattcgttttgtactataatgtttctgtttgcagttggtggctgttatgtgaatctaaatttgcgtctagagatactcacgtttgagtggttattaaattacaaacacataattattagttagtataataattgagtagctttatgctaggagaagaacttgtaatgcaaaaacatggaagacggaggcccatagtggaaagggaaattgacgtctggattcatgggatcgagaaagtgagaaacttaaaattgtagctttttatggaaaaaaaatatcgaaaattttcatgggaaaattgatttattttctccctataaactagaagaatttggccttgatagcttcaccgtagtctttttggtttggagaagcagaggcagtacaaagataaattagtcgattaaattgcttcgcttgcatgtcctttttcgtactgcagtcttaatattccgttatggaattagaaaaaatattgatgaccttctttttccattcttttttttaaactgcaggactgagctaattgttcctcagaaggttttctttc

SEQ ID NO: 104685 - DNA, 676 bp, Mimulus guttatus
  Intron number 1 from transcript mgv1a008907m (locus mgv1a0 08896m.g) derived from phytozome v7.0 (chr-ID scaffold_8; pos 1962333 to 1963008)
caacctaattgcaggaaattttggcagaaatcgaggtcagaaaataaacagagtgagttgacggaaatcaaatttgttaacccccccactgaattccccccatgcatgtcatttatctgctgaatttcgaacaaaatttgcgattacgaaaggtgtttggtacttaggtagagctttttttttcctggcccattgaattacacagctaaagattcctcctttttaatttcggtggtggtggtgggtggggtaagattcatttctgttacatcatatgtttggatttttctctggatgataagcgctacttttactgtgtgcgctttaattgtgtgttagaattgctttttccatcttcataaaagtggaaaagttcattgaatgggggaaataatgcgaaatgttttaattgagattcatcccataattacacgtttaaaagttggtagattctttccctaattggggttttttttcttttttcggggagaccacatgtttaaatacaggtttcttcagaacagaataaacctcatctgctgttcatgtgtttgtaatatttcttatgctttttttttcattttaatttgagtttattttggtgaataattaatgatttttgcatttttttttcttcgtaggaagtgattcgataatcggtggagtcaaggctgaa

SEQ ID NO: 104686 - DNA, 518 bp, Mimulus guttatus
  Intron number 1 from transcript mgv1a012563m (locus mgv1a0 12563m.g) derived from phytozome v7.0 (chr-ID scaffold_209 ; pos 299926 to 300443)
caggattatcaggatttgcagaaggtatactttaatttttatttttatttttatttttatttttttcttctgttatttggaagatctgacgatttatttgattttgattttttaatttctgggttttgctcttgaatgaatgatttgatccgattttgtcaattgattcttccttcgtgattctgcccttgggtttcttgaacatttttttataatatgagctgattcttaaaaaaggtcgcctaaattggccctttgtcttaaattgatttaattgtttaaggattccttttgaaatttgttgttttgaggctttccttaatgtttaattctgattgactcgagttctattccgattgtagagaagttcttatttcgattttcttttgttcgatctattcgaacggctgtgaacgatttctcgttcgatgctcgtttaagttttcaagattcttgtagtagtgctcgatgactaaccgaagcgtgattttgcgattttaccctcttgcaggaagctg

SEQ ID NO: 104687 - DNA, 487 bp, Mimulus guttatus
  Intron number 3 from transcript mgv1a003826m (locus mgv1a0 03826m.g) derived from phytozome v7.0 (chr-ID scaffold_1; pos 997701 to 998187 reverse strand)
caaaaactccaagtggctacaagataatcttgaaggtatatataccataatattctttgccgaaattatataaattagcttaaattaatgtttgtcagcttattttatgtaattgctaattacaaacatgtgcatgtttttgaataatcattccaaaaaaaataaaatataaatttatgatcatataatatgaatttgtttaaatagaaatatttggagtagctttcggagaccgattgaaagatatctggctatcgtttgacctatctatatcggtcaactcttagccgctcctctaaaaaaggaataataagtggtgaacaacactctccctcaatcaaacaaacattccaggagaattatgttttgaatgtgttaccttttcattcacacaacaaaaaacacttgcatgtcatgttgtaataaaaaaaataaacaaaaaaaaatgccgagccaaaaaatgacaaacaaattgttggtttcagat

SEQ ID NO: 104688 - DNA, 836 bp, Mimulus guttatus
  Intron number 1 from transcript mgv1a016833m (locus mgv1a0 16833m.g) derived from phytozome v7.0 (chr-ID scaffold_396 ; pos 78912 to 79747)
gaggggcgataatatctaaccgaattccaattgaagtaagtttttttgttatctattaatcacatgacaatgatgattatattattttctaagacgtaaatgatttaactgtttgttgctttggctgattgttcttgttccgggataatcatgttgaagtccaccaggtgtttgtggatatgcgtcttagagtcaatgcctctctgaattgtgtttaaattttaattttttattgttgttccaactgaattgtaagtctctgcttctgaagaccttcgttcttgatgtttgtgcttgattctgtagcagcctctttaaattgccaacctggtggacaatttggattagaatccttatgaaaacaactttcatatatccgaaaagtagatccagatcatattataattcattaacttaattacaaattattctttggtgactttccaatttttacttcagttaattcagtccattggctcttcctaaagctattatatttgctcttctagtatatagattgttgctaaaattgtatatacagcataggctctaaacaattatggcctttcgtaacagtctattcgtaattaacaaggggtaattggtgaaaaaattaagattaggttaaatactaatttcattttgacttattgaagattaagttcgatactgaccacttattcctcgtcacactgaccaattatattcaagtattgctgaattatatgcctcttccttgacttgcggacatgcagttcatttgttctgtgcaatgttgacgtatgttttattcaatgccttgtagttttaacttttcatacgcttgaggagcagct

SEQ ID NO: 104689 - DNA, 327 bp, Mimulus guttatus
  Intron number 2 from transcript mgv1a016833m (locus mgv1a0 16833m.g) derived from phytozome v7.0 (chr-ID scaffold_396 ; pos 79821 to 80147)
gattcaaccacaatttattccctggtaattttccatttacaacttaatatcatcgtcagtttttcttcaaattgtaaaaattatagctttttgtgagttatacaaaacttgcatttacatgatcactggtactaatatttggccatggatcaccctgattctcacacaaatacatggtgcattttgcctcaatgaaatcaaaagcaaaattgttatattgcggggggatgtttgaatttgtaattggatgttttcaataatcgattgtaacagccattaatttgtgatgcatgtataacaggttgcagtggattgtcccctgaggcg

SEQ ID NO: 104690 - DNA, 454 bp, Mimulus guttatus
  Intron number 1 from transcript mgv1a009600m (locus mgv1a0 09600m.g) derived from phytozome v7.0 (chr-ID scaffold_106 ; pos 657306 to 657759)
tggtggaggatctcaggttgttctgctaggtgcaggtaagtataatttaatttttcgagtgttaattaggcaacatttaaatatgctttctataataacaattacatgtctacaattttgaaaaattgcgaaaaacacgtccaaataatttaagcacgattatagtcactaatcccgaaataataaaaaaaaaatagaaacaaatatttttttccaaggccctacctatcgatcctctacttctacttcccggttagaaaatgtggagcagacataaaaattgcttagtgtccattttctacggactcaaattcgacccgaaatcctaactatcaagtatactagctatatttacaacaaaaaatcaaatattcttaatttatttaggaaaagaaaaacaaaaacagatatataaatagatagatatttaagaatttatctcacacatacagga

SEQ ID NO: 104691 - DNA, 444 bp, Mimulus guttatus
  Intron number 1 from transcript mgv1a015795m (locus mgv1a0 15795m.g) derived from phytozome v7.0 (chr-ID scaffold_27; pos 1545874 to 1546317)
gcgatatcgtcctcgtcggcctccgcgattatcaggtacttttctcctttttttttttctccccaaattgtagatctggattttttttttctgtctccttatttaatgagttcgattttaatttttgattttgtgttctctagtatttttcccattcaatttgtgttctttattgatgtttttttttttttttttaatcttgattttgttcatttccaatcagttgtaattgcataacatatcatgaattagtgtatttttgaggcttcagttgaattagaattgatgtttttcatcaacaggctcttcaagtaaaaatgcccaaactgtagttctgataaaccaagatatttatttttgttcacctattattacttattgacagagatcaaagtttaatattgaattgagcatgtaattatatttgaattttgattggatagg

SEQ ID NO: 104692 - DNA, 597 bp, Mimulus guttatus
  Intron number 1 from transcript mgv1a018018m (locus mgv1a0 18018m.g) derived from phytozome v7.0 (chr-ID scaffold_79; pos 228892 to 229488 reverse strand)
agatatcgattccagactctctcagtttctccaaggttcatctatcttttttcttttctttttcttttcttttattaccttttattacataatgttaaatatcgtttcaattttatcagtaccgtacgtttcctactattagtaggtgattttgaccatttttcaatccaaaaatcaaaacacaaaattagtagttctcttagctcacttttttatccaacttgaataactttctgattcaacttgaataagatatactatacaatttttttgcttgactattcaaaaatttgtgaagataaactatttcttgattatttatgaaaaaacatcgtcttctatatcatatgttttagtgtgattttttttaacaaaataattgaacatttcaagaaagagtgtatgctatagtatatattaattttttggaattttgcttgataattcgaagctaatgaaacaaggtttttagatgaactatttatatactacttatgcataaacatcttctataaaattaaacatttcagccaatttcaagaaaaaagtgtatgctacaatatattaagatgaaattttcttgtatgaatttatcag

SEQ ID NO: 104693 - DNA, 864 bp, Mimulus guttatus
  Intron number 1 from transcript mgv1a005934m (locus mgv1a0 05934m.g) derived from phytozome v7.0 (chr-ID scaffold_240 2; pos 5086 to 5949 reverse strand)
agaaaacgcgctccgacggctgctctaagacgaaggtcagctccgccgttcctcctccgccgtctgttcgtatacatttcttttttacgtcggtatcaaatcattgtttttattcttattctgttgtcaattttttttgctccatttggtagttcgagctttttcggatttaggtttttatgcgtccgtaatttttttttctggttgaacttggttttctgacgcgattttttggatatgttatttctcggtttgaattattttgtttttagggttttcttcttggtattggggtgagatattggagattagggttttagcggaaatgattttgttctttatccagtgagaaatggtgattgtgcgtgtgttatttgggatattagggcttaagatttgatggaacgctaatccactacgttgattggtatgggtctttgtaagggattacggatttgtgttgtgaattgcgaaataagattgatgaagtgtcgatctactacgttgattttcaactcttgtaatagtcgagtaacagtgaaatatttcttgaaatttctgcaatatattctccgatattcgtctgctctttcttatgtgaacataaaaaagaagttaatagttgccgataatgcttatttgtatggtatttacgccaattatgaagcaccttatgagttcatctaaaaagttccttgtaaattcttattactattgcccccaattcatagttgtcaccagattattgcatgtctacacattcaattattgttgtcctaagcaaacttgacttgaatttgcaagaaataatgatgaccctttgttgcaggctattgttaatttcctaagtggccttctcttctt

SEQ ID NO: 104694 - DNA, 1026 bp, Mimulus guttatus
  Intron number 2 from transcript mgv1a002417m (locus mgv1a0 02417m.g) derived from phytozome v7.0 (chr-ID scaffold_35; pos 134996 to 136021 reverse strand)
gcacatctgtgttcaggtagtcttgttttctgttttaataagactaagttgaatatgtctgtttcgtcaaatagattctgttggaaattgatctcgtttcatcttaccatttcatgaagtatgagaatgagaataattaaaaaagtgtagaaaaaatacgtgtataatccttggtaactaggatcagaaaatatggccaaaataatagagctcagttttcaacgagtcgactgttctccatgtagcatctacattgttctgtataactcaagtgtaagggacataaagttagcttgttcagttgcggtgattacgagatatgcttgtgatatatgtaacatcaaatacaagagaaactctatgcttgtttttgtttgtatatactctattacatgagttgtgtcatgtactattgcattggcagtagaaagctaaagaagaagaatattactttcaataaggttgcaattttttttgattatcatgcttcgggttgaagctttagtcgggctgaagaatctggaaaaatggattttaatgaagcaaattctcttgtgattgctgcaatgaaattttgtctttatttgagatggctgtgtgcatgttcatatccatatcatttttcagtttttacacacaaatctactaaaagttagatgttagggtgaatttattaattgtgttactagtgctgctttcagtttcttttaaacgagatatctatgagaagatgagagcaaaatataggaagctgtattattaagatacatagtgaattcttgcgttataatatacattatgattaagtttgtggttctgagcaatgttaatatggttgtcactatgaatatgttgtacatatatccagtgcatttgttgccatgtgagctgatttagttgcttttattagttcttaattttttcgttgttggtagcacttttagtttttattttctgcataatccacttcatggtgctaataaattgattcagaattttcctttttcaaggatttgccacgtagca

SEQ ID NO: 104695 - DNA, 310 bp, Mimulus guttatus
  Intron number 1 from transcript mgv1a002417m (locus mgv1a0 02417m.g) derived from phytozome v7.0 (chr-ID scaffold_35; pos 136072 to 136381 reverse strand)
agaggttccaatggatattcttctcatgttgttcactaaatttacaatgtcatccaattcaaatctttgttatcttttctacactaaactcgaaagttcattttcgtccttcttacatttggataattttcagttccatgtctatacaaaatttggcaagtgcccattttgtttcgtaacagtctagtgcaacagacttgttatactgatattgccagaatttatgttgtttatatgtcaagttgtatgtatttaattagcatgggttttaaattttaatgtatagtttgtgattttcagggatcaagag

SEQ ID NO: 104696 - DNA, 815 bp, Mimulus guttatus
  Intron number 2 from transcript mgv1a014395m (locus mgv1a0 14395m.g) derived from phytozome v7.0 (chr-ID scaffold_75; pos 182034 to 182848)
ccaagcgtgccatcggtgttgaagtcaacaagcaggtattcttcctcttcgatctgcctttttttactttgcttttttttttttttgtgttttctgtttgaatttcgaatttttgggattatatcgaattagctgtgtttggtatgtcgttgtatgactgtattttcgtattatatcttccattttgctgcatttggcttgtttttttttaaatttcagtaattgtcctctcagtatgctacagttgatttgattggaattgttgccgttttgtgaaagaaaataggatgagtttgaaatgcttaattgatgtttcatcaatattatctatgtcaatttgtgatttgtgtttgtttacaaatttgaattacaacatttgtcgaatttctggatgtctatgatgataaatctaaggcttgtttctcaaaacattcgcagtggccgcctgattgctttcgcctttgccgggcttgagagcacatgttgcttatccttccttggatgtctgagactctatatattgtttaactatatctgtatatctttacgagcttttgcaatttgtgtttggtttgaagaattgctaactaatcccataattatgttatataatttgattttcatatactcttggggaattatgctatagctgccatgtttattgctttttcaactgttctgtactctagtttgcgattattatttacttgtgtttttctgccccattcgactctcaaaagacaatgaaacttatgcttggtgttttcatttgtcatgaatgtaggttcgcaacaagatcctgaagaagaggatcc

SEQ ID NO: 104697 - DNA, 258 bp, Mimulus guttatus
  Intron number 1 from transcript mgv1a010104m (locus mgv1a0 10104m.g) derived from phytozome v7.0 (chr-ID scaffold_4; pos 367813 to 368070)
atctccgggaaaaagccctaaacgaactttctaaggttttcaatcattttattttcgttatttcctaattcatttcttatctgtgtttttcagtattgatttttttgatttatttatttgttttgagatttttctatttaaaattttaagtaagtgtgctccgggggccgtggcctcaccttgcttgttaatcatttggtaaattgtttttccgtgtcttaacgcactgttttgtttctgttcaagtagaagagggaa

SEQ ID NO: 104698 - DNA, 560 bp, Mimulus guttatus
  Intron number 3 from transcript mgv1a010104m (locus mgv1a0 10104m.g) derived from phytozome v7.0 (chr-ID scaffold_4; pos 368321 to 368880)
cacttgctcttcttcaggtatcattttttttgtttgtgcaatttaactctggttttcttattggctggttatgggagtttataactgtagatgagatggtttatcgtaatgtactttgtttgccactgtaataaactattatagttgcctttctttatgattttgtttctgtttacatattatgtaaccaagtacacatttttcattgtataactgagactgaatttacgtactgttggtttgcgttaatgttgctgcagtgatgagtagcttcttatatatgttctgtttgcacgtggatattttagtggcatgtttatgtctacgtgcttcttcatttttttttcatttgtttttgctaaactctcttccacaacagaaaaatattagctcctggaaatttgattattagtaaatttggttctgttcatctgtatagaagtaagtgaattaacttatgaccagaacatgcaaaaatattcccctttgtgttggagttaacataacaattttaatgttttgcagtgtgtggcctcgcacccggatactagaaagtcgtt

SEQ ID NO: 104699 - DNA, 335 bp, Mimulus guttatus
  Intron number 3 from transcript mgv1a024800m (locus mgv1a0 24800m.g) derived from phytozome v7.0 (chr-ID scaffold_1; pos 1267119 to 1267453)
gtgtgcttactccatgtatctgatcaggtacattaatacatttttcttctattatatattaattaatcttaattatttgaaattctgaaatataaaatttaaattaatttgtttcgtgtatgttcttcgaagtacagtattatcgtctatgtgggtggactcaaatcagctacaaattttatgacataaggtatgaatgagtaacctacttcgaattttttattttttatttttgatttataaacttcttgtttcttttctgaatttatatttttttttgttgttaaaaaacaaacacagatagaatcgtttggacgtcggttggaatattaata

SEQ ID NO: 104700 - DNA, 712 bp, Mimulus guttatus
  Intron number 1 from transcript mgv1a006487m (locus mgv1a0 06487m.g) derived from phytozome v7.0 (chr-ID scaffold_1; pos 1490314 to 1491025)
aaacgttaatcaagccacactcaaaagggaacctggtatatattacaatagttgctttttttttctgttgattattttatttttgaagtttaaatttttgtaatgttggtagtgggaattccttttgttgccacgtggcagatgaaaattagtacattgcacagttgcagttttgagtttgtaactatgcaggtaattgtgctgcttgaagtctagattggaatatggcttcatcagaacttttgttgttggctgaaaatttgattaaataaaaaaaaataattaaaaaaaaaaaaaggatcttagtttgacatgtaaaagaaaaattaggaaaatgatgttggtttaagatgatcgacgaaaactaaagtccgtgttgtgggagtatagttttacagtctccaaaaccagaggcttgactagttgactagtgttgattcatatcacaaattttgatgttacgacttaatattcttcgtgttgtgtttatatagtgaatgtgtactaatacttttcttagttgaaaaggtgagacgtaatttgattaaacaagaacgtgattcctttcctgcactaaaatagtttaaagatatttcgatagcattcttttggtgtattcgtttatcggtgttgtttcttatggttaatgattactctcgtatctaatattttgccaggaagcttaagcagttcgattttccttgttgctggt

SEQ ID NO: 104701 - DNA, 784 bp, Mimulus guttatus
  Intron number 1 from transcript mgv1a013846m (locus mgv1a0 13846m.g) derived from phytozome v7.0 (chr-ID scaffold_92; pos 726565 to 727348)
cgggtcattttttgaggtaaggtcaaattataaaaaaatatatatatatatatatatatatatatatatatatatatatatatatatatatatattgttaggataattacagctatccctcgtcttcttacacgttcacccccatggtattaaattcaacataattttttaaatttgtcgaacgttctctagtttgtacccgttttgtgcgaaaatgcagtttataatgcaccacaatctgatatttacaagccacgagacacatcttatgatcatcttgtttcacccgtggagctcgaatatgataaaatgggtaaaaattggagaatattccactaaatttgacaccgcaaaaagtcgacgtataagaatattcacaattgaaggaattgatggttgtaattacctaaacatgatgaacgtaatttgacctacgtaggggtgtggtcgtagcttacaaaatatttatgaaggttctctaaacaattagatctaacctcaaggagaacaatgtaaacttattaagtgggttgaaattatttcgtgggggtctttttgcaattaaacaagtaattgttgggtcagtctgcaatttcctcgtgagcgtggagagtgggagaaaactaaactaaaaaaacccagacaagcaaacgaagcatcaaaaggggcagctgtgtgtgcctttttatagtaaacaaaaactaattgcacttaatttcaatatcccattatatatactactgctccagaagaagaagaagaagaagtagagagagaaagaaac

SEQ ID NO: 104702 - DNA, 1020 bp, Mimulus guttatus
  Intron number 1 from transcript mgv1a014162m (locus mgv1a0 14162m.g) derived from phytozome v7.0 (chr-ID scaffold_48; pos 126056 to 127075)
gatttgcagctcagatctgtttgatcggcatctctgtaattctctctcttacaccgtctttcattctccgttgtctgttttttatacttggacttatatctatgtttctagatttaaaaatgctttctttgttggatttcttgttatctttccttctacccatgcagatctttgattttatggtcaagattttttttgtgagttcagctgtttagatttctgttacatttatctttgtcacttttgttaatttttgtgaagattcttaaatgttctgcatatcttgtcttttttcattttctaattgttgttttttttttttggttgttaattgtggtgttaattgatttcgttttgggtgttgattgatttttctcttttagctgaaaggggaaggtgttaatggtggtgttccttcatttgcggatggacttatccgatccgataagatatcgtttgtcgaatgttctagattttaaccagcggttttaggttaatagacgctgctacgcgacaaagaataattgaatttctgcatgaaactacttattacgtggcttacagattatcggatcaactattctttgttttgtcgtgtgtgcgaatggtgacgcttctttgaagtatctgtcgtttacaattaatttgtgtgtagtctaattagtgttttgtcgtgtgcgattgattgacacttctttgaagtatttgtcttttacaattaatttgtgtgtagtctaattagtgtttatgtcgtgtgccattggttgacacttctttgaagtatttgtcgtttacaattaatttgtgtattgtctaattaatgtcaagatcttgaattgtcgaatccgttaacagggaatgattgactttatatggcaatgccactattggtaccatgttcgactcggaataaaaatcatctagaacttatttctggtctgctttttcgcttatgtttgacctagcccttaatttatttgtgcagtttctcgacatcaattgcttcgagagggaggtgca

SEQ ID NO: 104703 - DNA, 888 bp, Mimulus guttatus
  Intron number 2 from transcript mgv1a016469m (locus mgv1a0 16469m.g) derived from phytozome v7.0 (chr-ID scaffold_66; pos 194701 to 195588)
ccctgttactggcaagagaatccaaggggtaaattaaatcttactatttgatttcatttgatgttgattatttttgttttttagattatgttgcaaaaaatcatgttttattttattttattttatttttatacactgttttatgcaactaattacatactgtctgaatcgattatttccggttggcatttgtttgtgtttttggcttggtgcattggaagttctgaatggttattctgtatggtagatgctgtgttaagttttgatttactataattgaaccgtagataattgagataatttgatctggaattttagctgaagaatgactaactggtttgggttcgttggtactgttagaatctgtagaaaatgaggttttttatagtgactgtagaacttgtatttgatatcaatagtgtttcttacgtttgtgtttcatgttaattacattgcaacaatgtttgaatggatatggtaatcgggacagttaattgaaacgtccgggctttctctgaatttccttgttgccgttatatcgcttcactatgttaaatgatggttttcttgacctcaccactaaccttctgaatctttgaattgaaaatgcgatggtcttttagatcaaagtttctcagttgaatatgttataaaatactcaatttgcgggctttctctgaattttcttgtttccattttattgcttcaccattttaaatgatgactttcttgatctcaattgtaccattcttgaatcggtgaattgaaaatgcaatagtctcttagatcaaagtttctcatttgaatacattacaacttacactcaattttcacaattttcacatgtttgtagattccacacttgagacctgctgagtacaagcggtc

SEQ ID NO: 104704 - DNA, 1014 bp, Mimulus guttatus
  Intron number 1 from transcript mgv1a022110m (locus mgv1a0 22110m.g) derived from phytozome v7.0 (chr-ID scaffold_18; pos 1803377 to 1804390)
ttactattgctacttatgtataattaattaaatgaagcttcaataattctgttttttcaatttttaagttttatctttatttttttcaattaaaagtgactcgtttattcaactacttgtgacaattgattattcgcaatttcaagttatatacgaaaaggtatcagagtaataaagttacgtcgtatctacagtagaacttcaataaatcagtaattttgtttaaatgttggtcataatttgacaacgacgtcatactaatttattaattcgataatttaaaatctcccaaaattaatacaagttttatgttgcgaatactttattcaatctgtgttttcctcgtgtattatttgaatttgtacttggctcatcatgttcagaaaggacgacaacgacaaattaccagtgatttttttaattatacatcaataaatttaattattttgtttgtaaaaattattatatttaaatcgcacaattagttttctttggaaccttattgaataaagtaacaaatataatacttcaaatattataattagtattacgggtaaaattaatgtaatagtttaattaggggtttgcagactaagatgctttcatgatcagagctagcatgaatagttcattactcatagagtaataaataataatacatgctttccagtcttagaaataaaatacagtttttattatttctatacacaaaagatcgataagaataattaagtaattaattgtctaaattaaatggcataatatataatatattacatcatagacggcgacaatgtttttttgcctcctaaactaaaaatataaacaaccctttcatgattgtcaaattatattaactttttttcccgaaaaatatatttccctaaaataaaataaataaataattaaaatatataataatactattacaacaatagccaactcaacaggaccttcttggcacgtagtaatttcgtataagaaaaacattgcaaattgctcatattttattat

SEQ ID NO: 104705 - DNA, 677 bp, Mimulus guttatus
  Intron number 1 from transcript mgv1a026574m (locus mgv1a0 26574m.g) derived from phytozome v7.0 (chr-ID scaffold_34; pos 1723555 to 1724231 reverse strand)
aaatttccgatcacgacctcaatatcatcattgtaacgtaaatccttcctccaactattattacataccaattttcgatttcgaaactacgaaatttggattactatatatatttcattctcaatttcgaaatttctaaaacatttcctaaatttcttttattttcttcaagcattacatttataattccaatattattatttattatttattttatattatagtttcttaataaacaaaatacaaatttccgaatttcattgatttcgattaaatcatttccgtttttggattaatatttttgaattgcagaaatttcaatacttctgaatgttttggatcaaatttgaaatatatatgagatttcaattttccatccgattttaataaattttgtagaatattagagatataatatcgatattatatataggttatattaataaaaaaattcaaattccgtggatttcgatctaatttttcttctattttagaactaatttttccatttcaataattccaaaaatttgaattttcgattttccaaaatgattgaaaattagtttttcacttacgaaaaaattggagttttttcaaatgtctgtttactcaacatatatatttcacatttggtgattgcaggaggtgttcttagcgggttcagagacaacaagcag

SEQ ID NO: 104706 - DNA, 615 bp, Mimulus guttatus
  Intron number 1 from transcript mgv1a021261m (locus mgv1a0 21261m.g) derived from phytozome v7.0 (chr-ID scaffold_305 ; pos 83666 to 84280)
gtaaatcctagtatttactacggcttcaaaattgttccgtagtaaaaaataccttttattacggttttttaccgtagcaaaaaatttcatagtaaaacgagtgcaaaattgagaattttctatatcatctagaaaatttcactaaacttgaaactgcaagggtggacgtgtaagaagatttatagttgaggagtggttgtaattatccaaacaagagggagtttttcgtaatttgaccatacctcaatgggttgattgtaatttaccctaattagtaattatgtttgtattagacgtaacaaaaagaagaaaaaaaagtgtttgtactaggaaagaagtttaccgacttagggtttagtattactttataactaggatttgtttttttttttaattgatcttatactataggtatccttttcctttgagaacactacttaaaatattttactttataagtaaggtttgcgtttttcttttttgaaaatattttataagtaagattcattctgaacgccaaagaagaaaaacaaaaaaaacaaaaaaaacacaaatccttgtcgccatggacgaaagcgaggagaaactgccgtacgacgtcctcgaaatcatcct

SEQ ID NO: 104707 - DNA, 905 bp, Mimulus guttatus
  Intron number 1 from transcript mgv1a014753m (locus mgv1a0 14753m.g) derived from phytozome v7.0 (chr-ID scaffold_41; pos 1527886 to 1528790)
gagaatccgaattccgaattccgaattcctattaggtaaattataatttctctgttgctcgtcaaattcatatctgaaataacggttgaattatttgaattattcgtaaaagaaaaaggttatttttatggaggttgatcgatgattttgtatctgctttttaaaaatttattttcgatacagtttttttcccttgtttcttcaatagcaattgctttgaaaatatatgtttatctgcctttgttgatgcatgtgtgcatgcacaagtttctaatttggcgatgccctttactgttttcctctgtgccttcgtcgtaattgaaatttgaaaccctaattttgtcagaaatgattttaggtttctttctggttttccttttgtttggggaagaatgggagaaggccttttttttatttatttttattaattttttataatcctattacaaatagggaagtaggaggttaggtaccacctttcctgataaatagggttagggatttgatatggagattgatcggaaactttttttatccgattgtacgttttttcggaaaaagtagcctcgagatttatgattaaggttggggattgaaatgaaagatcaagatattgtatttttatcttctttgttttaacaaagctagatgtaagtaattgctgaattcttgaatcaatagtataatattccattgaaaccatcgatttccgatgttaatttctaaaaacagaacaccaattactcgtaaatacccgttccatttctgtttgctatttaatttcattgctataatattaaatacacgctctctgtacgttaaaacacggcatgttactgacgggtgattttgttgatcgatttgtcgcagcctttgcgggtttttaactaaagtaagaaacagaa

SEQ ID NO: 104708 - DNA, 731 bp, Mimulus guttatus
  Intron number 1 from transcript mgv1a002924m (locus mgv1a0 02924m.g) derived from phytozome v7.0 (chr-ID scaffold_6; pos 777737 to 778467 reverse strand)
agcacgaatccaatcgccaacctgattacgcctccgtatggattgaattttctctatccatctttttttccctttttaaataattttattcaattgcccctccttttttctgataagattgattttttttttttttttggattgagtgacgtttattaggttttgtgtgaggcatgtaaattgaaattatcctcgctttaaaaaatagagtgatgttttttttatggtatatcaaattgtctgtttcgtgtttcttcagagtttgctcgtttctttttcctcataggtttcattaaattgatatttgaaaggttcaaattgagctattcaattatctgtattgcagtttattgggtgttgtttgaacatttacatttgtgcttgtggaaaatcaaattttaattagaaaaaatcgcatttttgcattggaatttgctattttctaattaatagtttaaaaaaaaaaggtttttaggagattgatgttctgttttactgaagtagaagctattttttctattgcattattcgggcataaataaagttggattttagtcacgatattaagtttagtttttggcgagtttgttttgtttgaacggcaatcaatcacaagtttgcagaatgcacggatgactgagtatgaaatcataattttacagttttacactcgattcgtatggtaaattggtaattagagttaataatcatcttttaacaggacgaagggg

SEQ ID NO: 104709 - DNA, 611 bp, Mimulus guttatus
  Intron number 4 from transcript mgv1a010465m (locus mgv1a0 10465m.g) derived from phytozome v7.0 (chr-ID scaffold_54; pos 1108128 to 1108738)
tgctggtatcttccggcaaagattctcaggtagcaatcaactaaaatttgtcttctgttgaaactgagttgtagacaaatattgtctgtgttttgatattatgttcttgtttaccttgtaaaggtatgtagtgttctttacttagtaactactaagggtactttagtaactaaagtagttacttattattgttgttcgcatttaaggttgaaagttaattcaaactactcgaccctcgattcaagattgttcatttaaagtttattaatttaacgaaccatgtttgaacatatatttttgtttgataagctatgaagctcggaccgagcttgactcgattgcttattaaaacaccactcggttcatttacacccctattcccatcatgttgtgtatttatagttgtaacaagaactccttgcgtttttttgttcagttttctgtactccaaatatcaattaatatttgattatcctagaaatgttagtaatataactcgactttataatatacagtatagttttcccaaccaattgataagtggctctctagtgtacgataaatttgttttatcaactctccagctctgcgtgtggggaagcaaggactgg

SEQ ID NO: 104710 - DNA, 296 bp, Mimulus guttatus
  Intron number 3 from transcript mgv1a020024m (locus mgv1a0 20024m.g) derived from phytozome v7.0 (chr-ID scaffold_72; pos 359895 to 360190 reverse strand)
aggtctgtcagtattcgtgacatgaccttttctttcactaagtacgtcccttagttccttgcatttgttttctataatgattgcctatcgtttcatttttattgtgtaaggtaattccagattttgcaagatcctgaaaagaagaaacagtatgacaaggtggagtacttgttcttttttgttggattttcttagattcttttttcgcgtttatgctgcattatttgaattaaaatgttgctggcgtttgataattggcataaatattttgactagtgaaataatctttgtaacag

SEQ ID NO: 104711 - DNA, 518 bp, Mimulus guttatus
  Intron number 2 from transcript mgv1a010015m (locus mgv1a0 10015m.g) derived from phytozome v7.0 (chr-ID scaffold_27; pos 1650511 to 1651028 reverse strand)
ggccagaaagttattttaggggctattcatccaaggtgatgattgttaattctttatctttttttttttcttgattattttcttgaagtttatttgagttttttttggagttaaaaaggttgtgaattttgttacttttaaggttagataaatttgatttttactgggaagtaatattcggatatggttgttgttgtgtattcaattcaattgttggtgctgtactgcagaacttgttcaatttgctgactagttattcattcatatgtacacatatccacttgctttgcaatttcttatctgatgtgacaaaaaaaaaaaaaaaaaaaaaaaactcgattttggactattcgacaactagcccgtgagaaacggcagatgttgaactagtagccctacagagaagtagcaattgatttatgtttggcttgaatgaaatgttgatctttgtggaaattaagaatcttgtttatgtatttttttctgattcgattgggatttttcagggcttattatcg

SEQ ID NO: 104712 - DNA, 935 bp, Mimulus guttatus
  Intron number 4 from transcript mgv1a000717m (locus mgv1a0 00717m.g) derived from phytozome v7.0 (chr-ID scaffold_159 ; pos 407664 to 408598)
gagtcagtacgtagttgtctgttgaaagatgtgtgtatattatattacatcataagatttaaatatacttgtataagctactagtttattaccagtgagctaacatttgtataaaagaacggccgtgaaacctagaacagtacaagataacaaagttgtaaccgttagttgatagtttgactaaagtactgcaactatacatattgatagctttattgtgcttccaaccaataaatgaacatagtgtaagtttcaaaactggagctagtgtagttttccattatttatcgaacatagttcaggatttgttatataagatagcggagagttgaaatttaaaattagttttttatgcgttacatggtctctacaaaggtattgtaatgctgagtttcatttttttaaataagaaatttatttccatcgaataagctaattaaattttgaatgcctaagctttattaactaggcctgttgatgtttgtccgtgttgttttgttattctcttgaatgccaataaactatcatccattattttcaaatatatagccaatttgttttggttatgcctatttatggatgtgccacaggtgaaaattttgtatcaaagctcttaggaacagaccttgaactgtgccatataatctcattgcatgccacaacattgaaaaaactttaatgcttaatactatgctttagtttagtcttccctttacaaaatcggagagtgatgatacttatgcttaaaactccattcatctaactgcttccgtaaaactttactccatgctaaataaaataatgttttgcatgaagaaataatgaatcacatcctctgattcttcctttttttttgttctggtcttcttagagtagcatattaattttattttggccattttcatttttcccttttacaggtacaatttttgcat

SEQ ID NO: 104713 - DNA, 893 bp, Mimulus guttatus
  Intron number 1 from transcript mgv1a018716m (locus mgv1a0 18716m.g) derived from phytozome v7.0 (chr-ID scaffold_7; pos 1831512 to 1832404)
ccacatatcccatttcaccatcttcttcccacctggttagggtttcttttctgcttaattttgttatttcttctgtaagggactttccttaatttaatttacattttttattcaaataattataaattaattagggaataatcagattgaagatagtctgagttcaaagagctcaaatgtatgtgaggtggatgaagatggagatttaattctaactcgccggcactgtgagttttctttcacaacagaaatttgattatttgtccctcaaatttgaattgatttcacatttggtcccccatgttcataaaaaaacacatttagtccctcatgtttcaaagattcaacatttcctattcacttccgtcaattttctgttagtactaacgtaatcaagcctgtacacatcaccgccttaactgacgcagtaacggtaaattgacgaaaatgaccaaaaatgttaaattgttgaaactcgagggaccaaatgtgaaatcggtgcaaagttgagggatgaaaactgtaattttcccgtcaatttatctatctattttatctcatgttgcttttactgaatttgaaactaagctttttgtatcatttcttgtttttttatttgtttttagtatattgcttcatttagaatttcattgatcttcttcaatcattgcgtcgaatttctatgtcggaaaattatctttattcaattcatcgtgaatcagctgtcgtaggttgtagttgttcacttgtttgtagctgaaatatcgtaaacggcacaagtcttgtgatactgacgttcctctcaataaaataaatacgaattccaaaaaagaataaacgaggccaagaaatcgatataattcatttcaaattttaatatgcagatccaccaa

SEQ ID NO: 104714 - DNA, 994 bp, Mimulus guttatus
  Intron number 2 from transcript mgv1a012406m (locus mgv1a0 12406m.g) derived from phytozome v7.0 (chr-ID scaffold_68; pos 73921 to 74914)
gggctctgttcttgctgcatcatcttttccctctggtaattatcttttttttcttcttctgctgatttatgattcttgatgaaccctttttttttttttttttttttttttttttttggggggcaacattttcttgaatgggtgttatgttttggatctgggtcttgtttggttgttttattggatgtaagcacactagaatagttggaaattagttttaatttttttttcttttccgaaatataaaaatgttatcacattagtattggttcgatctaggtgtgtaagtaattgtatatcgaacggtgggatcgaaattagtcattttggaaaaaaaaccgattttttccggaagtgaaaaactagttccaatttcattcgaaaaaaaaattggaattggaatttcggaaattggaatgtaaaaacttgttccgaaatcagaaaattttcggatcggaatcggcgcaatttggaaatttctattttttggtcacctaaaatatataaaatacagaagaatattggtattttaagtgtaatattcggaaaaaaatcgaaacttttggattattttcgaactgaaaatcgaatcggaaatcagaatctcatatatattcctccaatcccgatccaaataacttcggaaaaatcaaaatttcggaattcggattgaataatattgttccaacatcggaaatttcgttctaatttccacccctagttgtatagcaacgataagtatacacacaaacacacacattggatgtgatataataaataaataccccgttttctgtagcgaattgcattgcgttacatcggatccattttatatagccatactatttgtatcttcaagttgttttgtcgaagcttgttgttgaatcagatatttttttattgcgtttgatattatttattttaatgattccgttttggataatccgacaactaagcaggaatcttcgacacctcttgctgctgttactatatt

SEQ ID NO: 104715 - DNA, 570 bp, Mimulus guttatus
  Intron number 1 from transcript mgv1a011619m (locus mgv1a0 11619m.g) derived from phytozome v7.0 (chr-ID scaffold_136 ; pos 7232 to 7801)
tgttttctcaatccctaaaatccccaaattgagtgagcctgctgcttcttctcgatcccttcgtttacttcttttcaatttaattttgatttttctgaatatttccttaacctttgtttgattcccatttcttatggttttatttcatttttttttattttttggtggtaaattatgtttcggtgaattctgaatacccgtttttaccgtatttgatttcgtgatggaattgcaatctctcatgctcaacaattgtgagtactgtaaataaatgtgctcaagcaaaatgtgctacaaattcctttttactgtttttgtttatcttgttgtttttagggatttttgatttagggtttagacagagataattattcgatccttttgttaattcatcttctggaatatgttagatttttgaatgttaatgtgtattgtctacagagtagtgttctttagatgaattacagtaaggttattggaattcggaactaaatcgtaaatcatgtatatttctaactcgacttaattcgtacagatttcgcttgtggctgtaacaaacggagcttgcaa

SEQ ID NO: 104716 - DNA, 958 bp, Mimulus guttatus
  Intron number 1 from transcript mgv1a023706m (locus mgv1a0 23706m.g) derived from phytozome v7.0 (chr-ID scaffold_273 ; pos 84874 to 85831 reverse strand)
tggaaggcggtgttggcccgagggagctggctgaggtggcggaggcgggtttggatggggtcgagagaatggattttgaggggagtgttgtgaatgcggttgaagatgtgacgcaaaatgtggatgcttcttcggcgaataattattcgccgcggggaaaaggttttaaactcttcggagtgcaaattatatgagtgagtcgagtcggtttcgtatttatattccgctctctctctctctctcactctctctcgatttgttttttttttttttttatttgagcagttgttttgcatgaattgtattggagaatttgataggtgttttcgagactaacatatattttgaacattgggttgttaaagcaaccggattatgctatactgtgtttttgttttcattttttttttaatcttgagtttttttattttattttattttattttttgtttaaagaattcgataacgaatatgcaggtacagatgtgtcactgatttctgatccacgtctgtattgtgatgagtgtgacagacgtggattcttgaattttgaatttcgtaccatgtcatttaattgatttagggcttttttctctcagaagaattaaaaaaaaaaattgatttagggccttttgttttaatttaccttctttttgtgtaccggaggttttgtgtaccggaggttgaaattggaacgccagtttccgaggtccgatttttctgaaattatttgagtgtactggaggttgaaattggaacgaaattttcaatttcaggaacaatatttgtcaatccgaggtccgacttttctgaaattatttggatcgaaattggaatatatataatattttgattttcaatccaagtttttaatttcaaaaataatctgaaaattccaaatattacacttgaaattccattgttatgtgttttacatttgaagggaccaaaaatttga

SEQ ID NO: 104717 - DNA, 608 bp, Mimulus guttatus
  Intron number 1 from transcript mgv1a007433m (locus mgv1a0 07433m.g) derived from phytozome v7.0 (chr-ID scaffold_42; pos 906555 to 907162 reverse strand)
atttcattttcggttccggaactgccgcccctcaagttggttaatttttctcttctccttttcttttatatcgtacaccttaaaatcaaaccaaactactcgatttaagatggttcattaaaataaagtatcggagatattatattaaatgatacatttcactaacagtttaagttttttgttgagatgatcattcaatatggtatcagagccagaccaaatgaaatgtcttgagttcgaatcccacagcgacatattggggatattaatattaaatgatacatttcactaacaactcaagctcaagcttttggttgagatggtcattcaatagagtaaccaaacttgaacacatatttttgttcgataagctatgaaacccggctcgatctcaagcttataaattcgattaaaactcgactcgatcgcttatcaagctcgataaaaattcaaacaagcttgagcggattatacaatcaaatgtttttttttaaaatatcttttcggggacttggtttttgtgtgattgaaacatgtaaatgaaaataaatagaaaaattgatgtatatatatatatgcatgtgggaagtacgagggagcagcatttg

SEQ ID NO: 104718 - DNA, 788 bp, Mimulus guttatus
  Intron number 1 from transcript mgv1a026953m (locus mgv1a0 26953m.g) derived from phytozome v7.0 (chr-ID scaffold_59; pos 29821 to 30608)
cagacaccaggtactcgtaatttatctcgtcattttttatttctagttgcttcataatagtttatatctttctttgcaataagccctttatttacttttagtttttatttctcgtaaatggttcaaataattaaacacttgcaaataaatcccgacaattgaataagtaacttcccgttttagcaaaaaaaataaagggtttacttttaaatgtcaaaatcatattccagcaaaatctcgttttcgtttctgaggtttgggtgagtctgaactggtccttgggcaattttgagaaaactcgaaagaagttcattgttgtaataaaataaaattatatttgtcttaaaaatcgaatataaaactaacggccttccaacagagctgaaatattttccccatttcactaaaaataaaattaatttgctttatctccataaaaatataatacattttatattggaaagaatgccaccgagtaacaatctgatttatgtctatcttagtgtaaaatttgacctaaacctcgtgaatacatctgttaaacgaagtataactaatcctatattaccaataaatagttttatcttttgtttcttttcgaaatccgtatatttgaaattaatatgtacatatttccaaataggatgaaatactgttgttaactttaacttcaatttgatcagcattctttctaatatcggatgtctacgtacgatattgcggatatgataaagggtttgtagatttttaaagtaatttgtaacagtataaaggggggctcgactgaa

SEQ ID NO: 104719 - DNA, 900 bp, Mimulus guttatus
  Intron number 2 from transcript mgv1a010371m (locus mgv1a0 10371m.g) derived from phytozome v7.0 (chr-ID scaffold_8; pos 215644 to 216543 reverse strand)
ttgttgttctggtaatgtttcacttaattcatttcttcaacgtacacttgatggttaaacttaacgaaacgttgcaattaacggcatttttatcgaaatatttcgtcgttttataatatttaatctatataacccgttttatttgtcgtttaagatttagttatacagataaagaaacttgtcaaataaattttgaatttgataagggaaaaccccaaaataacatctctaacaatattaattaactgttaattgatatgatatgatcaacagtaaagttggcgccacagaaaaaaattaataataataataatgcttaaaaaatcgaagacaatgaattaaatatcatgaaaaacatttttcccgcctaaaagtaacaaaataaatggtagaatgatattctataaaattagattggaattgagaatttaaaaaatatcggatttttttaccaaatgaaatttagacataatagtgtcctttgatcaattatgcatgttaccaattttgcccctctatcatgatctataagttatatttttttataaatttacttattgattatttcactcgtcacctcgatgtttactttaaccgcagtctataagatattacatttagtggttttgaactataaatctatataaataattatcaattaagcacacatattacatttgtgtgtgttgtactgtaatatttctagatcacctagttagtacagtgttatcgggtgtagcatcgacaaaacgctttcaactgctaaattgcataggaatatatatattttttattaatattaataatttagagaattctaatattttgaattatataaaataaaataaaatgtttttggtaaaattgactacttattacagtcaggagggccaaagtgga

SEQ ID NO: 104720 - DNA, 871 bp, Mimulus guttatus
  Intron number 2 from transcript mgv1a008528m (locus mgv1a0 08528m.g) derived from phytozome v7.0 (chr-ID scaffold_207 ; pos 245867 to 246737)
ccaatttttcgaattttcgccgagcatattctccggtaacgctattacatttctcgctattttatctctcttttctcgattttcgtagtataaatcagtaatagtttagggcaatgtatgattgattgtatgtttccgattgatggttaattaatttcataaagctgaggttttttctctttttttttggatgattggttgttgtttcgttcatttccaccacctatcgccgccgtgattcttcgattgtggtgtctattttgtgaatctgaatctccataatatattggttgtttgcttttgctggatttgaaatttaggttttgctcgtctggatgggaatcttatgtttactctcttgaattgaaatttgaaatgttgaagattatttggtaattgctttgagttattacattgatttttgatttatcggttcgaaaaatttcatttctttaaaaggtgtgtgatctgcgcgtactggttctcgatgagcttattcgtttttagatgactgcccgttgcgttttattctttgatgccgcgtactcgtatgctgaagttgattttcaagagagcacatacaatttgtagatctgctgctgaaattatttagcttttatcttttggagatctaaatatgttgcgttaattaaagatatctctttatgtaaataccgatttcgagtgttcatagtgaatgtagtttcgaatatcccgtctttcctcacattaaaccaaaatttgagcgatccgaataggaagataaacataattacaatgttttagctattcttttagtgttgaatgtattattacggtttgttgcccttaatcaagattttcacattgcttatgaattactttaggaaaa

SEQ ID NO: 104721 - DNA, 689 bp, Mimulus guttatus; identical to SEQ ID NO: 103631
  Intron number 1 from transcript mgv1a015609m (locus mgv1a0 15551m.g) derived from phytozome v7.0 (chr-ID scaffold_44; pos 1327525 to 1328213)

SEQ ID NO: 104722 - DNA, 779 bp, Mimulus guttatus
  Intron number 1 from transcript mgv1a007748m (locus mgv1a0 07748m.g) derived from phytozome v7.0 (chr-ID scaffold_75; pos 237007 to 237785 reverse strand)
gagacagcagcggttggtgaatttttcttattccagttatttttgtgcgcacaaaatctcgtgtttgtctttgcttatttttagttctttcgatcatgttacctcatggatgtttttgtggattttttttcgaaaatttcagatctcagatgaatttcatttgttattttttattattttttctagggttttataagcaatcgatttcattgatgttgctagggttagtgcagaaattgaaattgaggttgaatgttttacggtttatggtatcttgaatgtgagctgaatttgtaattgtaaaattcgagattaaatttgatttttttgaattgttgtttcagactagatatgcattctccatttcatctccaaaggtttagtttatcttctcccacgattatctgctgttggagtggaaattttgccagtattcgatataacaacttataaattccatattggtgcatgtgtgaggcaacccttgtaatacctgttggtgtatccgatatttgttgaatagtttttggctttttgctattccaccattttgagtggaacttcaattaatatggaagtggttcactatgtgaaatttcgacttaggaaggagagattagctctattgatttttgttaacactttgttcactgaagtaatttcagtggtgggtaaaattttgcattagctattggaagtaaatgctaatatctggttttcgctcgctttcatatacatcatacacttaattttgtttgttgaaataagtacaggtactg

SEQ ID NO: 104723 - DNA, 400 bp, Mimulus guttatus
  Intron number 3 from transcript mgv1a005609m (locus mgv1a0 05518m.g) derived from phytozome v7.0 (chr-ID scaffold_68; pos 1161025 to 1161424)
cttctgttgttgactgcctcatctctcatcccaatgtatattttctctctttaatcttatgcattcatatcaaaattgaaacttgtttcttattttttttttttgggttggaaactcgtgagctttaaaatggggaaatagctgctacttttttttattaaaggtaacaactttcttcaaattagcatcttaattagagattaatcctcgcgaattactcgactatgtacaaaattatgttgaagatatcttacaacatttgtaatatcatctgaccaaatatgttccaatttgacggtttatcgagaagctgactggttttattttctaaaagccgtttaagacgatttcgtatggtgtcatttctttcttaaattctgtaattctgaacaggttctta

SEQ ID NO: 104724 - DNA, 733 bp, Mimulus guttatus
  Intron number 1 from transcript mgv1a015048m (locus mgv1a0 15048m.g) derived from phytozome v7.0 (chr-ID scaffold_114 ; pos 513378 to 514110 reverse strand)
ttcttcaatccatcccatactatccgtacgttttcttctataatcattttttgacataggcactagaataacacatatattacactcacaccgtctcgtttggttggtaagataaaacatgactgactgaataaatactccctgcattccacaatgcattccacaatacgtgtcgtttttcacccttgcacaagtattgagaatcttaataaatgttttttgatttaggaaaatatatattcttagactaaaatacccttgtccagtaattgaaattaaaactaataagggtataattggaaaatatgtaattgatgcagcattggcgcattggcattggaattctgaagtaactgataatatggaacaagaaaaatatgggagtaattaatttatcgggccggtccacaataatgaaaaaccgaggcctagtcgaattatacaattggattctcataagattgcataatcgtatcttcggaaccaaacgaggccgtaagattttagtatttggaatttaaattaccgcaaggcgcaaacccctaatgcctacttagcttatcccaagattagtcgtgggcatcttggtcaattgggtggtaaaaaacgagttgactccaaaatgaggaaaatgttttttttaggtataaccatctgcgtttatgtcaattaaaagtcccggaaaattgacatgcttgtctgataatagctgcatttaaatcaggtggtggaa

SEQ ID NO: 104725 - DNA, 719 bp, Mimulus guttatus
  Intron number 1 from transcript mgv1a011852m (locus mgv1a0 11852m.g) derived from phytozome v7.0 (chr-ID scaffold_58; pos 207831 to 208549)
cgccggcgacaaaattcttcatcggttgctcaccggtacgcttctctctttcctttctcctttctgtattcgatttctctctttaagatatcaatcaatcgcctgtgaacgtagtcatgaacgccggatccgaacccggatctgtattcggattcgcctcccgtaattttggagccggtgtgatgtgtgatttaatcgatttagtcgttactctccgtcgaacgttttcgaaggactgcgtatttccatttctattgcatcttaaactgtgtggatggaatggcgatattcacaattcatgtatatgtgtattttgatctgaattggttccgatgttttttttttggcatagatataaatttcatttggcttttgaggatcaaaacttgtaaattttacaaattggtgttagcttacttagacacgaagaaattatagttattaaattctgcaagtgaaattagacattgagtttagagtttccactttcaatgttagatttatgttgtttcttcctttgataagtaaagtgacaatctccagatctcgactagcatttacttgtgctgaaacacctcgtagcgagtttgtgattgcttgatattttttcgcagtttttcgttgttaaattctttttcctcaatttcttcacgaatccttttctccatcatcactgtgtttattattgttcttccagttattttttgattctcccgaca

SEQ ID NO: 104726 - DNA, 988 bp, Mimulus guttatus
  Intron number 1 from transcript mgv1a000044m (locus mgv1a0 00044m.g) derived from phytozome v7.0 (chr-ID scaffold_163 ; pos 593559 to 594546 reverse strand)
tggttggtcaattggcggccttggcgcatttataggtgattctccttggcccatgtatctagttttctgtacccatttttttatttttcgggatcatatcaatttgattgcagtgaaatctagtctttaatagatggattagagtttacgcacattctaattaatgaagatactgagctgtattcttgttagttaatgctgatattatttttattcctttatctttgagatcggttctaagtctctacattggaagtgtgatgtggggcatgccgcactaattggatttgccacaataagattggtcgaatgagaataattattacttgcagatcatatgttctgtcacaattaataagattttttcacataccgtattaattggaactataaatgcgttaatggaatttaagagcggctgaagtttttaagaacatagcagatgtgaaattgttctttattcagtaaatgatgtatacaaagtgaatgttcctgtaaaatttcatctaaatgctattgagccctgaatttttcttgtaatatcttccatgtcttcgtatctatattaaggctttgagactctaggattctttatcagacacgactgtctatattctggaagatgtagcaattcatatttattgcagaaagtctgtacctaggtctatgtatcctgaattccgatttcccttttgttggaacaaactaagctcttagttcattttgagcttaaacaaagtcttgaattcattgataactcaaagtgcaatggaatgcaagaagcagctttaagtgtggtggttcatttcaatttctttgttattgttaacaataggaaataatttcctagttcattgacctattattttaaattttcacaccatttagcatatcaagtgaaactatttatataacacaacatatctatatctacaattttgacttaattcttcctcatttgtcttttcagttggatctttgctagaaa

SEQ ID NO: 104727 - DNA, 516 bp, Mimulus guttatus
  Intron number 2 from transcript mgv1a003052m (locus mgv1a0 03052m.g) derived from phytozome v7.0 (chr-ID scaffold_26; pos 534100 to 534615 reverse strand)
gtctacggtggaacaattaaggttagatctcgttgctaattcaatatccgttatcggtaaaaggaattcctgttgtttggttaatgagatcgtgttcatttcaaagtcgtgcacatcgagttgtccgttttgtagttgatatcataggattacgagtaccattgtattgtcttcaaaatatatttgagtaggttttcgtttttcatgtctattttttttttctttcttatttgtaagtagactagtagtttattttcggactctacgaaagggattagattatgcctgaatcgtgatccaatttgacttttgtttcttgaaaaataacacaaaagcttcgttggtaattttgtttcagacgaatcaaaaaatatttaatcatcgttccgaaagtattacgatacgtcatagttgactctatacatttgtacgcatttgtaaattcgcctcgaaggtgatactgatttttcgtattattggtctcgttgcagccaggtcattttcaaggtcacacat

SEQ ID NO: 104728 - DNA, 840 bp, Mimulus guttatus
  Intron number 1 from transcript mgv1a002667m (locus mgv1a0 02667m.g) derived from phytozome v7.0 (chr-ID scaffold_44; pos 913579 to 914418)
aaccccacgaacacagttttcggtgagatctgagctcctctattctactatctgcgttggatttcattgcttgtgttctgattcaagttttttttagatcggatctatgttaggagtacttgattgacttttgtgttcacgattgacttgacttgtatacttcgattctgattttatttgctgttagatctgttgttatgttctggatctggcgtttttgatatttgatgttaagtttatgtattgcttatgactcgtactgagtttattttactagctgctacatctggtctaatgtagtttagcatcttaagttgtatagtattagtttgaacgatcctgatttcaacttcatgtatatgaattttttattataattctgttgtacatgtgatatttgtacgtatttctcaatcatgtgagtatgtattagttcttctcatgtaatgtgtgttccatgttatatttaatcaaataagccaacaccaaattatatatgccatgaaactcaaacattacgttgacaataattcgttgaaaattacttgtgattctattattagccactatcgatactgagctgtttgtttccattacatttggaaaataatatcattgtaagactatctacacgatcctgtaagtatgtacatgagttgttgtttatctatgtccattgcgtgtatactgacagtgctttagttgtgatttctgtacatcatgccaatgtgttttcattgattatcctgatactttgttttcacccattggttaagaatgattcatatatacatttggtactaccgaggagactgttcttatgtattacttcttttgcag

SEQ ID NO: 104729 - DNA, 511 bp, Mimulus guttatus
  Intron number 1 from transcript mgv1a005199m (locus mgv1a0 05199m.g) derived from phytozome v7.0 (chr-ID scaffold_7; pos 17695 to 18205)
ttattcgaaccaacgccggccggtcaacgagataggtcagtcaatctgccgatcttcaccaattcttcctttttttttttttttttttggttttcctctgagggtcatatgtcaattcgattatccattttttcaggtattccgtttatcttgttctggtaattcattctttatatgtcaaaacggtgaagtttgtttattctgtatatgtcaactgaaattcgaaaatcatattatttcctaaaacaaatcatattctgaacagccatttgaacctttctcgacctgttttttgccatcctgccatcccctctgcagatgtagaaattgattaatttcctttttaatatttcaaagttagttatagaaattaatcaaatccagtttcacatcctaaagccaaacagaaaaattatgtttaggatgtcccaacattctttcatcagcacatttctggatagttgtcagagttaaatattattgattttaatattttttttatcctacttag

SEQ ID NO: 104730 - DNA, 526 bp, Mimulus guttatus
  Intron number 1 from transcript mgv1a017600m (locus mgv1a0 17600m.g) derived from phytozome v7.0 (chr-ID scaffold_20; pos 1136861 to 1137386)
ttctgttctgttcggttcggttgttcctcaacaaggtatcttgtttcattcatatttttttgatttttttttttgttttttttttttgttatttcagtagacatatgtaattttaggaattatttatgtgttacatgtccatttgttctggttatatgaagataattgaaattcttgatcgtgttgtaccgattaacgcatagtttttgttgttctttggtattttcgattttttttctcccatttcttccctatttcagataattccgaaaatttctgaaattccgaaaattccgaaaatttcggaatcggaactcattttcagagtccgaatatttcggaatcggaatcggaaatgagatcttagttccgaaaaaaatcggaaattttccgaatttccacccctaattatatacgctgtagcaatttattattcctaaatatgcttgatttatttgtaattttgtgtcgaatgtgtgttgtctgtgtatttatactctgattcgatgtttgttttggtgcagaa

SEQ ID NO: 104731 - DNA, 652 bp, Mimulus guttatus
  Intron number 3 from transcript mgv1a003053m (locus mgv1a0 03053m.g) derived from phytozome v7.0 (chr-ID scaffold_278 ; pos 177608 to 178259)
gtggtgcaccgatcaatttacaggtcttattcttttacttctgtgttgttggttcgattgcacttattcctgagcataatcacgcttctctatatttgcctgatcttgtagcctcatctctacctgttatatacatatttgtaaatatatatatagatcagttttgatttttgaatcattgattggaaactgaagcatgtctcttccgcaagtttggtaatcttttgtaaaagtattgcatacagtctggcatccaagtgggttattttaatggattttgattgagcattttttcttttgtttttttttttttggaatttttttgtcttcttaaagattttgttgtaaaccctagccaaaaaattctgaacatgagagcccacgccagctacttattcataactaggttacataatctttttccatgacagagaacatgcatgtttcaattgtgagtttgatctacgttttccttataattgctgagctgcttcattttaaagatttttacttcgttgataccgttataattgagttttgtctgttgcttccttgatccatattggttttcggttacgtttccggttataataatattatcgacaatttattggtagcttcgagagcttgagagaggtgtagacatacttgt

SEQ ID NO: 104732 - DNA, 547 bp, Mimulus guttatus
  Intron number 1 from transcript mgv1a001513m (locus mgv1a0 01513m.g) derived from phytozome v7.0 (chr-ID scaffold_89; pos 239790 to 240336)
aaatccggaaggaaattcaggttatctgttttttttttttttttttctttttttatgtacaattttttgttgttcgtgcaatatgtttcaattcaattaacttgttgtaaaactcaataaaagtgtgtttatcttttaacttaattgaatgtacccgattttaaaatttaggatgattttattatggggctggaaagagcaattaaggcgttttttttagggttgagattactgaagatttttggtttattaattgaaataattgaatatgcatgttcatatatgagatggctgggaagttacagttgtaaacaaactaagatatgcttgttggttttgcgatagtcgaacttgttttttgagagtggtgaaggtttatgcagataacttcataaattgattattgtgtttgttatcatcaatttggttcttggatttcctttggttgtgatgcatggttttctttcacttctgtttctttattcgtctagattttatggaattatgtttaggcggaaacagatagagaagctggaggaaacaaagg

SEQ ID NO: 104733 - DNA, 908 bp, Mimulus guttatus
  Intron number 2 from transcript mgv1a021170m (locus mgv1a0 21170m.g) derived from phytozome v7.0 (chr-ID scaffold_21; pos 2092988 to 2093895 reverse strand)
ttttggaacttcaactaatcttctttcgttggatagtgaccgtctcaatatttgacggattgccatcttagtttgtgtgaagtgaattttgctttggtcaagtgaaaacgaagaggtatttgaaataagtgaaagctgagaagataagagtattttgatcacgagttgttgtttgtaatcaagaaatggtgttgtatatataggctagaaagaaatgatgaattcttcagatatcgacataacacggtcaacataaatgtggttgctctatgaaactcgaaaaaaacatatgcatatgaagtcacatggatttgtctttgaaaaatgaaatgaattcaaggcaacaagaatttgtgtgatagaaaatgttgtatcctaccaactctggcaacatggcccctgaaaccatcatctcaacatctctatttatttcgatatatctactaattaggccatcttatcctaaaggccacattcaattatattcagcgggtcaatgtgacgttttcttgctggtgatgttaggaatgatataagggtccctcacagttgacaaaaaattcattacgttgctctaatttatagacaaaaccatgtgattattcatgtgcttttgtttctctaacttctctagccatcacatatcctttggtctattcatcaccattcaatccagctaaggaaatagcatttacaagtacatctatatatatgcttatacgacacatatctaaattcacaaccagccttcaaaactcaacttctcatatattccttgattcattttcatcttcgacttcacaaaaatttactttaacaaaaaattcaatggccattcacaaaatgcttaggcggtctttatcagcggaaaagagatcaactgaagttccaaagggtcatttggctgt

SEQ ID NO: 104734 - DNA, 925 bp, Mimulus guttatus
  Intron number 1 from transcript mgv1a022355m (locus mgv1a0 22355m.g) derived from phytozome v7.0 (chr-ID scaffold_104 ; pos 54674 to 55598)
gttttctggagcttccatcctcccgcaataaggtttttcctcctcttcctctccttcatatacatacatatatacatacaatttatgaatgtatctaatgttcctaattcgagaggtatacgctaataggagatgttaatttctggatttgtttctaaattataatcgacaatttgcagggtgttttttttcccattttttttggtctggatttgaagtttgagcatagaaaatgttagttgttgtcgattatagacgacaacttactattaagctgagtatttgcagtaattcgagcaaacattcggccgaagttgctgatattttcgcgaaatttacatcgaattgttaaatttgatttgtgtgttcactaaaaatgtcttctctcttgcactgggtgctcgtgtgtatatatatctgtcagagccgatattgctggaaataactagttaaaatgcatatttctaggcttattttctcagtcgaaatgcatgtttttcatttactgttgtgtaccttattgaattctctgctgtagacaatttgattgatttattactttcaagcacaaatcacaccattttgatgaatgattgctatatttcttccgataagtgttgtagataaaagtttgatactcccaattgaattattgtgatttttgtaactagaattccagatattgctcgataattagtcttatcacatcaagtgtagtatattcaactcgggtttttatttaggtcgttacttttctctgcctgaataactgctgagagatcataacttgagtcattaatcaaaagttttaggactttgcaatagtatcagccatgataagtaattggtttgtggatgtttggttcataatcggaagacttctgccgtttataatcgtttctaacttctttaatcatgaaaggtt

SEQ ID NO: 104735 - DNA, 575 bp, Mimulus guttatus
  Intron number 2 from transcript mgv1a011123m (locus mgv1a0 11123m.g) derived from phytozome v7.0 (chr-ID scaffold_75; pos 1142653 to 1143227)
acctattccatcctttggaatccccacagaatcatgttagttctatttttttttctttttttaaggataaagtgcatttctacccctataaaattcccatattggcactttacacccctttaaaatattgctcttgttgcactctgacccgaaatctaatttccggtgggcaacgtgcaataaattaccattttataggggcctcgtccaacgaaaataacatttttaaggggcatcgtccaacgaaaataacattttaaaggggcaacatggaaaagaaagaaaagaaccatttaaaggggcaacgtgcaaataggataatatttagaggggcaaaatgaaaaaaaaaaaacacattttaaagctcagttccggtgaataaaccatcaaaattcaaatatagcattttgaagggggacgctcagttgttttgattttcgaggggggaaagtgcgaaaattgagtgcaatttgtccattttcgtatattattcgagattttttcaagaatttttcagcagctgatatatgtataaatgcatacatgttcttgattgatctgcagattttcagtag

SEQ ID NO: 104736 - DNA, 471 bp, Mimulus guttatus
  Intron number 2 from transcript mgv1a016462m (locus mgv1a0 16462m.g) derived from phytozome v7.0 (chr-ID scaffold_2; pos 238278 to 238748 reverse strand)
agttcttgaactgtattgccttcagtccgcttcaagtgagatcccttctcttccactttttgaagaaacaaaaacccatatctgattttattttctgtaattttttatgcatttaaagtgtttgatgttttgtctcagtcaaaatgctgtggatctttatatcctctgtcatactgcttaatcatctttgaatgaaaaattgactctaagagctgttgtaacaagtttatttacatttctggagaatcaattgtacgaattactcttatttgcaaatacgatcaattgatttcaattcgatcttccgattgtatctagtgcaacatactaaaaaggggaacatgtgaaagaatctatgatcattgtacaagtagtgttattttaaatgcactcgattatacatcttgaagttagggtctaactgtcgatttggcagctgattttgatttgacaggacagttggtttggccc

SEQ ID NO: 104737 - DNA, 863 bp, Mimulus guttatus
  Intron number 1 from transcript mgv1a019385m (locus mgv1a0 19385m.g) derived from phytozome v7.0 (chr-ID scaffold_4; pos 2782182 to 2783044)
tgatcgctgcgcgtaagagtttgctttccttttgttgatttggcttgtaatttctttttacagtagttagaagttggatttattgaatgtgttcctgttttttgagttgcaatgaaggatatgtagtgttctgacgggtatgatttccacttgctggaggtgtggattggagtttcgcatttggattgtgttataaatccttttgagttgaacttccttttactgaatcagcttttagcatctagcaaataatcgcttgtctgattaatttagaatacctgtattttcaggtctggagttcagaatgttgtagttgtttttgtttataatttggttataatgtttatattgccttaaagagtaattggagtggagagtgaggttttgacttgaaaaagaaacctagtaaaaaaagcaatcctggaaaatgtgaattcctgttgatcgaattgtttacgttgctcaaatggttgtaatgtggtctgagattgtaatcgtttgtctaaaatctgcaacaaatgtgtcatttgttgtgctcgattattcatattcttaatacttggcttgaatggtacttggtgcgacattggcaactccaaatacacaccattgatcgatcaaattttcttggatgaaattgactttaatatggtgaagatattatgtgatttgttccaaaattggaatgtgttttcaactttatatgaggtgtcgcatcgtgattccgtctccatgagcatatatttggaaaatcactttgatttcgttaaatatattaggccattcgccacttcctttgaatataacgcattttcaatgcaaatctagttctgtttacgaggacgaaaaattttgtgagacgt

SEQ ID NO: 104738 - DNA, 821 bp, Mimulus guttatus
  Intron number 1 from transcript mgv1a001272m (locus mgv1a0 01272m.g) derived from phytozome v7.0 (chr-ID scaffold_5; pos 585872 to 586692)
tgtgcagactgtggaggtatattcttctgagtctcgtgtgtttctttgtcaatatttttcatacatgtatgtatatatacacaaacacacgcacacatatatttttacctgtgtgaaagagatgaaatttggttcaagattgataaataatttcataatttaattcttggttagttaatacaaccgctaatatttcttgaaatatatattcttgattcgctgtatttataagataacacttatacaagaattctttaatatatggcaaatttatgagtaatttataaaccttcataaaaaacaaccgacttggctttttttctttgtcggaattgatgaaatcttgaatctcgtttctgattttttataacatagtaagaatttttgctctggttttacgtagattatcaccgctttagaaagttccatttcaagaagggggcattatggtaaatagataaatcatcttcaacttcattatcctaatatccttgtcaaattcccacgacgccctcaattatttgctcgttattaaagacatgcacaaattcgttattttccttcacaatagtctaaatattttttcgcattgataagcttatgtattcgtatctctcttaatgcagagacgaaagatcatagaacaagaactggagaaagcacacgaagaaatacccttatacaagaaacaatccgaagcagccgaacaatcgaaactccaagtcctaaaagaactagacagcaccaaacgcctcatcgaagaactcaaactcaacctcgaacgagcccaaaccgaagagcaacaagccaaacaagattcc

SEQ ID NO: 104739 - DNA, 873 bp, Mimulus guttatus
  Intron number 1 from transcript mgv1a017577m (locus mgv1a0 17577m.g) derived from phytozome v7.0 (chr-ID scaffold_247 ; pos 166865 to 167737)
gggtgcgagtgctctactgaagatttcatctcagagtaagtttcttaaaacaatttctattttttgaaaattcttttccttttattggaatatatataaatatatatatatatatatatatatatatatatatatatatatatatatatatatatatatatatatatatatatatatatatatatatatatatatatatatatatatatatatatatatatatatatatatatatatatatatatatatatatatatatatatatatatatatatatatatttgtcgaagattaaaagaggtgacaaaaaaagaatgcacgtaaattgcactagtgcatttttagaaacttatagcaacatagtatcaacaccagcaccagtaccggtaccagtaccaatatcagtatcatcagcatcagcactcagcaccagtatcagtatcagcatcaaaattagttatgttatagtagaacataaaaaaaaaaaaacaatatcctataaaataatttataatcttgtgactttttagcaaatgttcccaattttcatcgtatcgaaagtttgtcatcaacgatactatttccggcccttcttttttttgtttgtattttcaattgtttcaactatttctaaacaaatcttagcatccaaaaacttcctgcataacaatgaaaattgacagttgaattttccaagtgttcgaatcattttgggtgcgtgcgtgtgtggtacgtgtgtggtgcgtgtgtagtgcgtgcttaggccaattttatttttatttatttttttatttttttcttgttttaataattttttgttttgtcaaattgtcatcagattcttgaagaagcctggaaataaccaggaggaga

SEQ ID NO: 104740 - DNA, 589 bp, Mimulus guttatus
  Intron number 1 from transcript mgv1a003845m (locus mgv1a0 03845m.g) derived from phytozome v7.0 (chr-ID scaffold_65; pos 367854 to 368442 reverse strand)
agtgttagtatacttcatcacttcttttcatcaatccaaattccaaacacgaccttctttcttcaattctctgtttttttttttttttactttgatgatcagcctggcctgatgttcaaattttggatttttggtaggtaattgatttttttttttttggctgtttattatttattaccttcttttatttctgcagttgtaatgatttcctagcatgtttcatttttcatttctggactgagaaagggttctgattcttatgttatgatttatgaattgttgctgaaaaatgtggtttgaaccgattttgaccaatgattgaagtggattctgttttatataaattgaaataagttgactggatataatctacggctagtgattttcaatttttttttttttttttttttggttaaatgagaagtaatggatcaaagtgacttaaatagcttaagtgatgttattgaagagttgggaggccaaaaattaccaacttttgcttttgattttgttatgactgtgttgaaatttggtcaagtaatttcaaaatgcagctccaaaaggtttatttccaccagaaccaaagcat

SEQ ID NO: 104741 - DNA, 829 bp, Mimulus guttatus
  Intron number 1 from transcript mgv1a016835m (locus mgv1a0 16835m.g) derived from phytozome v7.0 (chr-ID scaffold_7; pos 3274475 to 3275303)
ctcctcctctcttctccatttttttttcttcattcgtaagtttctttcttgcagatctgttgcaggctccctttttttttttaattgaataatttaatgataatgaattttggttttgagctaggtttttggtctggaataatttttgctgtctggtttatattactggtgtatcattaattgcatttggggttttttttttttttttaacggctaggatttagcaattagaaatggatgaatgtgtttgttggtgatgatagttttgcacaattaattctattattattttttggttggagtaaagatagatttttttaaaagtttttgtttgcttgatccgacgaaaataagtgaaaatacgcgacggatggtttttcgggtactccatttgcacgtgttttggattttggatgaccaattttatctaaatttgtgaatttaattgaattggattcatttgcaaatgtctatgtgtgcaccacacaaaagcacctaatcagacatctcgattctcaattaaatgaattggcataattgacgaagctttcggtttatatatagaaattattgttcttacatgaaatctagttagatgattaccactttcggttatatctcacgagcgagctctaatgcaacgagcttaaacttgctgttcatatttcaatatttcaaacgatttttagtttcaagattgactaagtaaccgacttgctcatccaatatctcgttttctcttcgtgtattttctttaaccaccgcttattcggacaaaaatctgttctgaatgaaaaaaaacatatgcaggaatctctcttcgtaaatt

SEQ ID NO: 104742 - DNA, 503 bp, Mimulus guttatus
  Intron number 1 from transcript mgv1a019807m (locus mgv1a0 19807m.g) derived from phytozome v7.0 (chr-ID scaffold_90; pos 143686 to 144188 reverse strand)
gcggagctagaattttaagtttgggaggatcgaatgtattaatttttttttatgaatatttacataacaattaggaattcgggatttgtttgagattttacatatgctggctctgccactggctatattgcaagttataattcctcattcctataatatggaattgtttgagattttaggtgttttatatattatgtttaaaatatacacatatatttatgtatacgtatatgtgtaaaatttatttgtggcatctggtctagccttcaaattcttgtgttcattagtgctttttttttttttggtatttgtatcttggagatctgtcatcttaattcacaccctcaatttatatatgtgttctctcgtatatgtcggagaaaagaccgtataaaaatctttgttcttgtctgattattataattcatccatatgcattatgtactatgattgatctttaaatcaaatacaaacatatatattataggataattattttcgga

SEQ ID NO: 104743 - DNA, 611 bp, Mimulus guttatus
  Intron number 2 from transcript mgv1a013207m (locus mgv1a0 13207m.g) derived from phytozome v7.0 (chr-ID scaffold_8; pos 1794177 to 1794787 reverse strand)
gccccgtttttgagtaagtgattttttgtctatattacgtggtaaatatgatacgggtaaggattaaggaaattgcaattacagagcttccggtttgatgaatcaacgttttagtgatgttatcacacattttttgacgtaaacttgatatgaatccggtgttttactactgcaatttgttggaaaaatatcacgtttatttccttaagatcaaagtttcatgctgcgaatagaagtaatatacgtgcatatactaaccatgaaaacgatataataatttttcagacgatatattttctttcaccgtgtgtgtgtgataatttgttcttggacaaaactatgctttagcctttcacagtttcctgattggttaaaatttaaaatgccggacttgcgtttctcgtgttgtaccgttttggaagagagtcactaatagagaattcttaatggtactcaaaattgctactaatattgttccgaaaaatcttaccgagcataataattgatttttttttcccgcattttaataactagtccaacaatccatctattttttcatctcgagtgatgtaatgaaatttgttgtatgaacaaaattgacagagacgtcg

SEQ ID NO: 104744 - DNA, 571 bp, Mimulus guttatus
  Intron number 1 from transcript mgv1a003901m (locus mgv1a0 03901m.g) derived from phytozome v7.0 (chr-ID scaffold_7; pos 2674508 to 2675078 reverse strand)
ttagccagtccgttcaatcaattccatattggctcgtaagtaatttactgttcaatttttttattttttcttcttaattaaatctaagttctaatttagcccttttttgtatttggatcttaattttgggtttttgtactttattggaattaacatcaattccgtttctagcatggatctgttaacatcgtacagtaaaaaaaaaaaacatagtaattgagaaacctcgtacttgtcttttgacttcattttcatgaagctgttgtttgatttgtgtgtgtggtgaagtttgaattttgcccaaatttggaaaccctaagattaatctgtctctaattcttcattgttattaaagaattatgttactaaaacccgattttatctccgtttaacttttagaatttcgacgatgcattaattactattttttccaattccgccccgtatcactcttaattaagttgatgtagaattaatgaagataaaattagcgataggggtattttggtcttttcgtcacaccatatatttctccctaaaccatagttttcttaatatgtgcaccgcagtt

SEQ ID NO: 104745 - DNA, 358 bp, Mimulus guttatus
  Intron number 1 from transcript mgv1a002463m (locus mgv1a0 02463m.g) derived from phytozome v7.0 (chr-ID scaffold_109 ; pos 447863 to 448220)
attcaaaccacaattctggtcagtttttttttttcttttcttttctaatttaattatatttttcctttttgtttcaagatttaattatcttctttgtttaattaattaaatttaatggatgcagcttttgttactaattaattaataataatttgtcatgatcatggcttgttagatacgtgtatctttattgaattaaacatttattatacatgtatggtggtagctattcaagtttggttttcttgactttttggtagttgaaacttttgatttttatttattttaaagtttaataatttttgtttattctgatttttcaggggtgtcaagaacaggggcaactttggcaatcgtt

SEQ ID NO: 104746 - DNA, 1046 bp, Mimulus guttatus
  Intron number 5 from transcript mgv1a025841m (locus mgv1a0 25841m.g) derived from phytozome v7.0 (chr-ID scaffold_110 8; pos 197 to 1242 reverse strand)
acagcgatatcttgttactgttagtggcagtgagttccaaccttttccataacaaaattcaatccttcccaagtaaaagatacatcggaataactaaaaaattattagtgcatcataggaatctcatttgtgtaatagtcaagggtgttatttggttgttattgcaatcttcaattgagttcttgattggctgtaggggctcttatgtggaattttgttacataagtataattttttcccttaaatactggaggcattgggaattacggaggtgaatttcaaattgttcaaattcacttaatttctggacctgggtggattctgtggtcaagattgagaggacggatataatcccatttatctttctactttgggctatgtccatttataaatgtggacatttctggaagtttatgctatcggttggttaatatgcaaaattcacctctccgaaggtttttgcagtcaataccttttcatgatcaatttagtttcggattcttcttggtggtgggatctaacagtggaagagcaatctaagagtcaacaaagtttagaggtgccttggtaaaatttagttgatgattgaatccttcgaagggtaaatatatttgttttttttttttttttgataagaaaccatatattaaacaaacaaaaataggcaagagtcaaagatgggagaaccacggtcgcaagaaatagacaaaggaagagagttgggagggataacaccctcccatttgaactgaactaaatttcgatagttaaatttgaactgaattaaagaatccaaagataagtgtttccactagggaaccatttccgacaatgtttccagaacctgactgtcacatgtaatttatgatactggtttgacttggctactgatttggctactttcttagtgatggtgttcgatacttttccactgtttttgttgggctacgttttacaaactttttatattcagtgcatctggttttgttagctgaatctacctaaaagagatcttttgatctttacaggtaaaagagtgttatcag

SEQ ID NO: 104747 - DNA, 176 bp, Mimulus guttatus
  Intron number 2 from transcript mgv1a025841m (locus mgv1a0 25841m.g) derived from phytozome v7.0 (chr-ID scaffold_110 8; pos 1645 to 1820 reverse strand)
gaccaggttttcttttcttgcatcgatttgttttctttatttgtttgttttagccgaattttgcttgaatttctggtttttagtttgaatttggtaatatgttgaataactgcttattacttttactaatgatttgattagacttcgaccagcgggtgagccaccatcgcctaggg

SEQ ID NO: 104748 - DNA, 824 bp, Mimulus guttatus
  Intron number 1 from transcript mgv1a008163m (locus mgv1a0 08163m.g) derived from phytozome v7.0 (chr-ID scaffold_123 ; pos 550060 to 550883)
gctatctccaaacttgtttttccccatccggagaggtataaattgttttttttggtttttttttcttaggttatttacgaataattttatgtataataaatatttgttttggcaatgtgtgtttagcgtggagattcattgttgagtgggtagtaattagtgttgtcaatttagggctaattgcgtgttttggccgtaggatttggaaaataacttgattgaagtaaatgcctgaatttcctgtgcaatttggttgatctgtgtatttagtcttgggagattctgctttgtgtaatctgctatgtgcttttctttcgtcaatcacgttggtactgacttcaggaccgaaatctcggaaagagtttcaaaatctgctttgtgtttagtgacctcgattctttctttaatttgtttttcatggtttgatgtttctgaatgcataaatgtattagctaagctaaatacatgttgtgctaactcatggcactatcgtatttgaaagtgcctaccttgaatgggtaaacgagaagattgaatggataaattatcaattgttagaatacaaggagccatctttatgtatgaaaaatccgtacttgactgcttacatgagcattagagagttcaatttgaagaaaaaacccgaagatttaataattatgctgcgagttttgcattattttcttttgattctctctgtatgttttggatattattacctttttgcaacagttatgattttttgatacgactggtgtatttgatagcttttgacatccatatatgcaggtccattctgttaagataatccgcaataaacatac

SEQ ID NO: 104749 - DNA, 828 bp, Mimulus guttatus
  Intron number 1 from transcript mgv1a005739m (locus mgv1a0 05739m.g) derived from phytozome v7.0 (chr-ID scaffold_46; pos 243548 to 244375 reverse strand)
gttagtagtgttgaatgcactaagattatgtaagttctattcttaatgaatgcatttttttcgattatttatcaaataaaattgggtcacaatggatttaaattaattatttaattaaaatatagtagggtctaaattagacaattcgatgttaatctattttatattgatttaattaaaaaaaattaatcgaagactaatttggtaaattactaattatttttaataccatatgtgctattttttctacggtcgagatctaatattacaaaattaatgataattgaataatatctcatatgagtttggaagacgggtatctcaccctagacaaacacaaatcatgtttaaatgcgttagtgaaatgtattgtagaaaaaaaattgaaaaataaagtgatttatatttgttttgttcagtgaaaacaatttttacaggcaatttttttttactgttgcagtcacgtcgtattcggaggaaaaagttgttttgattttctttttttttgttaaaacgttaacaaacacgaatttgtttcgagaaataattaagataagatgaaaactcaaccaaacattgcctaaagtacacctctcctcacctctatttattaatcagtgctatagaagcactccatacataaataatatgaagtaatagttgtagtagttaaaagagcatagagagttgtaaaatccatatatcgcacgtacggcgtagctgtgagttcagttcctctcgtcgttccagttcagaaaagcttggcctcgcgcaattccgtataatggatgcagaaaagcttgagcactgcaaaattcagccttcacc

SEQ ID NO: 104750 - DNA, 1034 bp, Mimulus guttatus
  Intron number 2 from transcript mgv1a019809m (locus mgv1a0 19809m.g) derived from phytozome v7.0 (chr-ID scaffold_211 ; pos 55330 to 56363)
aatccaggttgcctcttctttagcattttttataaatttatttattgatgatggatattgttaactatgtttcttgaaaatgtatgtataatgtatctcctatttgattttcgtgcgaaaaacaaaaaatagaccttattttcgttgcggtcgatggttttacgagttccgattagcttgaagcaactgtgggaataagtatatagataaagaacttcaaacggagaaagattatcgattttcgaatcttgtgatatttggtaaaaaatccgcctacgaaagaagtgaaatcggagtagaatcttagggtgcgtttggatggaaggatttggggagggatttgatttggggaagggatttgaaatgactccaattttggagtcatttgaaatccacctcaattgctcaaaacataactaaaaaggaggggtgtggattcgaaattcatccccaaatccctcaatccaaacaagtccaatggatttgttattatggatttgaaatcccttccccaaatccttccatccaaatgcacccttaagttatttcgtttcttggttagtttagcttcatttgaacaaagtcaatagttatgtgaaggaattgagaccttttagtttcttatgaatttcttgtttctatatatatatacagggaaaattactgccaccttgaaatatggcgaaattacgaaaacccccctcttgttttggtaattacaaccacccctcttaaatatttttacataaaatttatgtaattcggttatttaccgaaccaaatcgtatattcggtgcggtaaacggtatgaattgttagtgtaccgaaactttagtttggttttaccgaattaacatccctaaatttacctctggaggggtattttctggagaggtattttcgtaagataatacataattgaggggtgtggttgcaattacccaaacaggaggagagttttcgtaatttggtactaaatgatttcttgttttttacctatgtagatttcaaacgattgcgtatctacaacaaat

SEQ ID NO: 104751 - DNA, 488 bp, Mimulus guttatus
  Intron number 1 from transcript mgv1a008333m (locus mgv1a0 08317m.g) derived from phytozome v7.0 (chr-ID scaffold_8; pos 3432820 to 3433307 reverse strand)
ttcatttgattgtttcgaattttgcatcgtttttggtttgtgcttttcgtatcatgcttaattttcgatatttttatggctttatggatttgatgttttgattcgtgctgtttgttatcgttcgagcaattccctgatgattaattaaagcctgagtggtgttataaatgctaatttatattttatcttcagttatgagtctttcggtacgttattaatatttttggtgatcatttaatgttgaatcaaaatcgatcagcgatgaatttgcaggagaaaaggagaagataacaatgaaaatttggttttcaatatttactttttgaatgatgatttccagttgtattaataaaagcaaaagtgggtagcataattcgtataaaattcgactaaatcaattatgcttgattgcttatccatatttcatactattttgcgtgcctgattgaacagactgaattttccggtgaaagttggtggttgaggac

SEQ ID NO: 104752 - DNA, 1025 bp, Mimulus guttatus
  Intron number 1 from transcript mgv1a005028m (locus mgv1a0 05028m.g) derived from phytozome v7.0 (chr-ID scaffold_92; pos 999184 to 1000208 reverse strand)
tgatcggacggagagcgagtgcttcaacttgcaaggtgagaaacgagcgaaaaaaaatatctgactttgctacgttgacttttttttccgttttcttcccgttttcctaccgtttgccgacttctatgaatctgaacaagaaaactaaaacacgtttttttgggagttttggtttttttccgtttgttttgcgcagtaatcgttgtttaattacaatgcgtccacatttttcaattttttttttttattttttaaataaatttatggtttcaactactctagctgcaataaatttcttgtcactttaagtgacctactccaattttatgtcaatctacctttacgttttggtttcgggtttcgagtttaaggtttaagttttagattcaatttcgtctattctaaattgacgcgcacacacacatatacatgtatatacttttcttttgaactagttttttattccggttttacaattattccaaagagaaagtatgaacgaaattgaaattagttgttcattttcaaaaatattaaagggattcccaaaaatacccttctaatatgtcaaattagaaagtgttcaattttctaatggtttatttatgactctattatgataatatatttgtcccacaatctagaaaagggaatatagacctttgaaatcaaatgtttgacgattgtgtcaacaactacttaggagaaacaaaaaataagtaaattaataattctaaaaagcatgtgtaaaccaacccaagagggcctggcctacacacaagttagcggtgtcacacattttgaccagaaatattatgcaaaccaagtgtttgttgaaaagactttcagatatatatttacttaatttaaatctaacctctttatttattctgccacgcgtggttttatgttcatatgtactatggtggatgtcaattttttgtgtgtgtattatatctaatatcgaattgtgtaagaattaataatgaaatgattgtgtgaatgcagcttctaggacaataaga

SEQ ID NO: 104753 - DNA, 872 bp, Mimulus guttatus
  Intron number 1 from transcript mgv1a018068m (locus mgv1a0 18068m.g) derived from phytozome v7.0 (chr-ID scaffold_37; pos 424468 to 425339)
ggttgtgccttgttcgttttgacggtgaggagttttataaccgtggggaggtgagtgtttcttctgatggaggcggcggcgcgtggggtaattttactgcttgggagggtgatcacaaaggtggtgggtgcgtgaaaaaggtggtggtggtggtgggatattggggtggtggagctggttgttttctagtgtttgtttttttggcttggttactgagaagggcagctttgaacagagctaaagtggcagcatttgatacctgtaaaattggtgagtgaaaaatgtattgaataatgaggatgaaattatattgactattaattaattttggtttattatgatatgataataaataattatcaatttcttttttatgctgcaatgataatctcttgttcagtgaaaattatagttttcacccctcaagtttgtaccaattctacatttggtcattcatgttcataaaaattacatttggtccttcatgtttcaacaatttaatattttggtcagttccgtcaattttccgttaatcaagcatgtccccgtgactgccttaactgatgagggaccaaatatattttttatgaacatgaaggatcaaatctgaaatcgtgcaaacttgatggataaaactatattcttccctttttttttttccacaattcacgagtttaaaattagcacggtgagtctattcttcgttcgctttctcaatcaaatttcattacttaaagattgccaatgaaatgatggtaaattcacaaattggttatatgttgtaaaatacattgatatatactactatagggtgggaaattggattgaaatttgtagatttttgccaaaaaacaaatttactttttacgaaa

SEQ ID NO: 104754 - DNA, 937 bp, Mimulus guttatus
  Intron number 1 from transcript mgv1a015913m (locus mgv1a0 15913m.g) derived from phytozome v7.0 (chr-ID scaffold_211 ; pos 46195 to 47131 reverse strand)
tgttagagattgactcaagaattgatcttgagctggtatggatatatttttatttttttttaatttttaatttagcaagattcttgtggatttagatatgatttatcgatgctaatctcttcgtattaggggctaattaattatctaccgcagtattagtagtgtcgttcgtatacgacgagctagcttaatcgttagtcttgcgtcgtcttgattgttgatcgatcccaccttgttgaaagttgttctattagtgaaatatagtcacttcgtaaaattatttagtactacatatttcgtaaagattcttacgggtatcgataataataacaaaaagttatataaagtattatatctttaagaagaatttggggctatggcccccgttgacatatgctggctccgtcactgtatattttgagtaaaatgagagcaagagttttgttgatttagatatggttttgttcgatgctaatctcttcggattagggttaattatgagtttgacctatacgattctatatcaaatcatttagtactaaatacagtagaacctcgataatttaataacctcacttaaataatagtttcttctggtcccgactcggtaaaaacctattaaattattagttcaataatttaatatttctctaaattaatagaattttgctagtcccgattgtattaatttatagagatttagcagtaaatggtaaaaaaattcttatgtggtggggggagggcggtgtaataataacaatatttatataaagtactatatcttcaagaaaaaaatggggggccatggcccccattaccatatgctggtttcgtcactgtatattttgaataagataagagcaagagttttgtcgatttagatatggcttttttattcgcagcaagaacaccggattattaacggtcttgaaccggt

SEQ ID NO: 104755 - DNA, 875 bp, Mimulus guttatus
  Intron number 1 from transcript mgv1a013096m (locus mgv1a0 13096m.g) derived from phytozome v7.0 (chr-ID scaffold_68; pos 699568 to 700442 reverse strand)
gaggtatcatctctctctctctctaataatgtgcttttacttattttgcgaataattagtgttgagatttaaaaatccgatttcgaatttgcttttttttggtcgattatcaatgtgtatgaacaaatgctaatcagtgtgtttaattgaacatagaatcttcaaagttttatctttcaatttgttaatttgattgatgtggctagaatctggtatagaccattgttaggtgtagcactagtttgatttgggcatatattttttttattttattttttatgccagaatgtttttggaaattagtgatctattggaataaacatgatgtgattttcgccattagctaccgacgattacccgcagaaatgagtatgttgtcttaaaatagagtaaaacagagagatatttgccaggttttagtcatcatttcttcaaccggattagagattggatacgtctgcagttatccgttacttgtgttggtcagttagtcgataaatttgcttgcagcatcagccagcagcgtgtttttttagcttgtgtgagcagaggcggaagatttttttttcgcatcaatctgcctgaattaaccttttgattttcataaaatgaatagaatcattttggttggattttcgtaggatgaaacgattgatatttgttttgagctttttccgagggataagcctttatttttggagtagcttttcttattcggctttgacaacatccaagggttttccatattttattcctctagtatttatactagttttcgtattttctcatggtttttgtacgtcacgaaatggaccatggttttcaacatcttatttcaacattactattttatctctcccaacagcgtttcttga

SEQ ID NO: 104756 - DNA, 534 bp, Mimulus guttatus
  Intron number 2 from transcript mgv1a008525m (locus mgv1a0 08525m.g) derived from phytozome v7.0 (chr-ID scaffold_15; pos 494083 to 494616)
cgactctaactgaggcagctggtgcaattgttgatgtaagtccccatccaccccccacctcaatcgatttttgatgttttgtgtctgatttcaatttgaggatgtcatttctgcctctaggatcgttacagtgcgaatgcagatatagtgaattagggcaagcaattttgttattcatattaaaccaattttatgtcttttttttttttttgtcgcatgaatagaaattataaacttgaagaattataatagtttgattttcggtgaattgctttcctaaacttgaaatttatgcacacacatatgttagactaactctgaaattttgtttgtggtgtgtatgcatatctcttaatttgttttctactagtgtagtaatatactctcttgttgcatctttacaattccatattctcattccctgtggtttagtggtatttttcagtgttggcgctggggcccttgaagaaaatgtccttgtaattttattcttctctttctcattcttgctgcatggcaggactctttcacaag

SEQ ID NO: 104757 - DNA, 734 bp, Mimulus guttatus
  Intron number 2 from transcript mgv1a011870m (locus mgv1a0 11870m.g) derived from phytozome v7.0 (chr-ID scaffold_201 ; pos 291559 to 292292)
ggtatctctgggtaagttaattttaccttctttattcagtagtttcattttctctctctactttctgcttgatgaatttatttgttgattatagctaggaatcttcaatttgttatcgtaaattttttatgttggtttgtttgaattctcgaaggactgtggattaaacttcattaatttaatctaaaattggactatattcggcattagttgaatccatattcacgattgtttttcttttccaaaattggaatcacagccaccaacaaccattcaatcttcttagcttttccttatgtaatatttggtgaacatgtacgtaagtttcttgaatatatagggaaggttttcaaaccatagtcatcggttttgctacaatgcctagattggtgggttaaactagtgtcgattaccatgtaggtttgcatttttaaatcattgatatcgatccaataggaatttctcttaatcagtatagttcaactttagcgagctaaattttgctttattacgttgcttgtatattagttttagcaagaagaggacctttacatatattaaccatatagagtagattaatattagtttgattgagacgtcgaatcttggagatataagatttgccaaataaatcgatgatccatgtgtgtagaatatatgcaagaagttgatgtgcgttgcatgaataatttgtgataggaaagcagaggaacttgttgaaatagagtctgttt

SEQ ID NO: 104758 - DNA, 563 bp, Mimulus guttatus
  Intron number 2 from transcript mgv1a007907m (locus mgv1a0 07907m.g) derived from phytozome v7.0 (chr-ID scaffold_60; pos 431661 to 432223)
ccggcaaacacggctccaacctctcatttcacaaggtttttttttttttgttttttttttctgggttttgtcaaatttgtgattccggagtgaaaagattcgatcttgagtggggggattttttgtgaatctgatttgtggtttttttttttttctgtgttttaatttttatttcttccttgtgatttttgatctttatttaggtgtaattattaaatctgatgatgagtttgatcattgatctacatttatttttcttcgaatagatctcgaaattttgtcatcatgttagttggtttttgcttagtgatctgaagtaatgacaccgttaattgggtattgggtgtcgattatccaatttcttgttagataattgaggtgatgttaaagtgatatactaagttcgattttccgttgctaatatacatttatcagcttctaatctataaaacgccgcacatatttagtgtatattttccgatgagaaattatctaactttcatttctatgattttcggtcaattgcagatcgatcttcgtgataagcccgcactcgagaagct

SEQ ID NO: 104759 - DNA, 703 bp, Mimulus guttatus
  Intron number 1 from transcript mgv1a015811m (locus mgv1a0 15811m.g) derived from phytozome v7.0 (chr-ID scaffold_3; pos 4085529 to 4086231)
ataacaagaaattggtatttctcttctctttttttttttttttttttttttctatttattcagtgaattattaagcgtaatttttatttttatttgggatttttgaggcggatttgattatctgttgttcatgaatggggagatctgttgtatttgggattttttaggctaatttattatttttttcccagatctgatttttttaatagcttaaatcattaattttcttttatcggatgtaaattacaatctctctctctgtttgtgattttgttgtcgattgaaaaagcttttttttttttatttatttaaataaaaaattaaatcgtgagatttattcaggagcattatttttttgaaataataatttctgcatgttttaaatttaaatggaaataatcgataaatcagtgatggagattaggttatgcaacagcgatattcgaatcatctaacttttgtgatgagtaatgatttttatatttcacacagtttgcatgtattcacgtacactgtcattgtttaaaaaaaataaaaaaaaaaattaagaggccatgtatttgaatctgtgtttaatgaaagtaatttcgtttgcgcaaagttaatccagcgatatattcgacatcataaactatgccataaatgctgaaatctaccgatgaatgcagatagttgtagatttcaccgcttcgtggtgtggacc

SEQ ID NO: 104760 - DNA, 874 bp, Mimulus guttatus
  Intron number 2 from transcript mgv1a021715m (locus mgv1a0 21715m.g) derived from phytozome v7.0 (chr-ID scaffold_314 ; pos 123436 to 124309 reverse strand)
gattgctcttctattcaagtaattaaatctgtttattaattatgtttgtttcctatttaattaattactttaaaatttaacaaatattgttatttttaatttcttcaaaatttgactgatgttatttaatctttttacttcataattatgactgtatgcgacctaattggggatgggaattgaaggtgagttttcgagtttcgtcgattccgactcgaatattgaacaatatttttcattctgaatttcggaattccgatatccgatttcttggatttttcttcagaaaggaattggaatacatattaaatttcaatttttcgaacatatttccaaaaatttcctattttttccccaaaaattgcacttacaagattaattattgttacgcattttatattataggtgattaaaattttgaaaattttgaaacctgccgatttcgatctttttttttgttaccgatttctgatatttccaaaaaaaatttgaactgaattggagttagttttcacttctaaaaaattggaaatttgtagaaaataataattttcgaactaattcgtccgatgaaacccttagacctaaatcctaatgaacgttttacaaatatacacgatatgcaatatgcattacccggttgttcgttaaatacttaaaaatgtatacatactaatgtggatgtatgtaaaatataaatgataaatattcaatatattgcgtaaaatatcataatttcattgagtgtaacatttatttacaatacgttatagcgaacgtggacaaattgtgaaaattatatttggtttgtttaattaacaatttgtgcgtaattacagccgtacataacaaacggagcaaaggtattgttctt

SEQ ID NO: 104761 - DNA, 725 bp, Mimulus guttatus
  Intron number 1 from transcript mgv1a007978m (locus mgv1a0 07978m.g) derived from phytozome v7.0 (chr-ID scaffold_16; pos 2195981 to 2196705 reverse strand)
ttccggccgacaccaacaattccacgccggaaaaggtgcgcatctctttctctctctatctctctctctctatatatgtaagtaattatgtgtgtatgtatgtgtgtgtgtgtgtgtgtgttcatctgttatactatgctttttcttttccttctgaaaactgtaattttaccagaatctggaagcatctgaaataaatccagggtgtaaaaaaatgctgaattttaattttgaagttcaaatcaaggccaatgtcattcagcatagaggaaaagtgaacaaacagttaatgtatcaatcgaattgaaatatcgtgtagattgatcggtgttgattccaatttctgttaaaaaaatgttaaatgccaattttgatttttttttcgatccgaaaggagtcgtcttttattgtttatgatgctctcaattatgtgggagaattactaccttgttggatcagagtgactagattttgttttacggatataatttacacggtttagggtattcaataagttaattttaaatgaaatgagatgcagatgaagaaaagctgaatgaaaatcaaagagagaaaaataagttttcgttactcttttagttgctgtagttttttcaattttttgactggtgctagggctcgcatagttgtaatcaatttaacggaataaggcccgtaaacacagtaattgatatggaattcattttgtcttggttcaatgttag

SEQ ID NO: 104762 - DNA, 921 bp, Mimulus guttatus
  Intron number 2 from transcript mgv1a013134m (locus mgv1a0 13134m.g) derived from phytozome v7.0 (chr-ID scaffold_64; pos 382256 to 383176)
caagcagctttcttctggattgcttcttgtcactggttagatttgttttttcttcgatctcattattttgttgtatttatttcttttcctggatatttttattgtttcgccctgattcataaattgttagatattgtagaaattcgtgatttaaattgattaccgatttagggatttttttgagctaatcgtttctgaaaatttacttgtcttaatcgtatgtcttaaaatcagttgaatttctattgattaggtgttgtgacttttgtagctaattctttagtgaaacttagttaggtcttttctcatcacctaatcgaaattgcaataaagagttgccattaatttttacattatcaaaaattttgaagctatgaagtattatttcaaggaaatgaatagttatgtgcagtgttaatgccttgtcctattgtttttggtgattctacttgtctatttgaaacaacgacgattaaatattttggggcaagttatattaaattcttgtatgacccagtttaatcaaatcgtcgaataaaaatgcacttctgttgatagtgtgtttgagtcattctatttggctcactcgcacattccggaagggctgttctcatatcctattgccttgagtagcaggttaccgcaattaccttttgggacttgccatgagacatacatttgtttattaattgtctactttaaactgttaacaacaaatttggccttaagctaaggctgttttggaagtgattgtgtacattgtatttaacatgtcttaatatattcattttcttacgtgtactttttgcttcttagtactgtgtttagataccgaactgggtggttcttgaaatagcctaattttctttaattgcttctgatacaggtccttacaagatcaacggtgttcccctaaggcgt

SEQ ID NO: 104763 - DNA, 1022 bp, Mimulus guttatus
  Intron number 1 from transcript mgv1a000995m (locus mgv1a0 00995m.g) derived from phytozome v7.0 (chr-ID scaffold_64; pos 242000 to 243021)
ccactttcctcaacgtcgttgctctcggaaatactgtaagtatggctaatcagagcgttgattgaagttgcttatttaaatggttattgtacggagtgggtgtgtttgatctctttggctagccgatttttggatctggaatttcaattgcgcgatctattgtttcatttgatatgacttatgaggtcgtccaacgggtgttaagttttgcatatggtgaatgagttctgacgcggatcatgaaattaagtttatcttctgggtagaagcatggtatttgttttcggatttgaatgttttgttgtattagaaagtggttgcatgtagatcatagattatatttttgcattttgtattctgcattgtagtttgctttcttagaatgaaaattgtgtttgaagtgaagtatgcgctcaatggacctaataacagtagattaatggtgaaaagcctcttgaactcttcattgatatatgttccacctttcttgttttccccatttctttacaaaactgtgttaatgaagaaattacatgttagtgatggattgtttttgcctttcagattttccaaataagttgtcttttgttgtgtctttacgatgtttactagtagatcggaacttgggcctgagcagttttcatgattagtctcgtgctcagggcagatgacacatttagtgtgaccagtatcccctgatatatacaagctttaaacaaacaagatttcttttcaatcaagcattcgatcccattcatttttctcctatgttatttggaacaatctattacaagataattgggtttattgtgaatagtacaccaggatgtgcattttaagtattagattgaaattgttcaatttgatctaccattcgtaaattgtctgtgaaaatttgtctacactatactgtcaattatatctatatcatcgtaattttatttatttgtttatttattcatttctgattgtgaactgtttattcagggtgcaggtaagtctgcggtactcaatagtctcat

SEQ ID NO: 104764 - DNA, 540 bp, Mimulus guttatus
  Intron number 2 from transcript mgv1a002905m (locus mgv1a0 02905m.g) derived from phytozome v7.0 (chr-ID scaffold_69; pos 351533 to 352072)
ttttcaggttagtcgtgatgcttttgctagatatgatttaattatacttgaagaaatctcaaagatttcttacaacattattatcacactttgagtgaactttgcttgcagtttcaaaatatttttcttatcagcctcttgaattcaaatttttgctgcacttttagctttctgttatgaaatttgtaattccttacattttgctttagtgaagaataatatttaacactccctctccccaaaatttgtgtcccttcgatgcggcactaagttttagaatcttaggtgagagttgagaagttaagttatgtgatctcgttgatctttgtctctattttctcatttgatcagcgtgtttctttccagtaacatttttttcctcgttgatctttgtctttattttctcatttgatcagcgtgtttctttccagtaacatttttttgcgttttagtctctgataacattaatgtaacaaattagcccatccgtttgatatgtattttcatttgaaaaaacaggaggttgatagattccaagag

SEQ ID NO: 104765 - DNA, 948 bp, Mimulus guttatus
  Intron number 1 from transcript mgv1a000946m (locus mgv1a0 00946m.g) derived from phytozome v7.0 (chr-ID scaffold_18; pos 1418467 to 1419414)
gtttctgaaaagatatccggccattaattcaagcggtaaatgttcctactatcattttctttttcgattctctttcgtgtgcgtaagtactaaatatgtacttcacatgaattcatgtttgcattgtgaattttgtttaggcgatgtttgttcttgttgattcattttcttttgttatttgaagtactatgtttgtggagacaactgcgttaactatttttgtcgtatttgtttgatctctgttgaatttcgttctcttaataaccatttacgtcttcacgattttttgtgtctgtttgaaaattaacaagtgtttgttgttgaccagaataagaatttaaaataaaatggaagtattcgttacattagaaatttgtagggcctaagcaagtcttgctcacacgattcgataggatgtacaaaataaattatccattgtctagtagctgtttgctaaaatgttattggattcagtccttgtgcatttgtccctgaagtttgtgcatgcagaagtaactattgaaagaggaagcgtcttgagaacctacagtaattaggcggtttcgagataccctccaccttatacagtttatggcatctctattgtaaacttgggtgattaacttgctgtcattatggtatacatgcattcttgaaactaaatgtctgagaaattcgccatcgagtaacatgactagcctgcttacagttttgttaagaaactgcacgtcttcaaaaaatgtgttttgcctgtatccagaagctatagacatggtataatttggaaactgacttaactgaactgcccgcagtcttatattatagattacatctaaacagttcttccattttccattaaataaagaagtatttacgttaatttgtgcattgtatttgactttttcattaacagatttgagctccaagcggcacaaagggataaaagcc

SEQ ID NO: 104766 - DNA, 697 bp, Mimulus guttatus
  Intron number 1 from transcript mgv1a006532m (locus mgv1a0 06457m.g) derived from phytozome v7.0 (chr-ID scaffold_223 ; pos 269379 to 270075)
acgatttccggttcaggaaccctggttaggaaaaggtaaaaacccttgtccgaagatttgttattgtgttgtttacttgttaaacagtttgacaatttgatacgattctttgagtgtttatgtgaccaatctattgaaaattcaaaaaaaagattggattttttttccttcttgcctatcgtggaaacctgaaaaagaaccaaactttaaggatcttttactttaattagctattaattgatgtgggttttttttttctgaaagtgtaggaattacttgggtatacaattgcctttgttaatttgatatttgtttgattatattatagaaaaatgaaaaagctagaaataagggtgtggattttgagttctaaaggcttggatcagacagttgttttgtttgtaggaattattgaactgaactctagcaagaatcttgatggacagatcatattttgttttttacggaaatgctgcagaatttcttgttaattagatagatatccgagtgatgatttcatcgagcatgagcttttcgattgggatttacaagagttgcttctcttttcgtaatttatgtaattcctttatcttagttattgaattctttaaagtatccatctcgttgctgcgtttttttttagtttacttatactgctgcatttgcagtgggtgttactttgaaccatataaaggca

SEQ ID NO: 104767 - DNA, 587 bp, Mimulus guttatus
  Intron number 1 from transcript mgv1a009994m (locus mgv1a0 09994m.g) derived from phytozome v7.0 (chr-ID scaffold_69; pos 27032 to 27618 reverse strand)
gcgcaagaaactcgctcttacttccaaaaagcccggtattcaacacaactatgtgtgtgtgtgtgtgtgtgtgtgtgtgtgtgtgttgttgttgttgaagagttgtaaataggtcgaatctttgtcatttttcaattttcagtgaattttattatcttgtcaaagtcgagttttaagggttcggaggtattagtaatctcgtcgtttctcggaactgataaatggtttatataattttggagtaattcgaaggagcttggctctgaaacgagacgatataaggaacaaaaatgtattggagttgaagttagattacgaatatgctaattgcagagtagttcttacttcttagccgagtacgaaggattaaaaattgtggggagggcatattctagattaatttgaataccatcaaaactagttttgagttcggggattgatcgacacatattcgggatttcgactaggcttggcttgtgataagtttatgtacctcgttcaggattaaatcgaactattcattgtagtttatttttttctgtaataaaactagttcaatggagattttttttttcaggaaaaacaca

SEQ ID NO: 104768 - DNA, 738 bp, Mimulus guttatus
  Intron number 2 from transcript mgv1a024168m (locus mgv1a0 24168m.g) derived from phytozome v7.0 (chr-ID scaffold_71; pos 188472 to 189209 reverse strand)
tatttggtttaactcaaatcaaggcgattttggtaattttctccactttccttcattttcatttttttgttatttaacctcgttctgtttagggttgaaaccaaagtacgttacttgattcgaaaccgttcattgaaagctcgcttgagcgcttttgttaacataaggatcggaaacacattttttgaacacatactttggtgaattattgacaagctatgataatttaggtactcgaacttgatccgtgttagcctctattgcttaccaatccatgctcaaacacaactatagatgctaggaaaagaaaaagaaaagcgtaaatagcacttaaccccccatgtggttacaagtttgtgcttgtaatatcagctcatgaccggaggcgtaacaaccaagaggggtttatctgcaaaagcttgcacatccacaaagggtttaagtgctatttactcttaaaaaaaaagcaaacaaccatatattcaactcgactcgattcacttacacccctagttatgttgtttcttgaatatattggagaaatattatttgagttccaattattaaaattcgctaatcgtttttgtagatataagctaaagtcaaatacaccctttgatgctaacaatgtaacacgctcgcaaaattagtttgtgtttctttacatgacacacattcatatgctctttgataataataataggatattgttgtcggggggactgatactacggcaac

SEQ ID NO: 104769 - DNA, 790 bp, Mimulus guttatus
  Intron number 1 from transcript mgv1a002066m (locus mgv1a0 02066m.g) derived from phytozome v7.0 (chr-ID scaffold_24; pos 1772338 to 1773127 reverse strand)
ctgctaccgatccttctgacggtgcgcatttcacatttttttctacttgcgttttttttttttttttttttactttattgttttcggctggtattagcttgatttgatgtatgagcagcttgaatttgaagaaataaattggaaaatgagttgttattttctcttcaattatcgatttggggattccaggtttttattttaaattattagattgtgaaggagaatgctatgaggttttacttggtggaacatatttggatgaaaatccataatcgcaatttttggagctaattttcggaaaaaagttttaatccatggactaatttttggagcttctactttggtgaggaagggatgaagaaattatctatcactaatttatacatctagttcgtttcatcatttgtaatggattgtgtgagactgtataatcattaaaaatattatttattttgtcgaaaggaaaataatgcttatgaatttgatttgctatatttttccttttactcaccaaaatcatagatccgaacatcatgcaaatgtttggccaggatttgaagaaaatcgaagatcgagaagtgcatgtatagaaaaacaatctacctaattctgtcgtgaatgtgaattatttatatacttgttttaggcaggattgagaaacgtgtgaagatattttgttatatagctgtaaatgtttactgaagttagtatctgttttctgaatgtttgagttgcatttgcctactgtgttgcagttcaagggctacaagttttgtacacgtctttgaat

SEQ ID NO: 104770 - DNA, 850 bp, Mimulus guttatus
  Intron number 1 from transcript mgv1a022712m (locus mgv1a0 22712m.g) derived from phytozome v7.0 (chr-ID scaffold_170 ; pos 495899 to 496748)
ccgtcgacgaagcggtgttcagtcttagggcaaaggttttgttacgatataatattgagtttattattagtttagttaatatttaattttttttcaaacgttggtggaattttcaagttcgactacctatattggattcgattggattagatgagattggattaactccctgctggctaattaattatttagttagtagcatattcgtattacaagaaaaaaaatcttttgagtgacaacacttattttcacaaagttaggcaaaaagtgttgtcactatacttgtcactaatggggtgtcattaatgctctatagtgacaataaataaggattaagtgacaataaaaagagttattagtgacaacaacaaaaatgttgtcacttaatgtatgcattaagtgacaacttttgcatttgtcacaattggggtgccgctaatgcaactttttcttgtagtgtcggtttcttagattagatcttctattaaatttgttaaattcagttattaatatgaattgtctataaaaccacttagtttaaaataatacgatatgattttaaggataaaattgtttttttttcttttttaatcacccctattaaactaatctcttggggaggggtgctactaatttaatgcaatagtagcattaattaataacaggctttgattttagtagcgggtttgaaaaaatgtgaatcttgtcaacagaacgtgttattagcccctaattacctcgaacacacggctatatatatcctaaatattattctaattaattaaaaaaattaaatattaactaaactaataaactaaatattatatcgtaacaggtttcgtcgaagtgc

SEQ ID NO: 104771 - DNA, 489 bp, Mimulus guttatus
  Intron number 1 from transcript mgv1a009673m (locus mgv1a0 09673m.g) derived from phytozome v7.0 (chr-ID scaffold_64; pos 1135547 to 1136035 reverse strand)
tacaactattggcccaagaatccaccttcttacaggtcagttttttgtcttttatttttatttttattttttttattttttttttatttttcttttttgttcttttaatttaaccctttattatatttattctaattactatcatgctagttccaaaaaaaaaaaagaaaaaaactctcctgcaatttctagttgaaatgacaaaaataccctttgattttaacttgtaatttcaaaaacaaaatgctctatgttattactattatcataatatcctgaagtttcttttctaaaatgacacagataccctttgtttgagtttgcaattctagaaaaaatgctccgcgagtctacgactgtttctgcggtctctagatgaaatgacaaaaataccctttgattttaacttgcaataattcaccctgacatatgtgtacactcatgcatacgacagagaagcaaacgaagagtacgcggagaggctccgcc

SEQ ID NO: 104772 - DNA, 682 bp, Mimulus guttatus
  Intron number 1 from transcript mgv1a013463m (locus mgv1a0 13463m.g) derived from phytozome v7.0 (chr-ID scaffold_7; pos 1600513 to 1601194 reverse strand)
ttgtactccaattggtctttctctgattccttcgagtaagttctccgtgaaaggactttcttgccctcgttaattttcttcagaaattatctacatcagagaataataataagataatatgttactgctgttgaattttacatgtttttttttttttttttgagattgtttatttaatgcatgaaatactgcaacatagtatgaaatgattattattttgcaaaatggtttaattttagaaagaaactggattaattattacaattttgaatttacagcattagtaattagcagtattttagaatataaattagttaatttcatttgttggtcttcattctaaaaaaacccgtgatccacgtcatcagataggttaataaaaacaagcacccgtgaacttcatctgtgtgtgtgtgtgtgtgtgtgtgtgtgtgtgtttctaggtcacgcactctcatatcacctcttttaacctacatttaagaaaaaccaatgccaacaaaaatggcaagagtgaaataaaatgaacatattatacgagatcgataaataatataattaatttaaaaatgataaacgacgtatgcattttcgatgaaaagtgtgttaacgtgaaacttctaattgtgccaactatgtattatcaggtatctggtcggagtttcggccgctgtggcggttc

SEQ ID NO: 104773 - DNA, 744 bp, Mimulus guttatus
  Intron number 1 from transcript mgv1a011886m (locus mgv1a0 11886m.g) derived from phytozome v7.0 (chr-ID scaffold_335 ; pos 103399 to 104142)
ccaggttgattttgtcttccctaattgcgattttttctttctatttggtgaaatttagcttcaaatttgctctgtttaaactttaaagtactgaatagtttatgagtttgattatgaatttatcactattattcgtttaagttgatttgatttttctagcttctgacttttggcttctgacttctagcttttagctttatcgatcagtactcagtagagtgatgaattggaagatttcgttcacttttttttttttttttgcctctgtttggtaatattgataggattgataagatttgattgaattggatacaattacattttccatgatatgattttcttataattgggacttgtgattatttgattatgcaattgttgtattatgtcatatcattcatatgattgattaaattcccggcccgttttttaatcacgggcttcaaattcagattatatagtctatcaagtgctatccttgttggcaaacgaggcctttgggataacttaattaatcacactatttgataaaacttgcattttttattagcattttcatgtgaaatattgcatttgtgttcgacggattgtttttaggttctttagattattttttaaatgaaatggattcagctaattagaattcgccatgtgagtttctttgtagatggtattgtatatcataatcatctaaacacggcttattttggaactcgattttttcaggtttggaatattcccttc

SEQ ID NO: 104774 - DNA, 949 bp, Mimulus guttatus
  Intron number 1 from transcript mgv1a003343m (locus mgv1a0 03343m.g) derived from phytozome v7.0 (chr-ID scaffold_58; pos 1422580 to 1423528)
ccgccgtttgcccgtcgctcgatcgccgccgttaggttaattctctttcattttccactcacattccttcttgcttgcccgcctactgtttttaacgatgtgtttctatcatttatttaatttgaaaattcatctctacaccggtgtttggcatacgaaaattaatgtatccttgctttgcgtttgatttacgactgtcttcctgcgtgtggtttttctttctatcttgtgcagaaattctcgtttattttttcttccgtttttcctacttttgctgttgcatttttatttaaaaaataataattattattgttctttaacgcttcttcattacttctgttacgcttcatttctaattttttttttaccgaagataaatgtgaggttcaggccatccaactcaatgttgccactgtatcgtaaaaataattatcctaatttagtgaatatttctgtttatctctggtacattttggctcactaaaacgcaagcattttctggtatttactttaagcagaattaaacaaaaaaatgaatacatgttcgtattcctggaacttggacggttaccgcttgttctttagtttatttgtttggaaagcgggaaatatcaattgctatttgttaattggtttgtatggtattcttggtaaacattgtatctattttccatttactatttgttgataagaagcatccagaaaagtaggatttgctaagcctgctcttccagttttttgattaaccaagaactgcctgtgagtgtatatgatcatcatttcatgcttaaatctctgtgcagttgcatataagtaggagtcacttggcacttttgctgaacttgcgcattaagaacttgtgtacattttattatgcatatattctctttatacgcccttcccagtttcttaacatgtgtattgatgttattgtgtagaaacaagaata

SEQ ID NO: 104775 - DNA, 398 bp, Mimulus guttatus
  Intron number 1 from transcript mgv1a009136m (locus mgv1a0 09136m.g) derived from phytozome v7.0 (chr-ID scaffold_22; pos 1058595 to 1058992)
ccaaagtgtacgagggaaagtaagttgactttttattttttcttgtctgaatcttgatctttaactatgaagttttagcactaattgagctcattatttgatttttttttgaattttttgaattcctaatagtaatgtatgaattgaaattgtccatgatttgagaatgagattcttttgtgtttctgcaatttcagttagcaatttgttcttacgaaaaacggggacgtaattttcgccgatctagttgcgtttaaaatgaatatgtcattagtgagtagaagttgccaattttgccataaccgaaaagtagtcgaattattcgaatggcgataaagttttaatttcaatttttcgcctttcgtgaattgcccgtttattcagatacagaaaccaga

SEQ ID NO: 104776 - DNA, 652 bp, Mimulus guttatus
  Intron number 1 from transcript mgv1a005777m (locus mgv1a0 05777m.g) derived from phytozome v7.0 (chr-ID scaffold_32; pos 104760 to 105411 reverse strand)
atttggttgactggtttattcctcttgtcaaggtcagctgtaatctagagcttctttcattatctggtctttcagtatttatgatgtgtgatgatttttcttggtactctgtgcaaattctacatttatattatgagctgagggatgggactacttgaaactattattcattatcaaagcgtgagacagcagcatgtaattaattatgacggatctcgatcttggggtttggtctttatctgtatacgctaatgattgtattaagaatgtaagatagtttgcagtttctttcgtcgtttttatgctactataaccaatgtaatattcattacatatcaagtaggctagcacggagacagttgaaaacttcagataattcatattttatgatgcattttcccgttttttcctgtaaagattttttttgaaatttatatcagtagtaggagtggtggtataacgcacttagatcattgatccttatcacctcaaaagaagaatatctacgctagtcattacatttggcatgtgaacaatttctttctcaccaaagtgttctcatatttttttggcattgaagccactactctatctaattctcatgtttaatttttggcatgtcggttaatttacagaggctagcagctggtga

SEQ ID NO: 104777 - DNA, 695 bp, Mimulus guttatus
  Intron number 2 from transcript mgv1a009164m (locus mgv1a0 09164m.g) derived from phytozome v7.0 (chr-ID scaffold_18; pos 1402214 to 1402908)
ccatgtgagctttatacaatagaattttccttctcatgcaatggtgcaaacaattgttgatttattttggtgttttgagaaaatcattagaaattgatttgatttattaagagaaccgaaagcttcgccatcttgatgaatctgcttttccatgaattcagatttttatctttttgtcgaagctggtgattggtgtatatttattttcagattgttatctcatgtatgaattggtgctagtttcagttcatgcgtgaacatcacacatatataaataacaaaaaatacgtgaatgaataatatccatgtcaattttgttaattgtatcctccctgcaacgtgttcctctgcatatttttcttaaatttctgtttgtattcctcatttaagttatagcgacggatacatctagtacataaataaatgcaattatataacatgatgatactccatatggaattaatgtatttgaaatgaccgtgtgacagggaaaaacaagtaatacgagacatgtatggcatatttggatatatatatgcataaaattcatttgtctttatatgtattattttggacagagctgaattcaattttcatctcctaaaagttgtactacgattgaagatgtattatgttctcattttcatcaatttgtttagcttatttaatgtataattgcagtttcggagaggaga

SEQ ID NO: 104778 - DNA, 610 bp, Mimulus guttatus
  Intron number 1 from transcript mgv1a024597m (locus mgv1a0 24597m.g) derived from phytozome v7.0 (chr-ID scaffold_24; pos 25752 to 26361)
ggatccacagaagtcttggagtgcacatatcaaaggtgatctcttttttcgccactagttttctctttatggttttgaagaggtttattatgtgggtaaatattttcagcggcggagaaagactttgagtcgattaccattataggattttaagatatgttgtatgatctgaatttcatgttgatagtttaattatttattactgaatggtgctaacctatgctggtacagtggctagtatttgtccattactttcaaacatggcattctttgaagcaaatgccaggataatttcaaccttgaattaatacagtcaggactagtaaaattctattaaatttagcgaaatattaaattatcgaactaataatttaatatattttcaccaagtcgggaccggaagaaattattatttaagcaaggttattaatttattaaggttatatcgtaacattgatagttttgctttgtttatttaagtaggataaaagaaacactcatttatgaatcaataaattttatcttacttttcttgtagaagtaggcaatttcatttgaatattttttaatatttcgtcatttttcaggtgagatctgctacccttgacac

SEQ ID NO: 104779 - DNA, 603 bp, Mimulus guttatus
  Intron number 1 from transcript mgv1a003431m (locus mgv1a0 03431m.g) derived from phytozome v7.0 (chr-ID scaffold_27; pos 1270065 to 1270667)
ttcgcaccggaatttcggctctttcgtcggttctggtaactcgtcgcctaattctcgcactgttggattgaattattagtttttttcgagtttaatttccggtggtggtttagcatttgcttttgcagtttttggcgactgttgttgtttgttgtttgtttttgttcgaggcttgtttaatttgcttgattagtaatttcgaagttgtgatgactgatgatatttgtcctgattttgtaatttgaggaattaaagtgcgttagtgagagatgtgaattgagaaaaaaatggctgcactatcatcctgagtaattttcttacattttatgctttaattagtttatgagatatccactggtaactctgtgatgagattaagtcaacaaattgagtttattgaattttgatatgagtacatttttcgctatctgccgatgtcgttcttttgagcattgtgatgtgagatacaagttcgtttgatgtgaatcgaaggcaactagatgacagtaattgttctccggaaacgtaggattttagcaattttatgaagaattaagcctcatttgatatatgttcttatttgttcttatcaccaggacgttc

SEQ ID NO: 104780 - DNA, 754 bp, Mimulus guttatus
  Intron number 1 from transcript mgv1a010447m (locus mgv1a0 10447m.g) derived from phytozome v7.0 (chr-ID scaffold_75; pos 453074 to 453827)
gctgataggtctgtggctttttgcgtgttgctcgtctttttcgactttttcggtattttggttttgtgatttttcgagtgttggggattttttggtggttggttgtttgatcattaaaagtgctttgtgaatggattgatgaaaatttgatcataaaagtaaagactttatttacatatggttggtttattagggtttgtttgaattcgaggatgcgattttgagaaatatgtattgaataaagactagtgatttaaacaaaaggcattgatttcgttgtagtttggaagttaaaaatatggaattattgattcagaatgagtaatttatgttggaaacattctcgttgttgtggcgaagagaacgttttattgtattgatcgttaactgcgaattgaatatttgattcttacgtagaacaaacgaaaaaaagatatgaaaggggagccaattaatggttggagttagaatttgaatgttaattgtgttgttctaaatcatctgagctatttgcaattatgtcaagttaatggttaactcatcgagtctcgttttattttgaatgatgttatggattatgctctattgatggaacaatgtttatgtgcctaccaagttgttgcctttatccatgattaattttttagtgctttattatctaattgatacgacttttggagaatacgactgacattaattgctttgttcttgtgattcaggttgagcctcgtaaccacaattaaggtattgtaat

SEQ ID NO: 104781 - DNA, 622 bp, Mimulus guttatus
  Intron number 3 from transcript mgv1a009016m (locus mgv1a0 09016m.g) derived from phytozome v7.0 (chr-ID scaffold_54; pos 1120638 to 1121259)
aacattgctattggggccgctgagggcattgtgtaagttaccctgcacctctccacttgctatcgttttctttcccgtaatttcaagaatcgaaacataccgctatggataaatttcaagaatcgaaacttaattatgtctcgtgtggctatagacaatatttatacaatgggaaatttgcagtttccatccctcgagtttgcaacgatttcacatttggtccctcatgtttacaaaaaaaaacacatttggtccctcgtgtttcaataatttgacacttttggtcatttccgtcaatttacccttagtccgtcagttacgttaatgatgggcacacgtttgattccgttagttttaacagaaattgacgaagatggctaaaaatgttgaatttttgggacatgagggaccaaatttgtttttttgtgaacatgggggaccaaatgtgaattcggtttaacttgtgggacgaaaactgtatttttccctttatacaatgatactaatatacgaaatgtccactgtctttcgatttgttcgtgttgaattttatataaatcggcctcgtaacatttgtcttattccagctatctgcacaaccacgcaaccccacacataatcc

SEQ ID NO: 104782 - DNA, 790 bp, Mimulus guttatus
  Intron number 1 from transcript mgv1a015630m (locus mgv1a0 15634m.g) derived from phytozome v7.0 (chr-ID scaffold_255 0; pos 2 to 791)
ctctctctagtttagaaatcaaggtacttcctttttccttttgttcttgtttactactttacctcgatatctccgtctgctgtttgttcttcattttccttttattaaggcaacaggtgatgagttttttttccttgtgtttttgatttcttgttcttgataaaagacggacctttggatcaactttcgaccctttttagatcagggctagatcttgctattctgtgttctgggttttctttttctttaaaaaataataatatttatgtttgcttcttgattcttccttttctaatgtttctttttattacatgacctctgattttaaggtggctgatgctttggttttagtttgtctgaaatctgaaataattgttgcagaaatatattatgccgtccttgtcttgtactttttatttgagatccatttgctatttccctgcatatgatgaagttgattaagattggttgcttagcagaatcttgaatctttgggggtatttttgtcttttttatttgcgattgtatttttgttgttttttctttctaatggagcttcgagtgaagggcaattttgcttgcacttctcataatgctccgaatatttattcgcttcgttgctatttaaatcgatggccattgtgtttccatcattgtggccatttgcagcatgcagcacatatatttatatatatatatcacatgtaatgctgtttttatagttacaccaccgaattaagcacgaaagtaacattagtcttcttttctattttttatataggagaagaaa

SEQ ID NO: 104783 - DNA, 709 bp, Mimulus guttatus; identical to SEQ ID NO: 103994
  Intron number 1 from transcript mgv1a016593m (locus mgv1a0 16596m.g) derived from phytozome v7.0 (chr-ID scaffold_37; pos 1138923 to 1139631)

SEQ ID NO: 104784 - DNA, 364 bp, Mimulus guttatus
  Intron number 2 from transcript mgv1a007997m (locus mgv1a0 07997m.g) derived from phytozome v7.0 (chr-ID scaffold_69; pos 309592 to 309955)
gggtaatttttcccttttaaacctttcccttgtattctttttttgctactctcgcttacattaccacgattattgatgataatgaagttgtcatcagtcagcttttgaattatagatctgcatatttatgactcttggtaatgttttttgtgtaaagaaatttcactggatactctaaaaagatttgccattaattatgtttctatgttgaatagaattgaaaaagaaagtggttggatcctgtctatttaattatgtttctctgtagtatatttgtgatgtgagttgttcgatctgtctgtcttttcattacaaaacattgcaaactcagcactcatgtcccttcttcttggtcaggtttttg

SEQ ID NO: 104785 - DNA, 572 bp, Mimulus guttatus
  Intron number 1 from transcript mgv1a015128m (locus mgv1a0 15128m.g) derived from phytozome v7.0 (chr-ID scaffold_1; pos 1345664 to 1346235)
ttcgtcgtctctaacttcattgaaggctctgctctgtacgttttttgagcttttatttactgttgagctcattatttgttttgcttgttcgtattttcatttcgttttgctagatttgtctggatccttgttttctggtttcgcctcgtgtatttatcgatgatgcatgttattttttctctctgatgcttcggtttattgagatcctgaacgacgatgggaagaaatctctgtggtttctgtcatgatattgaagtggaacgctctgatttttataatttttttgctctctgatcatatgttatttgtttgcaaatatgttcatcatttgaattttgaaatattttttttggttactattttcttcgtaactcagtgagtcagtggtcattgagttttcgtgagcattaaatgcgtgtatagacctgtagcaggatgtttatttatttttttatttattaataataaaataatgttatacaatacagtatgcagaatgttgtgatcccactgattcgatatacttccgacttaaataataatatatatatattttcaggctgaagtctgcg

SEQ ID NO: 104786 - DNA, 1014 bp, Mimulus guttatus
  Intron number 1 from transcript mgv1a000120m (locus mgv1a0 00120m.g) derived from phytozome v7.0 (chr-ID scaffold_1; pos 489300 to 490313)
gacagcagtagcgttacgtttgtttcagtgccacagtctgctggatttagcccaattttatcggaggaaataataatggaaacaactgtagaaggacagagtgatgcagccatggatcgtgccgtggactttggagaacagaacctgtctcaaaaccaatctggattctctccaaacaggttctttccgcatacctctttctgcgtatcgaactaagcaacatatttgtgatagatctagattgtaatatattttttgggttgcctaattagtgaaatcacattatgttaagttagctagtcagtccccttccggattttgttactgagtgtgtggctctaggttgaattgagcatagacatttgaacccgaaatttgtttttatttttcatttacagaattagagttttgtggtttataagtctgctccgttattccttataagtaagaacctcagacaaatgggaattgctttataataatggtctatgttttttccgttcactgcttctgttgcatgtaatttcttattgtatgatggctctactatgtgtaggaacctgatacaaatgaaagaagctactttacaattgttgcgtttgggtttgtatcttcttctgctgcatgtaattttgacactatctgatctctgtgcaattcttaagaatgcatgtatcataactgatttggagtcaaacgtataagcttctttacttgtttttctgttcttttgaggaaggttagtttctgtataaggattttcttttttggtcggaagggtaggtaaggacttcttcagtgatttaggactggtgtaatggtgcttatcactgtgcaagtagtatacatttattcgtgttggagttgtatgtgccatcaaaatcccgagagcttatttttctaagccttcaattactaccctcctgattttgtttattcattctaaacttgtaggttattatcatcatccatttacattctttttttttcctattcttttttaaaacagaagtg

SEQ ID NO: 104787 - DNA, 368 bp, Mimulus guttatus
  Intron number 1 from transcript mgv1a002600m (locus mgv1a0 02600m.g) derived from phytozome v7.0 (chr-ID scaffold_2; pos 8761 to 9128)
ggccaccatagctttcctcacaacaagtgagtaattcatcttcgaatttgctattgaatttgtttttggttaattatatttgatttgcaattattacacctttttttcttgatttagttaacacctatgtgctttcgattttacccacatcccattttaattattcgaatttttcatccgtttctattattagcaaaatcgtcttcgacaatgtgcatcatcattagaatgaaacaatttagggtttatatgaatgggagattgtgatatcttatccgaaacacggtgcattttgttggatgggctgatgtgtaatgaattccatggatttaatttaatatgtgtgactgtgtgtggtcctaacagga

SEQ ID NO: 104788 - DNA, 622 bp, Mimulus guttatus
  Intron number 1 from transcript mgv1a006728m (locus mgv1a0 06728m.g) derived from phytozome v7.0 (chr-ID scaffold_18; pos 1137106 to 1137727 reverse strand)
taattcaccaccaagtcgccacctccgattcagaggtcttaatcttccttttcaacatttgatatttcaacattttgatttttgatttttgatttctgatttttgaatttttcaccaagcgttgacttatacaaatgtatgtttgactttgagatttcgttgcactgtgtaactggtaattgaagtttaactggcttgatctttgttagctattagtttgttgcttttgattttgataaatgattagaaaaaaatgtgaattattttgttgaacaatgttgttttgtgttattgttgtacaatattctgatattacaattgcagttttgctgctgattgagaattaatctgtaaatgttaggtacataaacttctgttaaagctgcaatttgctacgaatttatgaatcggtgttcttcgtaaattatattcattatgactggttcttgataaattgtgttttaagattcaaataattagatatgctgaggacttgatcgttgtattgctttgatcctttcgaggtttccgatctgttcctgtatttgtaattcgtatcgattagatcctaaacttaattttatccatcaatttcatatcactcgcaggtcgtgacctcttc

SEQ ID NO: 104789 - DNA, 638 bp, Mimulus guttatus
  Intron number 1 from transcript mgv1a024098m (locus mgv1a0 24098m.g) derived from phytozome v7.0 (chr-ID scaffold_21; pos 421163 to 421800)
gtggcggtaagagaaagaagaagaaattagagaaaaaaaaaacgtgattgatgaaggaaaaaaattagtagttgaactaaaaataattagggttatatttacaagtaggggtaatataaatttatcatttataattatataaaataattatttaattaaataactaagggttcactaataacacaaaagaggatgtatccactcttatatattcaaatgagtttgggggtttaattaattatccctatatataaataaaacttaacttttatcaaaaagtgaatttggagttacaacattttcctattaaagtattatttgaagagttttatctaagagccctttaatttttattttattccaaaaattcatggcttcctttacctaattccttttttcgggtagttgcagaatcatcgtagagctatcaagaccataaccccactgctgttaagaaatttattattttatatatatagagttgtcaattttcatgtaatgtaatattcctcggctcctcaaaaaaaaaaaagaaaaaagaaaaaaaaagtcatatatgtatttgtcccacgaattcaaaattctgatttcgtttatttattattttcgtgcatgtatcagtagtggtaaagtgagag

SEQ ID NO: 104790 - DNA, 201 bp, Mimulus guttatus
  Intron number 1 from transcript mgv1a008570m (locus mgv1a0 08570m.g) derived from phytozome v7.0 (chr-ID scaffold_4; pos 3707992 to 3708192 reverse strand)
gcccccgtccaggtctcgtcgccacagccgcggaggtatttcttcttttcaccgcacactcgattgagttacttctactcttgagcatgaattagaattggaatttctaaaaattttattaattcgtttttttttttttttaatcggccttcaaatagcagttgatttttttttttttgattttaattcacgtgaaatagg

SEQ ID NO: 104791 - DNA, 523 bp, Mimulus guttatus
  Intron number 1 from transcript mgv1a005650m (locus mgv1a0 05650m.g) derived from phytozome v7.0 (chr-ID scaffold_5; pos 636462 to 636984 reverse strand)
ttcatctccaccagattcaaaaggttttcttcttcttcttcttcgtcgtcgtctttttttttttttttttcatattggtcgtcttatatgtattcttttacgaactaatccttagtattttttcgaattgctaaaacttctattcttcttatgagcatcataaacccttttgcttcaatttacattttttaagctcgtttttcccgattgattatgctcgttgatcaattgaaaatcgacacactcacaacccctttactcactttatttctactttatgttatatatgcatttatgttgttttaattcaaattccgcgagtgagttacacgatcagtctttgacttttgacttccgatcgacaagtctacactaataaaaacaaaatacgaaacatttttcggcaatttgaatatgtactataggagtgtcgaataaaaaaaaaaaagaaaaaaagaaaaaaaacaccactaattaatgaagatttttgcgtgattaattaattttcttgaattttgcaggt

SEQ ID NO: 104792 - DNA, 753 bp, Mimulus guttatus
  Intron number 1 from transcript mgv1a009711m (locus mgv1a0 09711m.g) derived from phytozome v7.0 (chr-ID scaffold_49; pos 1404135 to 1404887)
aaacccgagaaccaacgagtcagtcaaggagcccggttttcggccaaaacgtcttgaatcatcgttgagttggttatttgtggctagatttgagcgaaccttcacatacttagtagtgggtggccggatctactcatgagtggtcgaatgattgtctgatatgatcatgggtgaccgaatatggttagccgattgccgatttgaagaataaaaaatgaaaaaatatagagtataagcaataaaatatagtaaaaagtgaagtaaagtagataaaagtgaaaataataattgggagattaaaaatataaagaaaataatatttttaaaacattaaaattaataaaataatggcatattaaaaaaatcaaaaacccttgaaccagttcgaccctataaacccatgacccaaatgattgtctggttctatagccggtctggttctgaaaacattggttataactaatgcccctctaaaatatttggtattaattgaagagatgtatttttaggggtaatgtcaaatggaaaaaaaaaaaaaaaacatttggactaacctcaaatgaaagttagttttgaggagctaatctcaaatttcctcattcttaaattggcccacctacatgttaataaatatgaaaaagaaaacgcgttactaggctaataatggattcgaatatccaaaaacgtaagcggagagtatatgaattgacaaacaaagcgtcactttcttccttgtgcgaaggaaagaaattc

SEQ ID NO: 104793 - DNA, 865 bp, Mimulus guttatus
  Intron number 1 from transcript mgv1a017652m (locus mgv1a0 17652m.g) derived from phytozome v7.0 (chr-ID scaffold_63; pos 846265 to 847129)
gattcttctcttcccccgtcgtatcctccaatccggtattcctctttcccgaaaccctagggtttctatttccttttttttttttgtatatatcatgatcccgtcgtttttttttctttttataaattgaaattcgattgttgtatatgctgtaattgagtaattgaataggaattaggatggaagggaatgatgcctcttgggatcgaaacaaaggttttaaagattttatatattaaataagaaattaattgagaggatttaatttagtggcaatttcaataagatttatacatacatggctgttagataaatagtttaatctggcctttaccaacacttggcgctagctcgtaacttataaatcattggatttgatttccgtaaatgacggaaatcgtggcttatttgttgtttataatttccgacgtgtgtcgagtccttgttcgaagttttcttgtggagtgtgaaaacatgtgtagggttatcacgtgacgtagaaaatatgcgcaaatgtgtagcggatctttcaataattaggtcaaatgtaagattcccacgtactgttttgcttggaattaagtcggtacgtaaaaagcggcattaaaagcgattgccaagtgtattgtaatctgtttaccttaaaaatctcttatcccgattttctatcttcgacgtgtctaacttgccgaattatcgaaggggtgctattaaaagtgtacatatattcgaagaatgtaaatgtgtttcgttgttgtttatgtacaaagtaaaaacgggaggtgtaatttttccttcggtctcctccgagagtattgttgtgtttctcactctaatctattaactacgatttgtgcaggaagaa

SEQ ID NO: 104794 - DNA, 975 bp, Mimulus guttatus
  Intron number 3 from transcript mgv1a008376m (locus mgv1a0 08376m.g) derived from phytozome v7.0 (chr-ID scaffold_1; pos 2836595 to 2837569 reverse strand)
agggatcttcagactcataagcacattccgtataggtacctttccttatttttttattgggtcaacatagaagtattttcccttgcatgtctttaggacatatgaagtgatgcattggtctttcattacttatgaagtaacattaattgtttgcctcagatctccagtctatttttgtgctgaggcctacaaataagtaacgcgtgaaagaaaataattcagaaagtgtctgggagaaagagaagagagtaggactaaagtataagacataaatgctcgttttgttagcttatgctcatgtcacatagatgaactgtaaatgttgagaatatatttatgtttatgaagccattgatctcctgtgtttaattgcttttgcaatcatgagtgtttgcctgaaatccatttgtatcgcgcagtgctggtgtgctctacaggatactgacttctcaaatattatctggaagatttactgtagtcatagagccaggaataaattattttaaacatcttatgttcttgaattaacatttttcttagttaatgtaatagataatctttcttccccatggtaacggagtcctttcttgctttatctttattactcttcatagggttctggcaaaccattttaaaccaaagtacaacttcgatgattaacattaaaatttcaagtgtaagaattaacaaaattatatctatagaattatccatttttcacattttttaactatagagataaagatggcatggatgagattgatcctggaggtctgatgtaacttcctttgatctgggttttatgctttttcgggccttgagtgatttatgacgttatataggaatatcgcaggatatagttgtagtgtatctgacaaatatctgtatttttgtttatctttcgatatacttacctagtatcccttttaacatctcattgcagagaaaacaagaatctcactggtactgctcgct

SEQ ID NO: 104795 - DNA, 935 bp, Mimulus guttatus
  Intron number 2 from transcript mgv1a000026m (locus mgv1a0 00026m.g) derived from phytozome v7.0 (chr-ID scaffold_104 ; pos 423440 to 424374)
cggaggcagtttacttacttatcttccattccgaggtatatttgattttctctgaattcgacaatcgattcatttattttgttgaactttagtgttttatctcagttttatgacaactttgagcgaataaaattttattgtgcttggttcagttttgatgagagtgaagtgacttatttccttgccgcaattattgtgaaatattgattaaacggaatgcgatgtttgtgtcgtgagaacctatggtttcttcaatcatttcgtttactttttttgatgtgtgtgcttattgcttattaagttgaagactgttataggaatgtgccaagttttgagtagtagttctaagtttttattgggattagaatgttgatagttttccttgtgtataacttacttctgtttctatctgctgattggggtcatgtgttttgctcacacccgaatggccatcacatttccctgctagcattgtcaccttttcttgcttacaattattgtcatactgtcgcttcaacgagcctaaatttctgcatatccaacttatatcatcacctcaatgcaatcaattccatcttctccaactacaaaatgaatattccaagtgatgctgtcaaataaagaactgcctaacagcttctcctttattttgtttctctattgttgttttgcgatggaacctgtgcagaagtatttgcttctgactatgttgctatacatacaacaaccactagtcagttttgtattaccagtagtaaaattcccttttcatccttttctattttcttgttttagcttttggattaggtcaaatttttgctttctttcagaaggtgatttagtttttgtttgtttggtggcttatgaacttaactgctgataaattattatggtatatttatactcgaaggaattactactcaacttaaagagaa

SEQ ID NO: 104796 - DNA, 769 bp, Mimulus guttatus
  Intron number 1 from transcript mgv1a002427m (locus mgv1a0 02427m.g) derived from phytozome v7.0 (chr-ID scaffold_329 ; pos 5662 to 6430)
cttgctatcaaaattggcgtccacttctttttgtatattaattttgtgctgttgttttttcgattttgattttattttgtcaaattaagtttctaattatcggaatatttattgtgcttgagattttaaatttgatctgatttgcatgcttattgaggtttgacttggttagtgaaaactatttttacgttgcttattaacttgagggtaaattacagtcaccccacccctgaggtaaggtcaaattacgaaaaatcccctcctaattgggtagttatacttataaccaccccttagctacgaatcttcttacacgtatatccttatggtgtcaaatttaacgtaatcttctagattgcgaggaatgttatatagtttgtactcgttttctgcaagcaaaaaatgcagtttctgacgcaccgcaatctgatatttacggagcatgaatggggtaaaatatgtacaaactggagaatattattcaagaagattccactaaatttgacaccgtaagggtggacgtgtaagaagattcattgttgaggggagtcattgcaatcacccaaacatgagggtttttttttttcgtaatttgaccttacattaggagagtggccgtaatttactcttaacttgatcggtacaattttcggttatcgtatggtattttgtggctcaattaacttgaagagttttaatgattttttttttatatataattgttgatggttcaggggtggtgctatacagttttttggaacgaaaaggc

SEQ ID NO: 104797 - DNA, 526 bp, Mimulus guttatus
  Intron number 2 from transcript mgv1a021427m (locus mgv1a0 21427m.g) derived from phytozome v7.0 (chr-ID scaffold_44; pos 1542728 to 1543253 reverse strand)
attacttgagtcgtgattgcgaccatcacttgaaggtgcatatctcattgcgcactcttcatttaagtctcttaatatttatttacatgacatatatattataaagtccaataagaaatagttacctgttaaatctcattgctcttcttttaaggcctcgtttggttggagatattagtcttagactatgtttgatggttgataaatccaataatttttccgctcgacccaaaattattattttgtcatggcctatctacataggcctcgtttggttgggaaaattagccatgagtaactaattagattttctttgatgtttggtaaacccaataacttcccagatcgaaccgaaaatatcatgccttttagggagttttttagtggacctttcgaggtccaataaaataatcgggtttaattttatgaattaccatgatgcttgtcatttattttctctttgactttccaataatattgttcagatttcataaggtctgtggttttgacataggaaaccctgaga

SEQ ID NO: 104798 - DNA, 601 bp, Mimulus guttatus
  Intron number 1 from transcript mgv1a017543m (locus mgv1a0 17543m.g) derived from phytozome v7.0 (chr-ID scaffold_2; pos 3823704 to 3824304)
tgtgaattgtgatggatgcgattccttttgtttgtgtgaatgctaaatgctaatgatgaaaatcatgatctgcagtagttttcgttcttgcaaatatatttgtcaaattatcaaattattatgttgcaaaattgtaaacacgagagtggttattttattttattattatattcttatacgtcatgtcatctgcatctgcatctgcttttggcatggcacagatgttagaacaacattagtttaactgagattcgcattttttttctggtattacgtatctcgtcatctgcacccaatcagggtaagatcgaacggatgatgttcactaaaattatgcttgttcactagtcaactgtcactttctgtgcattttctaggatatcttctaaagaatacccgattatttgatattgttatgtaagttctctctcgtgttgtgcaatcctttggtggagtgtataatctgagttctaattaatgttttggttccgtggtttcattcttgaaaccctttggtagattgagttaagaattcagcttttgattgttgttcaacttcccgatttgcagataacataggattacagttgtttatcttgag

SEQ ID NO: 104799 - DNA, 989 bp, Mimulus guttatus
  Intron number 1 from transcript mgv1a001529m (locus mgv1a0 01529m.g) derived from phytozome v7.0 (chr-ID scaffold_48; pos 69422 to 70410)
taagcacagagtatcttggtaagattctttctggaatctttccactctcttttctattaacgagtatgaacaaaggaaaaagaaaaaaagggggtttttgtttttttttggtctttcggttatttgacctagggattgtttctgtgtagtgtttgttgtctgaattggtgatgaaatgcgataaaggttgaatctttaaccagggttttatcctgtttgtggttttcttgattgattgcttaccagttgacttttgttgcttgcgtggattaatgctttttttttttttttttttttatgcttgattcttgattttttttaagggatttttcttctagctgaaaagggttcgactaactatcgtatattagttgaagattgcacgattagtctctaaaatttttgagaggatctatcagaaatgattttcgacccgtttatgctgattaattgaatttgtaatacatttgttcgatttcatttccactaggttgaccgaaaggtaaattgtttcatagattctctattaccgatttaccgtatgtttgtttaattgcttatgtcttttgcggactaactttcagaaagaaagaatttgccccggcaatgtgtgcagcaccatgttataaacgaaaggtcttagaaggaagttattttttctaatcgaacaatatggattcttcgaaaccgacagaattattttatatactatgacctcatgcatagagttagctagtaagtggtggttgcatttgtagcccaaataccccttttttttttctggtaattccttaccgaaaaaatgattttctggtatattaactcgttatttgaatacgagaaaatgaaggagctctattaattgtttaaaaaaattcattgtcgtctgaattaggtattagttcgtctaccttgattttgtttcggttcacctaaatataatactttaaacaccttcttgcttggattctttttccagattgcagaat

SEQ ID NO: 104800 - DNA, 671 bp, Mimulus guttatus
  Intron number 4 from transcript mgv1a023718m (locus mgv1a0 23718m.g) derived from phytozome v7.0 (chr-ID scaffold_836 ; pos 13727 to 14397 reverse strand)
ctggtgaaacttttgtcagatcaaatttacaaaaggttaaatttatagcattaatgcaggttgtttactgtcatcattttttggtgtagcaaaagatgggggtctagttatgcacaagttccattttttgccttctcttactactgtttcacttcagggaatactaccataaattcttgaagaacttttggcagctcgtagaagggccaaagcggatttgaaggttctcaatttaattactataaatatataaatacttttttttttgtaaatttctattcctttgaaataaaggttctgaagtgttgatactacttcaccattaaattgtcttttggatgtaaattatcctggagataaagaacacttatgtaactggtaactaataatacacaagatcatgttcgtctagatggaactgtacattagactggtcaatgattgtcaaaagttttctttatgggattgattattgcgtttggacaacgatatctggtggatttgttcacaatgtccaaagtttgagtttcgtcgtacttgaatagtaatgcaatctatattgaaatataaatttgttactctgtgttgaagaaaaacttctaatggtgttttacctgtatgaatttaaatttttaggaagcaaaggatccacttgaaagagctgtgttaga

SEQ ID NO: 104801 - DNA, 832 bp, Mimulus guttatus
  Intron number 4 from transcript mgv1a014951m (locus mgv1a0 14951m.g) derived from phytozome v7.0 (chr-ID scaffold_117 ; pos 604761 to 605592)
ttgtttgtctcctcaagagtggagaatcggttaaggtagaatcttttttcgtttcctttttcttgaaaattggtttttgtgacgatgaggaagagtaactagctattacgtgtagaaagtaatgctgttaaatatgtctgcaagagattgcccgattgtacggttttgtgaccgtagattcagtgtcaagaattgagatcaaattttatcaacaccattgttacaattagtgaactaaaatgttagttgattaaccattatcgtatgtgttggttgaattatataatgaatcaaactcgatggctcatttgagtaggaacaccttgttgagtttgtctacgattattttcgtacccaagcaaaatgttttttactagaatgaacctgtttaattttatgtaatattttcctaatttgtgcgtttatttttttttttgtgtaaaattttatctttaagagcttaaaagttgcattcaataatacgttcgttttttttttgtccgaaaatcatattcggtatccttataccatcagcttattttcgcactctcactttatgtctgatttcacttcaggcaggcctatgttttgcattccacttttgtatgtataaataaatagtagagttcatttattcgtcgaagtatacatttattcattattattcatccatttgatgttgaaggttatttgttcgactattgctcgatctttaatttctacaatgacattgtttggttattatcatcatcaacttctttcagttcgactaatttaaagatattatgaaatacacgattattatcaagtgttaacatattttgaacaggtt

SEQ ID NO: 104802 - DNA, 558 bp, Mimulus guttatus
  Intron number 1 from transcript mgv1a010743m (locus mgv1a0 10743m.g) derived from phytozome v7.0 (chr-ID scaffold_114 ; pos 367836 to 368393)
tccgtcgttttcagctccttcttcttcttcttcaggtattaattagtacttcttttgctttgctttaatgttgttttttttttttttcgttcttgaaattttctaatactaatactgatattaatactaatattgatactaatacaaaaatcgagtgttctgtccaactttgattttacaatatcaatgaagataacaagaatgataggggtaattttgtcaaataagaacgttctttctcgattaaaatcaatattgtttaaattagctttcttgattggtttgcatcgaaccttaaacgacacttaaaaagaaacgggagcgagtaagcatttcttcggtacctcaagacgaatgcatattcgataagggagacgtcgattttcaagattcgacattttaaacaaaataattgtctagggtggatcgatttgcttggccttctctcccgattttatttttatttttattaataatcttgaatttattaaaaatcgtaacttgtgctttgattaaacgatagggtcgggaccaaacacggggaaaacagtggcgata

SEQ ID NO: 104803 - DNA, 844 bp, Mimulus guttatus
  Intron number 1 from transcript mgv1a003969m (locus mgv1a0 03969m.g) derived from phytozome v7.0 (chr-ID scaffold_4; pos 1896670 to 1897513)
ctctctagaacaacacagctgaaaaatctgcgcaggtatgcagctactatacggatacagtttagtaatttcttcaagcacatgatctttgtttctgtagttttaaatttccttttaattttttttttctaggttgaatttgtgaattgtggtatttgaattgtgtatgagtaaggggttgaaattcatgttctaccaaattatgcttttgcttttacagatttcgatatgtttgttaaatttttatttaattttatgtcttcgttttgcttctcttgtgagttgttgaagcatgtgcttctttcttctctgtttttcaattagatatttcctgtttaatttgaattcacccccaataatcacatctcaagtatgctgtagatttagttcttgtccttgaagaattagacatgtagatttaatttgttctgatttttccattaatttagttgttctgaggtgttgactagctgacatctgtttgactttttgggtcatgttcttggtatattagggtcctgttaaagcttccaatctgatttttttccccattttgtgtctgtattttataaatgatttacagatttagtagtgcatcttcgtttcacttgttttagtttctttagtgcatatatcgaacttgctcgtggtttgtattctggattttatgaactatataatttgctcatggtgaaagtggaagcggctaagaaaaaataatcgaaattcatcatcgaggaagttgctctttgtggctggtggtttgtactgaagaaatgcattgacccgttcgttctttctattggcagatcttgttgcttctcgtattctaccacaaagtctg

SEQ ID NO: 104804 - DNA, 909 bp, Mimulus guttatus
  Intron number 4 from transcript mgv1a012587m (locus mgv1a0 12587m.g) derived from phytozome v7.0 (chr-ID scaffold_52; pos 348361 to 349269)
tgggttgctgttgcctcacaatactactgatcaaggtgaccccactattcatataacttgttatatgcatgtattgtatatgtcatatgtctcagttttgtgcttcttaaatgcttatgaaattccgccaacgtttatttatcaagtgcaattaatttattgtatgtaagaagtttttatttctcactttgaattccaacttctagtggaagtatagtttgctaatggagaagacttattggaacttttgcgattacatacatagctaacgttgctttaaaacattgcactggatataagagtgtaagagccgagaagattaccatgttaccttaaattgatagttgataaaatcgctctgatcaatcttgtagataaatcaaaatagtattgtcagtttatttccaacatgtcccgaaactatgagatcttaaaaaaaaaaaaaaaaaaaaaaaaaatcggtgattataagccacagtgctcgttgctattgagttgcttgtctaacaagaataatacttagcatggtggttcaagtttgcgaacttgtcggcatatatgatgttgatacgactctttggaatttcaatgcgttttttatgatggccacttcactttgtttactacactcttgtcttgtaaaatctttatatgttgcactctaactcgttaacccgaaacccgaaaacctgaaaaactgaaacaggaaacccgaaacccttactatggcagttaataggcactgatacatctgattatcctctggcggaggctgagaccatttatatatgaatactgtatttgtttgtacgatattttgttgattttctggtttcgtagacctaatgttgatatctgtattttgctattttagagcttcaacacttgaggaacagtctaccagattca

SEQ ID NO: 104805 - DNA, 549 bp, Mimulus guttatus
  Intron number 1 from transcript mgv1a003672m (locus mgv1a0 03672m.g) derived from phytozome v7.0 (chr-ID scaffold_2; pos 3228758 to 3229306 reverse strand)
tttacaagtgggatcccgaggagttgcccggtgagttttatctctcaattttatttatttattattattggtttcattatcactgtttttagttcgttttatttaattgctgtgtgtatctaatcgttggtaagatttttgattttttgttcgattgatttttccttttatggggtttttgactttttgtttatgggttttgttggttataatttttttagcatgttccagatttctatttaatttggcttgtggctgtaattgaagtcaacgcagatgagtggttgattggttttttctgctattctattagggtttattgtttgttaatttatgtttccagtattcgaatcgtctaatcttctgctgaatacaattgaatggatgataaatttattggggggctagtgtgtgtgtgatattatcctattgctctatgcccatttttcatgtgtgtgaagcttttttgcagtttatcttttcgtgtaattttctgactttggatatgcaaaatgcagatatatcgaagctgaaaactggtgacaggca

SEQ ID NO: 104806 - DNA, 966 bp, Mimulus guttatus
  Intron number 1 from transcript mgv1a016498m (locus mgv1a0 16498m.g) derived from phytozome v7.0 (chr-ID scaffold_104 ; pos 695867 to 696832 reverse strand)
ctgcccattattcctccactctctctcactctcaggtgtgtgtatttttttctgtacgtatatgtgtgtgtgtgtgtgtatttacgccgctagtaagtatggcttattatcacttgatatttacctcatttgatgatcgtgtttgtgattttgccaattttggcgatacaaaatattaaatattaaatactcatcattcctacaatctggggattttcctttctggaagtatcactcagtcaaaccatattctaaattattgaattataaataacttagtattattattatcgattggattgttaaaccaattctgagttatgattcaaaatagtatgtggagtgatttggggatttaaggctctacttatatagttttccacttgtctagattctttctatataattgatgcaatcttagctataatgatatatgcattacaatctctaatcgaggtaatcgaggactccactttctaaatttgatctttagaagataattcgattttaaggccgacatttataattcgtagtgtgtgtcaattgactgtgacaaacgccttcgtatagttatcgagttcattatatttccatcgggatttctctgaaattttaccaatcaagtgataatgttaatgagatttgatttctcttacttgctaagtgcagatgtaatatcgattaattatattattgatcatgtgactgttatcccacttgactaaaattaccccacttgggctgcccactaattacttgacattgtacacctaccattcatattctcaactttgagtattcaatgtttgtcttggctccaatcaattacgtttctcttttattttgtccgtgaaaaatataagaattttttcgtcgtgttttttaattgttatttatagagttttgtgattattaataatcaatgttatatacatgttgtatgcaggggtgtgcacagctctgcct

SEQ ID NO: 104807 - DNA, 543 bp, Mimulus guttatus
  Intron number 2 from transcript mgv1a009574m (locus mgv1a0 09574m.g) derived from phytozome v7.0 (chr-ID scaffold_96; pos 282721 to 283263 reverse strand)
gcatcggcaacccatcagttgaaggtaataaataatagctgcttatattttattacgtaaacgccaaacgtatcgaccttttgtattttcggtccaatagcatgtaaatttgtattgagttgggtaattaatgtgtgtgcaagtgatcgaagatgcattattaggtagaaacaagttttctgtttttttcttatttgaccttgttgaagtaatctaccaaaaaaaaaggaacttagtcgttgataatttttacaatcgtctaaaccatttcaaaactagtatttaactacaattgtgaagtgaagtttctacttacgttccatggtatatactactttgaatggaatatttatataactatttagtcattttctacgtccagatttacttgaattttattcggcggattctgattctgtttcagaattgaagcatgcagcatttagttattttcaattttttttctgcccgattaaatacaaaaattatttctgtcgactttattcagggttcttgtagcactttcccgtcagtcccttcatc

SEQ ID NO: 104808 - DNA, 471 bp, Mimulus guttatus
  Intron number 1 from transcript mgv1a009574m (locus mgv1a0 09574m.g) derived from phytozome v7.0 (chr-ID scaffold_96; pos 283309 to 283779 reverse strand)
tgttgctctcttcttctcttgctctatctatttaggtatatactttctactcaaatttatttttatatggatattttctgctcatttgttttgtttatgggtttttggatgttgtagagattttctttttttttttttgaatttgggggaaagttgaaaaagcaattttcaggcttggatgtcaaatgatgattcatgcgatttttttttttttttttttttaattattgcttctcttattccatttctgcaattttggttgtttttgtaattttcttcctttctgaaacttaattttttattttaaatgtatggtctcgagattgtgtttgaaagagaaagggaaaacagagttgtggtatttcgatttttatgctttcaattcagaaatatctcgattcgataacttttcacccggcaattaaagatgaaatttttatttccagggtttttggatttctttaagcaaat

SEQ ID NO: 104809 - DNA, 206 bp, Mimulus guttatus
  Intron number 2 from transcript mgv1a012284m (locus mgv1a0 12284m.g) derived from phytozome v7.0 (chr-ID scaffold_169 ; pos 188847 to 189052 reverse strand)
atttaccaggtcaaaagaaggatcctcctgaagaagtaagctctctgtttttcatcttcttattattattttttattttttattttttatttttgttgttttgaatgtatgtgtgatggttaattgatgcataggaaaatgtgggtgaaattgaatttggttttttttcagagagacccgttgaggattttctacgaaacactgca

SEQ ID NO: 104810 - DNA, 422 bp, Mimulus guttatus
  Intron number 2 from transcript mgv1a018439m (locus mgv1a0 18439m.g) derived from phytozome v7.0 (chr-ID scaffold_5; pos 3857303 to 3857724)
ggaaaagtacagtttgcaccgtcatgtttgcaccgattttgtattttggtccctcgtgcacaaaaatacacatttgattcctcatatttaaaaaaaataaacacttttagtcatttccgtcaattttccgttagtactaacggaatcaagtgtgtgccactaaaagtgttaagctattgaaacttgatggaccaaatgtgttttttatgaacatgatggaccaaatgtgaaatcggtgcaaagaagagggatgaaaattgtaatttccccttatctttatctttcttttcatttcttctttttttatttttcttgttaattagtttgttttagtcctatagagtagtttctttaaattgtcaaggactacttttttttatttataatattatttggcaggaataacaagacgtttccaaaca

SEQ ID NO: 104811 - DNA, 700 bp, Mimulus guttatus
  Intron number 1 from transcript mgv1a005316m (locus mgv1a0 05316m.g) derived from phytozome v7.0 (chr-ID scaffold_52; pos 810417 to 811116)
agacatccgggaatctgtaattttgtctctcgcaggttacgaattcttaatttttattgtacgaatttcgtttggggctttggtttttccccctcttattttttttttgaattttttgtcttgttgttgggttgatcgattagaattctggtgttttaggggtgttgaattcgaacagcgcgatcagagaagaagaatttgttgctgttttttttttatttgactgtggtgattgagtttgactgatctgattttgtgaagcttttgtgtttgttgaattgcccctgatagatgatgtgttgttgggtgataatctgatagttgattaattaattagtttcttgcttttggttttcggttactacaacttgaaaatcggcttttagaatttgggggaacgattttaaatgagatggataagaaatcgaccacaacgtgtgaggtgttaggatttgaaaattcattagaaaacaaattcatccaaacaaggtcaaccgtttcgttattcttgatttgagatctctcacctctaaatcgtataaatccaaatgaagacttaaataatatgtttttttcgcttcttcttctgacaatctattcttcatagacataaaaccgggttttatatttacatacactagaagatttcgaaactcgattactgaaatatttcttacagttattcgattcggagttagga

SEQ ID NO: 104812 - DNA, 639 bp, Mimulus guttatus
  Intron number 1 from transcript mgv1a024502m (locus mgv1a0 24502m.g) derived from phytozome v7.0 (chr-ID scaffold_242 ; pos 15286 to 15924)
ctttgaggaaagagaatcaaaccctactcatccaggtataacaaagaattttaatccttcttataaatgtatgaggccacatttggttggtagcattaaataattaggtcttatttaggggtgaaaattggacgggtatcgaatcggaattagccctttcggaatttttttttcagaagtggaaaactaactccgattctgttcccaaaaaagtcggaaaaatcaaaaaaatggaatttaggaaattggaaagaagaaacttattccaaaatcggaaattttcgggtaaaagaaagtgaaatccacgattcattccataaggcttgggctttggtttgatagctaatgattggacttgggggaattcgaaaattccattttttttgtcgcatataatacaaaatacataataatattgatgttataagtataattttgagaaaaaaaatggaattttttgaaattaaaatcggatcagagatcggaatctaataattattccaattccgttgaaaaaaatcggaaaaatcggaaatcggaacttttggaattcgaattaaaaaatattgttccgaaatcgaaaacttttggatcagaatctgaggaatttggaattttcgatctgatttccacccctaa

SEQ ID NO: 104813 - DNA, 750 bp, Mimulus guttatus
  Intron number 1 from transcript mgv1a016376m (locus mgv1a0 16376m.g) derived from phytozome v7.0 (chr-ID scaffold_16; pos 1538591 to 1539340 reverse strand)
acaattctcaccctttcacttttcatcaccaagtaattccttctctctctctctctctctctctctctctctctctctctctctctgcatattagattgtgtatttcgtgattttgcagcaaaatgaaacgtggattctctctctctctgcatattagattgtgtatttcgtgattttgcagcaaaatgaaacgtggatttctgtatttggttgctttgaaatctataacttgttgctttgtcatggatttgatagtttctcatccttgtattttaattggtaattctattttttaattcgattcaatggcgggaaatgcttaaggagagggtctgatatctgaggttttattgtgatattagttatcccaattgctcagttatggaaaccacatatatctttcctttgaattttatctgtctgatgttatgtttataattgagtttgattaccacttaggtgcatttgtttgtgcttccatgttcgtcgcctttactcgatagtcgataccgaattgcttaagattgtattttcatcttcaaaccccgatgtaactttcacaagttcttctttccaatttgaatttgtcagggccatctttgtttcttatttaaatttgcatgtcttttacttttatactattcatcagccagttgaaattaaaattatgacatttctcttgaccattttgtccttgataattttcgaatgaaggattcaaagccctgttagcaacacccgaggcggga

SEQ ID NO: 104814 - DNA, 556 bp, Mimulus guttatus
  Intron number 2 from transcript mgv11b016587m (locus mgv11 b016587m.g) derived from phytozome v7.0 (chr-ID scaffold_5 ; pos 3240238 to 3240793)
taatcagatttctggccattacctttattctccaggtatatattattttttatgggaaaagtacagtttgcaccgtcatgtttgcaccgattttgtattttggtccctcgtgcacaaaaatacacatttgattcctcatatttaaaaaaaataaacacttttagtcatttccgtcaattttccgttagtactaacagaatcaagtgtgtgccactaaaagtgtcaagctattgaaacttgatggaccaaatgtattttttatgaacatgatggaccaaatgtgaaattagtgcaaacaagagggatgaaaattgtaatttcccctcatctttatctttctttttgtttcttctttttttttttatttttcgtgttaattagtttgttttagtcctagagagtagtttctttaaattgtcaaggactacttttttttatttataatattatttggcaggaataacaagacgtttccaaacaatgaaatttgaatggggcctttcaaaatttatttcgaaggaaattctgtctgacccatcaaactgatacctagtta

SEQ ID NO: 104815 - DNA, 711 bp, Mimulus guttatus
  Intron number 4 from transcript mgv1a012465m (locus mgv1a0 12465m.g) derived from phytozome v7.0 (chr-ID scaffold_23; pos 57324 to 58034 reverse strand)
accttgtaagcctcaatcactttgatattctttatgttggtcgttaaatgttattctttatatttttcgtttgttctacgtcaaaattttctattacatttttgttcatttgctctattttcttaagctacgtgtatattgaagtttctgttgatttgaaaataggattttatttacttgtttctcttaagccacatttttgatatattaattagtgttacttatttgaaatgtaaaacatgattacaagaagtaagtatcgtggtgcatttttgggttgacaatttgtctgtagtgatgttgtatgacctggcatttacgatacctcgtaaaattaaatgtgtaagttttagttgtcattcgccttcttgcagtagttagcatctgttaagtaaacatatttgttaagtgtttttcttccttttactcaattttatggttcttggatttttcataatatcttctggtatttgaacgaatattctttctcttgctaatttgttttcttctcttggatcaatggaattgtggttgaacggggcgcgagtgattgtaaatctgttatgtattgtacaacatttttgtaactagcaccacttatttgttaatttagctacttgattaacacgttattcgcattatttctcgttttatccttacactccgtgataatttgctttctttgccacgttccttcagattgacagtcac

SEQ ID NO: 104816 - DNA, 464 bp, Mimulus guttatus
  Intron number 1 from transcript mgv1a013287m (locus mgv1a0 13287m.g) derived from phytozome v7.0 (chr-ID scaffold_58; pos 1301516 to 1301979)
cgtctgcgttggcctcactcgttctctccccaacggtaaccctaattttttttggtgatctttcattttttcaattttcatgcatttgttagtctctctgctttgttttgggtgttttaatttgaggcagtttcatatctagaaaaaaaaaaaaaaaagattgcaactttgtgaatttggtaataataagtttgtaatttggcacagaaatttgttgatttgttgattagtgattatgcatctttttttttttttttttttttttttttttgcgttaagagattgggctgggattttatcgagcttgttcttgaattacaaacttcataagtatatgcacatagtttcatgtgcaacaagtgttcttcgtatttctaccttaatcgctgagaattattactaattaaataatttgaaaaatggattatgatttcattttgatgtttgttgaccagtgcctcggc

SEQ ID NO: 104817 - DNA, 993 bp, Mimulus guttatus
  Intron number 1 from transcript mgv1a001952m (locus mgv1a0 01952m.g) derived from phytozome v7.0 (chr-ID scaffold_37; pos 241057 to 242049)
aagctagtagctaaattattctggtgagcaaatttaaagtgtcattttttctccctccaattatttatgtatatgaatttttgcatgtatattacatttgaatggtggtggtggtgtgtgtgtgtgtgtgtgtgtgtgtgttcgtagaatttatgcggaagtagctcaaaaaacactgttaattagcactgttatggtttttgattcgagtaattctccatatttgttgttgtttatgttggaaaatgaataaattagggatttggggaattggatttagggatttcaattaggaaaaaaaaattagggattatggcaaattgggggaaatgtgacctgaggtggagaaggggaagatggttaagggatgtcacttgcagaacacgcgttctttttcccgtcaatttggcggtcgaaaagtgaagaagaatggcaaataactttagtggtatagtatagggaccgattctgtaattttcccattctcagttgatagaaattttcatttattgtaaagttcctctagaggaagtttaatgggtcatgatgtataacagcctctgtaaatgcactgtttgctttttctttccattgcttaaaaagcgaaaggaaattaattggttcttgtcttcttgaaagtgacaccactaagaaaaccaaatgcaagtcatgataacgatgatctatttaagagtaggtgatatgcagcggagaaaatcaactctactttgttctaacactactaagaattcaagaaatggataaacttcagtgttttttcctgtttattatatgcaatctgatttgcagatgcctgagtgatgctacagatgataaaaggcaggcaaggggcatttttttttctgatcgacgttaataaaaaaattaccaccaatacgtaaattaagatcattggattcatgtcattaaatccgagtctcgatttttttttgtaagtattggctgttttgttttcaggtttacgtagtttac

SEQ ID NO: 104818 - DNA, 837 bp, Mimulus guttatus
  Intron number 1 from transcript mgv1a011045m (locus mgv1a0 11045m.g) derived from phytozome v7.0 (chr-ID scaffold_249 ; pos 182634 to 183470 reverse strand)
tgggcagcaatccagcgatctcccattttctctgagtaagtcactatctcgaaaaatcattgtgtacttttaaactgtatttttcttctgatttattgcttaattgtgttgtaagaagatctctctctctctctctctctctctctctctctctctctctctgtgcgcgcgcgcgttgactgaatccctattagttgtctgtgtagattgggggtattgctaattcagaactgggttaatgaattagagccccttttcttgttttgatgccctggagaaattcaaaaacaaaataataaaataataaataaataaaataaaaaatggaatctttcttgaatcttgtatgcaaggaaattaatttagttcttattaggtttttttgtgctggtgttattttttttcaattgtgatttgtgaaacacgtagttgaaagtgttcttggtgtatatttaggccttaagataatccagtattgaatgcatagtaactacaccacgaagcctataacctcgtaactcgtatctatacttcgattatttgctatgatttttgaagtatgttgcttggagaagaaggattagtttcgatgttttcttcgtgtatatctagggatttcacttgccgttaacttatgtatcaaatggtgaaaccaaccctcctaaaggggctttccttctcgatttccgaactcgtgaaccaaagatttgatttagtatatttcctagatttcggtggaaaatgtgatatggaaagttcgataaaatgatatgcgttacaaatcccgatgcatcttttttcttcatcatttggcagacatctggcaactcggtgaag

SEQ ID NO: 104819 - DNA, 957 bp, Mimulus guttatus
  Intron number 1 from transcript mgv1a020539m (locus mgv1a0 20539m.g) derived from phytozome v7.0 (chr-ID scaffold_39; pos 120872 to 121828)
gccctattccagtcgagcaacttcaggtcgaaaataccttccaccttctcaatatttatcgattgttctctcttaattttatgggttttatgtttctttgaaatgggttttctttaattcacctagatttttggggaattttcaaaatccgacctttttttatttgcgaagaatttgatgggtttgtttttcaatggtcgtaatccgtaaagatctatcattttggggtttcaattttccgctattcgattatgcttttgggcgacgagggatccgttcgatttcattgagttaggttgtcgattaatacaattcaatggccgcattgaggaactcttaaaatgatatggaaaattttgattgccctcaaatgttgtaatgccatatgcatctggtgaatttgagcggcatgatgttttcgctagattgagacgagggtttgggtgcaaatcatttatgattttagactgtcttttcatcatttgctacgatgagggaagttcgttgatgttctttatactcttatctagacataacagaatatggttaagacagttatttttgataagcttgggcaggcggaaaaaccctaagaaaattcatcgagctctcgttaagggctaagaagggtgcaactcaaaaaaatttccttgattttttccataataaaaatggattttgacatatgaataacagacgaaatcttttgtgggtttcgtccctcaattctcgttgttaaataaatgctaggggtactatcgtactaatgtccttactcagtgtagttttaaattactaaagcccgttgaatttcaagaagtaaatgtagctgatacctttagctcttataaattcaatttggctgtacgaaaacttgatatttatatagattctaaagattaatttatctgctattctttaggcatctgggattgctgccgttgacattaaaaagct

SEQ ID NO: 104820 - DNA, 895 bp, Mimulus guttatus
  Intron number 1 from transcript mgv1a002384m (locus mgv1a0 02384m.g) derived from phytozome v7.0 (chr-ID scaffold_83; pos 270570 to 271464 reverse strand)
cccgcacgctcagctccggcggacgtttttcccaggtttgattcgtttcgttactatttttatgcgtgcctttccgatgaatcgattttttttttttcattttctgttgcggttttccggcgagataactgatttatacgagtgttcccccttttaccgggaagtgacgccatagtctgtgtggaaagtgcattgccaattgaccagcatgtgtattcaattgacaaaaatacccttggaactattccaacttgctgcttttatttgattttgtcacgagggcaattttggaatttattttttgtgcaatgcttgcacgattcctattattccaataaaataatggcatttagcgcaaggagatttaattgatttgattgttgtggatttaaattatctaattgcttcgtagattactgcaccattatttatactttgacttattatttggtcaaatcaaaagccgaataggtcaatgcatttttcaccatgcccttttgtgtaagggataggaacaaattaaacatgctttatctctgtgtctatacttttagctggcaattaatggagaaatttcttcatgtagttaatattgcaacatcaaaagaagtgactgcatgaactaggaacacataattccgagctgtgatttatcgactgacgacggtttatcgacagattgttgcgaactttaacttgtgtactttttaatctgtttcttgaactgtgtcctgtgccgaaatgtattccttcaaagtcggaaattttgtcgttcgtcgtttctttaagtatcattgtatcgtgacatcgaatcaatagtaacttatttgacatgcaaaccttaaactgtttcaaattatgttgttgcagaagatttgtgccatttgcctcaaga

SEQ ID NO: 104821 - DNA, 854 bp, Mimulus guttatus
  Intron number 1 from transcript mgv1a003110m (locus mgv1a0 03110m.g) derived from phytozome v7.0 (chr-ID scaffold_37; pos 611851 to 612704)
gtacagattgggtgagcgaagtgacattcctgaaggttactgtttgttctgttttttttttttttttttttttgttaaataatttatttattatttattatttttatttaatttataataattatgaaaatcaatcagataatatagaattgggtattttggtaatttcaggcagccctaaatttttcttcatattttggtttaccctaaaaattacattaaccaacctattgactggatatgtttttgaatatttctaatctgcccttacatttttcagaagcggttatgcgcacagcaaacacacacacacacagtagaacacagtttaacatttgcgcttccgaaaaaaattgaacgctgaatccttcctcctttctctctctctcaatccccaagtaagagcattcatcgataaatctcgactgtaaattctcacttttgcattccttatggttatcttttatatcaatctgttagatttatttacgtttcattgcttcggatattgaatttggaactgacgtatgttggcataaaatttcaatttttcggctagatttttccaattattcaatcgttctcatgattttgtgtcggaattaggatttttttagttttaataggaaatatttttttagtttgtgcactcctgcctgtgcggattggttccttttatacacgatggtgatgatattttttttaaattctatggtgtatgtttttgtggtggttcaattcatgttgaagtagaaagatcttttaaagaaaaaaaatctgcattttttatcaccttgtataaagcttctacagattttatttgttgtagttaggtcaacaaaaccccaacaaaa

SEQ ID NO: 104822 - DNA, 783 bp, Mimulus guttatus
  Intron number 3 from transcript mgv1a009651m (locus mgv1a0 09651m.g) derived from phytozome v7.0 (chr-ID scaffold_3; pos 3792214 to 3792996 reverse strand)
gattcactttcggtatgtttattacaactgccgaataactcgaaatgtctttgattatcttccttattcaagaatacttgtttatctgcattgacattattccacacgagctttttgattttgactttggatactttggagtcttctttttgcttctacttgtagatgtagctaaactgtaaacaagatgttctgacagtccgattccgattcgaatatttcctattttggaacaatatttttcatttcgaattccgaatgttcgatttccgattttttggaacggaattggaatacatattgattcccaagatccgattttaatttcagatttttaattttgttttttcccactttgaatatcaatattattatgtagtttatatcataggtgactgagaaaaaattgaaattccgaattccaccaatttcgatccgaaaaatttccgattttggatcaagtttattcattccaatttccaatcttttttcggaacggaattggtgttagtttatcacttccgattttttttagattttttccggaagtgctaatttcgatccgattcttcgatttccacccctaacttggattgatgaaaaagaatgtcgtaatacaaagcgacctcacttctctgttaatggctgtcagtcaatatatttatatagcttttacgaaaaacagtatattgtttatatttctttttgtccatattttcttgatccctcgtaactcttatatttgcagctacgactttaaccggcctccattttgccgcaact

SEQ ID NO: 104823 - DNA, 572 bp, Mimulus guttatus
  Intron number 2 from transcript mgv11b015099m (locus mgv11 b015099m.g) derived from phytozome v7.0 (chr-ID scaffold_1 58; pos 26631 to 27202 reverse strand)
attgacagaggcgtgcttgattgctgccagcattggtatgttaattgtgataatatttacttttatcgctttaatctcttgcgatgctatcggcattgttcgtttgagtatttatgttgttgttaatgtttttttttttttttcgtttacaccgacccttttcaccaatctagcttttatttttactttctgctggaatctggatattttacacttaagtttgaagttttttgaaaataaatttaatctcttgtgtcattactgtaatttgagaggattatacatttcagaaagaaacgagcttttctgtagtctttgagctgaattctttcttgtatatgatatctatcaattcaatgggtctgttagcgtctatcttctctcgacttagtatgatgagttggtgatagctaatctgtgggtgcaccctataaatgggtaatctcgaatgtacatcatcatacaaagaaagtggtttaaagtccttcagtataagcttctctctgctgggcaagttcgtatatttgttctgctgattttaatgatcacttatatctcaggttttgttttgg

SEQ ID NO: 104824 - DNA, 744 bp, Mimulus guttatus
  Intron number 1 from transcript mgv1a013506m (locus mgv1a0 13506m.g) derived from phytozome v7.0 (chr-ID scaffold_429 ; pos 49924 to 50667 reverse strand)
ccgaagagaagagaatcgcaaatcaccgtcttcaggtaattgatgttcgaactctgagaaattgttatattagatttttttttttttttttttttttttttttttttttttgagtttatgcgattcgcgaaggaggaaagtttcgtggatatactctcttctttctgggctttacagaaattgaaggttgttcttatcagttcatggcttactcgatcagttcatgaatatctgatctgtttgtgtgaatttttcttttacaaatttttcagttatttgggtgtttttgaaattattatgattatgcaaaaccattttgttctgcacctaattcaaacaaatcagaaattatttggggattattgtgctcgatctctcttataattggtgtttggcactaattttcatcgccaaattacgttgtgtttagttcatgtaatttctcgagtaaaaattgttgttgtaaatcttggaaatggagttaattgggttagggtttagttcatgcgatttctcgagtaaatcatgaaatcaacagtttgggatgttgattccctgtaattgactgtttacggacagtttgaaattgttttcgcaacgtatactcatttccagtgtcggtagttttcaatctttcaacagtcgaggagattttcttttccatttattgtgcgagcgatccgatctgttattaaattttcgtgtgcaggaagcatccggaatattctagttgatcttcagtat

SEQ ID NO: 104825 - DNA, 766 bp, Mimulus guttatus
  Intron number 1 from transcript mgv1a003789m (locus mgv1a0 03783m.g) derived from phytozome v7.0 (chr-ID scaffold_4; pos 796689 to 797454 reverse strand)
acacttttggagcaaggtgaggtggtggactggaggtgtcactctcttctttaattctctctctctctctctctacacttcgctgcctttctttaattattattttaaaaaaaagtttaatttagttccccctccattgttaaatcgattaaaaattgtaaaccctaaagttgtgatctttgtgactttctctctctttcttttttgagtgtgggctgctgctttttcttggtttgtgggttgtgttttctttcagcattgtggggttttaatggagccctcttgctaggtttttttttttgctgagaagaggtagccattgttcaagatctgtgctttttcattgaccctttactgttttccagctgtctttttaaaaaaaaaaagttcaatttgatgctgatctgaagcatgaatttattttctcaatttagctatatgtgcttctgaagttgaaaagggttgtgtttggaggtaattaaaataagcagataattctgaaattgtaattgtgatttactttttagttactaagagcttcgattttttgttggatttgtgttatcttggtagatatgaagaaaatcgtcatgggttggttctacactatgttccgttctttaatttttgcccgtattgcagagattttgtctatcgaatatctaatcttgctttaaactaattgccattcctttaactagtttatttcattcacgtgatttggttgtttatgtggatccgtcttgtgtctttcctgcagatctcg

SEQ ID NO: 104826 - DNA, 481 bp, Mimulus guttatus
  Intron number 1 from transcript mgv1a008929m (locus mgv1a0 08929m.g) derived from phytozome v7.0 (chr-ID scaffold_22; pos 171116 to 171596)
ctttggctcagagaattcaacgactccctgtaaaggtaaaaattaaaaattaataattaaaaataaataaatatatacattttgattttttttgtgtgcaaatgtatttgctctgattgcatgtacatgagtagcagagcactgcatgtacaaattaggtgttttcgatgccggggatcgtgttagcttaaattttaattacatgatccggaggttaatttgggaaatattttctgttctatagattcaatcttcaaacattggaattttgcaccatagatttagaaattggtactaatgttatttcccgatcgaaaatctgtcacgtgcaagccaattcgagtcggttttcgggttttagattggattgaaatcagttgggatctcaattattagtttcattaaattaataatcattatgagatcttaggagatatattaatgagaattagtgcaggttggattttccgagagttcaata

SEQ ID NO: 104827 - DNA, 766 bp, Mimulus guttatus; identical to SEQ ID NO: 103439
  Intron number 1 from transcript mgv1a014708m (locus mgv1a0 14704m.g) derived from phytozome v7.0 (chr-ID scaffold_1; pos 4689359 to 4690124 reverse strand)

SEQ ID NO: 104828 - DNA, 643 bp, Mimulus guttatus; identical to SEQ ID NO: 100772
  Intron number 2 from transcript mgv1a015293m (locus mgv1a0 13337m.g) derived from phytozome v7.0 (chr-ID scaffold_48; pos 846894 to 847536 reverse strand)

SEQ ID NO: 104829 - DNA, 606 bp, Mimulus guttatus
  Intron number 2 from transcript mgv1a015065m (locus mgv1a0 15065m.g) derived from phytozome v7.0 (chr-ID scaffold_69; pos 54682 to 55287 reverse strand)
ggagggcctccgttgtacaaccaaagaagaggtagctaactacgcctctcgtttatttgctcatatatatgtggcttaaagtcttgtacgtttggctcctttttacgtgccgtttcttcaatttcattcaagtgttcattgaacatattataggtgctaactgtatcactgctgctatgtagttttctccttttaatttgatgctaatttactctaattttcccggtaagataagtgtactcaaatccatatccgaaatacggcatatacagaacgaaacaactataccctattacacaaacatatccagataaactgtacatgattgaaaatatgttcactttccgagctttttcgactccttgtcaataatcaaacttgatcggctttcttctgttcagaaatccgagtaatttctcacttaaacatgcagttcattatgatttattcttgacatcttacagaagaatgaaactttgttttatcggatcacgttgcaaattaagttcgatattctgctctctttttatatatatatataatcttgaaactgttgcgcgtcttttgacaggtcatcctgcattgattggccgtcaccgcccattc

SEQ ID NO: 104830 - DNA, 909 bp, Mimulus guttatus
  Intron number 2 from transcript mgv1a004422m (locus mgv1a0 04422m.g) derived from phytozome v7.0 (chr-ID scaffold_114 ; pos 351617 to 352525)
tattcgagaagcgcttaattgagcgccacattttggttcgtaactttttactgcataataatactgcttcgtatagtgtgtggttgaacttgtaaatttcattatgtggctgagttatttgtttttgaattgtggccgatttctgaggtaatgtatgaagagtaggtgaaattttctgaagagaggttgtttgatttcttgaatattttcattttaagtggtaatgattgattggtaaaaatagttttctgtaatgtggtttaaggcagctataggaaaattttgctgaaattaggtgtgattcataaatctctcattgtagtattaagtgttagtattactatttgagttggtgaaagtatgtataggaaattttgcccgttaaagagtatgtgaataatccttgaatttaaagagaaaataaagttttctcaagcatgatgtttgatttttccattttttatatgtttcgaaatcttggttgaaatataagaattgtgaaaatgtttagtggattgtagtctacaaagataaaattagaataatcttctgattgaactcagaagcagcatagtagtttgtatttttagctacactgcttagatgacatgacgtgatttcctagatctatcattgtgttccaaagtaaactaggagtatgtaatatggtgaaaatatgtatcggaatatagcttcttttgttgatctcgatgaatttctgtaagtggcgacactttgatctcttgtaatgattgttatcatagttttagtttctttttatttgcttcatgagatgaaaagacccgtccatggtttcaataacttgaagcatccatctaatatttaatgtttttggatctctccgtgataaaagatgaattgttatgtttttctgatctaattaggatt

SEQ ID NO: 104831 - DNA, 745 bp, Mimulus guttatus
  Intron number 1 from transcript mgv1a011100m (locus mgv1a0 11100m.g) derived from phytozome v7.0 (chr-ID scaffold_8; pos 2933307 to 2934051 reverse strand)
gagtctgccgccgttctccgctctttccaatgtaagtgcttcccctcccctcctcctttccctctccgtaaaatgttcgcacgaaattgtgtgttcagatttctgatgcgtttggtgtatgtatgtgtggcaacctagtgatttgtgtagctactttaatctgaagttgtgtagttactgcgttttgagctgaagattattagcttgtattttacgattttttttttggaatatgttgttcgtacatttctaatttttcacacacgaaatttaattctgaaaataaattgtatgaaggatgttttgaatttatcgttgttgtgatttagatttgattcattttctttattgtgagctcagctgcgtagagattcaagggaataaaattgaaaatgttaatcatgggtcgtttaaatggttctaaagattggaagaataggtgtctaactgattttgatagcttggcctcagtcaaatgtgttgtgctattgttacctttagccgtttattcacatttctaatcgtcagtctggagtggaagaatcaaatcaacaagttcatgttttcgtgactcaattgccattgctgattcatcttgcacaatttgagtagttatttcgtatacttaaattggtctcgggggtaaaagaatagctctgaatcttgcctgatctgcagttatcttcttacgtgaataactcaactatatcttaagcagctagttgatgcttactttttttttcag

SEQ ID NO: 104832 - DNA, 407 bp, Mimulus guttatus
  Intron number 1 from transcript mgv1a024464m (locus mgv1a0 24464m.g) derived from phytozome v7.0 (chr-ID scaffold_124 ; pos 34562 to 34968)
tttttccgcggtacgtacattgatgtatgtattggattttaattttagaaacgtaataattatgttgataataagaaacgtaataagagaatgtgtcgttggcatactatttcggatcatttgataattttaatttcatgtgatgaatcttttagctttttaatttgatttttagattaagggtttgttctagtctcgtagatcgatcaaattcatccaaacaaattcaagatttttttattatggactcgaaatccgtaacttctagatggagctataacgaactttgaattttgttttcattgcagtttgtcagacgcctctacttagttttgtcgttgtcttcttgattatatttttggcatcgaattccaatgcggttggacaagagagagttgtagcgcgca

SEQ ID NO: 104833 - DNA, 1059 bp, Mimulus guttatus
  Intron number 3 from transcript mgv1a013716m (locus mgv1a0 13716m.g) derived from phytozome v7.0 (chr-ID scaffold_25; pos 939467 to 940525)
ccttctctctctcctcctactgaagtctcgtctgtgtatgaatatcattctctccgtttttttccttgccgtgtttatatacttctaattgtcttgtttatatttttcatggaattgaattgtggttgttggatttgctgatttaaattcactttcttatgtgatgatgtgtttatggtgtgaggtgatgaattagtgtacagatgtacggattgttgtatagatataagtttgtccggttctgaattattccgatggtagactatagatggagacgggatattaattaatctaagcgtggtatttatatattattcgttaaaatatctgcgctttctctatgatataagttcaagcatcggaacttggccgcactttagtattttgcagttttggataacgttacaaaaacgtctaactctcggatttctcagtgaaccgccccaatatttttcttgaagatgtagttgtttttttgtcggcattgatcaccttcaaagtgtagtttctgctgcgctaatgtgcttacatttttaatccacatgtgtagctttatatatgtgtatgttgtgtctatatctgattgtatttcttttgtccgtatacattactctatttcaatttgtcctgctactcgtgtttaaccttcttttttctccttttcggggtgatttttttcaagaaaagcccttcctatttttgttttcctaaatttatgcaatttttcgtttcgacttctaaccctgctcagttattctatactgtcaaacaagggagtccagagctaggtggtatttaaaacagagttgacatttacgaggattttttaaatggctgtgactttttttgagtgaataaaagatctgaacttgtcgaagattcttattagttatctttcattgtaacaaaaattgttgcgggatggactctcgatatagcgagtgaaatataggggttaaatgtattttgctatatgtatattattgtactaatttctgttgcctttgacttttttttatcgtagaggctccaaagtatttccttcttttgtcaagttct

SEQ ID NO: 104834 - DNA, 424 bp, Mimulus guttatus
  Intron number 1 from transcript mgv1a008747m (locus mgv1a0 08747m.g) derived from phytozome v7.0 (chr-ID scaffold_122 ; pos 629840 to 630263)
cgacacaagctattggaataatttcaattggggtaaattacatttctccccactccaattttcttttcagtgtttcaatttttgatttgtgtgtgtgtgtgtgtggtaattgaattaaattatagtttcatttgctagagaagagctggtaatggaatgaaaacacattgatgttgctattacaaggcttgtttgtttgtttgtttttttcgattttccgatcaagtgttaaaagaatcattaatgttagctcataaagttcagattgctacagtttgtctagtatataaattcacccgtgattaatgccgtcatgattcgtgtaattagattgccaacaaaaaaaataataaaaataatcgattttcttgaattatgttcgatttcagacaggaaattgaaggctgcaaagtcagctttcgat

SEQ ID NO: 104835 - DNA, 559 bp, Mimulus guttatus
  Intron number 3 from transcript mgv1a007225m (locus mgv1a0 07225m.g) derived from phytozome v7.0 (chr-ID scaffold_123 ; pos 10749 to 11307 reverse strand)
tttctatttggttcttcgagcacttgacacagttggtaagatctctattaataattttgttttagtcaatcattaagttgtgaaagaattgctcctgaaaaacatccctgcataactcgtcttcctatcgtcttagtgattaaatcatttaagaatgcctattggtcaagctattttgtgttatgatcaattgtgatttgtgagggttgtaaatttggattgacctttatatacttgttgttctagtatgagtgcattattttgaaacatgttgattcacctcctagcattataataaagagttagaaacatggatgaacgtcagaaaccccaacagctcgtttgcagaagacagaggtgacatttacttgtcttctccagacctttgattctcctcatttctagatggatctgaatgtattttcaggaggaaccaatacttgatgcctattacctgaacattaacatggcagcatattattcatcgtttatggattaccatttttcatcgccactatctaaatgacattttcgtgcttggttattcatttgacagagg

SEQ ID NO: 104836 - DNA, 509 bp, Mimulus guttatus
  Intron number 2 from transcript mgv1a007225m (locus mgv1a0 07225m.g) derived from phytozome v7.0 (chr-ID scaffold_123 ; pos 11314 to 11822 reverse strand)
ccgtcaatttctctctctctctctctctctctctctctctctctctctctctctctctctctctctctctctctctctctctctctctatttatattttaaaaattgcggttacttgtattgttcatctgttgtagcttttgttgtctctggaaaggttcggctaattttctagcagctgtcacgcatgcagttattaaatacttgattgaaatttgaatgtgtatttttaatcagctccaatgcacgagttcaattctatggccgatacacaatttgcattagtataaacaaaatccgatagaacaaacagagttactagtagaagttctgaaaaatgagagagattattgattccatctactaaaattgatgttatgacccttaaactgtttcatgtcatatcctggaagagttgatgttttgattattgacttgctagaaagtctctgtatgtatttcacctgtgcaaaaattaacttcattgtaaacttcttcgactttgcaggt

SEQ ID NO: 104837 - DNA, 799 bp, Mimulus guttatus
  Intron number 1 from transcript mgv1a007711m (locus mgv1a0 07711m.g) derived from phytozome v7.0 (chr-ID scaffold_1; pos 1049814 to 1050612 reverse strand)
gggcgggtcggatcttataccggacgcgggttacggtaaatgggagatgaactccaacaaacaaagcagatgatcctccaatcgacggcacaggattgatgaaacgatattgtgaaatggatttaatttggggaggtaatttgtttcaatttcttcagattaatttatttttccagaagaacatggttaatcaaatgttactgttcagtaaatttctgtgtgtgtgtgtgtttttttttttaaattaaattaaatatatatatttgtaattgtaataataattactaaaaaagatacagtgagtgatgacatagttccagacaagcgcattgaagccttaacctacacaatcttatggcagccacctcacctcacacctcccatctaccccctcaccctacccccaccccccttcttctgttgtagtaaaaaaaattaagagggaggggaagaaaaggaaaacctataaataaatttactgtttcagaaagaacaaactccagctcaagaaacgtgtgcatttatataccccacaactatttatttttttgtacattttaatttatatttactgtattttcctccgtcttctctcttcagggtttgggttttttttcccatttgcccagttctcaccctcacagccgaactcagtttcacctcttgctttctgtcccctttagttgattctctctctctctctctctctctctctctctctctctctctctctctctctctctctctctctagtatttgtgttgttttgtagaaacagtaggagcggtgcttcttttat

SEQ ID NO: 104838 - DNA, 591 bp, Mimulus guttatus
  Intron number 1 from transcript mgv1a005759m (locus mgv1a0 05759m.g) derived from phytozome v7.0 (chr-ID scaffold_2; pos 3232198 to 3232788 reverse strand)
ggatcccgaggatttacctggttagtttttgctttattacaatcatttaggtttactatttatgattgtttttattttccggatgtagtttattgccggaattttatatactgtgggatttttttggggtagtaattttgttttatgtttttccgattgattgtttccatggattttttgacttgtaattaatggtttattctttcagtttgtttggtgtgttaattgatgtaaacctgtgtttgatttctggagtaattgattgttttttcctgattttttgtgaggaatttattgttgttttatgtttcctgaattagatttgctgtattttttccttctaaatcagttgtcctttaggaaaaaatggagtaattgtaaataaatgagctgctacctgtaatgattttcgcctttcagtgcacacaactaagtgtagtgttagttagctatgtggaacagaattttgcaagggttgaatagcaaaattgagttgttaatttaccaattatatgcccaccgtttcgtgttttctttcttttctcgaatggcataattgttttctaactcttcgtacatctaaatgcagag

SEQ ID NO: 104839 - DNA, 960 bp, Mimulus guttatus
  Intron number 1 from transcript mgv1a022325m (locus mgv1a0 22325m.g) derived from phytozome v7.0 (chr-ID scaffold_292 ; pos 16862 to 17821 reverse strand)
ctggcagcagcggcggtcttacaaactacccctctgtggaggctgccgctctttcgcggcggagtcagtggctgtgatggggcggccttcctgaaagatggggctgagccgccgcatgcaagggtgaacagcatggagatctccatcttcaagaacaaacaaaccttttcgaactgatgttgccattgtcgataatcgagatttcattgttcgagtggtcggaaagagtcagggaggtggttgatggaggcgaggagaatgaattggtgtcgagatttatttcggttgggtttttattgttagtgttgttgtgtgggattttgggcttcaattcttcgatttcttcagtggagacacccctccaacacctcgtgtgcactgtttttccagcttcatattcttctccttcattttcagcagctgccgcattttcttcatattgatggtactgatcttgtcgttttgtaggtaaaaatttgcgctgtgggtgagccgtggggcttggacagccaatctccgtttcatttcccgtttttttaattccccacgcctgtaaaaccgggtgccgttttaatagtatatatatatggggataagcccttttctttttatgcaattttttttgccttttcttttggcccatttaatacctaaactacgccgtttgattccctcccaccaatcatcttctcacgttattttcttttttatttacttctggagcagctcgaccgtgatgcgcttgcttgatttttccttttcttttaatctgttttctgcagaacgacgtcgttttggacggctgaagctcaattgttatttttattttctttttctttcacattctattaaaatctaatagaaattaaatatatatatatattttttaatacggggtcttctttttttttttcttttcacgcagtcgcacatttttttgctgaattgtgacgtttgttg

SEQ ID NO: 104840 - DNA, 608 bp, Mimulus guttatus
  Intron number 1 from transcript mgv1a019413m (locus mgv1a0 19413m.g) derived from phytozome v7.0 (chr-ID scaffold_27; pos 1151719 to 1152326 reverse strand)
gttctttatccactcccaggtatttgatttagaattcgaatggggcatttattaccttttttactcaaatttcccctcatgctccgaattaatggagctaattcatggagagagaattattagagggacataatgttttagtccatttcgctcggattcatgcatatttattagttttcttattacttgtgccgaaaccttgaagtacagataatatgaaacggagggagtaaatatagcccatggttgcttgaagaaactaatcaataaatatatgtattttttatttcagtattatgttttgctttttacttcacattacttaaagattctgtgaatattttttgtttgacaatgacaatatttgtcgaacgcctaatcctgtgaagcctatcacattcttgaatgtactttgaacttgaaggaactcctatacttgtatttttttcggacggaggatcttttcgaatgtatgcgtgtttatatgaatgtatgcagcgataaacattttcatttttttgtcaaattgtcacaaaagatttgtgctgatttgatgttgttccgtgtcattgattctattaggtgcttcttcgcgttcgaagctttag

SEQ ID NO: 104841 - DNA, 652 bp, Mimulus guttatus
  Intron number 1 from transcript mgv1a025598m (locus mgv1a0 25598m.g) derived from phytozome v7.0 (chr-ID scaffold_10; pos 1760490 to 1761141)
taagggtggagaagtcggctgggcagcacaacccagtaagcctaattcaattgctttcttattcttcttctcttcttttttaggttaatttcataaaagaaaacattaaatcattcgactgaccattacttgttggaatgcctaatgtatagttagggttggagctttaaacaatcaattattgatgcaatttattggatgtaacaaattggggggcaaaaaataatttgtttgtcagttaaatatttggaaccctaacacttgcttaaaagctttgattaacaaggcatttctggtagagcttgctttattggtttagttttcgatgtgtttttggtttcttcaatttgttaggtgttctgtgccttgatgtatgaactagggtctccatgatttgagttgcttaaattgtttatgcatttttctttgattttaggataaacgggaagtgttatacttgtaatgggctatataacatggttttcgtttgtttgatgtttgttttcttctaggattggttgcaatttattccatcattaagctaaaaaagacctgcttattactaacggctgttcgttaatcaccatcttaatacaattgattgaatttctgacatttacgtttggttgaaaaaaaatgtcagtttgggcgg

SEQ ID NO: 104842 - DNA, 191 bp, Mimulus guttatus
  Intron number 1 from transcript mgv1a024284m (locus mgv1a0 24284m.g) derived from phytozome v7.0 (chr-ID scaffold_11; pos 650726 to 650916)
cctctacgtcaagattattttgataagaggatatttgtaaaaccttcttcgagttatttgaaatgctcgaatggatttaaaaactgatttcttacgaaactttgagttttaaagaataaaagctagtaagaagtataaaaaaaaaaaaaaaaaaagttctttttatatacattcgaaccactgttggtcat

SEQ ID NO: 104843 - DNA, 810 bp, Mimulus guttatus
  Intron number 1 from transcript mgv1a025940m (locus mgv1a0 25940m.g) derived from phytozome v7.0 (chr-ID scaffold_54; pos 920168 to 920977 reverse strand)
aagttatcgcccgccttctggtataaaaccccctttccttttgtgaattttctctcacaaacacaaacctgtgtctgtgtgtgtgtgttttgattgaatgtgtttgacatgtttaaaatcttgaatggagatgcagtgattttctttttctacaaatgcttgtttaatgtgtgtgagtgtgaaattttgatttcgataaactattatgcaaacctcctttttgcctttttcgggggctaacacacagtgtgtgtgtgtgtgtgttttcccctcaagtttagagaatcttgaatggatatgcagggaattgtttctgtaaatgcttgtttaatttgtgaggatttttcgctttctatgaagtttcgatttcatatccatgtgtatttcaattcaagagatttatttatacatacacatgccgattcgcttgtgtttatcgctctcgtttagttaaacatagccattcttcctttagtatttggtgtatcggtaaacgtctgatttggttgtgtgtcataaagaaaaaaaaaacactcgaaactgatgtgtggatcaagatcgagtgattcattgactgcatcttttctttgtgttcgtcgttacttaattaattcaaaactggtttctcgaaatcgcggcgatcgttttcattgttaattgaactttcttgaaatcaatgcattttagaatatttttttttccacttaattttctcggtactgtcgttctcgagtgcaaataaaattaagtgttccgttttgtttgttcttttcagagggcagaggcaattctaaagagggtaggtcaagt

SEQ ID NO: 104844 - DNA, 628 bp, Mimulus guttatus; identical to SEQ ID NO: 104029
  Intron number 1 from transcript mgv1a006300m (locus mgv1a0 06280m.g) derived from phytozome v7.0 (chr-ID scaffold_85; pos 522923 to 523550 reverse strand)

SEQ ID NO: 104845 - DNA, 719 bp, Mimulus guttatus
  Intron number 1 from transcript mgv1a010946m (locus mgv1a0 10946m.g) derived from phytozome v7.0 (chr-ID scaffold_32; pos 911413 to 912131 reverse strand)
agaatttgtcgacggagattgccaagattctgccggtaacaaaaattctctctctaattctttgaattaattgttgggtttagacttctttagagtgatgaattaaactttaattgtttaaaaaataattatttttttgaaaaatgaagtttgattcacgtttcaccgccttttctagtctttgtgatgtatatttatgggaattctttatttttcatagtaatttaattgttttcttcatgatggaaattgtcggtggtttcggtttcggtttcggtttttatgcaaaattggatttatgggatatttttattattttttatttatgggaattctttattattcatagtgatgaaatttttggtgttaggtaatttattaatggattttccagtttcttgaattttttttgtctaattggagtatatgacctaaattgattagttgatttgtggtgaaagtggttaggtttcagatcttaaccaatccgatcggatttcggattaattcctcttcgtgattatgttaatattgcccggtagttatcatttaatagacttgtgtaattacgttcgacttcgatcacttgttaaagaagagtagttgtgttcggcaagtgttgtggaatttatacgtagatttctaattaaatttgtttttaaattaaattttcctgattttaaggattcgcaagaaactcgagcgctccgtggcagttt

SEQ ID NO: 104846 - DNA, 562 bp, Mimulus guttatus; identical to SEQ ID NO: 102168
  Intron number 2 from transcript mgv1a021398m (locus mgv1a0 21398m.g) derived from phytozome v7.0 (chr-ID scaffold_9; pos 3247381 to 3247942 reverse strand)

SEQ ID NO: 104847 - DNA, 245 bp, Mimulus guttatus
  Intron number 4 from transcript mgv1a008996m (locus mgv1a0 08996m.g) derived from phytozome v7.0 (chr-ID scaffold_58; pos 1094204 to 1094448 reverse strand)
ataaagtaccaggtatatcctaattattattgttttttgtatcagttaacttattaaccaaccatgtataaatatcgggaaactttgatgtactcgattatttatcatttatgttcatgaagatcccattttctctctattaactaattgctagctttaagctctgctcccataattcttgcttttattccctatgtttcacttaaattagttttttgatgcatatattttgctttattgcagtg

SEQ ID NO: 104848 - DNA, 749 bp, Mimulus guttatus
  Intron number 1 from transcript mgv1a010596m (locus mgv1a0 10596m.g) derived from phytozome v7.0 (chr-ID scaffold_336 ; pos 13575 to 14323)
ggccgacggaggagaggcgaaaccgccgtgaatcggtacgtgcctactttttcagtcctgtaaaactgaattagggtttctcaactagctatttttcccgctttgccgccgaaggcggaggaggcgtggtggcgactggcgtctagccgcggcctccgcctttaaatggcgagaactcgaattcatctccgcccatcgccgtgattctatgggcggcgccgatgagttttctctattgaatgagatagaattctttctgattttgatgatggtttaatgttgtttttttttgcgaattgacgtgcatgttaaaggttgtttgtattaattaattaattaatcaaataaaaattttgagggatcgtcaatttttagttcttttatttatttatatttttgttaatttatctagaatttggaggtgatttacgattctgtatatgctgggacattcggtatttgtgaaatgcagcagggtcaaggggccatggccccccaacatttctcaaaccttgtaattttatattgaaatatttttttcgtgtataatagcgttaacgggccccgctcagaaaactttaaatgcatccggctcccgtggacttataatagcttgatcttattaagaaatttatttgtgaaatgagttcatctattttttttatttggttggaagattagtatttctgccattttacgatcttttgtcgtgtctctttcgtttttgtagagaagatccctatcctatc

SEQ ID NO: 104849 - DNA, 677 bp, Mimulus guttatus
  Intron number 3 from transcript mgv1a010596m (locus mgv1a0 10596m.g) derived from phytozome v7.0 (chr-ID scaffold_336 ; pos 14840 to 15516)
gtagctcgatacatcaaattccaaggtttaatattacattttttttgtcgtgttccttaactattgtcgtgactttacttttcaattatacctcaataactataccaaaccgaaagcctcactaaccaaataatcacattaaacatgtcggttcgataaattaccaagttttcgtttcgattttcttcatttggtacatctgtacaccataatttgggaaaagggtcactttattttttgcagccacgttggcaagttcttctgaatcccacgttgggaaaaggatgaacattaatagtgaaataaatattttataaattcatagtgctaatattataaattgaatagcgagccaaaaccataattgaaccataattgaatgcctaactggcatttcagttggtattggataaataatggattttaagtttacgcagtatgtcgaattgtgaacatctttaattatatcgggtctccccctaaagtggaaaaaaatcaagaaacatttggttgctctattacaaattagtggttgtgtggttatatttgctctcgttgtgctcttttgtgcttcggaattcaaacatgttaatttcgaatatatttaataagttctgatgtgattatttttcgtgaacataggctggacgatctaattttggaggctataacaaaat

SEQ ID NO: 104850 - DNA, 908 bp, Mimulus guttatus
  Intron number 1 from transcript mgv1a000351m (locus mgv1a0 00351m.g) derived from phytozome v7.0 (chr-ID scaffold_92; pos 296643 to 297550 reverse strand)
tccttgttaaagctcggaatttcctcgtttttcaggttcttatttcttcattgagttaattcctttttttttttttgtgtgatttttgtttttaaattgagttatgcttgtggatttagtgctaaggcaatattgttacaacagtattcggagtaacatgctaagttttaaaattgaaataaatgggaaaaaaatgaagaaaagagccggaggaaaattcccaaattttttgcttaatgctgaactggaatgatgaaagccgtgttgctactatcaactaagaaatcagaacaggtgaactattaggagtgttgttcatttaagagagtgcaggtgaggtggatgtaatggtaaaatttaaaaaataagttcgtattattgtaggattaaggcagaaatagtggaagacgataataacgagatgattccctagtcactcaaacacgagcccagttgtcttgtatgcatgtgctcaccgtctgtatggtttacatgtataagtgtattcctcatctactaatatatttaatttttcttttatctgattatcttttaactctgggacagagagaggcacaacagacatacacgcaacaatatgaacttaagcacgtgtgcgtttaaactttaaatatatcctataaattataagtcaattaatttttccgagtagagatcatgcatatatgtgtttcatcgcacatacaatttacccatgttaattgtaatgggaagttctagaataatctgaaagtgctctagcttctcaatcgacgacttgtagaagcacataggtgcaaaaagtctagaatttgatttgaattatgggcttggttgtgttcttctacataatgaattctttttacgactcagggtgacgtggagtccattgcttctaagaatcctaa

SEQ ID NO: 104851 - DNA, 512 bp, Mimulus guttatus
  Intron number 1 from transcript mgv1a006993m (locus mgv1a0 06993m.g) derived from phytozome v7.0 (chr-ID scaffold_3; pos 4211204 to 4211715)
gcgcatctgcggtggatttgctctgagaattacaggtcagttcacctttttccgatttgttattattgtttttttttttttttttcttttaatcgtatattggattcttcattttctgtgttgaattttttcaatttctgtagccctagttgcataaacgcgagtatgattttgatttatctgcattttatgattaatagtaatgaataatgagatgaacatttctagttgatagctaaattagggaaatatatgtgaaatttcaagtactaatctctactatcagctcgtactgaagctttaatcttgacttttatagcgagagaacagagggaaatggttggggaacgatgatataatgatctgctgtttttcttgtgcttttatctttgatttttgttattgtatcgattctcgaagatttttttttagttttacatgttttcaaacagttttatttattgccaatatattgttaatatctgcagaaattcagatctgaatccataacc

SEQ ID NO: 104852 - DNA, 458 bp, Mimulus guttatus
  Intron number 2 from transcript mgv1a021814m (locus mgv1a0 21814m.g) derived from phytozome v7.0 (chr-ID scaffold_2; pos 1753015 to 1753472)
aaaagatttgcctttggatcaaatcaaactgtcaggtagggataattttgttctaaatatattccagtgcttttcttgttcaagcagtcggtatgcaaattttttttaatcacttttttgtatgtgcatataatcatagatgaggtagacagacatactttgaattggtgaaacctatgtttcatgtaacgtgtaatgtatttaatttaagcactaaaaattcaatttctggtgaatgagaaactaaacgattaatcttcatttgatagacaacaacaaacaccatgtttttttccgacaaatttttgatgctcgataactaatgcatgaatcctatggtataagatatctcttcttttaacacattcaatgatcgttccaccattatagtattctgatcgagtaaagaccaaataataatataaatcgatcgaattgcaggtacccgtcagatcctt

SEQ ID NO: 104853 - DNA, 429 bp, Mimulus guttatus
  Intron number 4 from transcript mgv1a004466m (locus mgv1a0 04466m.g) derived from phytozome v7.0 (chr-ID scaffold_5; pos 689867 to 690295)
tgggacttccgctttcttttcgtacgaataagaaggtttgcataatcaatttatcttcttcttattattattattactattttttgggatttttgaaattggaatttattgaatgttgtaaacttgaatatttgattcgaagcaaccaaatttacttgcagcattgcatcgattgttaaggtggaatgaggttttagttctcaattgacaacagaaaatagatacttcacttctaattaaaatgttaggttgtgtttggatgaaaggatttagagctaaggatttcaaatccataatgaaaattttgtttttatttttaaaacttagttttgctgtagtctccctcaggtaattgtctctgtcttatttaacggacgtgatgttatttttgcagactaggcaaggagtgaacaacggtaaaaaaaaagg

SEQ ID NO: 104854 - DNA, 417 bp, Mimulus guttatus
  Intron number 1 from transcript mgv1a006681m (locus mgv1a0 06681m.g) derived from phytozome v7.0 (chr-ID scaffold_7; pos 1117089 to 1117505)
tgtctattcggccaagcagtggtcgtggtggcaaagtaagtagggttgtgatgtattgctattggtactttaagaggacttttttcgtcttttatctatcgaatgttcttcttgaattatgttcatgtgaatatcgatttggactatgtatgaattttacgtgagatctcgagtttgaattctgaaaatggcaaggatggttcatggtgtgaggttcttgtagttggtatatgttgttttcttcgtgaaaagataatcgtttacatctttttttgccactttttaaaatgctgataaagatataatgtttgtttgaagtaattttcatgattatgatcaattagtttcgttttaatgaccgtagatttgttgtttttcccagtggccagaaatttctcactcagtgaatagacacca

SEQ ID NO: 104855 - DNA, 440 bp, Mimulus guttatus
  Intron number 1 from transcript mgv1a000409m (locus mgv1a0 00409m.g) derived from phytozome v7.0 (chr-ID scaffold_51; pos 106771 to 107210 reverse strand)
acgaggattcccccgaaattactgttactcgtcaggtaattttgatttagggcaaattattacctttaattttaaattttttctcggctaaacgaagatttctggtgtttgttgcaatcgtttgtccaaatgttttgtaaaagagcttccactttggttgtgtaagcttcgaattagggaaattgtttaggatggccagtgcctgcaatttacatctaattttgtatttttctttctctcaattttatgaacaaatacatgaaatttacatattaaatagtatgtatttgcgacaaattgcttactcttgcacatttattaagtggtgtaaagcttcaacttgtacggcagtggtcttctaggccgttcccctagacctgatttaaaatttattccattctgcagattgtagttggtggaaggaacaagtatttgatcaa

SEQ ID NO: 104856 - DNA, 982 bp, Mimulus guttatus
  Intron number 1 from transcript mgv1a008036m (locus mgv1a0 08036m.g) derived from phytozome v7.0 (chr-ID scaffold_92; pos 428000 to 428981)
gagaaaccagccattctgcaaccgatatagtggtaacgacattttatatgacttctgattttgtttatttttcttaatttggacttgagatgggattttgtaatgattcctttctatagataaggtgattttgttgtgattgatgactttgataagactgtgacatagagaagggcatggttttgaagtttaagtaggagctgttagagaatcctagtttttgaccgagtcggtcgaagtttattccacaattagtggtttttttttatttgctgtagtcgttctttcttttgtttaaggaataaaaagtcgagcgttgaaattaaagaataaccgtttcccgattgttattatgactgtgcagaaaatcttgaaatccctagccaatttcaaattggatcttttgggaattttgtagcgagtgatttgggaagatgaaattagggatgttatacattctcttattgttgcctttgactgactgaattgaagaaaatcatgatatggaagcttaatcttaaaccatgttgaaagcggtacacgtatatcacattgcgcagctttccattttaaaattgttaaactactaaaaagtttcaattatggccgttaggaactgtaaagtttaatgttggaataatataaagaacttaagacttaccgcttacgattatgcatgtttctatttgtcacaggagtgaatttttaaaatatagacacaaaagtttagatagaatggcaatcgatatctctctgcttaaaccattacgtagaagtgggtgaaattctttcgtcgttcttatttttggcaaatagctttgaaacttggagacataatatttgcaatttccattttcttcagggccaatatctgaatattgtgctacctggttttgatatgttttttgttatattgatcaaacgcataaaatcagccctgataaaacgcatgtctttgatgcagaaaattcatcagctactc

SEQ ID NO: 104857 - DNA, 635 bp, Mimulus guttatus
  Intron number 3 from transcript mgv1a024195m (locus mgv1a0 24195m.g) derived from phytozome v7.0 (chr-ID scaffold_565 ; pos 24796 to 25430 reverse strand)
ctgttaaacagactgctcttgccaacaaacgctgggtaattaattattgggcaaatttcactttcctaccttgtagttttggttcggtaacactttaccccttctactcttgattgcatccatttgtcctatgcacttgaaaattttgactctatgtggcacttgatgttagttgtcagacatttgacattaacaccgtttggtcaattacaaaaacgccacccctccccgattaaataattatttataaaaataaaaaacttctaaaacaacgagaaagcatagtccacgacagcaaccacaatttatttttattttttagattcttttttataattatttaaacttggaggagttgtttttttgtaattttcagaccttagaccaaacggtgttaaggtcaaatgtctgaaaactaccgtcgtcgaggagattgacacattgagaaaaaaattcaagtgcaggggtaagccaatgcaatcgagagtagaatgggtaaagtgacatcgagccaaaaaagtacaaggggatttctctcactactctctctctactttgatcttttaatttcgtgttgttcatatcttgtgtgaagaacagattcctcctccgggaaaagggtcattgtacatcag

SEQ ID NO: 104858 - DNA, 726 bp, Mimulus guttatus
  Intron number 1 from transcript mgv1a003825m (locus mgv1a0 03825m.g) derived from phytozome v7.0 (chr-ID scaffold_4; pos 3424178 to 3424903)
cctcggtgttttcccacagattgtcttggttcttggtcagtactatatatatatttatatatatatactttttaattctcacttgccttccatatttgattcagtttttcttttttctacttgtttttttttaattattatttacatgctgattttgtggttcattatttgccaaaaaaataataaaaaaaattacttgtcaagacgactggggttactttagtgatcagtgtcagacgtgttgaacatatatatacatacatacatacgtgtctgaaaaacccaatctggcaatcttccttattggttgtcttccactagctagcattgctaaataaataaaaaataaaaaatcaaaaaaagagtcaagaaaataagagtattttgagaaaagttgtagccacgcgattttaggtgggtgtagaacaaacggcagttgtcaacaaggataagatatcataacgacaaatttccaaaaaaaccacttgataacttttaaatcatagaatatcccacttgaatatgacgtatggaggaaaattcccctgtttatccatgttaataatacaaatttacaattacatcactaaattatgaattttcttacacgttcactcttacggtggtgtcatattatttaaagaaagattctcacatttcacttcaattatgactcttttgaatgattcagtatcatcactttcgggaacaaccgaagctgctcaa

SEQ ID NO: 104859 - DNA, 748 bp, Mimulus guttatus
  Intron number 1 from transcript mgv1a003855m (locus mgv1a0 03855m.g) derived from phytozome v7.0 (chr-ID scaffold_16; pos 2432527 to 2433274 reverse strand)
aattctcttaacccctcttggcctcagagttacaggttttttttcttttcttttcatgtatctatatctcgttttcttatgtgtgtattacgatttacgagtcgattttgatcaagattcgtttagttttatgttctaatatgattacttctcgtatccggttcgagtaattcgatttgattaaaacctttttttatatttatgatgaagttattaggccatttttagggatcacatcaactccgaactgacttgattacaccagcttatcacatctgaacatgtgataagttattttaagagctgataaactgttacatcttatttttactgttttttaagatcttaaataaaaagttggagtgtacgtactcttttaaaaagatcttataagcaccagcttcttttttgaatttttcagatctttctgaaaaaaaattccaaacactttggaagagcttataagttgttttaagatttttaagatcttaagtaaaaaggtggagtgtacgtactttttaaaaaaaatcttataagctctccaccagcttattttttgaattcttaagatctttcttaaaaaaaaattccaaacactttggaagagcttataagctcttaaaaacagcttataagcttagccaaacacggtctaatcgattttttttggtttgatattttgaaattagtaactttttttttgtgtgtgacaggcaatcgattgatctgtacagtagtgtaccatcac

SEQ ID NO: 104860 - DNA, 665 bp, Mimulus guttatus
  Intron number 3 from transcript mgv1a014580m (locus mgv1a0 14580m.g) derived from phytozome v7.0 (chr-ID scaffold_155 ; pos 204066 to 204730 reverse strand)
gcaaatacgagttggataatctcctcaaagaagaggtctatattctctctctctatattcccgttccatttagtctcgtttgttacaatttgatgtgtgtatatgtacatcatcttttggtcaaaacgatatgtaaagtcttattgccatgagttttttgtgcattcgatagttcgccgcccttcttttaatttgacaatgtgctttactttttttattttccttcatgaagtcccaatgagtttccgtaaatttataatttattgtggaaatttaggatgcgtttgataatgaatgccccagagatgtaaagttatttgttacgagatatgctcgtcaacatgtttcaatcatcatttatgatgtgaatcccgaactttggttatcatagtaagtagtaaatcaatatacattgatatggtatacgtgctggctaccaccatacaattatgactattttttattattcgagattagatttagtcgcttttgaataagctgtagttttttaaccatgttttacagaatgaagcaagcgaagattgttgatttatcgggttccttttttttttttttttcttttgtcttatttttgcgaattttgaagtttcaatttgcatttctttacagaggctatcaggagcatcgttgttgatttttgcaaa

SEQ ID NO: 104861 - DNA, 847 bp, Mimulus guttatus
  Intron number 4 from transcript mgv1a014331m (locus mgv1a0 14331m.g) derived from phytozome v7.0 (chr-ID scaffold_178 ; pos 194234 to 195080)
gagtatacccagagtgctcgaggtagttccgcctttttcttttatttttatttactggtgcttattcgcttttttattggtttattaacttgtcatggcatgaacttaagctacatcttgacaatttgaaattttgaaatgggggacctcagttcttctttatcgtgtctacactcggaaaacacagtgaggcaaaaccaaacttaaacttggtggaagcaataatattgagattagtcagatacgatttagcaacgtgtcgtctttatttgtgacgaattttctaagttgtgctaagatttgctagatacatggtcaaataataaactataaaatgtgttggccaaatcttcgacacctgcacctgtcactgttgtcttatttcttcgcttttagttcacactgacaaggtttttctcattcttttgcaacgagagaaagtgagaccaatgccttattgaggtttattattatcattcaaaaaaggttttgatttaggatatgtgtagtacaacaagagaacgaatgagaatatcaacttaaaaaaaattcaagtgtcgtactctgattgagcacaatctagacctattttgccgagatgagaagtgaaataatgtataagggaatttattagttggtacctagctagtgatttttagtaaaacgtacatttcagcggacgggaaatcggtttgtttttgtacacactacactttcaacctgcactatcgtgtacggaaacactttgtgctctatatagagttgtgtgttcttcttctcggtaaaatcatctacttatctaaaactatatttaatgttatttcagttattttcttgccacaggaga

SEQ ID NO: 104862 - DNA, 668 bp, Mimulus guttatus
  Intron number 2 from transcript mgv1a012445m (locus mgv1a0 12445m.g) derived from phytozome v7.0 (chr-ID scaffold_85; pos 645063 to 645730 reverse strand)
ctccgccttgcgtgagttttttgcgcctccgtaattttttttttatttttttttgttgtttttacgttttaattttgtggattttgaatttttgattgatattgaatgatttgtttatgataatggtatagtgatttgatctgtggagcacattaaatgatgatcatcgtcgttatgttattttattcgaatgtatttgttttctatcctttttacatctattaaattgatgcatgtgatatttagagaagcataattaatttgacttgagtatatatggcttatatgagtgatccgatttatggctttgagtctagtgctgtgccgatgattgcggatgattttctagtgattctgatctgtagagtaaggaaacacgttcttcggatgatgcacgagtaattttacaatatcatttgaatacaattattcatcgtctattttagaatcttaaactattacgaacatatacgttttctttcttttttacatttgaaaaatacaacatgcgacgtaatctaccaacgaaagcatgatataaaaaagatttgaccgagatttgagatctattatgcctcagtaatatgttttttattttatttttatcatctcatctcagtaatatgattgtaggtggcactctgctggtacatttgaccaaggcagca

SEQ ID NO: 104863 - DNA, 1036 bp, Mimulus guttatus
  Intron number 1 from transcript mgv1a017213m (locus mgv1a0 17213m.g) derived from phytozome v7.0 (chr-ID scaffold_158 ; pos 409904 to 410939)
gcattctagaaatacctgaagttaggaaaagtaattattaaacaaccgtttcaaatcaattgtagcttttccatgtcatgttgtcactttagaataccaatttttgctttagtaaacttttttccatgtttgcccttaatgactcctgtactctatcaaaagttaattctcacaaatggagagagtaattaataaaaagaaaattagttggaagggtaacgtagtactattatgtatcttttcctaaaacaaatacatatttattagtttttataacacatatgccaaaaccttctctttttatattgaatagatatgccataaccttaaacgacaatgattttaaaacgcaaaggagtattttcttatgggtgtatcgtctcctcaacatttaaaagaaaaaataacatcacatacaaagtaggagaaaatcagaagaagcataaaataaacatttagcttacacgtgtaaacaaaaattagctcggaaactaatttgagttaatacgtttccaaaacgacttgttctctctggtcaaacatattcaaaccctcatctcatatctacggaatgatataaacacgtagtaccacttaaatgctgcaattactatattctatttcacccaacagacttgcaaacaataccccctttatatagtgataaaagcacgaagcaaatcaattaatgaactctcaaaccatatcacttcgaccgatactcactaccaaaacaacgaacggtcaatagactgtatcatacaaatcaaacgtgtaacaacattcagcttaattattaaaattcacaggcataaacaaattcagatcaactttttttatttgtccataaatccaaatcaacttttcgagtaactaatggttgacaattgaacctcaaaaatccactttccaaaaagaatcgataacttctcacacccaaaaaaataaaaataaaaataaaaatcattaaaaaatacttcaataaaaaacaggagctgatcatgtaaacactcaccctttttacctccagagctgc

SEQ ID NO: 104864 - DNA, 512 bp, Mimulus guttatus
  Intron number 1 from transcript mgv1a006639m (locus mgv1a0 06639m.g) derived from phytozome v7.0 (chr-ID scaffold_4; pos 437490 to 438001)
gttacacccaacaattcaatgtacgtttttttcatttcatttcactccctcttactgtttgtcaaaatgccaaagaagaaaaggtaaacaaaaaaggttaggattgtcttattgttaattctgacttttgttcttgattccccaaattgatgctctgttcagcaattctgtagactcattgcttagtctacataaattacactatatccattacttactacagaagattgattacatgcagcacttgcacagtaataccagtaatcatagatctaataaacagagaattatagttgccgatttgaagttttgagtacatttaaggctactgaactctcgatccaattcctttaccatcaattgcaatgtctagaaactagacaatacagcaatttttatgtaacaaccagctagttcttatttctttatatgcttgttacatacaatgaaagtagactatcttctttgcacgcgcagagatcgctgaagatcttattcgtattcgtgctgcc

SEQ ID NO: 104865 - DNA, 596 bp, Mimulus guttatus
  Intron number 4 from transcript mgv1a024153m (locus mgv1a0 24153m.g) derived from phytozome v7.0 (chr-ID scaffold_230 ; pos 33440 to 34035)
tggccagacaatcggcactaaaagaaggcctagtaatatagagcttaggtcccgtttggttgccagtattagccatgattaaataaatagttggacttaatttaatgttaggtatcccaataaattagttgccaagataagtcatgattaatcaaatagttggacttaattcttgccttctaatgagttttttttgtgttggacgttgcaagctccaataaaataattgagtttcattagagattatttaattttattttggctaatcttatcttctcaatcaaacgatttataatattaaataatcactatttattaggcaaacatgtttaaaacaaattaaaaaaaatatcggtataattattcgattgatataatatatatattatatatgcaggttgggatttcgtcgggtgcgctaatacagttgctgcacttaggcttgccagaaggcctgaaaacaagggcaaactcatagaattagacaagttaattatggcataattaagttaatcttgtattaaatgtgattaactaaacttaatcataatctgttctcagacaattcatccgagctttggagtgcgatacttgtc

SEQ ID NO: 104866 - DNA, 496 bp, Mimulus guttatus
  Intron number 2 from transcript mgv1a019651m (locus mgv1a0 19651m.g) derived from phytozome v7.0 (chr-ID scaffold_79; pos 587269 to 587764)
tgattgcggtactctcttttccaggtatgtatttatttatttacccaccgttttttttccatcagcttcttaatacagattttgatttcctggttttacaattttttttttctctttctttggttgtagatcagaaaaagcaattaattagttgtagcattgattaaagtgaaaattcttcacctgtttgtttttctgtctagcttagctagtagtaccttttcagaaaaacacaaagggttgacgactctctctctctctctctctctctctctacccgtgtgtgagagagagtgggaaaagaaagatttttttttaagtttttcaagaaatgatgactgtacagtagttctagagttgagagagaaattgaaaaaagcatataattatatatatggatttgttgtttgtttgtgtttgttgcttagcgtttgttgtttgtaatgaaattaaaaaaacaggagggacagtttcataacacacagagcattctgcg

SEQ ID NO: 104867 - DNA, 552 bp, Mimulus guttatus
  Intron number 2 from transcript mgv11b023448m (locus mgv11 b023448m.g) derived from phytozome v7.0 (chr-ID scaffold_3 82; pos 74711 to 75262 reverse strand)
ttccagcgtaagagaaggacctaagaagtcttcaagtggggtaaatcctttcatgttcccatcaaaacaaaaaagttcaaacaatttttcgcttctcaaaaactcaaagcagttggtaagcctatttcaaagtggttttaatttaatattattctatctaatgctgctgatagtggaccttgttatcaatctatgataaatactattgttgagtcggggatcggaattataggtccttctagctgtcgaatcggtagtacttgtctagatgaagaagtttctgaaattgacagatatatatatatatccaatttgaaagcaaaatgaccacaatatggttgtagaatcatgtgtgatgggtggagtacaagaaataagcatcctatcatcaattttatgatatattgtaatcgatcaatgattgtggattgtactaataaaataaagaacgcagagtttattatgttccttataaataaagtcattgatgagatatgagagcaaaatcttgtacaagttgttacagacagtgaagcttcgaacaaagctgct

SEQ ID NO: 104868 - DNA, 1064 bp, Mimulus guttatus
  Intron number 1 from transcript mgv1a004449m (locus mgv1a0 04449m.g) derived from phytozome v7.0 (chr-ID scaffold_20; pos 2016959 to 2018022)
ctccggcggaggattccgggattattcgcattgaggcaagtgtttcttgacttcaactaattgcacaattaacaatcttttttttttttttttttttttaagtttcttcatgggattggataaattggtaaatgttattatgagcatgattcatagttcatgttattgtgaatatatatgccacgtggttggttgagagagggttgtaccttgattgtccaatcttgttccttatcctagattatgggttatcacacttgcaattaattgacttcagttgattatatattcagtattgtcttttcttggctgatggaaatcttgattgcttgtgtgcatgtgttgtgttttataagtgataaactctttgaatttttttattttttttggtgtgtgaaagactcaatgtaatgtattcgaaaaatttcacgacgttatattttgctatacacgtatatagatctatacgtattttacacacacacatatacacatatattcaagaaaaaaaattgtttaatttaatcaatctagcaggatagttataattatgtgttactcagagggaaaatttgcgacttaatccacgttgcacccttgaaaaatagttttttggcatttcataccattaaaaaatatttatagcacattttatcattaaaacacaataaatcttgcataatgcacttcgaatgaattttttaaaacccaatgaaattaatttaatatttttagtgatattttttaggatgtgtccagtgtcaaatcaattttttatatattgatgaatgtagatttcataagtattataattaattataaatttgttaataattgtttagtaataattgatgaacaattggtaattggtgaatgtgaaaaaagacattacttttgttaaataaataaatatattaataaataatttacttaataaataattaatactttgtaaatgattgtttaataattaataaataattaaatttgaaataatctaatgggaggattggctatgggttggtgaaggtaccaatacaggagaaggtagaagccctagattg

SEQ ID NO: 104869 - DNA, 681 bp, Mimulus guttatus
  Intron number 1 from transcript mgv1a011386m (locus mgv1a0 11386m.g) derived from phytozome v7.0 (chr-ID scaffold_48; pos 748080 to 748760)
acacaaggatacacctagctattctccttcaggtttattctttcatccattgtgtgttgatgaattgtgctgcatatcttatttttagaatttgattttactcgcaaatacattgtttttgtggttttgagaatttctggtataaagccagccatggagatttttcttccagtgagtttcatgaatgtcttccaactgagtttttttgcaaaaactgttctgattttatatgtgtgcatcaattgcatgcatctttactcatggcaggattgaatttctaatcaataaagctcttcctctgttaaatttctctctctctctcacacacacacacactcgcacatttatgtctctctctctctctctctctctctctctctctctctctctctctctctctctcacacacacacacacacacacacacatcaacttgcacatttaagtatatcttttaatcctgtaaccattttttgctaattttattttatttggttttctgatacaatttgaagcgcttccatgggtaattcaaaatactcgaactctaccaaatacagcatgcttttttttggtttcttcatacagacatatcttctccaccattggtatatttaaattttcatttgcagttacgatttcttaaaaaaagtttgtgctgtcagattctagcatctccca

SEQ ID NO: 104870 - DNA, 612 bp, Mimulus guttatus
  Intron number 1 from transcript mgv1a018947m (locus mgv1a0 18947m.g) derived from phytozome v7.0 (chr-ID scaffold_151 ; pos 248906 to 249517 reverse strand)
gacgaaaagctcctccctgaaatccttcaccaaaggtgtgtgtttatgaaatttcatgatcattactttggatattattatttagggtaaattacaaccacccctgaggtatggtcaaattacgaaaccccccccccccccccccctggttgggtaattacaaccatcccctcaactataaatcttcttacacgtccacccttgcggtttcaaatttagtggaattttcgagattatatggattattatcacttttgtaaccgttttatcccattcgaactccacagtttgaagcaagatgatcataatatgtgttttttggcttgtacatatcagattttgtggtgcatcagaaactgtatatttacacaaaatgactacattccacgaaatctagatgattatgttgaatttgacaccataagagtggaggtgtaaggaaaaatcatagttgaggggtagatgtaattatccaaacaagagggattttttcgtaaattgaccatacctcaggggtggttgtaatttaccctattattgattgtcattaaattaattttatcttttgcttttgttttaatagagtgactttaagaggacagcccgacgaag

SEQ ID NO: 104871 - DNA, 948 bp, Mimulus guttatus
  Intron number 2 from transcript mgv1a011008m (locus mgv1a0 11008m.g) derived from phytozome v7.0 (chr-ID scaffold_343 ; pos 121742 to 122689 reverse strand)
gagaaggagacaaatcttgaggtaaaatatgtgttccccgtttttgggctgactgatttatatctgaaattgctatgtgccttaggttatacagtacaacaacaatgttaggtacagtactgaaatctgttcctatgttaatatggtctgctcccccattaatttgcttggatttaatgatgaatttttttcttttaattatgtcggttatgcatgttatattagttctagaatatcctcttgcgccattgcatattgaacattttcctagaggcatctacttcggataaatggtgcaggactgttagaatataatcaagattatgaatctattattatcgttgtttaggagatttgtgtcttctttatggaagaagtcttcctagtttggagtcttttccaactctatataagagagtgggtttattcgatattgtaactatcttctatctagctattctgtaataaaactgtctgccatctggccgttgattcagtcattagctcgtaatatatctttattttttgaaaatattgaacacctatgctgcaacaataaatcaaaataataaaatcaatcctcttatttcttccggagagccatttttcagaaaaaaaaggacaacaaaaactggattgttttgaatagttactttccacattttggtgctacttcattgaaaatgataccttaagaactaatgttttgtctttagtataaccacaattaactactgatgacgatacaagtggactacgtagagatttttgcattaccatgaacttgtgaatatgattgtgatgttgcaatttacactctgaaaattaagtcctggtggcttttatatttataatatgtgcctagtgaattaatataattattttaatataaattcttgatacattaaactgttcgattttgcattctttaggtacatagagatcaca

SEQ ID NO: 104872 - DNA, 760 bp, Mimulus guttatus
  Intron number 1 from transcript mgv1a000919m (locus mgv1a0 00919m.g) derived from phytozome v7.0 (chr-ID scaffold_123 ; pos 467534 to 468293 reverse strand)
tctgtgtatattcgcagtgacttacttcttgacacgtaagtgtaaacattgctttgttttttttttttttctaggttttcttcaatatgaaatcctgaatcggattattcatttccagttatttgattgtggatattatagcattttatttaaaatatgtttgttcagctcaatttgccgcaatcgtgattttttgtgttcaattgagggggaaaacatggattttatgattttttttttaaattacttactattgatttttaggtgcgatgttcatttgatttgtgtgcgtatttctgagatagttgctggttcatgtatatgcgtatatatccgatttcaattttaaagattattatatatgggaaatgcaatgattattctatcaaccctgcagctgtcttactagaaaagttttcggtttacatggtatccatacatatgtgtctgtcattttttcattttttttctactttgtgcttattgtagctgaactagtgatcaaaacatgtttttgtgcttcgagcttattatagctgaattcgtttgataaaaaagaaacgctgttatcaaatttttattatgtgctttaactgaagtgtagttacactggagactcaacatccaaattctgaatattttctttgtttcgtttcggtggtctacaacagcatgtataccgttcttctgcctgttcttgattttaattccgatcattactcttatttataatttttttattgcagataccagtaaatca

SEQ ID NO: 104873 - DNA, 637 bp, Mimulus guttatus
  Intron number 2 from transcript mgv11b021680m (locus mgv11 b021680m.g) derived from phytozome v7.0 (chr-ID scaffold_5 1; pos 689924 to 690560 reverse strand)
ttgaaccggtgagaatttactatttatttatgtaataaataaacacggcatctaacatgtatatatattaattttgtgtaaattaaattttgtcattagcagaaccaagggtcaaaaagaaaatgggttccgcctatggtagcacttgctcgaaggagggtagctatggaaatcgaagattatgaagttataaataaatacagtgcatgtcacatggggtattggtcaatggtcaaacacacactcatgagttcttgatgcagtgatggtggacacgttttgttaatctgggaatgcaaagagagaaaatttggcaacacgtggctgtcacttgtctgattctccccaccaccatatatattacatttacaccactccattaacaatcattagttttgttaattactatactgttgtcaatgcctttcttgctttcctcttcagtgacagaaaaaaactgcacacacacacacacacacattcattcactcactcacagaacttgcactgaaatgggattttaacttgtgggttgtgactaatttagtgtgtacaactgtgtgtgtgtgtgtgtgtgatttcttgatttttttttttttctaatttgaattttagtggtttctggatatttattgaa

SEQ ID NO: 104874 - DNA, 528 bp, Mimulus guttatus
  Intron number 1 from transcript mgv1a009480m (locus mgv1a0 09480m.g) derived from phytozome v7.0 (chr-ID scaffold_98; pos 344567 to 345094 reverse strand)
ttggctgcaaattcgtctgctctgctgttaacaaggtcggttttttttttttttttccgattacattttgatccttttttttttggccttttggattaattcgtgttttccgatgatgttttctttgtgattttgaattgggtttttggaaatttgagatcgttaaatgctctcttacacatgtgcccatcatatgtttgatcaaatgcttctgtcaccaaacacagtcacaaagaagaaataatagttgaaaatatgtcacaattgatcaaattcatgcaagttatatttctcagtcaaagtgagtaatcggatcaaaaaagaaaaatttatcgaattatgccttgcccccagttttatggccattcaagaaagactgtatatatttatatatgattaaatctatcctaattaaaacaggggataactcctcatagtacaatcagctcgaaaaccgtttgtctaatgaactttcgactttgcgggtttacaggctggtttggctaagcttataggacttgctggaga

SEQ ID NO: 104875 - DNA, 796 bp, Mimulus guttatus
  Intron number 2 from transcript mgv1a022703m (locus mgv1a0 22703m.g) derived from phytozome v7.0 (chr-ID scaffold_412 ; pos 11326 to 12121 reverse strand)
ggaagcccaagttttgtacatttagactttctccagtaagaaattatcttttccatcacctttaccacaacaaagtttttccgtattcatttaactttgctgtcgcatgttaacgctaacttatatgttgcaacttatctcttccttccgatttttattcgttctaaagagtagaagacaatctacatttccatttatttagaaatctaacttcttatcaatattttacggggttaaagatagaaaggcattgtgaacttaactaaatataggtttttgtttgtgtgtgtgtgtatatatatatatatatatatatatatatatatatatatatgaatatgtcttgcttgagagtatttttcctccgttaataatggaattgttgttgttgtcatcgtgcagaaggcattgtatttgattaatatattgctaaaaagaattgcaattttaactggagggttagttttttcaaaagttggttagacggtgaaaatgagttgagaggacaaaaactggtggttatgtacggttacaagaaataccaacaaactctttcgaaagctaggaataagctggaattcgagcttttcttattttaattctgtggataagcaagatgaagcagttgtacataaagatccactttctggttacatcttattagctgagattcttccacttgcatactattgcatccatttgcatgttggcgtaaatatatattaaagaaagtataattatgaataaataaccttaaaaatatgttggttcttaggttttgcatgctattttcagg

SEQ ID NO: 104876 - DNA, 869 bp, Mimulus guttatus
  Intron number 1 from transcript mgv1a011652m (locus mgv1a0 11652m.g) derived from phytozome v7.0 (chr-ID scaffold_114 ; pos 777050 to 777918)
tgtttagccacgaggctcgaaacggcttgtttcctgtaagtttgctctacgtgtaaaactcgaacaagatttaaaaaaaaaagaaaaaaaaagccggccgagaaattgtcttatgagtcggtgcgactcggtcgatttttgagtcgactcgggcgagttgtgattggttgtcttttcgtgttttttttttgcttaattagtaattacgattatgattgtgattagtgttgaaagattttgcgtggactaatttgccccttggaggattatttaattgggtgattaaaatcgtaattggaattggtagctttaaaataaaatgtgacaaatgcgcactgagcttattatttgttttactttttttttttaatcttttaatatttgattttagaaaagaataaaaaaaaaaaacaataactaggaaatattcttttacatgtgtccacttgcaaattgcccatgtctgaatattttgacttttattgcactagaaaacatccgatccttatcatggtactcaccccaattgacattattttattgagcaataataactattaaattaaatgtgcaacccaaaaatttgaaattttgaagaaacacaattttttaaaaattttaattgaccattattagtgagtggactcataatcgtttcaactgtacaaccgagttatgaccgagtcacgcacgcaagactcaattcgaacatttgggtgttgtaaagttttaatctttcttcatctaaacgcctctctgaaggagttcttgaactgagtcaactgagttgactcggtgcttaatttgcacgtgttcttaccgagtcatgtcctcgtgtgtatgcaggagtttgtggaggaggaactgga

SEQ ID NO: 104877 - DNA, 974 bp, Mimulus guttatus
  Intron number 2 from transcript mgv1a006067m (locus mgv1a0 06067m.g) derived from phytozome v7.0 (chr-ID scaffold_59; pos 989034 to 990007 reverse strand)
ttccgctgtaaatacacttcgcttttctccttcgggtaagttttcctttcattttatctttcaataccaagttctccttcctgtttccgttatgcaactaactttactttgatagtggtattattttcatacaaaaatcagcacttacttttcgagaaattgaatttctggttctaaacatgatctcgtatctggttcgcaggacttcacaaataactttagattcttgcttcgttgttttgcttgtggttttcatgttctaaagtcctttggtagttttctaagactggaattttctctaatgaagttagataattttattttgtgtcttaaaacaacttgctgcgattgtaatttttagtgtcactggattaaggcaactagtatgatactggtttaggcatttatagatttgtttcgtggttaactattaatatgaatgtatataagatccatttatgctgcacatatcttgctattgtgctcgtcatattggcagaggcattcaccgcattcatttcttgattgttcgaaggagatttggcttacatgcgaatgttaatgtaaataggctgtcaagaaaaatacagagagactaagaaagtcgaacctctagtgattttgctttagtggtgcctctagatatgtcaccataaaccaagggcagtagttgcgcttgctagtaattatcagccaacctggtactagcggtgaacctgagtatgaggacttactattaattgagtcgggtgattaccgaggaatttgatttttttttttctctcttttgaatgtgctgagtggaaatgactaatgtagccaaatctgatagcgatgaagtggaggcttctgttcaatttacctgagtcacttgaatttttcgttatctctagatgattgtattctattattctatctttataaaagtgtgacttcttctaaaattgcaggagagcagcttgcctctggtgctg

SEQ ID NO: 104878 - DNA, 961 bp, Mimulus guttatus
  Intron number 1 from transcript mgv11b023993m (locus mgv11 b023993m.g) derived from phytozome v7.0 (chr-ID scaffold_5 1; pos 33181 to 34141 reverse strand)
ggtggaaggagagagagagagagagacgaaagcaggtaagcaatgtatgtatgtatgtaatcttgtttgtgtgtgtgtgtgtgtgtgtgtttgtatcatatagtgtagctagcggcttcaaaaaaatgtgaaaataaaggtttcccttccctcagttctgcgtaaataaaatgaaatattctctattaaattgcttcgacgaatttcttttatgttttctacagtttgcattgctactcaaattgaaataaataatctcgataggtgcgttggggagcatatgcctttggttctcactttcagttcttagctatttagatgctcatatggatttggtggattctgctattggccggccgtgcatctttcggtgaattacctcattggttggcacatttttttgcttttggctccgtacattacgtcctgctttttcgccatggattcggtttatgtgttcttgtctctttggaatttctttttattatgcctgtggaattttctttttcagtattgtgcaggtattttacctccttgtttttgtcaaatttatattttatgaaaatggcaattcttccagcatgctttcatcaggcatttgtttgtttgtttcgtctcctccttttgtaattacctttcatttgttagctctttaggtgttcgcatgtatttcgttgaatcgtttgccttcttatttgagcgtccatgtcatatttatttgtctgcttggtatgccgttagtgccccatctgttgtttctaattatgcactttctttatcatattaggtttttttccatcagtggaatggttaactcttgttcaacttgaataaatgcttttgtttgttgtctttaaattactcggtacatttatcatatcaagttcaattaaattgatttcagtaagcttttgctaaattccgatgttttatgtgtgtagtgcaaaagaatcggcggctg

SEQ ID NO: 104879 - DNA, 730 bp, Mimulus guttatus
  Intron number 2 from transcript mgv1a020020m (locus mgv1a0 20020m.g) derived from phytozome v7.0 (chr-ID scaffold_85; pos 517506 to 518235 reverse strand)
agcaaggtaaaccgtaatgcatctcttattttttagcttctaaagatgttaaaaatcttttcaacagacaacaaggatttacatcacctattccatttatttttcttctaaaatatgtactatcggctgccatgagatgtgtatttttcttatacgattatttgcatttctcttctctcatttatgaacatttgaatttaagtagcaccgctgttacatgaggtcatcaattcatgtactttgcccttgaggagcttctttccttgagcacgatcatgttcttactccataaccatatacatcctagtatcctatgttttactatttttctcgtctttgaccatattgagattagaattaatacatgtatgagtacttaggagttgaaaactttgatggtgttgtgaatcgtgagattcagccaattgtattgactgtagaatattattcagaaatagttatcagtgttttcaaaggtttcttgcaattaatgatttaattttatcatggaatgagtcaaccacccactgtggtctcctattgaataaactgggtgtttctccaaatgatcacgaatttcgattttcgggaagtatcatgatcatccagtacaaagggcttccataatcaataatttgtagaccgtgcatgcatttctaagctggcacttcaaagctgactttttccatgaacatatgcacctgatactgtatttcaccattgcaggaac

SEQ ID NO: 104880 - DNA, 534 bp, Mimulus guttatus
  Intron number 1 from transcript mgv1a020020m (locus mgv1a0 20020m.g) derived from phytozome v7.0 (chr-ID scaffold_85; pos 518238 to 518771 reverse strand)
cccagctaggtctttccaagcaggggaagaagcaggtttagatttaagaaatattgctgatgttggtgaatctttataatcagttaatcagccggcgatactacttccctttatttgtttctcttattgccttgaggcgatgggtggatgagaactaaaaccagttgattgcttttgttatattgttcaaaaaattgagctggatttttttctaatttgcttcccttactctttatgtttgtatatgaagtgcactgtatctggtcttgcccatttattttaagcaagttatccaaagcatcacagtccttcaagtctggttgggatctggagattgatctcattcttcttttttcccattttggtttttgaatttaatttctgtggactttcacataactttgtaaggactattaacatgcttatttcccatagtcagcttttggtacatttgaatacaaaaaggtgtttaattgtttgctgcattgtcttggcacaggaccttgttgatcgaatattgggtgttctctctga

SEQ ID NO: 104881 - DNA, 499 bp, Mimulus guttatus
  Intron number 1 from transcript mgv1a017736m (locus mgv1a0 17736m.g) derived from phytozome v7.0 (chr-ID scaffold_79; pos 167091 to 167589 reverse strand)
atttgtgctggtactttctcaaaaaaaattggttcttttcaatcctataatctgtgtgtcaaccgtcatttacttctttcgctcggaattttgatttcgtttattttcatgtagttcaattttctattatagctgattctgggttttcttcatgggtttctcttaaacaattctacgttggaattcaagaaaatgtttccatgattttgatttccatgtttatcggaattggtaaagtttgagtttttcaactctgtgttgtctaatagtaacatgtttgggttctggaaaatgattcctggaatggaaaaaataaatcatttttgttaatatagaaaagtattgcccttaatagttaaagggaataattaatttttgtgtgattattgacgattaaatgttcctttaggtatgcgaaattaaatccatactttgttcattaattcaatgcgaaaaggacttatcttgttgggactttgattttgcagtgttcttggtg

SEQ ID NO: 104882 - DNA, 565 bp, Mimulus guttatus
  Intron number 2 from transcript mgv1a013073m (locus mgv1a0 13073m.g) derived from phytozome v7.0 (chr-ID scaffold_16; pos 30516 to 31080)
ataccaaatacaattgtaagttgtacctttcctttttcttattttcaattgctttctaatcatcatattttttggtatctgatgggctttctttcttacttcaattgctttgtcttagttgctctttgcagctgaatattaaattaagattgatgtcaagatttatcattctaatattgtcttgctatcctgatcataattcttcgtttccttctccgttcttcaaagattcgttttttattgggattcttgtttatagtgtaaatcaaatgggaaagagtagaacattggcagttcagccaacttttctcattttcacttgatcactttaaacgaaaatttaacctttttcccacaatatgaccagaaagatgattccgcaaattatgttgtcatgtataaaatgcgtatgctaaccatttcttggtacttttatctatctgtaggaaaatgaaggttcgacctcttgtttgtgttatttgttacattactttttgtcttttgttgcttcttgcataatgcagaattacttgaaccaaccacctctatctatgcaggccacctg

SEQ ID NO: 104883 - DNA, 726 bp, Mimulus guttatus
  Intron number 3 from transcript mgv1a009125m (locus mgv1a0 09125m.g) derived from phytozome v7.0 (chr-ID scaffold_1; pos 935738 to 936463 reverse strand)
caaggcgctcattagcactctcggcttcagtttcggtgagaatctcgtggacttgattcatccatttgtgcgaaaactatgtagtgcaactggttttggtgattattgtgttaaactttattttagttggcagaattatcgaatgttagatcttcggtttctgaaaaatgattcggaagttaataggggtggtttattgacatttcaaagtttcgggatttaagttttacgttttctttttttggttgattcgagtagggagttgcgtgaataccaaaatgataatattttttacaaagacgtaaagaacggcatggtgcttgtggaaatatgaaaattttgataaaagttgattgtccaacttatttactgtccagagaaatagtttggcagcttttcttttctatttctcaaggaatgcaattctccaatctactttgcggaaaattacattttgcggaaaattacatttttcttcaaacttgatgctttcatgaatcgtaaaacgaaactgaacaatttattgcaagccatcaaaaggtgaatggtgaatatataaattctccatattttcctccagcatgaaagtttcatattctccatattagcctgctagttttactagaacttttatattattgaagacattaacttttcctctcactcgtttcctgacattttgatttctcagctacaactcttactagctggcatcttcttgtcacg

SEQ ID NO: 104884 - DNA, 299 bp, Mimulus guttatus
  Intron number 1 from transcript mgv1a009125m (locus mgv1a0 09125m.g) derived from phytozome v7.0 (chr-ID scaffold_1; pos 936709 to 937007 reverse strand)
acatcgatttcagtgatctgaaagtctctcctctggtacactctctcctactgttcttctctttgtgcatattacacacactaaaacgtgtgtgtgtatatatatgtatgtatttataattgtttatgataagcataattatacataatgtttatttcggtttgattgttggtgaaatacagcagatctagggttttaatttttttttgttttttaagtgatgtttgatattgttttggaatattgatccgttattatctgcagcggagctggatttttggtgatttgcagctgaaatt

SEQ ID NO: 104885 - DNA, 477 bp, Mimulus guttatus
  Intron number 1 from transcript mgv1a001343m (locus mgv1a0 01343m.g) derived from phytozome v7.0 (chr-ID scaffold_13; pos 2509233 to 2509709)
tgcatattcggtgctaaagtgctgatatctttgaggtaattattcttctctcttaacttgttcatgttcgaactaggatgagtttctactaatccctcggaaattattgctttctgagctgggttttcgtggatctgatcaaaatttcccacaagtctttgttatgagataatttcttcgtttatgcccgtgcttgttgttcaatttgaccttactttttgattctgtactccatcagatcttcaaatagccctagtttatgttattgaacttggatatgtgtgaattagttaagaggcttaaaatggtgcattgttcttgtccatatttttcttatatgtttatactttccttttgagatttctgagcacctttttagatctgtttatctgacttatattcaggtcacggaattcacactgtttcatttcattttttccagaacttgagtggctttttttttctctgggattatca

SEQ ID NO: 104886 - DNA, 757 bp, Mimulus guttatus
  Intron number 2 from transcript mgv1a009896m (locus mgv1a0 09896m.g) derived from phytozome v7.0 (chr-ID scaffold_2; pos 2965447 to 2966203)
tgcagttctacaagtttcggtgcgagggccagttggtaaattcgatttcttgctctactgctttttaattttcttgaatctcatgttttggtttgtttctttgttgattttccattgctattgaaaatttagttgtgcatgatgattttcctttttttaacacgaattcaatattatattttgagggggttatgcttgctatagtatattcaaaacaatgttaagggattatggatgatgttaaagggacatatcttttggattgtgattaagtgaaattttggcatttgttcatttgtactatttgcctcttcaagcatctctgtattatgaagtctttaaactccagcgtaaaataaagttctttacaaataaattttcaatgtttttaggtggatttttgttgtgtgttgttcattcttttatctcactttgtagccatattccattcagaaaatttgtgccagagttgttttgggagaaaccccttgttgaaactttaacataagaatttctgtcccattttgtttatgttagagatcagtcgcgatacaacacataggttattctcttttgaaacatgttttagtttggattttctttaaaatgcctggcagatttaaatgaaaatgtaccatatctaaatttgctctactcctattcagttatatttttttatggatttaaaatgtgagtatgatattactctaattctctatcgagtctgacatctctccgatttgatggctgtaggaga

SEQ ID NO: 104887 - DNA, 694 bp, Mimulus guttatus
  Intron number 4 from transcript mgv1a009816m (locus mgv1a0 09816m.g) derived from phytozome v7.0 (chr-ID scaffold_159 ; pos 68340 to 69033 reverse strand)
caacaaggtcagctgtcaaagcactgtcaattattgactaaaccagcatgaattaatttttatttttatttgtaatttgttgtttaatcgtaataaatattgataattacataacgggttgctgtcgattgtttcaccggggaaaagaaagaaaaaaaagctgatggcttttgcaccaagaaggtggtgggcctatgaatgaagtgtccctctcttaattcttgaaccatttattcttaacttttcagctttcttagttcgtgtctgttatcggtcctttcttcggcagttgtcttctactaaaccatattaatcgatcgtcatttaatcactcgaaaaatagttgtgaacgagtatagtcgaacgacgtatctttaattttgattctaagagtttctttgcgtttacagatcttggaagttagaatagatactaaatgagttaggtcaaaatggtagttaaagagtttggttggagttaggtcttatttcaaaaccgggcccacgatataagcaaattgagattagctaatctcaatacaatttgttacttttattttagaatttaactatgtcttgtgctaattattaattaatagaagaatcaagaagatttatacaatttttggtatatactgatatatgaaatcaagaaaattttcttttttttttcctaacagatttcgggtactgca

SEQ ID NO: 104888 - DNA, 592 bp, Mimulus guttatus
  Intron number 2 from transcript mgv1a007915m (locus mgv1a0 07915m.g) derived from phytozome v7.0 (chr-ID scaffold_11; pos 1748861 to 1749452)
tatattttaggccttcgtgtttctccttctcatcggtaattattattatcattttttaattatttattattaataatatttttatttattttcctttatttaataactaaatttaatatagtaattcttttgctataatagtattacatttggtaattgtgttactatttatcgttttgaactatgtatatttctcttagggaaaaataagattacaattttacatttggtcaccgatatatataaaatttatattcagtccgttatgtttgaaaaagttaatatttttagtctcttctgttaagtttatgttaatgtagccaccactatcttaactgaaggagtaacggtagattgacggaaatgatgaaaacttattaatatattgaaatatgagtgaccaaatgtgtttttttatgaacatgaggagctaaatatagaataaatgcaaacttgaggggtgaaaactgtaatttctcatttcttattcttaaaccttctatttaagtgtagggacaattttgtccttcttgaaaaaagaaaaaagggtttgtttttttaatttatataatatttgtcgtattgcaggaga

SEQ ID NO: 104889 - DNA, 529 bp, Mimulus guttatus
  Intron number 1 from transcript mgv1a022298m (locus mgv1a0 22298m.g) derived from phytozome v7.0 (chr-ID scaffold_3; pos 1719265 to 1719793 reverse strand)
gaagaagtttgaacaatttgaagacaaagaggttggtgagtatggattggttccatatgtggagagtgtgtttttccccactcaaaacaccaagctcaagaggaagcgaaaggatttataaatacatatttaggctcaatttacatttctgaatgaataaacaatcagtatgtcatggtctatgttttttcttattgatatgtttctaaattgttattattatttttatttattttttgtgtattttgatttcgggtatggtaatagtgtttttcatggttattaaaatggtacgatttatgattcaattgtacgattcgattcgatttgaaccattttcgatttatgattcaatttgtatcgattcatacaattttttgaatttatatatatattttgaaaataaaacaaaaaattatgctaaaatataattgaaaaaaaaaaatctttggttattttttcttcatccttaatgtttctttgagttatcaattactacccataaacaatggcgaccagggatcggcgg

SEQ ID NO: 104890 - DNA, 691 bp, Mimulus guttatus
  Intron number 1 from transcript mgv11b020762m (locus mgv11 b020762m.g) derived from phytozome v7.0 (chr-ID scaffold_1 5; pos 1832526 to 1833216 reverse strand)
gagtagcatttcagtgtgggtgtgttcattaataaaatcatctctcgaactagcaatagatgatgggagtatctcggatacccatcgattatcacagagttgtgcaagaagggatatataattgagtctaaaatataagggatgctttatctaataaggtcaattcaaatcacggacgacgagataatttgttcacatcccaacctataaaaggaagtcaatgacaataaggaccctacgagcgaatcgtgggatacactcgcggttcatgcagctgggcatgcgttttaggacattttaggacaggaaaagacataaaaaccctttggtagaggaaaaaaacccagattgattcaattataaataatctaaagttataggactaaattgtaattatcaaattgtgggctgaaatcgtcttccccaaaatccaaatttcttcttcgccattgaaatcaccaccaccaaattcctcacatttcaaatctttttcacatctcctgattattattaacgagtagaaaaaaaaagaaaaaaaaattatccagcaacaaaacaatatgagagaaacagaagcacatcaagatgaagaaatggaaaagctgagatcgaaagccacagaacttctcaatccaaacctactcccaaatcatctccctctgccaaacccgcatcgccgccaaaaacccag

SEQ ID NO: 104891 - DNA, 864 bp, Mimulus guttatus
  Intron number 2 from transcript mgv1a008247m (locus mgv1a0 08247m.g) derived from phytozome v7.0 (chr-ID scaffold_207 ; pos 112139 to 113002 reverse strand)
tctttatagagttcgagctttatcaggatattcaggtaatcataatagtgtaaattacaaaaaaaaaaacccttcttgtttgggtaaaggcgtcaattcaacttaatcttctagattccgtggaatgttctctagtttggactcgttttgtgcaaaaatgtagtttctgatgcaccacaatctgatatttacaagccaagaaacacatttatgatcatcttgttttgtttcaaaaatgtgtttcaaaatgtggagatcgaattggataaaacgggtataaactggagaatatccacgtaatcaagaagattcataatcgaagggtggttgtaattatccaaatatgagggatttttttcgtaatttgacattctttgtggggtggccgtaatttacccatactaatatatagctttttccggcatcttatgaagtgtaaattttatcatcactttgtagaacttacctttgtagaacttgttcttttttagcattatcgtattcaaaaacaagggaaaattttaactagacagcatcgagaaatgtcggggtttcagctgcgaaatatatatcggccacgatgaagaaattttagttttagctataagctgaatttttcaaataaaataaacacctttcgtcgagtatgaaattagattccttgctcaatgaatcatataatgttcgtttctttggtttctgacaagacttttttacgtgatacagtattattacatttagcatttccactatcttgatttcgctgtcatgaaatccaaccgtgttaaagctttggaattcaaagttttgatcttccatggtcaaataaacagatgtttgtcgaatttattttaggcttgtata

SEQ ID NO: 104892 - DNA, 641 bp, Mimulus guttatus
  Intron number 1 from transcript mgv1a015649m (locus mgv1a0 15649m.g) derived from phytozome v7.0 (chr-ID scaffold_15; pos 2541391 to 2542031)
ccaaaaattcttgtagtattcatacgcggtcaagtgtaagtaaattacattcgaattcttgtacttaatatatttgaaaggatggctgtgggattcaaactcaagaccttttatttggtctgactcaccatgttaaatgaccacatcaactaaaagtttacaaagtaaattatatcatttaacattaatatcttcaataagaccaacaataatctttgagaagctagcatgcaaagtttttggaggaatatgaatctgatcaagtaatattgcatttgcatttattagacggtcaaaaatattcccattatattacacggaatttattcagcgcgcaacaagtatctgtccctccgttgttggcaatcaaataatcatcatcaacttgtttatgttcgacaaaaatatcttacaatctttgaaaaagtgcctttatagcatgttttttcgcatccaagaattaaacccaccttctttacaaatgttctttgtttgcaaaaagcagtactccgatcctctgttggctgctgttttttaatttatttattttaaaaaaagaaaaaagaaatccctataaatagagctgcaagataactcaattttcaggcaagttttgaacttacaatatttttcttgcctag

SEQ ID NO: 104893 - DNA, 496 bp, Mimulus guttatus
  Intron number 1 from transcript mgv1a010117m (locus mgv1a0 10117m.g) derived from phytozome v7.0 (chr-ID scaffold_258 ; pos 239749 to 240244)
attttttacggagatcaacgttctcttcttaccaggtttgatccttttatatacacaaaagaacaattttttattgcgatttatggtcttttagaacaccgatcagtcgtttcttggacaacaatttaacaataaatcgaacccatgtttccgatcagagatttcttctgttgtctgaaatcgagtcccactttcatagttgactaattagctgatcagttctctcttgtataatctgtgagcgtatatttgattagtggtatctgggtttttaaatatctggtttttatgacgaaattatttcttcatttagaaaaaataaaaaaataaaaattaggtattaattaaatgatcggctaacaaattttaatttgtcaaaagaaattaattattcatttgtgaatggtttgagcttcatctataatctgtatatgtgcattgggattgaaatttttttcgatttttcgatgatcgaattttgtaggaatttttttag

SEQ ID NO: 104894 - DNA, 1042 bp, Mimulus guttatus
  Intron number 1 from transcript mgv1a012638m (locus mgv1a0 12638m.g) derived from phytozome v7.0 (chr-ID scaffold_116 ; pos 222037 to 223078)
aaaattgggaatttcggtaatttttttgggcttgttttgatcgtagtgaaacattgggtgtgtctttaatggcttgattttgtagttgttgaaaagtttgtcgcttctctccaatcgaaggtgaaattggatgaggcggcaaagcttattgctgctttggatgttcctggtggaagtggtggtagaaggcggagatacgagtagggatggaagaggttgtggtgggtttattcgatgattttttcgacccattttaatagctccttggagatggattgtcttttgagatgggtttttggaagaacactcttagccatttgctgtagaataatatatttggtgtgtgtttagggaaaatgtcgagatgatttatgattagttttgattgttgaattttattttgcctagaaattggtgcacaaagggctttggagatggatttgaaccagagttgagttggggaagaagaccagttggagaagatgaccaaaatggaaaagagaagaaaaaattaaagtcagacaataataaaagtaaaaagacaaatttacccctccaaatatcacatgtgcgtgagattccggtgacatttgtcggaaaataccacttttagggcaccgtgcaaaaaaaactcgagtttaggtaagaacgtgcaaaaaaaaattgtttgaggggcaaagcgcaaaaccgatcattgggcaaactgctttttactcaaaaaatatgaaccaaacaaaaactcaaacacagaaaatttcccgatcaccaaattccctactcacgcatgacacacccccaccgtttccaatttccgacgctgtaaatttcaaccattctctcacctacctccttctgcccacttctcaaaacccatctccctcgccaccccagatcgaattccgcgctcaaacccatcttttgcgccctaaaaaagcaatctttgcactcggttcagcagcaatcctcgtacaatcccaccaccacttggctctccaatgtccaccaaggaatagcggcgctcgccatttctctggccctcaat

SEQ ID NO: 104895 - DNA, 499 bp, Mimulus guttatus
  Intron number 2 from transcript mgv1a013540m (locus mgv1a0 13540m.g) derived from phytozome v7.0 (chr-ID scaffold_51; pos 244841 to 245339 reverse strand)
tagaagaagaatcccatttgtgacatttgtattgggtaattgacattaactaaagctgcttgtttgggttatgaactagctggttttcgattgttgactcaactattgtgctcactaaaatttctatacttcattttttgagtttatgcaaacacaattttgctcgataaaattgttcttcagtgatatattgaacttctttttatgctatgtctacaagtggtctacaagtgttccaggaataatgattaaatatgttaaaagcatgtaggcatagttggtgttttctgtcatcttaatgttgtaacttcagaaaagcgaacaatggaattttgcatttgttttgttttgttggatatctttggagatttatcaggaaattataaaatagcttattcaagattgctctcgtgattcacaggaattatacaagagtggttctgatctgatagttgtgctttcagggggtccagggagtgggaaaggtactcagtgtaca

SEQ ID NO: 104896 - DNA, 773 bp, Mimulus guttatus
  Intron number 1 from transcript mgv1a013540m (locus mgv1a0 13540m.g) derived from phytozome v7.0 (chr-ID scaffold_51; pos 245325 to 246097 reverse strand)
tcctcgcaaccaagtaccttgcgcaattttcaatttctatcgaatttctaatttgtttgatgtttctgatgaaatttctagcttgttgcgctgaatgttcgtatctcgtctgatgcaggttgcctatggattcaatgcttggcaaatgttcactactcaagttcttaacccggtatcgtgttaatgagtttttttttttttcattttttcatttttttttaattcgccattgaatgtagtttagattccgagtaatgtgatttccttttttttttgttacgattttaatatgaaaagaattttctcattcagctagaatttaaataatggaggagtatatatattgatacatacaccttctatatgttaatttctcacatgtttaaacttttgtcgaaccgaatcgtaattacaaaattcatcggttttcactttgcattcagtttactattactgtttctaccttaataattagtgtgtgccttaccccattgtcaggggagggattgtgttaggcaatcgatagctgattagcaatcttctttatgagattgacatttggaattacgattctcaaatttttcccctacaccttacatgaatttgatatttattttgttgttgtcagttcgtctgtgttccaatatggaaaattatattgcagttcataaatcgtaatttcaattgttaacaagattttgatttgtatttcattgtgtgcatgtttttaatgtacaggcagaaagtggagtctctgatagaagaagaatccc

SEQ ID NO: 104897 - DNA, 631 bp, Mimulus guttatus
  Intron number 1 from transcript mgv1a008684m (locus mgv1a0 08684m.g) derived from phytozome v7.0 (chr-ID scaffold_113 ; pos 281563 to 282193)
tagattcttcttcacgcggaaaattttgatctgaggttcgtcaaggcatcttcgttttcggaaagttctcttctcattttttgtctgtttcacttcatgcttgtgtgtgtgcgtatatgcgtgtgattgtgcgtgtttgagtggtgtgagagaaacggcttatggaaatgttaatttttatccgcgatttgaggtgtttggtgatttttttacaaattatattgccaagtcggtgtgttttttactccaaattatttgaatctagggagattttgctatcatatagttgttttttggagtttgtatggcaaaattgcaaccagtggcgcgattgcattgaattttgagtgcctagatcgtacttactggagatgaagttattactggaaaattacattcttttatatgttatatttcgattattgaacgaaagactgagatatgttcctgttgttttagttttgtatcaagtccaattcagttagtttggcaagtgtattttaggttaaattcgtctcagcttgtataacagtgactgaaaaaaaatatttttgcagttattgttattttatatatgttggcatggagatctgattccttcttctgtattctgtttcaggtctgaagaaat

SEQ ID NO: 104898 - DNA, 412 bp, Mimulus guttatus
  Intron number 1 from transcript mgv1a004367m (locus mgv1a0 04367m.g) derived from phytozome v7.0 (chr-ID scaffold_106 ; pos 256833 to 257244 reverse strand)
gttaatctagtatgatttatatttgcagtttgcaaactaataaaagaagaacataaaatcatgtacaattaaaaaaaaaaatatttctttacaatacaaaatactctaaaaccaaaccatgtatgcattaataattaccaaactaaaactccttggttttctcaaaaaataaataaaataaaataaagaaataaaaggaaacagaaactccttggtatattagacttagtacaatcaaacacgaaactatataaagcaatttcgttgagctaaatcagcgtaaaccccaatcgtaaagcacaaaacccctttctccaatttctcccttctctctctctctctatttactagcagagatcaaaaggagattatttattataattattattttttggttaatcaatggaggagg

SEQ ID NO: 104899 - DNA, 575 bp, Mimulus guttatus
  Intron number 1 from transcript mgv1a024576m (locus mgv1a0 24576m.g) derived from phytozome v7.0 (chr-ID scaffold_64; pos 306302 to 306876)
cccttcaactccctgtgtgtgtgtgtgtgtgtgttcttgaaaaatgaaaagaagaattgatggataaaaaatgtttctttacatttgaacatggattttaaggttgaattgttgagcccttttgtgggttttgcttttatgcatctctaaaagtgaaatttcttctgagtagctaaagtatttggtgactgaattgattttaatttatgattaaaaaaaagggggaaatttggatctttcttggcatgattgctgttaaaattactgtaatccatgttgttaggcaaatcttgattcttaatcttgtgttaagataactaactacttgggagattgagcaatagagcaaaagctttgagctttagttgtgggatgtgaattaacctaagtaaaaattgaatctttcattttcctaacaagatttcgataagctcatgaattataggtgaaatcgagcatttcgttgacaaaaaaatcctaaatcttttattgcctttagtacacgtttgaggcaattgttgaatgttaattgtcgatctgtgtaggattagcggacacctcatcgacatcgaaca

SEQ ID NO: 104900 - DNA, 556 bp, Mimulus guttatus
  Intron number 2 from transcript mgv1a000009m (locus mgv1a0 00009m.g) derived from phytozome v7.0 (chr-ID scaffold_11; pos 933243 to 933798 reverse strand)
ttctagaagagattgatcccgaggtattttattgcatttccgttcttgttgattttatactgcataatatagtattgttggaatgtgtgaatttatgaacattttggggagctaagaagtgttgcaggcttatgctatgcggctcttacgactgcacaccggtctggttacctctgaaaattgaaagcaatagtacttgaaacgcaataattttcggccatagggtctaacagaacctgcaatattctactttataagattgaacttcactagaatccgcaattttagtcatcttatatctccgatcaactttaaaatgaatctccctagtggcactacaaaaacctgagaaaatgaaacgaaaattattcaacagaaagaaatggcagaacaacagaattccatgatttttaggtgcaggaaattatatgtattcttcctttattttttttattatgtttttgagtttttgtttgatctttgaagctaaagtatgatttgcatgtctttgatgggttcagggttgtgctttgcattcttccattagaaagatatc

SEQ ID NO: 104901 - DNA, 622 bp, Mimulus guttatus
  Intron number 1 from transcript mgv1a006168m (locus mgv1a0 06168m.g) derived from phytozome v7.0 (chr-ID scaffold_6; pos 3958628 to 3959249)
cggcccatctctctacgtcctcgccgccatcgccggtaactctctccgaaaactctacttttgctttttaattaacaatcttcattagagattagagcttttgcgcgtggggaagatcgtttagtaccgaaattacaaaatgtttgtggaccggcgtaaataagctctgaaacttgttctttctgttggatttctcatcaaaattattgtttttaatagttacttaaaacgatttctctcttgatgaatatcttgctaggttaatttattgaaagggctgaaatgtattgtccataatgcacattgcttcgcggaaagatattctgtgttttccttatacgagagtgttaaatctcccctcgcataataagttcgtgaactccattacgattttttctactttcttttgtctggaggcatgagaacataggcaaccttaaaatttggttgaattaagttaatatgtaatgcgtgtaggtaatggttgagttttttcatttatcttgttattttcctttgtgaaagtgatgaattttatttctacttatgcaactacttaaccagagcagcataacaaaaggatagttttagctcttcaaagtgggctgaaaagtgaggtgac

SEQ ID NO: 104902 - DNA, 995 bp, Mimulus guttatus
  Intron number 1 from transcript mgv1a011522m (locus mgv1a0 11522m.g) derived from phytozome v7.0 (chr-ID scaffold_15; pos 402010 to 403004 reverse strand)
acgaacaagcagttgctcaggttcttactttctttttttgcatttattttattttttagatttgggggtttttttattgaatgatcagtttatatattataagcacgtgagcatctatttttaggaaacattgtgttattgatttgggggtgtaaacgtaatcaagtcgacccgagcacgtgtttgttcaagcttatttcaattttatcgagctttcaaagttgtgtttgagtttggtttgattagtaatcgagttagagcatgaattgagctcgagtagcttaattcgtgttttatctttttttccgaatcgagcttgatctatagccgaaaatatgtgttcaagttttcgttatgttaattaatcgagctccaactaactttaagagaacgatctcaaatcgaatcaacgtatcaagtagcttggtttgattttcagccctgttgtcaagtctccacaaacccgattttttatatgcgattcttgaaattttgtatggcatatgaacatacccttcgattctagatgataatggtccttgaatatggttttactgcgcctacttttttgtcttaaatgtgatgatttgtcaaatgattaatgttcaaggtggtctcttttacgatgttttatttagaaactagttgtcctaaaaagccctgttgagaaactcagagattaataatattttagttcctcttcattatgctcaatgcttgttgatttcttcgtcggtgggttgttatttgttaaccacgacactaatataactgtttttttaatggatcaaatcaacctcctatgtaatctttaatttcgcttctttttttccgaactcaactatagaaggcttaataaaccatcgttcgtctcattactttctttttcttctacttggctaaagaaaaatccgagcataaaaagaaagaagttaaatatgacacgaattaatgaatacgggttgtctattttacaggtagagactgcatacgat

SEQ ID NO: 104903 - DNA, 660 bp, Mimulus guttatus
  Intron number 2 from transcript mgv1a010978m (locus mgv1a0 10978m.g) derived from phytozome v7.0 (chr-ID scaffold_190 ; pos 64750 to 65409)
tgcgaaattcgcggctgataattttctgccattaggtgtggtagaggtgcatatagcagaagctcgataaattaatactcgataaattaataacctggattaaataatagtttctctctgtcctgactcggtgcaaacgtgttaaattattaactcgataatttaataattcgctaaattaataggatttaactgtatattacttgttgaattttttcaactaaattgtttaatcctgcaattttgtgattgtctaaattagaaactggctggttttattttcttatatgaagggcattatctcttgttttgtatcaaaagcgtgatttttctttccgttgttcgtatactaaagcatttttttccatggcttgacgaacacgatatcaaaatgtattgaatgtccttcatctaaatgccaatttccttttaaagagacgtagaatttgaaactattattcgaactgttttcgtataaaaagctagatctattagagaagtggcacggtcttcatagaggtgtgcacatacattaaggattaatttgttaccaatttattcttttttagttttcgggcagatatgttctgtgtactgacctgtatacgcatcgttgtggttgcagctcttgtctctggagtggtgttaggtcttgtgaat

SEQ ID NO: 104904 - DNA, 384 bp, Mimulus guttatus
  Intron number 1 from transcript mgv1a022653m (locus mgv1a0 22653m.g) derived from phytozome v7.0 (chr-ID scaffold_108 ; pos 186213 to 186596)
agtgcctgcatttggatttagcacattgtacaggggtatgtatgtatgtatgtatgcacgcgcgtattcgatctttcgtttttctttagtgatggtaatatctaatactgtctgtttgtatgtatgtgcattgctttgcagattattgattcactctctgtttgggctataagttttcataacttaaccaaactcgaactgactgctgattgtccttttctctcaaagtttctcgaaagtgctgataatcttcaaatccttattttctccgaggttagttacgttgatgccattaaaaaaaatcagctttaactttttgtgtactataaacccctattgtttcttttgtttttgttggtatcatcagttttacgaagaaataga

SEQ ID NO: 104905 - DNA, 465 bp, Mimulus guttatus
  Intron number 1 from transcript mgv1a012714m (locus mgv1a0 12714m.g) derived from phytozome v7.0 (chr-ID scaffold_54; pos 1200678 to 1201142)
attcgtagctccaatcgtgcgcagatctgccctaggtacgtataatttccttaattttttttttttaaatctgtgatgtaattgttctttctttctcgtgtgttacgaactttaattttcgttttttttcagaggtcgatctcgtgaattttagggtttcagatggtagattcattagttcgccttttgtttttccttaaactaattgattgattattcgctgttttcttcgtctgttcttcctacattcgtgattgtgtttaattttctttttaatttgcaggggctgattaattagtttttttttttattttttttttattttgaggattaatttgcattgaagtggagatatgaacttgtgcttttaagttttatatgttatcttgttaagttcataaagttttgattttgatttttttctaaacagttaccacttgaggaagaagaaaacacacaacagtt

SEQ ID NO: 104906 - DNA, 823 bp, Mimulus guttatus
  Intron number 1 from transcript mgv1a008025m (locus mgv1a0 08025m.g) derived from phytozome v7.0 (chr-ID scaffold_96; pos 837015 to 837837 reverse strand)
tgcaggttcgttacgttgatcccccgttttccccctgtcgttagccatctttgtcgattacttttttataatctctagctagttcttttatgacattattataactcggtgtgatcaagaatttcgaagtcggtatttcatttgtgttacatccaaatagaaagggtcttgtcgtcgcagtttgtctaaaaccatgttttaaacgcgaagatcagaataagtgttggaaattggaaccgaattttcgatttctgccgattccgatctgaaattttctgattttagaacaatattttcatgttgaattctgaaattgcgatttcctttttttcggtgtttaaaaaaaatggaattggaatatatataaattggagatattaatattaaataatacatattggaggtggtcattcaacatggtatccaaataaaagttcgaatcccatttcaaatatttcaaatgcaagacttcaaatgtaattcgtcagcacttgagggggggcgtattatttgagggggcgtattggagatattaatattaaatgatacattacactaacagcttaagcttttggcattaagcttttggttgaggtggtcattctaataatatacgagattgcgatttccgatccgatttagaattcctatttcctatttctccattttctttacagaatctggatgtgtccgatttccacccccaatcagaatatagtttatttaatttaattcccatacgtaatatgcattcgtgttttgacttaattaattaatgtgtttctaaggtttgctgggaaaaattcgcacggtacttcgaggt

SEQ ID NO: 104907 - DNA, 812 bp, Mimulus guttatus
  Intron number 1 from transcript mgv1a011171m (locus mgv1a0 11171m.g) derived from phytozome v7.0 (chr-ID scaffold_245 ; pos 296600 to 297411 reverse strand)
cacatctccggtcaaaattcactcccctcatctctgtaagtgttcccttcttccttccttcatcaagcgatctcaattccgtttctccaaatcagagtacgctgcatctatctatgtaaataagtcacatttgcggacttttagcaattacgagctgttcttgcctggggaatttgtttccgttctgttgcttgtgatgtgtgtgattttgattacctaggttttgattttgtgtacttttactgtgtttttttcaattaaggttaaactacttgttaggttgatcatgctattatgtatgctgttgagattgatacctgttagtaagtagtactgcatagaataaggttttacgcaacttctgaagatgaatcgtattacaatgatgaattaatagctattatgaagtcgtgccgcagttttgagttgttaattctgataatttaaaattaaatggcaaattcaaattgttcgaatggatccaacagatctacttatcgtttctatcttagtagattatggcctggaggtctccttttgcattatccgtattaacggaattatatgctagctgttttcccctctcgaagaagaataatattgcgggttcgcatttattgaaaaaaaccccgaatcattattttttgaatctttatgataaattatcttttatgatagtgaaaaatctggagtaagattcttttccattaactcgcccgtgcagttagttcacgggattaatcattagcttcattattgcaattgagattcaatacgtgtttgcaggttgaaacttatttctctgtttagcc

SEQ ID NO: 104908 - DNA, 593 bp, Mimulus guttatus
  Intron number 1 from transcript mgv1a010627m (locus mgv1a0 10627m.g) derived from phytozome v7.0 (chr-ID scaffold_96; pos 733374 to 733966 reverse strand)
gaggtaaactcgccgaggcaattttccctccttaactatgtatctttcttttatgttatgagggtatttaattctaattgggaaaattgggagttagaattttgaggtatggcttctctaagtctgttaattctagcaaattataaggtttattcatctaatttcgttacatagtggcattatggttgtttgaatggttgaattttagtgccctaattgggtagggttcacactaggtcagttgggattttctgatgtggcttttacgttttttttcgtaatttgaccttacctttgggggtgaccgtaatttacccaagcaataaaagatcaaaattcttggcagtctagcttttccaaataaacatgaaaggcataagaggggtaggggatgttagaaaagggataaataatggggtcgtctatttcaaattgtcattagccgagccgttcgagtttcttatgaaaaaacccattgtactagctaacttatattgctgtttcatggtcgtgtatgctaatatcttatctcgatcttgttttatgttttttcaacagcgattctggagtggaagtagtataagtaagaacaa

SEQ ID NO: 104909 - DNA, 435 bp, Mimulus guttatus
  Intron number 2 from transcript mgv1a010688m (locus mgv1a0 10688m.g) derived from phytozome v7.0 (chr-ID scaffold_8; pos 1758284 to 1758718 reverse strand)
attattatagttctcaaccccagaactcactaaaggtatgcacttttttctaggtttttttttttttttttgtttatgtttttgggcattgctgtttacagagagtttactgtgtgaattaattatatttatcggtagtgatggtaaatgtcaatttgttcttgatttctttttcctctttctcttcatttttttggggcaatttttaattttctatgagtatattcagtaagagcatatatatatatatatatgggagtgctttcgtttcggttcaatcgattttcgtttctgatgcatcaactcaaaatgcaattggacttgcactagattgtcttcaatcttgtgttttcttttttcgaagtatctgcgccgatttgatgaagtaataacacgaaaattccctatcttgagcagattttgaaaacttgtagc

SEQ ID NO: 104910 - DNA, 792 bp, Mimulus guttatus
  Intron number 2 from transcript mgv1a012073m (locus mgv1a0 12073m.g) derived from phytozome v7.0 (chr-ID scaffold_13; pos 1170545 to 1171336 reverse strand)
taccgcgccggcatcgtccccgttaacttccgccggtaataactcctcactcttccctaggttaatctttcaagggtagttctgtcttttcactgccttggtagttagtattctgactgcgcatagtgtctgcggtagggataactgtggacagaactgccctttgtgcagaatatggtttttttttttttttttctattacatttattttattccttttttttaattagggttctaattttttatgattagtttttgtccgaatctgctgaattttagtgtcctgaaaacttacagaatccattctatccactgcaaatgctttattcggtggtataaaatataaattaacgaacttcccaccgccgctaatttttacatcgagggtagttttgtcattttaactactctaactggactaaaatgcccacttgctttcaccaccgtagaaatactgtagctgtaaccatagagggtttttattgtcctttcacagtcaagcatccccaaccaaaaagtttaaatatcagtaaattatgtaactacttaccaaagggcattaatgtaattttatacctggtaatttgttgccgtgaaatatggaattggcgtgcttcgggttcacagagtcacgatatcccacgcgctttcgggggcccacaatctacattaaaaagcgcaccttaccggaaataccggtcaaacctagggttcctcctcagtgaaaagataaataaataatttgaacttttgatataatattgcaggataccgtgcagaaaacaaggaggg

SEQ ID NO: 104911 - DNA, 783 bp, Mimulus guttatus
  Intron number 1 from transcript mgv1a007001m (locus mgv1a0 02926m.g) derived from phytozome v7.0 (chr-ID scaffold_195 ; pos 126813 to 127595 reverse strand)
tttccaccccgaaggcaaggtaattaattcaaccctgttttgaacattatttttttatttttccgtatctccgttacttcaattatattaggtagcaatggtgattactgggattttgtggtttttttttttgaagtagaaacaacttgaacaaggaagtgtgttgttgcagaaatgtttgcttaaattttacagacgatatatatatatatatatatatatatatatatatatatatatatatatatatatatatatatatatatatatctgtctgaaatgtaatctgatataagaaagtatgtgttttccctttgctattgaattccggatatttatgttacggacccgacttcgactaccgtttcacaagaatcggtagattagctcattataaaagttgatttcgttgtattcgatatcttcctctaggatagcttccatgttcagggtttatatttagcttagaaagaacttgtagaagtcggcaaaaacaatttagtacagaacagtattttcttagagaatctttacatttcagctgcttttagttagttttgactttttaagtttttatgccaagaccgattggacaattaatttgtcgtttatttataagctcatgagagttgtttgttgagtacgatgaaattaaatgagggccactttttcaaaaaataaacttcttcctcccacttactgagtgacaccgatattttgtcggctttgcaactacataatgtttttttccctctttaatgcagcctgcacctgccacttacg

SEQ ID NO: 104912 - DNA, 747 bp, Mimulus guttatus
  Intron number 2 from transcript mgv1a024483m (locus mgv1a0 24483m.g) derived from phytozome v7.0 (chr-ID scaffold_92; pos 229651 to 230397)
atttacctctggcccgataaccctaccagataccggtatatacatacatatacatatataagtgtttattgcctttagtacccctgtgtttactctaatcgtcaaaaacacccccatattattaatattagcaaaatctcccctatatatgatccaatcttattagcaaaccacctctaaaaacgcaccacttagagagttgtgtactaaataaaatttagggtaaattacaagatcaaattacgaaaaaaccccttatgttaactatgaatcttctaattacacatccacccttatggtgccaaattcaacgaaatcttctaaattccacggaatgtatgttctctagtttgtacccttattttgcagttttttgatgcactacaatctgatatttacaagccaagagatacatcttatgatcatcatatttcaaaacgcgaacctcgaatgggggtaaaacgtgtacaaactggaaaatactccacataatccagaaaattctactaaatttgacaccgcaaaaatgaacgtgtaagaagattcatagttgacgggcggttgtaattgcccgaacattaggaatttttttcgtaatttaaccttatctcaaaagggtggcttgtaattcaccctaaaatttataacacgaacatttttttagcagttcgatacaataaagtatataatttttttcttttcttttttgaagtgaagtagttggtgaatattcggttgaagtgagga

SEQ ID NO: 104913 - DNA, 431 bp, Mimulus guttatus
  Intron number 1 from transcript mgv1a014730m (locus mgv1a0 14730m.g) derived from phytozome v7.0 (chr-ID scaffold_41; pos 41816 to 42246)
cctccaaacgaagactcagttcgcgcacaaaataggttaactcccgaataattcttttccatgctgaatttttttagttatttaaagttgaatttatgtggattccagtcaatttgtgttctagggttgcggattttaatttcagaaaataaagtatggtaattaatccgaagtgtcaattacgtagtaatgttattgttctgttaattatcgtaattcaaaatctgaattgcttttttttttgggcaactggatgtattggccgaaatcgaaaggagtcgaaaagagagaattttttgaattgcaaaaaaagaaaaaaaaaaattgttttgtttgtacttttaactgtgcattaactattcgtcgtaaagtttgtgagtacgaaactcttgaatcgatgttgattgatgaggttgtttacggtaactagg

SEQ ID NO: 104914 - DNA, 795 bp, Mimulus guttatus
  Intron number 4 from transcript mgv1a002164m (locus mgv1a0 02164m.g) derived from phytozome v7.0 (chr-ID scaffold_396 ; pos 41994 to 42788 reverse strand)
ggagtcactacagtttgcgaatcccaaggtagctctctaaatttcttttgtttcactaatacacaaaaaacacttatctattgtatatgtaattattggaatcaaagtcttattcagcatgttttcagaaaacattagcatttattgttctttataatttgttgtaccattctttggttctctctgtaagagtacacaatgcgatactaagacaatcaatttataagatgttgtttctggaaattatatagggatagagttccatgtggttacctttcttatctgttcagtttcgtatgattggggctgttataggtttgttgattttaagtaaccattatttgtttctctgctgtaatagggttcaggtatttaagattttctatttcacattcttctgcattgcggttttgatatttttgtgaataaaatactatattaaattgaagattttatacgaataaatcttcttataattttctttcattcctttcatcagaactacttacattagtacgcagtaggtttccaataaactgtagattttgttttgaggatatattataaaagcttccagactttgttaattttatgtttttaaaaatcatctatactaaattggcctgtggctggagttatggcttttatttttacatcttcgcctgtttcattagctatgcggatgccaatcaataaagcacccaaaacgtggatactcttttcctgaattgttttttgtaggtaatattatggtgtcagtttcactataatcttactcattcctttttgaacagg

SEQ ID NO: 104915 - DNA, 731 bp, Mimulus guttatus
  Intron number 1 from transcript mgv1a003857m (locus mgv1a0 03857m.g) derived from phytozome v7.0 (chr-ID scaffold_89; pos 212873 to 213603)
aggtatagttaaattacgaaaactcccctcatatttgagtaattacaatcataagtctttttacacgtccacctttgcgatgtcaaatttaatggaatcttctaaattatagggaatattttcaattttatacctgttttatcttattcgagctccacaatttgaagtaaaatgaccgtaaaatgtgttttttgtcttgtaaatatcaaatcgtggtgcatcagaaactgaactttgccacaaaatgtgtacaaactagagaacattccacaggatctagaaaattatattgaatttgacatcggacgtgtaagaagattcatagttgagggatagtagtaattatccaaacatgatgattttttcgtaattttgaccatactcgaaggatggttgtaatttaccatttttttataacttttattattattattattattattattattattattattattattattatgtgtgcccgattatacaaattaattgttaataattacccctgtatttcaccaggtgtagtattaaataaatgagtgtaatccacctactcctagataaagattcgttactagttaattgcacaaaattacaagaaaatctgactcatcccggaattaaaaaaacacaaaaaaaattaaaaaaaataaataaataatataataattaaatttgctggaaatcatccagtcattcaacagtggcgctctgctctgcattttcat

SEQ ID NO: 104916 - DNA, 611 bp, Mimulus guttatus
  Intron number 2 from transcript mgv1a019225m (locus mgv1a0 19225m.g) derived from phytozome v7.0 (chr-ID scaffold_48; pos 1293574 to 1294184 reverse strand)
gctatcgcccaggcaactaagttcctttcttcctggtctctctctctctctctctctctctctctctctctctctctctctctctctctctctctctctctctctctctctctctctctctctcttatttttgtgcgtgcgtctctgtgttttctttccctgatttactaattctgatggggttttcctgattctagtttatctccttgatttatgttttatgtgtgtgtgtgtgagagagagaattagaaaggggtttttgtatgatagaagaaatactggagggaattatcaatgtcgcacaccaggtgttcgatcattttaccggacactgtttccaatttctaaaataattaattaatactttgttgttgaattttggtttctgttgcttagctaagaacaggtaaactagtaaaaccacacaaataaatgctaaatatgctagaggaaaactgaattttaacatccttgaagtttgaaattgtggttaaacattttcttgatattcacaaaaaataataatatgatggcaaaattcttaaaaaaatgttgaaagtcgagtactttgtgtaggtataaggaaaaccgttgggatctgaagcaactgg

SEQ ID NO: 104917 - DNA, 940 bp, Mimulus guttatus
  Intron number 1 from transcript mgv1a018567m (locus mgv1a0 18567m.g) derived from phytozome v7.0 (chr-ID scaffold_38; pos 483834 to 484773)
ccgaacttggtttcgagtgggtcagggagctggaggttaggaatcgggtataggtgctgtccattccatagacgagagacccgctgacccactagtggttttagttggtaaaagacaacaggttcaagacaaaggtatgtcacgggagatggagcgaaagcacaaggccagttctcatcaactgagagctccactccaagagagggaaaacaacacaagttgaattcaattccgtgagacctatgaatgagatctattaggttaggagaccctttgaccatttgaaatccatatataacagtagaatagaacgtcgaagataatgcgccttttaaggatatgggaatcaacttcgccttcatcaaccaaataggaatcaaggtgagagccgtggccgggtacgaacgatgggtcgtcgggttccagaagtctcatgttcggaacgtgtgagagctcggcttggggcctaagaaatgaatataagcttggattaaccaacaaagacgtagcatgtgctgaaaggatggatagcgtcaacatactacaagtggcgctttcctaatcaaaagataggagagcaccccttctcccgacccgaggagtgaacgaagctcagtggctcagtagcctttctttatcgattgggtcctggttctagggtgccctcgtaacgtaaggctctggaagacctcccccgctgcaaggagaaagagactaatttagtgaagtctgacatctgttcttttgaacgaatccggtgatagtccttcctttgcttctatttgagattggtttcttagaattgcatacatagacaaaacttcgaatcaaatcattttttctcgagccgtacgaggagaaaacttcctatacggttctagggggggtattgttgatctacatctatcccaatgagccgtctatcgaatcgttgcaattg

SEQ ID NO: 104918 - DNA, 625 bp, Mimulus guttatus
  Intron number 1 from transcript mgv1a002321m (locus mgv1a0 02321m.g) derived from phytozome v7.0 (chr-ID scaffold_2; pos 3220771 to 3221395)
ttccaggtcagaattgtgaaattgaaccgtctattttgtagattgagtgctatttttgtaattttgcttgttgactgctgtatttaatgcttttgaaattcaattgattttcattgtttgtaaatatagtgccaaattaggcatatcagtatggcggaatcccttcctggttctagttcatccgacggtgtcagtattcgtccagactgattgttgattttgatttttagttttgggtaatttgaagcagtggttgttaaaacactaatttgtcgttgattttgatatcaccatctgatagtgtttttggcaattttactctagaaaaggaagtcttattgtggtatttttctgaactcgattagttagtgattagcgtattactcgggcctctgaaaattttgtttagacattcaccacaatttccagatttttggcatatcaaccccgatcaggttttttggagcaaacaagatgatatgcttataattcgaggcagtttatttttcataaaaacagaagctatatatgtttttcatatttagacttatactcgtctgttgcattcctgttcttcattttggttgtaggttagagctgctgaactgaggaagatattagtgca

SEQ ID NO: 104919 - DNA, 861 bp, Mimulus guttatus
  Intron number 1 from transcript mgv1a009380m (locus mgv1a0 09380m.g) derived from phytozome v7.0 (chr-ID scaffold_132 ; pos 459531 to 460391)
cgttactatttcgcactgcaaagtaaaatattcaggtattttgttctcttcatatgcatgccattttttttgccccaaatatgtaattttttaattatttttttattttttgtgcttatttgagctaagtactgccgaaattgagctgagatcttgcaatttttttggaaattttgtttttttgggggtttttaatttattttagtaatactgtgattttgtggctggtgttctggatctcctttgatattttgccctggctaaatatctctgtttctaatgtctctgggttaattaattaattaattaatttatttatttttcaaattagtaatttctgctttggttatggtccttctggatcttcgaagaaataaatacttctatttttaattaattttttttaatcaaaattttcatgcaagagttgaaaaatacctaattgattcaaaattgcttaatataaactgtaattttttttttaacttcacttcactttgtttgttggctgtaaaaatggtggttttatctgtagggaattactcaaattaattttatttatttattaatgcattttcctgttattaagttaaataaaaatctctcttcaagatctactgatcactggggttagaaaataattttttttttgctttttaacatttttaaattgaattgtatattttgatgaacactattggcttttatagctgttgtttattcaagaactgatgctccgtaattttcctgtattgaagtagaactgtttccgattaggatatctaaaacttgtacgtttttttttttttgttttgtttttttaattgcagattcttacaaccttagaaaagaacaaactct

SEQ ID NO: 104920 - DNA, 929 bp, Mimulus guttatus
  Intron number 2 from transcript mgv1a002725m (locus mgv1a0 02725m.g) derived from phytozome v7.0 (chr-ID scaffold_81; pos 750497 to 751425 reverse strand)
aggctattcttaatcaatttgatagatcacgccaggtctttctactctcttttatttattatcaattaaggcctcgtttggttggggagattagctactattaactaaattattggactttgttggacgttctagggtcggataaaataattgggtttttgtttgattatttaatcttatcttggcaaccaaacgaggccttaagctatttgatagattatgttattgtttaattttttcgttatgtttattacaatttttaatttcgcaagttacctatgtttctattgtttactttcatgctatttctttaggaaataaaactgtgacacaagtttctgcaaccggaaaattgcatttgttgggaagtaatatatagtctagatattgattgcattttgtgtatttttttctaaactcgattctccaagacttatcaaacttagacccccaatgtttaaaaagaaaatatgccaatctatgctttgtggttttaggtcctctcggtaagtttcggcttccatagttccaatatatacattgagagtttgaagctcaaactaattgcgtattaaatactagactgcaaatttacagttatttttgcagttttccatcttaaataatttaataattttcacttggcacatgcatcatcacgggtaaatatgcaccatgaagtgttttaactgaaagggcgaaacatggttatgaatcttcttggtgctgttagtaatccagataaaacgttgtatttgcaaacgaactaaactgtgaacaatattacaatatttgaaaaattcgctcgaattttctgcatggagctcaagcctgcttgtgtcgtgaaaagttgacaagattttcataaacttcttatatacgatgcaattttatctttcaggctgaggctaaaatcttaaggggcccgc

SEQ ID NO: 104921 - DNA, 595 bp, Mimulus guttatus
  Intron number 1 from transcript mgv1a006190m (locus mgv1a0 06190m.g) derived from phytozome v7.0 (chr-ID scaffold_36; pos 713000 to 713594)
cttcttcttcttcttcttcattcaagtaaggaaaacgagaaacaatacgcttttcgtcgttttcttttttacgtatatccgtctaaggtgcacatccatttatgtattcatataattttattttatttttgttcgtataatttttctcctatcggacctgcgttgcggctttttaggttatttcgtaataaatttcgcgataaattctaacgttctttgatatgaacatgttaatgtgaacgctagtcatttgttcgattgcttgattgacgttgtgaaacttcaaatttattcgaaattttcttttattttcttctgtcgaatttatgtttgatatgtgtagattgtggaaaagaaagaaagtttccattcgtacaatttggatcatgtgtaaatcccatatttttttccgttcatctttctttaacattgtcaaatatagttactagttcctcgattctctagcaggcgacatgcaaattcgaaatttttttaaaaaaaaaaaatccgattaaattatgtggtcgaagctaatttatgcagatgtctatttttgccaggttgtctgcctaaatctgccaactttctgttgaag

SEQ ID NO: 104922 - DNA, 402 bp, Mimulus guttatus
  Intron number 2 from transcript mgv1a014988m (locus mgv1a0 14988m.g) derived from phytozome v7.0 (chr-ID scaffold_334 ; pos 61656 to 62057)
aagttgttggaatttgtacccaggtattttctttaatatattctactctgtcaatagattttctctaactaattttcctgaagatagtgtattttttttaatcaatctcaacgaagggtgaaatttgaattcttggagctcttgtgcattatatttatgtactattaaaaacaaataaaaaaattgaagtatttgttaagtaagtattcgatatgtgagtgagtaattggttcgtattcatatcattccatcatatatcgtttgcattgttctcctgctttcgtttccaactggggtcttttttcggtatgtgtgatgtagtagcatcaataatgttcaatacatctgctgaatttcgttacttataaaattatgtacatgtaacagatcttcaacgagttc

SEQ ID NO: 104923 - DNA, 450 bp, Mimulus guttatus
  Intron number 1 from transcript mgv1a007943m (locus mgv1a0 07943m.g) derived from phytozome v7.0 (chr-ID scaffold_1; pos 1586929 to 1587378 reverse strand)
cttcttctggacaattctctggtaatcaactttttttttcctttattgctgttcaaattttgatgtttgttcttcttacaatgcaagattaacaagttggtttcatatcctgcgattttcttttttttttttttgttgttggagttgtctctgtgaacttttgtcgaacacgtggtgtgcgttagtgaaaattgtgattagtatatattatatgctgtgtagagcaatttacacctctgaaattcaaccgaaaacagtcattcttgataaatttatttgaaggagcctccgaaaaatttggctcctgaaattcatgggaataattcctattagctatggtgtagaaaaaaaaaatcttatttttttcttaatatatatatatatatatgcatgaagaacatgattaattcttgcaagtatttcattccatttcagacaataagcatacag

SEQ ID NO: 104924 - DNA, 250 bp, Mimulus guttatus
  Intron number 1 from transcript mgv1a009044m (locus mgv1a0 09044m.g) derived from phytozome v7.0 (chr-ID scaffold_11; pos 2514463 to 2514712)
tcaccggattcagtgttgtcgtaagcccccacccccttccagttttccccaatttttttttatgtttttcaaaaaccctactatttcaatcagaaattcgtcatcttcataataagttcaaattgagggggcttctctacaaaatttaaaaccttaattatatctccaatttgattaaatagttgaaaattatatacacgtaaatttagtagatgaagaaaataatttcaattttgctctgcagtttgga

SEQ ID NO: 104925 - DNA, 893 bp, Mimulus guttatus
  Intron number 1 from transcript mgv1a024342m (locus mgv1a0 24342m.g) derived from phytozome v7.0 (chr-ID scaffold_1; pos 1763679 to 1764571 reverse strand)
cctgatcttcatattgtcatcgccggccgtaacaggtgattttcatttttcaattttttttttaaattatttttgcaatgcctctccaaatgtagcatatgcatctctctctctctctctctctctaaaaagatatgcttgggtttacttttttatttttgagtaatatatacaatttctgggaatatatgtatgtatatattgacataatgatatataaattggaaaattacgtaatgtactatttgatttcaataatgattaatgacattattttatgaaaatagtacatattaagaaagaaaaaacaacaacatttttttgctacgttaattaagatttgtttgaccctacaccggaacccggtgataaacaccgggtgggtcttctgctatcatatatctcttttttgtattttataatagattccccgctagaaaaataaaaaaaaggaacacgtggcagcagaagacccacccggtgtttatcaccgggtgtagggtcgaaagaaccgttaattaaccacccctcggtactactaaaccaattatttagattttttaatcaaaataatataatatatatatatatatatatatatatatatatatatatatatatatatatatatatatgaggtaataaagaagtttatgcaatatacatagagatatttgtaaaatttaaaataaattttgctaatccatgtgagtatgtgaagtatactgtatatatcatcatagatcaaaattttgaggttacttatttgcacatggaaggttaattgagcttaatttaattattatttatttttaaattggaatattttctcttacatataaaaaaacccgtgtgcagggaaaaaggtggtcgagttgtagcaacgttgggtg

SEQ ID NO: 104926 - DNA, 522 bp, Mimulus guttatus
  Intron number 2 from transcript mgv1a002017m (locus mgv1a0 02017m.g) derived from phytozome v7.0 (chr-ID scaffold_4; pos 2419398 to 2419919 reverse strand)
gacgaactccattctttgtcccagcaaaaaagtcggtgagttaattattgctttttcctttagagattattattatttattaaatggataagaattcagggttttgattcaatggatttgtgaattttctgtacatcaattctttctgttggaagatgtgcggcttttaattaaaaagaaaccctttagcttccctttatcatttattatttcaagagtcggccaatataattttctctctggttttaattgtgtacacatttgagatctggttgatttaatttatataaattaaaggtaatagaaattaaattccagtaaattactcttacaatggagatcagcgtagcaaaaagagagatcttggcctgttaagtttgttttcgactatcgttttccgatcatcgaagtttttccatttttgaattactttgtttatgttcaaactaataatcatgtctgagctcactttaatttgttttgacagattgaagaagaagactagcgtttttcgagcagctt

SEQ ID NO: 104927 - DNA, 679 bp, Mimulus guttatus
  Intron number 1 from transcript mgv1a002017m (locus mgv1a0 02017m.g) derived from phytozome v7.0 (chr-ID scaffold_4; pos 2419976 to 2420654 reverse strand)
cctaaccctaattcctgataagggtttcaacaacagtaagtttatttacacctttaccatttagctcgcttctgtataatatatactcattcttttcaacttccatttttctgctatttatatatataaaaataaaccggaattaaagcgtgattctctccttctaataagttttaaattttgtaacttgtattctaattttaatgttttcttccgttttattttatttttggcatgtagagagagagagagagaatctgcatccaccgaatatgtatgtatgtatgtatgtgtgtaacaagggtttgaaaaaaaaagatagaggtagctataatatagtagtagtgtgtcaaacggtgagttcacacagagtcaactctttgctggtttttttctcgttttagtcttttggcacgtcactacagcgaacatagaaagtcttgtttcgaaaatcaaaaaagtccatctcctaattaattaacataaaataaaaaaaagaataaaaaaaacaagaaaacgaggaacaaaagtccattgttagtctgttgttattacatgtaacaatcccatttgtactttttttctctcaaacgctctgccagagaatcttattaaactcaacgcactaacttttcaaacaaaagtttttctagggtttcctggaggtgaagatccgcag

SEQ ID NO: 104928 - DNA, 799 bp, Mimulus guttatus
  Intron number 1 from transcript mgv11b014929m (locus mgv11 b014929m.g) derived from phytozome v7.0 (chr-ID scaffold_3 43; pos 94543 to 95341)
tcataggtaccaaatgaatttttagaataaaactgataaatttggaacataacacgtaattaatctagactatttgctcaagagtatacttaaattgaaggagtagactttgatgaaactttcgttctagtagctcgtcttgattgaataagactattacttgttgtgtcttgtgttttaaaattcaagttattcaagtggatgcaaagagtgcctttaggaataatcttttaaatgaagaagtttttgttgaacaaccaaagcgttttcaagatcctcttaaaactaagcatgcgtatggacttaaaaaggctttataaggtctaaacaagcttctcgtgtttggtctgaaagacttgcaaactttttaattgaaaaggagtacaaaacagggggagtacataaagcttttttttaagataaaaatttcaaaagtgaactcgttaatgctcaaaattatgtggatgacattgtttaaaattccgagaatctgaggcctttgatttgattgaggtctttcttcgtctattgacacgtgtcatgcccaatctcgtgttctgctaaaattcctgaagaaatgtgtgcttatatgtttgttgctttatcacggaaacccgatatttgattagatttgtttcttgacaagcattggtgcaagtgagaagtctcttagaagtacacttacgaagactcatgctattctaattatctttagcaaacttcttcttccttggatacaaagtgagcttgtgcatctattttagccaagaaatcatccacagaatcatcatcatcagca

SEQ ID NO: 104929 - DNA, 993 bp, Mimulus guttatus
  Intron number 1 from transcript mgv1a015447m (locus mgv1a0 15447m.g) derived from phytozome v7.0 (chr-ID scaffold_255 ; pos 24488 to 25480 reverse strand)
ttcgtctccgttttcattctttcggcttatcaagagtaagagcttcaatgcttctttctctctctagatctattttttcattatttatttatttaattattaatttttttttttgattttccattttcagtagcttgtttgtgtagtgggtttatcttcttgagctgaaatttcaagtaattttgttcgatttggtccgaggttgttagttagttcatgtttaattaacctgggattttcgattggatctatggttgtttaattaattaataataatgtgaattattacagatactctgcgccattttttgcttcagtgatgttacttcgattttcagcaagaatttatcttttatttatttatttatttattataattttttaattgatgtttcttgaataagtctcttgttatgatgatagataaattaggatttatttgcactaactttccgcaaaaaaatatttgtcgacagaagtttttcgatatatagattagttagatcctacgctgcatttaccgtaaattcttgatttcgatgataaagaacttgttttttcaaaaattatttatcgacagaagtctttcaatacataaattagatcctatgctgcatttaccgtaaaattcttgattttgatgataaagaatttgtttattttttatttttttgttaactgtgtgtcagttatagtggttcatttactaaggcctcgtttggttggtaagattaaccgtgtttaattgagtaattggaccttattggatgattagttagtccaataacttttcgggcctggccgggccgcagttgtggaaaaaatggctatttctaattgggagattacttaattgacctcctattagccaacaataatacagttatattttcgtaatttgggtaatcttttataggaaaataattaattttcgtattttgttgtatttgctcgaaattgcaatttcacacaacacgttcgtacctaggttca

SEQ ID NO: 104930 - DNA, 518 bp, Mimulus guttatus
  Intron number 1 from transcript mgv1a003153m (locus mgv1a0 03153m.g) derived from phytozome v7.0 (chr-ID scaffold_2; pos 346196 to 346713)
gttaccgctgctgcttcactcgaccggtcttctgcgtatgaattcattttcacttgaatcatcatctgtcgtagatttatcgggatactttaacactgttcgttgattcaattaagattttttgatcgcaaaattgatgtgtatgcgtcatggcatgtggtgcgacggggagaatagtggaatattgtcaacaacctgttatttgaatatctgttgtttgaaattttggggaatagtgtcgtacttttttatttaagaattctgttatttaggtactgcattactggagattttgccatgtttcattttgttcgtattcacccatgcaagagaaagaaaagaaatgcagcaagtttttgtttcaataactgactatgtggattggttctatttacgatgatgatcacagttgattctgtattcattattaaaaaacagatagcgttgtggtttttgattgtaagatgattttccatgtcccacacacaggattacacccgaggctcgtagaattttta

SEQ ID NO: 104931 - DNA, 1034 bp, Mimulus guttatus
  Intron number 2 from transcript mgv1a010892m (locus mgv1a0 10892m.g) derived from phytozome v7.0 (chr-ID scaffold_98; pos 305620 to 306653 reverse strand)
caaccactctttcggctcagattacattgttgcaggtatttgtgcactgtccggatattttttttttggcactgtctggatttttatgtgattgtgctcggaattttaacttttttaattacaagacatggaaattctatgtccgttgcttaatgctttctcttcaaaatcaattgaagctccatcgagtaaaatacatacaaagcatattgcgtatgcaactaggtttctattcttaatagataaaagggattgtttattgttgaggcttttttatcaatttgacgatcaagcaaggaaaaaggtgatgaatcgggaagtaactctaaattatgtcttttgataaacaagaaatcttgtgatgcactattaatattgcaaaattagaagattaacttttgggcttatgctgctgctatgcatttcatcctgtatctaactggttgtgacttggatttttttaattttccgagagatgctattgtgcgagtagtcaaaaaattgaaatcaaaacaaatgttgtatggtcaactgccatcaaattagtaatttacttattactgaaaaaatgatcgagtatgaaattgaatttgttacatgtaaatattggtatttttttgtatcaataaaagtttaaatagaaaatgctcgaaagtattactcccttgcacccatgaataaggtctagtcaatttcatctaagcttcataaatacgcacacaccgaaacgaacagtagttgatcagaagaatataatgtttagattagccctccaaggtcaacagttcattgactgaaagtatagttatgtccagtcaagaatctgctgcagaattctgtaggtatatttacattctctcttacaattgtagaatgtatcctcgtctaattctttttacgtgaatgtgcttctactaagttaattaaccttgaaaaaaaaaaacaagagtgagaaaaacaatatacgatattattaaaaaaaaaaaaaaagttcaactcattcgtactatgtcgaactatgcagagagacacga

SEQ ID NO: 104932 - DNA, 948 bp, Mimulus guttatus
  Intron number 1 from transcript mgv1a006152m (locus mgv1a0 06152m.g) derived from phytozome v7.0 (chr-ID scaffold_117 ; pos 177324 to 178271)
gcttcccctttgcgcctcccttctctccaaaacaggttttttttttttttaaattactcccaatttttttttactgtccgttttggaatatctactgaaagtgaaaaatgagaatgtaatttaatacattgagaaagaaatgaacagatcaaattttagtttacttattttgtaaaggtcccgaactagaaagaggaaaactaccttgcttagtgtttgtttacttttactgtggcgactacttatatacatagaaatgccaacggtcgctaggtggaacttgtcacacatggttagcctagtgtggtttacgtctcctctagtatggtttgcaagctattatacgaaagtgtatatttacttagtgcagtgcacctatatggttggctgcgggtttctttatcacaaaaaaataaaagaaatgcagcggcagaaccaggaaactttggttggggtttgagggttttagagggtgaactatttaactaaaataatataaattaaaatacctcttgtacatcataatattgtcattataactccttcaattacatattaatgtaggtaggcttgatagaagaaaaaatgtaatttaagaaagagtaaagactttcagtttttatattttttgtttctaattatgggctttaatcggaattagggattgagattgcaagaaaaaggtttcaaagaattgattttgatagaaaattcatttcaaaaaatataaataataatttccaacagaggccaataaattaaaatttagaattcgaaaatacaaactcaataccaataattaaaaaaaatctggggggccacggccctcattccccgacaaagttccacctatgtagaaatgcatatttcacaactgttgggagaaattatttattttgttatatcattgcagtttttgctccattggtacgtgtaattggatacagg

SEQ ID NO: 104933 - DNA, 623 bp, Mimulus guttatus
  Intron number 1 from transcript mgv1a023664m (locus mgv1a0 23664m.g) derived from phytozome v7.0 (chr-ID scaffold_129 ; pos 183392 to 184014)
cagccgcgccgtgtagctgctgttgcagtatcaaggtatttttctcgctttcagatacgagtttacttatgtatttacacggagatcgtttttctaggtctgattgtctatcttttatgtttttcttcttcgccttagcagtttgattttcgattttcttaacttatagtgaagtagttatttgcagaaaattgctttggcagaatttgggagtttaatgagtgaatttggcactgtactattcacttcctagagtaggaagctacctgtttgttcatctaatggcgtacttgctatggagtgctaatcacagacttagaagttagaatgcacgtaatcgtactagttccacggctgatataaataactcatctgaaataaaaatctagaaattatggttacttcaatcggtacttatctgagaaagggtggtatcctgtttctttgcattcaaaggcagcatggcttttgctgatttgcaatagactacgtttgagtttcgtacttttgttagttataaatttcacatgtttccgtatttctctcggtgtgtgcatgtccgtgaatttttaattattttttccctcccattgtaacgaacaggcgtgttgcagaagaattgg

SEQ ID NO: 104934 - DNA, 368 bp, Mimulus guttatus
  Intron number 1 from transcript mgv1a017093m (locus mgv1a0 17092m.g) derived from phytozome v7.0 (chr-ID scaffold_129 ; pos 113409 to 113776)
atctctgcttctagttcaatcgccgatcagctaaggtaaatcactcaacattattcctctaattcatctctttccgatgatgattttttcatgtttgcgatttatcctagcctcaatttccctttacccatccgaatttcttattccgacggtctcaattttcagaatctagggtttttattatgattgagctcttctacaatcaaagccggtttttttcttgtgtttttcgttttgatttgactatcgttggatctcaaatttcagaacctcgatgaaagcttttgaatatgtttatttttaaggaatgatgaattaaaatcaaagtaatggtctttttttttttttttaaatttgcagatttggag

SEQ ID NO: 104935 - DNA, 530 bp, Mimulus guttatus
  Intron number 2 from transcript mgv1a005097m (locus mgv1a0 05097m.g) derived from phytozome v7.0 (chr-ID scaffold_18; pos 1969245 to 1969774 reverse strand)
aaggtctgtggtgcatcgatcttgactaatcaaacttaaaattacagttcattgcttgagagagattgattatgtgttactgacgggaaataatttgcttctatgtcttggtgaaaaactaatacaaaatgtccaaagaattggatgaacttgactcatgtattattttggagtgtgttttaattggacatgttcttcataacattggatgaatattatctctattacttttgtaacttatgatttgtatatacatgtcaattgtcagcaaccttttagataaatattgcaacagcactttagatagaattgttgactaggatttgattgtgtatatatgctaccgtatcgatgagaaacaaaaaacgtgaattctcccatattcagtctataatggtattaaagcatttttaaggtacccataaatcccatctaccattttgaagatacagtagccattttttttctttgatctcggaaaccatctaatcaccattaacgtggctgcacatgtgtatttgcagatcatt

SEQ ID NO: 104936 - DNA, 889 bp, Mimulus guttatus
  Intron number 2 from transcript mgv1a012617m (locus mgv1a0 12617m.g) derived from phytozome v7.0 (chr-ID scaffold_27; pos 1547165 to 1548053 reverse strand)
attcgtatttaggttagatttctgatattatttgtttctgttttgaacttttttgattctcgtatgattttgacggcgtttaccatattttatgtggattgtgtttggaactaattgttgattgattcgagacttgactactccaacatggttatatacttttgagccgtttcatcatgcttaatactatttcttgagttctatataatcatccaagaagatgttaaatgagaaaatcattcgtagaataaacgataactactaaatctgtccgaccgttgaatctgatggaaaaatataacggatggaatctttaagttgtcgaatatgtttgcttggttatgaaacttcagtttgtaaactcaagtcctttgttttttaagcagataggaattggtgtaaaactcgcttatttggtctataaatatggcatctgagtagacgttccgagtaatgttagtattccgagcaatcagttatataagattcatattagtgtttaaaacacagtccttgttgcgttttttagtgcgtattatattttcttagcttatatctgatgaaattattaaataaactgtcaatattatttcaaataacgagaattcgaactgactgctcaaaatgaaatatgcaggacaatacaatattgagcagtctattgataatttaggcttgtcaaatattaatgtgaagcccaaaggataaataaagtttttgatgtcacatattacttctatttttatttcatagtttatgtttgagagttgttcacctgtttcttttgccgactgttttcaattattaacgacgcctaatgtttgtgaatgcttacggagatctcactttggcagagaggttgttgttgctgtttgtggttctgaagaaa

SEQ ID NO: 104937 - DNA, 579 bp, Mimulus guttatus
  Intron number 1 from transcript mgv1a003104m (locus mgv1a0 03104m.g) derived from phytozome v7.0 (chr-ID scaffold_57; pos 195680 to 196258 reverse strand)
gattcacataaaaaggttgccttttttgcctcttttgtttatccttttatgggccccttttgttttattatttgttcttttgctatggggttagatctgtgttatttgtgttgattacttctcggtgtttttaagtgaatccactatttgcattatacgatccacgaaattcggatttgagatttcatatatatatattaatttttttggcagcttttggctggatcgaagtgtttttgggttttgaatattcctgattgtgtaaaatatttgaaatttcttttgcttttctacgtgcgatttgctaacaaggagaaagaagagtgagaatcagtccgtccaaatgattggggctttcgtattctctgctttttttgcatcttatattagttcaatgttaagtaaatttcacaaatggtggtttccgtgctatttaattgggaccgcctaaggttgttttgttgttattccatccaacaattcgtcttcaaagacaataaagaattttgccattgtgatttgttctaatcaagtacctcttcttacagagtaatctagaaactgaattcttcaccgagt

SEQ ID NO: 104938 - DNA, 655 bp, Mimulus guttatus
  Intron number 1 from transcript mgv1a012984m (locus mgv1a0 12984m.g) derived from phytozome v7.0 (chr-ID scaffold_50; pos 1200344 to 1200998)
tgtgaaaagtgttcgcaccgattctgttcgttctggtatattctgccctgcgcaattttattcttattttttttgtgtttatttattgcatattttatttttcaaatataatgtttttttttattagttttccgtggtattgaatgtaaattcttggttctgggttttattggtgccgtgtaaattgattgattcctggactagggctaattttctgtttcttgatgaagttaaaacatagggtctaactagaattgaatttccccttcgtttgattaaatctgaaattgaagtttagtaaatctaagttgatttttgaattttgaaattcgacgacaaattcaacaagctaagctcttttcttatcgagtagtttaggcgtagtttgccttgaaatcgaaattcgagtagggtatgtagatggttttatcaatcagttggcccggattcttttaccgaacgaatcgggcaaatagagcaaattcgtaaattttctcttttgcacaatacgatatgtctagtcgcctttttgtacaagatatttgaattagcaagttcgaacattacgggatttcgatgaactatttttttaatttacgtccataataagttacaatgtgtttacatttggttttcagcttcgagtaaagctgcg

SEQ ID NO: 104939 - DNA, 546 bp, Mimulus guttatus
  Intron number 2 from transcript mgv1a020600m (locus mgv1a0 20600m.g) derived from phytozome v7.0 (chr-ID scaffold_21; pos 519218 to 519763)
tatcgcgccgggattgtccccgtctctttcagaaggtaacatacatcactttattcaatagtcgatactacactcgatgaagtacatccagttgtaattgatcgtactgcacgcatatattttatcaattttttttcttctaatcaaggtcgtggtcgagtcaattttcatagtttatcgcatcccgctcatctcacatagtccacctatattttttttatctctaaatttgagagattaatatatttataattaaaacgtttacataattttctttgttgtgctattattgtatgtgaacacccctaaaatttgggaggagcgttcacacgaaaaaattacggttatgcccttgtatgtttgtgtgattatatttctaagtacgataaatattatcttattggtgaatttcactcgatgtaacatctaaaaaatctgacttaatagatgcgcgtatttttaaatcaaacgagatcttcaatttcaatttggtacaagtacttgacgtactaacatatttcttattttattttttaatagggttcc

SEQ ID NO: 104940 - DNA, 692 bp, Mimulus guttatus
  Intron number 3 from transcript mgv1a016212m (locus mgv1a0 16212m.g) derived from phytozome v7.0 (chr-ID scaffold_8; pos 2827814 to 2828505 reverse strand)
taccatacctgcccgctatttttgaatttcgtcgggtaattcaacttttcttatataattttgctctgtgttttgtttcttttcttaagctgttgttcacagttatatatattatgtgttcggtcttcaacatgttgggaaatttgtcttttaacgagcatgctttgttgagttcatcgagtttgtctgtgttattgcattgaataagtagatctatatagaaggctacaaagtctaattaagttgacacaaaaagattgaaaccggaaactgggttcggtatttggtgcgaagtttgaatttattcgaggatatgatatcagtaggcatgaggactttatatttattattaatgatataattatattcgatacggttgttgaatcttgtatccacagaaagaaatttcagaagttaactttgagtagttgggattgtgcaaaaggtgtagaataagttgtcgacgttatcaatttgcattttgtagttactcgtacttcttatgaattgcattgtcgaaagacttgagtaaccttttagactcctcttgaatcttgcggatatactgatatgtcaaccgctctgaaaaatagttgtggccttgaagttattttattgatacattttttttttgggcgacgactgatgtcccaaaagagagtcttggctacctaaagagttgcactttttga

SEQ ID NO: 104941 - DNA, 990 bp, Mimulus guttatus
  Intron number 1 from transcript mgv1a007657m (locus mgv1a0 07657m.g) derived from phytozome v7.0 (chr-ID scaffold_181 ; pos 264819 to 265808 reverse strand)
cataccattctgtctgcaattcatcatctgtaagtttccgtcgctaaacgctctttaatttcgtcgctaattgtttatcaatggtgtatgatcaagtgaaattggtcaaggggatccgactttcacacatatttcacacactcaaacgtgtgtgtaatgtgtattagtgtaaactgtgtaattgtgtgtatataacaatgtagagtttattgcatttagtacccctgtattttattaaattgctaaaaaaaatcccccgtgatataaattttagcaaagaaaccccacagtacattttgtaggcacacaatccgggataattacagttttcatccctcaagtttgcaccgattttacatttggtccccgtgttcaaaaacacacatttggtccttcatgtttcaataatctaacattttttgtcatttccgtcaatttaccattagtccgtcagttaagtaggtgatggacacacgcttgatttcgttagttttaacgaaaaattgacataaatggctaaaaatattgaattttttaaacatgatggatcgaatgtcttttttgtgaacatgagggaccaaatttgaaattggtgcaaaattgagggatcaaaactatattttcccccacacaatcccctaaaaagtgagttccttgggggtagtttgccaaataaaattggatcataggggagtttttgctaattagagaaaatacagggatgccggatgcaataaattccaatatactggtaataattttcttgaaagattcaataggaagaaggaatgtgtatatatatatatatatactgttaccaaaaacttttttcagctatataactagtaaatgaagcaattatcattacatatcaatattattcgccgtgattaaatagtcaaaattcagtatatatctctgagaaaatatgtgtatctaactcccatttgtttattatatatatgtatgtatacatttagagaaattaca

SEQ ID NO: 104942 - DNA, 838 bp, Mimulus guttatus
  Intron number 1 from transcript mgv1a027167m (locus mgv1a0 27167m.g) derived from phytozome v7.0 (chr-ID scaffold_428 ; pos 13374 to 14211 reverse strand)
ttggtcattgatcttcactcccgttttggtaacaggtatatatatatatatatatatatatatatatatatatatatatatatatatatatatatatatatatatatataacatgcttttcgttggttaaaatattttgttgcatgtttttgtttccccttttgcacactttttatgtatattaataacaaaaaaaaaaaggttagctttttcaatcaaatcttttaccacctaggtatttacatttgcatgtaattatatatactaggttgttacacatagatatattatggatagtcattcacatataaaaatacaaattcatattgatactgatattaatatatatatgcacaaatggctgataattttttattagattcgattttcgtttcatcaagcgtaacataaatttgacctggtacaattaaactaaaaaggtgactcgtcgatttcaatttgttcgtactttggagtagagttgaaacaaaatgaccactcacatgatgttgaaaaccttattttgtttctttaatttacaaaaaaaaaaaaaaaagatatagtatttgtctttttaggtctccaaatgcataattgtttttttttaccaattttatcttaaaaagtgaaaagaataaaatgagattgaatatacaaatatggttgaaaaaatcagccactcgaagtgcgatgattaaactcttttagtgacatatattcatgttatatatattgctttttttcaagccaataaaaattttgtactaagaaaactttttgatttatttttttaatttaataaggtggtcgaaaatcgcagcaagattgccaggaagaa

SEQ ID NO: 104943 - DNA, 1039 bp, Mimulus guttatus
  Intron number 1 from transcript mgv1a005101m (locus mgv1a0 05101m.g) derived from phytozome v7.0 (chr-ID scaffold_4; pos 3043817 to 3044855)
tctccactgatttccctctcgttcgcttccttagggtatatatcaccatattcttcacttgtgcaattttttttcttcttttgtttctgtccgtaggtgtttggaaatttgatttactccattttgcttaattaaggggttattaacttattagcgatatgaaagtatggctgcgtgattgattatgattatgctattatttgatgggatgtgttgttgttattgttgttttctgatttcaaaggactttgcttgattattaagggtttcaacttcgaggtagaggaacaaatgagagttttcggcttggtgtggggaatttgaagcattatttgacttgtctgagtaacatacatgaatctgatcgaatttcatggtttaattggtatttacttgatttaaatcatatttttgtgaagcaactattgaaggtgactgtttgttttttataattccttgatagaaagttacattattcacttttaaaagagaagaggagagtggaaaattttatttggatgcttaacatggcgaataaattgctggggtttagaggtgcagatactgcatctcttctttatcttcgtgataattacgagctcaggcctaagtaagaagtgggactttgatctcgtattgcctctttcttttttcatggaagatgagagcggttgcaaattagactgtttttggttggtgcagggataacaaaggttgatattgtttataaacataatcctctgtaagaatatttttgtgtatgttagtctggaaactgaggttacactttgaccgaggcttactatcatttgttttgccactcttttgttttttctcttgtttagtaatcatgttgttttgttgctcactttcttgcttttgtgaaaaacatgtaatgttcctgaacctgtccattatagaaccattgattagatgaaaatgctcttggaaaatttctgcttgtattggatgacttgctgacataatttcttctgatattataggtagaagctgaagagcagccagaaatttcggaggc

SEQ ID NO: 104944 - DNA, 733 bp, Mimulus guttatus
  Intron number 1 from transcript mgv11b023465m (locus mgv11 b023465m.g) derived from phytozome v7.0 (chr-ID scaffold_1 3; pos 867030 to 867762)
gccgtcttccggcggaggaggcgacgaaccggagggtaaactggcggacggggtggaggcaaaggctgccgatgtggacggaggcggtgcggctactgatattcagaagaagatgaagcgtgcggagcggttcggaatgccggtaaatctctccgagcaggagaagcgtaactctcgagccgagaggtagtctatttttgttttttgtttctactgtgtctggtttgattttagaatttatgtttttagggttagggtttcaaattaggggactagatttgtttattgttttgaagttcagcgtgctagaatgaggcgttatatttaccatacaaatagtagaacaaacaaaatatggtgaaaatctgttgagatatagcagattcagtagaagtagggcatatggtgaacatttgttgagaaatagcatattgagtgttaattgtgtaacctttttcagttgcattcagagttgacattaaatcatgatattccaactcagttattgatttttgagtgaaggactattactcgattactctttatgtgcatttatggtgtcagatattgtcgtactctcatcgaatggttatagctccaaaacttgttcaatattctgttatacatcctaattactatttcagtcgatatttatcttgctaaataaggttactgagtcaagttatctaagtatgtcccttttgatgaaggtttggcactgctcctggtatcg

SEQ ID NO: 104945 - DNA, 803 bp, Mimulus guttatus
  Intron number 1 from transcript mgv1a002979m (locus mgv1a0 02979m.g) derived from phytozome v7.0 (chr-ID scaffold_24; pos 1101769 to 1102571)
attgcgatctagctgagattgatactagggtttatgtaagcttctcttttcgcattaatttttatttatcgtcgtcactgtatgttgttaaatctggcgattgatggatgcatgcgtttccttatccggataaagtgctgaatttgatgcgatgtgagatctgagggaagaaaaaaaaaattagtggcattgttgaaattttttggttttattacaaatggttgatgtgcaatgaattgatgggaataattattcccccccccctgcttggacttttgtgcctaatatttttttatttttcttgtctaattcgattaccaagtctgagttttatagtttcctttaagttttctgaattatgggttgaattggtgacaatgacatatttagctattctcaataaattgtcgttaatcgggcattttcggttgagctgggtattaatcagatcatagtagctccatctaattacacttaatgaacagaaatgcaacagttaatgacattgcaaaggccggacaaagttgtgataattgcggattttaaagcttcgcccttagtgcgtctgacaaatggcaatgatttaatttaaagtggttttatgaggcgaagctggttaagattttttgccttaaattagaataacttgcatcgttaagtttgttttatgtgcaagttgatttctaacccctcctgcataacatttctttagcagaatagattatttagttaattccgtgatactaatttgtttgttccatgtatgatgtagttctacttgagaggtttgtttcgggacctga

SEQ ID NO: 104946 - DNA, 973 bp, Mimulus guttatus
  Intron number 1 from transcript mgv1a021371m (locus mgv1a0 21371m.g) derived from phytozome v7.0 (chr-ID scaffold_56; pos 446075 to 447047 reverse strand)
aaggtaagtttcttctccaaaaaaacattattacatatgcaagtaccggtcaaatccataataacaaatcacttgaacgtgtttggactgagggatttggagatgaatttcaatccacgcaccttctttttagttgttttttgagcaattgtggtggatttcaaataactccaaattggggtcatttcaaatcccttctccaaatcaaatccccctcctaatcaaatccccctcaaaacaccattatatatattttatttttgcatacatatggcttcgcatatatatatatataatgacttaattccatcttgcaatcttgaattgacaattgtatcattttggcactttgcactttcgaaaataattaatggtactttgcaccctcaaaacatgtttaatcgttcaaagtgcaccctagtctattttctggccctaatttttcgccgacgaattatattatgatcgtcaacatggtcatttttttccaattcaattattgtttttcctcggtgcgcgaaatccaaatgttttttttgagtaaactgactttggtgacaatcagaaaataggtgaacgatggaaattctggccgaaaaataaagtagggtgcaatttgaacgattaaacattttttgaggaatgtaagtgccagaaattatttaagcggtgcaaagtgacaaaatgatacattttgagggtacaaagtgaaattaaaccataaataatgcatgttggtaatttacattgtaagtttcctatttttatcgctcaatacataataccaagcaataagtcataaaggattttttttttttttgcgagtttctttgagttcatggaatttgtttttctttattcgattaatatatgtacgacgatcatatataacgaacaaagtaatgtcgttactgtatctaacgacttcgtaactttaatttgttgctctattggacgacgcagtggatcgttc

SEQ ID NO: 104947 - DNA, 920 bp, Mimulus guttatus
  Intron number 2 from transcript mgv1a011507m (locus mgv1a0 11507m.g) derived from phytozome v7.0 (chr-ID scaffold_32; pos 1206654 to 1207573)
agctaaaagggtatggattatttgtttttcgaactacattctccgttttccccattatatgcaatcgatttgtttttcgcagtgtttagtaattcagttgattattcgagaaaaaaaaatctgaaaaccaaatcatagcttacctgatttttaaatagggaggtacgattttggtggtgcgctgtgaattgtgcttgctgtttttttaccttgcttaagatatttgatatctcatcgtaatttcatgtgttatttacatcgatagattattaaaatgcattggagtatttaggacctcaaaaatggagaatgtaaggagatgctaacaccctcatcttgaactgtagagattggaaattgaactaatgttttatgtataatgtcactgtctgggtaaacttgatcgatacttttcagatgattgctccatggcatatttattatgtactactgctggtgtaacaagcgatatccgtaatatattatcaattagcattaataaaatatttgttcgattgaaacagacaagaattctcatccatgatgacgaattgatattgaaaagcaggcctacatctgttgaggggtggcattggttaatattgataactgatcaccaaaagaatgcttattgggaacaagtggaacttccatttactaaaagaagtgaaatgtcgaatttatgtgtaatacattatccattatcgtactgatgtaattttgcaccgcattgatatgctctctgtttttacatgaaaaccatgtcatgaagtcctaattatttgttagtgaagtttttgaaacattgtctacaaatttgcaatataagtacaaaattattgtgtatgccaagacagttaagaacatgtgtatcggtttttgtaggaaaaatccaagaggtgtattaatatcacccggac

SEQ ID NO: 104948 - DNA, 672 bp, Mimulus guttatus
  Intron number 1 from transcript mgv1a015224m (locus mgv1a0 15224m.g) derived from phytozome v7.0 (chr-ID scaffold_75; pos 392747 to 393418 reverse strand)
gacggattcccccacctacttccgctcaatagccggtgagttttcgtgatattgctaatttttttatttatttttccttatgaattgaataatcaatgacgccctgttgaattgctgtatcagtccgtacattgattcatttcataaatttaacctgattcctgatgtttatctgattgatgcgctgagaagaatgccgtcgtcttctcacattttgtagttattctgcgccatttctttgcttttgtcgtaggtatctcaatttagggatttgaatccctctttaagttcatcctcgttagaaattcatgggctttctacagtggaaaccctcgtatgctttagtgaatgcggggtaaaaatgtaatttgtatctgagttttatttagtatgtaatgaatgtatttgatcagctttgagattgctcaacctaagactttgtttgctgatgttgttgattctaaagtataatcgaaagagtcgaaccttcacgatttcgggtgttataaacacgaaaaatactaattccactatttagatcgattatcttctgttcgtatcggtatcgattttttatccggtctttcgtttgaagtataatgttgtagccttttgtttttccggttgtcgaattcagtttaaagagttggatttgatcagtcgaaaggcaaa

SEQ ID NO: 104949 - DNA, 782 bp, Mimulus guttatus
  Intron number 1 from transcript mgv1a014271m (locus mgv1a0 14271m.g) derived from phytozome v7.0 (chr-ID scaffold_29; pos 87152 to 87933)
gagttcagcttattcgttggtcagtcaagaaacattttcttcattttttttagtgtacatagcaattaacccccctgtggttacaagcttttgcagatgaacctatgtgctcgtaatatcagcacataatcctcttatggtttatgaggtagctttcgttagtttgtccgtcaaacttaaccgcatgtgtcaaacatcaaggaggtcatctgcaaaagaattactttgacgtttgacactggcaattaagtttgacggaaaaactaacggaagctaccccataaaccataaggagggttatgtgctgatattacgagcacatggggtcatttgtaaaagtttgtaaccacatgggggttaagtgctatttaccattttttttatacaattaatcgattttattaagtgttaaaatttgttcgattctcatcgagctttaaaagcttatcttttgaaattggtctggttgtcaattgagtcgagctttagtcgagttgattatcagtcaagtcgagctcgagtggatcttatatatataaataggggcggcgtaacttaggccagccaagaggagcacctgccctcatcgacccctcgttaagagagttggtacacagcctttactaattagagtagcggtccagggttcaaatcatgcacaacacccgcccggattgaatatatattttttatttatttttattagattttaacttttatttatataatttagtctatttgaaacagagattttttctggacaaaaggaccggaaagaattg

SEQ ID NO: 104950 - DNA, 704 bp, Mimulus guttatus
  Intron number 2 from transcript mgv1a022049m (locus mgv1a0 22049m.g) derived from phytozome v7.0 (chr-ID scaffold_91; pos 789563 to 790266)
gctactgtcaacaagtatcagtggtggtacgataatctaatatattcgaaataatctaatttaatctttttttattattattaagagtggtgttattttcacctccaaattatctcaattcaccactaaaagtatataaaatgtcacaaatacccctaaaatttacaatctaccaccgttccttatattcgcttaatcctcatgtgttcaaagttatttctatattattattttttttttgtaatgaaatatttattacaagacatttaaacttccattatttaaattttttttttcggaaacgaaattatattaagctaaactggccaattctagaggaagttcacgaccttgtatacaaacactcttaattttttttctccaaaaacgtgaatttctgctcttttttatcttcgtaaatgtttttttttctgacaaaagtattattcacttaaggtggaaagggtgagattttgcggtaacgattccagtgaaaatgttggggttttttttataaatattttagttagtttagtggtgaatggtttataaatttgtaaaatatataggtgaaagaagaaaaaaaaaatggtaaaatggaaaatataattaatttagtagtcaaataagatattttggtgatgaaaatagcaggtttcattattaattcttgatttgttttatttaatttgaacaggagtata

SEQ ID NO: 104951 - DNA, 890 bp, Mimulus guttatus
  Intron number 4 from transcript mgv1a006397m (locus mgv1a0 06397m.g) derived from phytozome v7.0 (chr-ID scaffold_4; pos 1603296 to 1604185 reverse strand)
ccagatcggtaaaatcaacaattcttcattttcaggtaaagatatagttctgtttggatatttttttgttgttcattttcgaatgactccaagttgaaattttggtagcaaagattagtaattatgcagttggagcttgtaaaaatgcaattccaccgttatagttccactagattgcaatctgtttgggcaaagatcatcttatgtatgaccatttattgacgcacaccattaacagtttaactgtttaagttagtacactttggtattctattccaaactaggagttcgttaggtaaataatgtattgcattatatgtctgatatgagatctgagatgagatgttggtttggtgcagtaaggttttataggactggtcatcctcctccatctctgtactctgtcatcggatcaaacccaatgctttttcccccaatcttccttcgttgttcttttatattcattgttttttggctgagaggagagttgatcaaggattagatgttatgcctctgatgatgtaagaattgttcgttagtatataaagaagtacttttctcatattttgtcacattcagattgctgtctggtaactctttcatgacactaagtaagtcaagatgcaagatgttacactaggttagataatgatgccaatcatgctttgagtctttcgttttctgttttagacaatgtttaggtttcaaagttatggttacgtttgatgtagaagaacctgtcatacatatgaccacatgtgttttgttcaattatactcagaatatttgttgtttttattaagaatattgttggtttcaagggatgcgatttttcaaagttgctgtctgtgatttgcagctaagaaacctggtttggtcgacatcgaagc

SEQ ID NO: 104952 - DNA, 541 bp, Mimulus guttatus
  Intron number 1 from transcript mgv1a006397m (locus mgv1a0 06397m.g) derived from phytozome v7.0 (chr-ID scaffold_4; pos 1604782 to 1605322 reverse strand)
aaatattgaaggaattgagaggtcagaataaaatttcatttagattttttcctgtttattgtacgtcgactctgtttattcaccttccgctgttgatttgccagttgatttttgctctacttttaatttgggcgttttagacttgtgctgattagagtccggttttgagtgcagagtagtataattttacttttctatttttctactttgatggctttactttatcttcgttgtgaagagttctattttttttcgttttcttgttgggcgttgacataaaggtttccttttttaattgctggtgtatctgtaaatttttatggaagcttcattcgttttgactcttcatgttggtagaatttgaaataatcatttaattgattattggtctattcactggatttcgtttttatggatatcttgttgcactgaagttttagggttttgttcccccaacttatctgtgacttattgtgtattctgatgattatgcaattactgtcggtgcagctaacaaggggggtgaaattgactgctatac

SEQ ID NO: 104953 - DNA, 693 bp, Mimulus guttatus; identical to SEQ ID NO: 103875
  Intron number 1 from transcript mgv1a010191m (locus mgv1a0 10191m.g) derived from phytozome v7.0 (chr-ID scaffold_85; pos 546587 to 547279)

SEQ ID NO: 104954 - DNA, 847 bp, Mimulus guttatus
  Intron number 1 from transcript mgv1a001865m (locus mgv1a0 01865m.g) derived from phytozome v7.0 (chr-ID scaffold_121 ; pos 325401 to 326247)
gggacaattttccgctctctgtcgaaaacaattaggtgagtaattttttcttcctcaacacacactgttactcaacatctggtcacacgattcggcgattacactccaatgttggtgtggtttattagggttttctgtaattttgtgtctgggtttttgttactcggtgttgatcggattattcccgatgtggatttgggctgaatttcagtcgtagtatttaattatggcttgtatttctaaaaatcccaattggggtttcttttattgcttggctaggatttatttttttaggtgatttaattgagatttttacttttgtggctctaaaaattgaaaattcggcgaaaaaaagaaaatgattaatcttctggtcagctattacagaaagtgtgcctccttattgtgatggaatgatcagctctattcgacaagattacggccttttgtgtataaatttaatttcttgtgtttttgttaattgattgtgcagaattttatggtttgcactttacttttaagagcttttagattgttgataatattgtgcgactggataggggttttgattttcgatactgaaacaaggtggttataatacttaaactagcttaaactgcgcatcgtttttaggtgaataaagtcttgtacacaacacaattagtcataaaagagaatcgaacgaactaccttgcaatagctacatattaaactccacaagaataacaagtattagccactatcactaccactaccacttgacaatttggactgctttcttcattacgtactttgatgatgattaaatgtttttttttttttgacaaataatgcaggtttagttgtt

SEQ ID NO: 104955 - DNA, 714 bp, Mimulus guttatus
  Intron number 2 from transcript mgv1a026157m (locus mgv1a0 26157m.g) derived from phytozome v7.0 (chr-ID scaffold_3; pos 3359174 to 3359887)
tcaacctaccgccggagagtagattgaagtaaccttgattcttgaatttatttttttaatttattttttataattattgaagtagtaataatattgtgttatttttatttgtttgtgattttgacttttcttttgttgtggttgcatgggagatgcagtcatataagcaatgttcaggtatgatttattatatgcaagagttcttgtaataacataatttgatacaagattactttatttcatatatacataaaaatgaagaaaaaaaaatcacttccatcaggcatatagatcaaggttaatatatatattcatgtatgaaaattaacttatttcgtctcgtgttattttcatgaagaccaaaatcgataagctgcgacatctcgatcacattaagagtgacaccaacaagctacaatatctggacaagcaatagataaggtgcgacatctctatcacattgagagtgacacccacaagctacaatatctggacacgcagtaagttctctctctctctctctctctctctctctctctctctctctctctctctctctctctctctctctctctctctctctctctctctctctctctctctctctctctctctctctctctctctccccatatgtatatatgtgtgttattacattcaaatttgcatgtgatctactgtgtttcatttcacttggaaaaaaatagttatagc

SEQ ID NO: 104956 - DNA, 825 bp, Mimulus guttatus
  Intron number 2 from transcript mgv1a015103m (locus mgv1a0 15103m.g) derived from phytozome v7.0 (chr-ID scaffold_39; pos 213487 to 214311)
tgttcgtcaattgtacccaaaagggacaaatattggtaacgtcgtagcatttccttattatgactttgctatatcacatgaatactgaacttgatattagatcatttagatgtgaactagtaagacattgtgtttgtttttcagcttttgcaaatggttcgttattcttcctatgattttttttcgggacccatattcagctgttatagcttgcgtactttcttatcatcgtatggtagcttgattttattgattggatgtctttgcgactaacataagcagctaaaaagatggcaaatagcttaatatatttgaagtactttttcaaaatgagtcactaattccgataatcttcattatagtgtgaggtatttatgaccgaggtacctagattttgttcaaatcctccatttttaaccaatctgttagtcatttctatatgcttgtgaactgtgaagtcttgctataccagctctcatgttcctgactatctaatctagggtaaagaatatcgttgtcgattgtgattagattcttttatcttagatttcaggaaaaatatgaagtttggtagacaaaatgttattttgaagcagggcatttattatttagactgtaatcagattgggattgtagttttctattataaaaaaacaagaataaattggttcatagtagtttttattccgggagttgaaatatcccagctctcatattcctgactatgtaaactaggtaggttaaagaatgtcgttcgttgtgaattgtgattaaattcttttcgttttagatttcaggaaagaactgaggtcacttaacagagaa

SEQ ID NO: 104957 - DNA, 680 bp, Mimulus guttatus
  Intron number 2 from transcript mgv1a025093m (locus mgv1a0 25093m.g) derived from phytozome v7.0 (chr-ID scaffold_151 ; pos 202419 to 203098)
aaacttgcgccatttttcaagccatcttcgtcatcgtaagtcattacttatcatatttgtcgtttttccaaaagtttcacaattttttttttgtgtgaaataagctccgcatactaattttccgggggtattcatttgctaatattaataagacgacgagttttttttaacaacttgagtaaatacgttcttgtaattgaatgaaattaattatttttactactctgtttgttttaaagtaagtgtcatttttctgttactgcgccgtggtattagaaactactaaaaatatgtggattttagggggaaaaaaacaaatagactaaaatactcatgtcgttaattttatttatatcgtcctctctcaacaaatcaagagtaatagttgcaaaattgaaaaaaaatggtagtcaacacatcattgaaattccaaaaaatcgataatatgccacaatttcttctttctttttttttcctaaaacgaaaattattttgaaaccgaagacgagtaacatttcgccgtcttttaactttaatatttgtaatcgacaaatcgaaagattagtcaaatggcgatgtctcatctcttgtgatattttggttactaattattttgactctcttttcctttttcttgttggatagggattggtatcactatccctaacatcatacctatt

SEQ ID NO: 104958 - DNA, 567 bp, Mimulus guttatus
  Intron number 1 from transcript mgv1a005344m (locus mgv1a0 05344m.g) derived from phytozome v7.0 (chr-ID scaffold_108 ; pos 106562 to 107128 reverse strand)
gttcaaacctctgcaggcaacgtactatttctcgattttgtggtttttacaacttcttatttcattactattatattgttcataatgtggtggcatttgattgatataggtgacttgagatagtggttagtttgctgtattcatagtctgatgatcagtgtcacgtttgatacctgttaagtacggagtcgtgctatatatagcagtagtgttttgctgataattatctgcaacatgttatttcaggataacttttacatacgaagatgaagccaaaataagcaacgagtactactttttgtcacttccaactctatagggaataacactcctttatacaccaattcgagttacctacaatttgttcgataacgattggtttgcatttatgccctcatcgaattacataatccaccttgtgttttttggttacaagtgtataataacttgcttcagaaagaagaaaatactagaaattttcattttcaatcaatatgtacttgcgctaggtgtagttgctgcatcttttatttactcttttcactaatcccagtaaattttcagcag

SEQ ID NO: 104959 - DNA, 679 bp, Mimulus guttatus
  Intron number 1 from transcript mgv1a002986m (locus mgv1a0 02986m.g) derived from phytozome v7.0 (chr-ID scaffold_17; pos 970549 to 971227)
caacagcaaaatccgagctttcatcactcaaaaaggtatttcattctgctgttttgacgacaaaaaaaaaatactttaacttttgcgtggggtgtttgatttggcttctttgatttcacaaattgaactccataaccttcgttttgcaattttgcccaatttccacttccttctagggtaataatgttttcattttggtttacgtgattgagaataattatatctgaggattttgccgctaagtgattagatagggcttcttacaggtttaatggcggttgtatcatgtagtctgctatttctggggatttaatctcgttgtagattaccatatgctagaaacagaaaatcgtcgcaaaatgtgtcactgcccacgaacacaatcaaatattttgtatgattagatttattctgattcttttaactatttaacttaaacggaacgacgatagcacacaaattgtttttggcctaatcgagaaaatgtgctgttagactcttctcatgtatgcacttggtgaactagtagaaaatcaaactagataaaagcaggctcctattttgatatcacaacgcaattggatctgtgattactagtgttttttttttttttttttttttgctcaagaatttctaatgcgaaaatttaattggatctcaatacaagttattattttag

SEQ ID NO: 104960 - DNA, 550 bp, Mimulus guttatus
  Intron number 2 from transcript mgv1a002986m (locus mgv1a0 02986m.g) derived from phytozome v7.0 (chr-ID scaffold_17; pos 971762 to 972311)
gggtaagttaatccatacttctactcactgctattagggtatattatcaactggcatgtttatgcaattctgttgcaaaaggtacacttaattacttcagtaaacggggtgagaatatatgattcatgatagtcttattcacttagtatctgatatgttgttgtagggcacaatgtaatgaatttatgttttacgagtgtttgaagaaaacaaaatgagtgatgtcaaaatacgaggcctattttatttgtcagatgaatatcaatatttcaatgaagtttctgtagatgcctttttggactgtagcaattacctattttaactcgtctattctgttgttctgacctatgttttcactagtgcagttcccttaatggttggattccgttttagtattgtacattgtattctcaaacttacgctttcatcttcaataagctagagctaactgttgaatctcatgagaaaatgatattagcatgagtttagttttattatttcaagtatgattgaaggtttgctggacttggagctggtcttgcttggggga

SEQ ID NO: 104961 - DNA, 959 bp, Mimulus guttatus
  Intron number 1 from transcript mgv1a015172m (locus mgv1a0 15172m.g) derived from phytozome v7.0 (chr-ID scaffold_170 ; pos 223479 to 224437)
acggccgcctaaagctcgatcgttttcccacctttgtaagttttttttttaattgtgtttagcagattaatttaatctgcacttctgtatgaaatcggttgctgtaacccttttgagcaataaacatgatgtacatttgtgtgagagcaggaggggtaaaatggtaattatcggataattaatgtatggattttgtttgttttggtatactcaaataattcaagaaatgcaggctaattgttcttgagctacacttttggatttttttcgtgttttttgtgtttcgtttttctaattggtatctctcggcgttacaagctcttaggttcttgcagcaaatcaagcaatcgaagcacgacacgtcgatcaagttacttcctaaggatcaatcgagcgacaaaatgggctctcacaataatactcctccatcacctacagacacggttaatctagcattagtgaaatgtgcgtaggcttttcctactcatcataacaaggaagaggccgtcttgaatacgccattcacaaaagtcccttgcccagtcagcagcagtttcgaagcagtgggaaaaactcggggcaatgttgacctcaatatcttgcaacaggtggcaaatgcttttaaccacaacatgcttgaaaatgcggtagatggcacaaaagtaaattcgagattttcggacatggacaaaaatcttgccgatacgcttaaggcaattaacgaaaaatatggggacattactaaagattgttcgttggagtcggattgtatgaagacgcttgttttgatcgcgtatgtaaggtggtgcaagatctgcagaagaaacagttggaagagctcgatatcggtttcttggattcttgttatacagctgtgagggatgcggagagtatgaaggtgaacgtgcggtggttgagtaatcggcttgacgaaatcaaagacgctgttcggtcgagcg

SEQ ID NO: 104962 - DNA, 281 bp, Mimulus guttatus
  Intron number 1 from transcript mgv1a010085m (locus mgv1a0 10085m.g) derived from phytozome v7.0 (chr-ID scaffold_22; pos 966760 to 967040)
tcagtcggtgctgtcttctcagatttcgtcagttcttctctttattcacctgtttcttttaattgttgatttttaaacttttttttttttggtgcatgtttcgaggttttgtgctgtcagtaaaaacagctgctatcggcataatttgatttttcctgtaattgcatgtattgggttgatgagaaaaaaataatttaatgcattaattataactctgtaatgaagaaattttgcatgcattttcagggagggaaaattaattcgatcgatttccatcggac

SEQ ID NO: 104963 - DNA, 555 bp, Mimulus guttatus
  Intron number 1 from transcript mgv1a001182m (locus mgv1a0 01182m.g) derived from phytozome v7.0 (chr-ID scaffold_75; pos 648753 to 649307)
ccctctgatcgacggtggtttgattaccgttgaaggtgctttgtttttacttttcatttgattttgtgtgggtttattttgattgtttaatttttttttcctttttaggaaattaatttttgcgattgcactttttctgagtgtctgtgagcttcgattactggtgaatttggaatggaattaggatttaatggatgaggttcactgattgtttgttccaattcttcttaattcgatcattttatgtttatttaagggcatgtggtaaaattgttatttcggtgccatattcacgatggatttggagtgggttggtttgcattatgtgtgtgaagattgatggggtgaatagaaaatcacaccttttggtctcgtaacttttttaccctgaagtgactgtactcttgctatatgttggtatctgaacttgagctatcacttatcgttgagcttaaaggttcgttttctccttctctattcagttcttgtttgactttaacatgtgtcgagtgtgtgacaggtattgtcccaaaaccaccaggcaagggaagtaga

SEQ ID NO: 104964 - DNA, 810 bp, Mimulus guttatus
  Intron number 1 from transcript mgv1a025763m (locus mgv1a0 25763m.g) derived from phytozome v7.0 (chr-ID scaffold_363 ; pos 126259 to 127068)
gttcttcttcatttattttcaacgctcttactcaggtaaatcctcttttccttactctttaattcatatatattcgtcgataactgccgatttctcacatctagggttcttttctcgattgtctgttagatttaaatctttgtggagaatcgagtgttagtcttgatttttttatgatttagattcttcattttttggttttttttttaaatctgtttattgcgtgtgattttatgtttattgaagcttgtgtttaatttagggtttatgttggaaaaatttgggtctttagtgggagttttgctaaagatctagacttgagatctagacttgagatgattataaagatctagacttgccgccacaatgatacgaattagaagctattgtttttctgcggtgctggtcaattgtaataggatttgagtttcgccgtggttttggctttctgattgcttcctttgttgttagagtttgaaatgatatcagtttcattctaatttgagaaaatgcctgctgactccttaatttcagatatttgaaaaaaaaaatgttttcttttaaaacagaattggatgcttgtaagattgtttacattgttgaacccagaaacaaaattagtctctgcagatagcattctaaaagcctctcattatttgaaataacaagcagatcaccagtgctgtatttgttggtattctgtggatgttgatgcattcattttggctatttcatatctagaaatgctattgtatgttttggttgttttctaatttctttaacttatacgcagaccactcgggtgcagac

SEQ ID NO: 104965 - DNA, 736 bp, Mimulus guttatus
  Intron number 1 from transcript mgv1a012171m (locus mgv1a0 12171m.g) derived from phytozome v7.0 (chr-ID scaffold_26; pos 434829 to 435564 reverse strand)
ccaggttataggcttaatttttcccccaattttccctgtttattcgtaagattgatacttatttaccaagtacttatccagattcatgctgaaaatgtagtatacagcatacctaatcatggtggcaaatacctgggcactgctttgattaattcagttagatgaatcttcacagtataagatgcaaattcctttagaatgtttttataactatcatgaagtgaaatcattgattggtacatcatgtattcatgtattccgatttgcgtttagatcgcatgccatttacttatttagacgagagtaaacggggttctgtatttctggcatttgtatgtatatatgtatatatgtatcgatgtcttctgggagtttctataaaatggtgtgttagtttagggaatcgagcatttatattggaaacctcacgaaatgaattaggaggattcgatttccaacataaggagttctgttttgaacttacaacctttttgatgcatggaccctggaattgcacgagagcgagaaatgtttggatctgtctttgctgttcttgggcattatgttacgtgtagaaccctcgaataaaggattcaacttacgctttaaagttatgccttttcagtatactgtaaattcgaagcaagagtttgacgagaaatgaatttgacgttggttttaacagttcaattttgttgcaggtgcttctgaactttgtgagtttctcgagtctagg

SEQ ID NO: 104966 - DNA, 928 bp, Mimulus guttatus
  Intron number 1 from transcript mgv1a010864m (locus mgv1a0 10864m.g) derived from phytozome v7.0 (chr-ID scaffold_161 ; pos 144967 to 145894)
ttctgtactcagttagctgctactcctcaccaaaggttcgaacttttttttattttttattttatttttgaataattaagctatttctagttgctattattactgtagcttttgatttttgattttgcgatgaatcaagattgtgtttggcttcacttctgctggcaaataatatcttaagattcggaggttttaaggttttaattcttaattttaaggttttgttttactggtttaatcttgtcacttgtgtgtgatcaaattgaactattttatttggtattaatcgaaaaggaaaatacaagttgggatcttcatatatgaaattaacaacaactgttttttctaaacttacacaagctcccaattttgaagattcgggtcggaaaacacgaataatgtatgttgagaagcaagaaaaggtctttgttgcaatccaaaaattgtgttcttagacaaccgttccgtgtaagatcttcctattgtttacgccttcttgatttctatgattaatgatcaagctactattcggcatttgtactgcagatatatatatacatttgttgtcttaaagtttgactactcagtaaatcctagttatcgcatcgcgtaaagaacagagaagaaaacgactagaaaatcctattcaataaaccctaattttgtcgtcttcaaagtctggtgttgattatgtcgtattaatgatgatttaaattaattacagttaaacctctataaattaatacagttgggatcagggaaattctattaatttagcgaattattaaattattgagttaataatttaacacgttttcaccaagtcgggaccgggagaaaatattatttaatcgaggttattaatttatcgaggttctattgtactaacattttagaattatcaccatcagggagacgattacgagat

SEQ ID NO: 104967 - DNA, 690 bp, Mimulus guttatus
  Intron number 1 from transcript mgv1a000969m (locus mgv1a0 00969m.g) derived from phytozome v7.0 (chr-ID scaffold_8; pos 1367917 to 1368606)
ataccttcatcaagttcttcgaggataaagctcatgttaattggaaatcaagtcccgttgttccccacaatgatcccactcttctctttgccaatgctggtaactcttcactcctcgtttcttatatttttttttagtaatttaggttttaatttgtcgattatggaagaatctctatcatttttgtgtatttggatgcgtataataggctggtcaacttgtaattatgtatctgttatatctatttgaacgggagtagctattgtaattctaaatctttcgattcactgattcgatttgttgtttctaattttggttgtggtatgtaattgggcaggcatgaaccagttcaagcctatcttcctgggcacagccgatccgaacaccgagttgagcaaactcagccgtgcctgcaacactcagaagtgtattcgagcgggtggcaaacacaacgatcttgacgatgtcggaaaggatacttaccatcacaccttcttcgagatgcttgggaattggtcctttgggaattatttcaagaatgaggccattgaatgggcttgggagcttcttaccaaggcaagttgcatgcatgctgactgttctcattgggatggaatattgttttggtttcttacatttcaaacctcaaatttcacctacaggtgtataaattgcccggtgagcggattt

SEQ ID NO: 104968 - DNA, 670 bp, Mimulus guttatus
  Intron number 1 from transcript mgv1a015037m (locus mgv1a0 15037m.g) derived from phytozome v7.0 (chr-ID scaffold_101 ; pos 835227 to 835896)
tcgaattccaacatctcgagaaggaagactctcaggtaaataaattattcaattggattttcaattttggaatgtatgtatgtgtaatttggttaacatatatagagattacaagattacattacaccaccgtacactttgttttatgtatagtagttaaaatagtaggcaaattacggccaatgtatcgatcacgtttacttttacggtgttaaattttccaattgaatgagggagttttttcgtaaaacaatacataattaatgagattattgtaatttttttttcttcataatttaaccttatcttagggttggccgtaatttgccctaaaataatctaacttacttttggagttacaaatattttcctcatatatttatatgtattttgtaattttggtttttgataatccaaaacatagataattacagtaaaaccttgataaattaatgttggatagattagtaatctcgcttaaataataatttattccgatcccaactcagatgaaaatatactaaattattagttcgataatttaatattttgctaaatcaatagagttttattagctccgactgtattactttatagaggtttaaccgtacattatattattttttgaaatgtagaaacttgtttatagtggaagcaaagttgcagaaga

SEQ ID NO: 104969 - DNA, 830 bp, Mimulus guttatus
  Intron number 1 from transcript mgv1a015820m (locus mgv1a0 15820m.g) derived from phytozome v7.0 (chr-ID scaffold_682 ; pos 8291 to 9120 reverse strand)
agttcatcgcatctgatcccgtccacggacccactgtatattttctcatatcctacatctctgtaatttttttattttattttattttgtgttatttgtttgtttgtttgtcgtgtttattctccgattaatgatgggaaatttattgggtcttctattttgtgtttgtcaatcaatctatgtgtgtgtttttagggatttcgttttttttattatatcctatgggatatgattagtgcccaattgttgttcatctgaagtacagatgctttgtctttagtaattttaatggaagaacagctgtcgaggaatagatttaattacaaatttgatgtgtatgtttgtgatatcttgattgtttgatctatgttataaaagaaacaaaaggttatataggatttttttgagtattgcagctcttggtcactccgttcattttttccgattattcacatctaactcacctgcttactcgattggattttggttttccgagccatgtgtgtaatattgagtcgtttgtttgggtggggttctatttccatcttttgctcttgtattttcgtctctttacttgtgtagcctctttgggactctgttattggattacaggtaatgacgaaaattgtgaatactggatttcgaaagttcagctgagggctttctcgttattttttctttattttgtggttacgaagtatgataattaaatcgatttttagtaacttctttattcctttcaatattctcgtaattccctgtatctcttatctcgtttcttgccacctcgttcagctgaagactgcgagggaagcagcacagttcggtat

SEQ ID NO: 104970 - DNA, 505 bp, Mimulus guttatus
  Intron number 1 from transcript mgv1a024731m (locus mgv1a0 24731m.g) derived from phytozome v7.0 (chr-ID scaffold_178 ; pos 237897 to 238401 reverse strand)
gccatcatttagttctactgaaagctctgaaggaggtaatatttatatccccatcaatgtttaattatgagcttcttttcgctctctctgcaaaatgtgattaagggcaaaagtcgccattcataacaacttatgcaaatttagtgttatatactagcggcagaaacattttcttcacatttttatagatatagattatattatggatagtggttagtcattatgcaagtcatttgatttttggaagagagattaccatcattctcgaggggttgcttaatggacaagatatctaccaatttacttcaaaaaaataaaaaaataaaaaaaataatataataaataaaaccctttacttatgaacatgttgagatactattgggtatagaccatgcttatattgtaaacgagattccatcaatgaacgttggcaaatacttacacagctggaaatatgtttttgccttcagggacagagaaaacagtagattttgggctgttcttc

SEQ ID NO: 104971 - DNA, 407 bp, Mimulus guttatus
  Intron number 1 from transcript mgv1a018648m (locus mgv1a0 18648m.g) derived from phytozome v7.0 (chr-ID scaffold_85; pos 377283 to 377689 reverse strand)
ccactcacacccacattaaaggccttggccttgaggtaatttcttctgttcgcctctgtaattttttttttaatccgcttcaagttttattttccttgatcgtgtttttagttgatattctaaccactctgcattatggaatttcgatttcatttattttattttttgaattttttttatgtggttctgtggggggtttaagggttagggttttgccattcttcaattttcgcattttccgatttctatgtggcgcaaatggcaaatttatggatgtagtagaaatgtaaggggggcatataaatgaaacattgcataatatctggttgtacgtagatgaagaaattttgcttttattaaatagattagtttttgttcttgattattgcattattatacataggaaa

SEQ ID NO: 104972 - DNA, 493 bp, Mimulus guttatus
  Intron number 2 from transcript mgv1a015554m (locus mgv1a0 15554m.g) derived from phytozome v7.0 (chr-ID scaffold_210 ; pos 2015 to 2507 reverse strand)
aacattcataccaagaaagtcaacacccttatcaggtacggagaaattttttccctttctgtaagaaatgccgtttgttgtatgttttagttctgtatgtttaaactcacccaatttaccgattttaagttacattctcattaaaatagtagaattgcctgtggttttaaataatatttggttccttcttttttatgacgaatatctccgtttatcaacatggttactggggtttgattctaatctgttttcagcatttagtttcttttctgttgcaataaaattccgattcatgcatcattgactttgctaattttaatctgaattgaaaatttaattttgtgaatattgaaatgctgcattgaaagttatgaatttgattataataaaagttactatgcttgtttactcgcattagtgtttttctgatccgtgataaattatcgtctatttatggtatgagtctaatggatacatttcaatttcaggcctg

SEQ ID NO: 104973 - DNA, 461 bp, Mimulus guttatus
  Intron number 1 from transcript mgv1a013753m (locus mgv1a0 13753m.g) derived from phytozome v7.0 (chr-ID scaffold_129 ; pos 142954 to 143414)
agagttggtcttgtggttttgtggtcttgtgatagggttgtttgtgtttttgaatatttggtcttgcatatttagaattttttatttttttaataaataagggtattatagtatttatacattgaaaattttaatttgatcttgcacaagtggaattagtcttgcatacagtcgcagcctataacttaatagtactaatcgcatgagatgtaaatctaatacaattaatcaaaaacttaaactaaataaaaatatatggaagtataaacattgaagtttgcaccctcaatttctattttctctgtttacacaattcattacggcccaaatttataaacgatactaatagcccagaaaatgaggcccacagcccattagggctcacataatataaaccaatacttggcttcttcttctgaagaaaagaaaccctaagttcagtagtcccgctcgccgcagaa

SEQ ID NO: 104974 - DNA, 980 bp, Mimulus guttatus
  Intron number 1 from transcript mgv1a013767m (locus mgv1a0 13767m.g) derived from phytozome v7.0 (chr-ID scaffold_13; pos 493015 to 493994)
ttctaatttagttgacgatctttcccctaccataggtacttctcaattgcactttctctctctacaatctctcgattctgatttttatttatttatttatttatttaatgtttgattctttttaagcttgatcgaaatgtcaaattcgtgatctccaacttccgttttgttagtttgtagattcactgaaatgtgttggtgttggtggtggtggtggtggtgatcgttaattttttttttttttttttatttatttatttatttatttccgattatgttattgaatttgatcctagatttgattcttcctttgtgtttttgctgtttgaacaaattgaatttttgtaggttttttggtaaataagtagagttgatttctctccccttccaatttgagtacaagcaagggttttggctatctgttgctttactcattgtggatagttaggtgtttgggagctattttcgatgagtgcaaattgtcctaattgttgttgacattttgttgtggatttaaataggtaaatatatcgaacatgtggatcaaatagcaccgatatggacctatggtacgatggatctagataaaaaatattaaagatgtccatgaaagccgtatggggcggttttctgtatgcatagtggtttatcccgattgtagtttgttattgtatcttaattaggagtaatcacaacttctgattcaatcaagttcagtgaccttaaattaatcataattaaaggaaaatgttgcttgtgaaattaatgattttcccgaattcttaatagtttcaattaatgattttcccgaattcttaaactaacttattaccgtctcagttatgttagcttttgatttttttaaaattaagaactgtgaaaacattaatttgaaatgaataaattctatttgattatgtatccgtattattgttcaatttccaggtgtggattttaaggtgaagtttctcacagctggt

SEQ ID NO: 104975 - DNA, 1004 bp, Mimulus guttatus
  Intron number 2 from transcript mgv1a000184m (locus mgv1a0 00184m.g) derived from phytozome v7.0 (chr-ID scaffold_60; pos 96573 to 97576 reverse strand)
ttatagcacaggtaattcttctttgatatctactagctttgatacattggttttctttcttcttttgcttgcaattgctcatagttgctgttgcagaatgtacttaagagtcttacaaggagaagaatgctatttatctgcctgcaaatctgtctattttaatgctattggtctttattagtttttttattgcccagtacatgtttcagattgatgtttttgcattatcttcaactggcaacattattttctaaattttgcatggatgtgcacttgatatggttatatattcttcaccatatccttattcacaacatcgttgaacaagattaaattgggtctcctagttgaatttattttctgaccaaataattttggatattactttcactttcaacagagaactattctttccaaataactaacagaaaagtatcttaggcaccgtggccagggtgagattttacgttggaattgctccatatagcagaatagtggtcacgtgtctgctgtttattggttaagttgctgattcgccggaggcgaaattgttgaacatcaattttattgtaccaagaataggtagcttatgatgataacatatattttgatgcaaagtggattctttcttccaacttcttcctgatatactcaagatgtttttcccatcagttccttttttttggcctaaccacctatagttatatgtttgtgcaagggcatgttgttttatatactttattttattttgtgttattttctatgtcacctcctattttttttttttttttgttcacctgacggggggggggggggggggggggggcaaaacccttttttttttttttccccgggggggggggaatagtcttactttttagtcatgtatcagtggtatttatcatatccagttttacaatataatgctaatgcaattcacatttttgtttgcgttgcgtacttttcccctttgcctctcatgtactttgttgtttgggcaggca

SEQ ID NO: 104976 - DNA, 835 bp, Mimulus guttatus
  Intron number 1 from transcript mgv1a002501m (locus mgv1a0 02501m.g) derived from phytozome v7.0 (chr-ID scaffold_92; pos 902477 to 903311)
ccggtgatcccagaaccgatttgatccctagagaggtttaatttcgttttgatttattcgattaaattttgctcttattttatccttgtgagttatttgcagagaagtttcaattttgaagatgcctaaattaagctgctcttgcattcgcatatttgaaattaactacatatggaggttatctgtttccagatgtatatattgatatagctcaaaaggaattcaaactgtcagtagaagtagaatcctttcatatttgggaaagatttttctggtatttttagattttcaagctttgtcattgatcgagacgggttgcttgtactgtcaagaatatgtttcagagaggatatatatatatatatatatatatatatatatatattattggtctatgaaccaacatctgggaatagtattattaagaactattttgtatttataatttaatcaaaacaacttttatcttgcgacttttagaaagagaggagacttgttggttgcctgattcgtctccgatcgaccaatgttcggcactgatttgattagaacttgggtactgaatagaactttggggatcgtgcagttattgttctagcctctaggaataatttaccatttgtcaaagtgagatgttatttagtacatggcatttgttgtgcttttacatgtttggaaaatcttcgaccaaagttagagatgtcagagactttatgctgagtattcttatagtttgttattacttccttaattgacatacttgacgctattatacgtcatggcatttgccatttttgcaggtcctgcattcttgttatacaaaagtatctccatc

SEQ ID NO: 104977 - DNA, 826 bp, Mimulus guttatus
  Intron number 1 from transcript mgv1a005895m (locus mgv1a0 05895m.g) derived from phytozome v7.0 (chr-ID scaffold_92; pos 709623 to 710448 reverse strand)
ccgttcctcacctaatttctcaaccttctctttctgtgagctttttttttcccaattttaactttttttttggctttcaattgatgtattcttctctactcgcccctccgattccattgaattcaaattcagtactcatattcatgtttttttttttgatcaaactccaattttatctcgcttaaattgtagtgttagaaaaacttttgattagaatcatgatctgtgcctgtatatgtttttttttttaacagaattggtcgaatttattggtcccactgggtgatttggttggggttattgggaaattttgttccagaagcattttgtcttctccaaactaatgatctgctgattgtatttaaacttgcacaattatcggtttgagttttatccgatcggctaaaccttgtttggactagatttttcacaagtttactttatgtcaactagtttctgtaactcaatttggttcagagacatgctaaagtttagaatcacggcaaaatatcacctctcgtttttttgaactttgattcgactcttacgatgttgcctttcgtttgttttgtctttgttataaatgcttacgggacgaggctcttgtaataagtgataatgcagttgtgctgtaatattggggaaaaaaccttttgagtatgtgaacttttgttttgctaaaactatcaagtgaaatttttatatgcatgttcaagagaggtgttgaaatgacctaacaccatccaaattatacggagattttcagctgcgatcctttgtaattgtcgttcatgaccatgtacaattttcattgacagcgtgcagt

SEQ ID NO: 104978 - DNA, 810 bp, Mimulus guttatus
  Intron number 1 from transcript mgv1a005540m (locus mgv1a0 05540m.g) derived from phytozome v7.0 (chr-ID scaffold_11; pos 183560 to 184369 reverse strand)
cctctctctctggaagccaaattactgatccagaggtaatttctttgttttttttttccaatcaaaacctcattgcgtttcttcatttactggattttttcaaacatttaaaacgctaaaatgcgtgttggtgaaggtggattcatgtgtgtgtcagtgtgtgtgaagttcttagatgtaatttgctgtatagtgtctgcggattgaatttgtgatttgttctaggttaaatttgtattgttgcgtctgatctgaaacggagattttggcgttttacgtgtgaattgtgattacagtggtttaactgatctgatctctcgttttttttttttttttttttatgtaatttcatttttgatggattaatgcgtgagttttatcagatctgtgtgagtatcatgaagtatatgtgaattcattttattctgtgatgatttatgagttagctgaaattttatttttcatgcaagttgggatgtgtttatcgtgatagatctaatcttcaattgcagtaaaattttaggtgctgcagaattctgtttctgctagctactcgtcagatctgattgtgaaacactttttttaacgttatagtgatatgaatcgaattgggtgattttcaattctgtttgtggaagcataaactgtgtaaattgtaattgattcccgaaataggcacctcattcgatagtctctttcgttcatcgttctgtcttgaatcaaaatttaatcttgcaagagactgagtaccacctttttgtgttaacaaagaattctaaaatgtgcagggcattctaagtagaaaaaaac

SEQ ID NO: 104979 - DNA, 529 bp, Mimulus guttatus
  Intron number 2 from transcript mgv1a002565m (locus mgv1a0 02565m.g) derived from phytozome v7.0 (chr-ID scaffold_44; pos 1413559 to 1414087)
ttcgtcaacaaaattggcccccttcataaccctaggtattgattttgattttataagtgaagaattttttgttcatgtgcattttcatcgtatgtttagtttatgtatacaaataggttttgttgactgtttgctctgagaaatttgttggttttccttcggtttttttgtaagaaaattgatttttcttctcgcttggctttatgatcactgttaactgttaagaagtcgtgaaatataagatccgaattcgaaaactagggttttacttctgaaaaatgcatttgatttacccaattggcatcaataacccttacccattttcatttccaaaaaaaataaaaaaataattttcaattctatgattcttcatggattttgatgcacccatcgaattcattctcaacctacaaatgtagttgctgtaaccgaattatgataaattatgatcggagcaacttggtgtaaattcatcttaatctgattcgttttcacttgttatcgtcttgcagtgaaacatacaaatatt

SEQ ID NO: 104980 - DNA, 541 bp, Mimulus guttatus
  Intron number 3 from transcript mgv1a002565m (locus mgv1a0 02565m.g) derived from phytozome v7.0 (chr-ID scaffold_44; pos 1414091 to 1414631)
agttggccttctgtcgtccaggttggcagtgacactctgcattaaccttttcagggatcttacattaacttctgtgtttttttcttccttttcatgtgcatctttaattgttcgcttatatcagttgtcatataccaatggctaagagacacattacgattatttcgataaaacttgaatgcatctttttattttcccagcaattgaaatctcggcattatgaattcaaaggcatatgttagaatcataggaaggacagtagccctgtttttgattattagggatctcaagaaggggctttcttgagaattgttatcaagattttgttgtttgatgataaatcgagaagggctttttttgcataatgaaatgatgtattttcctaaattgtcaagtggaccctcttgcattttcggttgtaaatcttcgaggaatatttgcttctgcatgtatcattaatccatttggcatgcatttctcgtatcttattaattttttgttggcagatcaggtgctcgaagagagagaaagcattggggaa

SEQ ID NO: 104981 - DNA, 558 bp, Mimulus guttatus
  Intron number 2 from transcript mgv1a003999m (locus mgv1a0 03999m.g) derived from phytozome v7.0 (chr-ID scaffold_8; pos 900232 to 900789 reverse strand)
cactacaagaggatacatagtgactctttgcagaggtgattacttttggaaagccctacttcgcttgattttgcgtttgcacgtttataaggtcgatttcatgaaattttggttttatgattggcatctttctgaatctaagtttcatgtcgagattcatcaatcatcactcattagtgtcgcatctttcgtagacattttttttttgataattaaaatgcattaataggggaaagaaatattacaagtgtcaacgagaagaaaccctccatcatatcaaacggaataaaaccagtccaacttctaaaaatagcccaagccgcgaggttatgggaagcaaaattggggtttcttgagagtttacggaaaatagaatttgtagacattagctaagttacttattggagtttcagaagagggtttacggaaaattggatttgtgcaataattctgctttcccttttgtcgtcatcttagtaatggcgtaagaatatctgtattaatgttataccttggaagttaggactgctgggagttcagataacgacaaagccgagg

SEQ ID NO: 104982 - DNA, 639 bp, Mimulus guttatus
  Intron number 2 from transcript mgv1a013363m (locus mgv1a0 13363m.g) derived from phytozome v7.0 (chr-ID scaffold_519 ; pos 9026 to 9664 reverse strand)
cgcggccgcccgcccaaggctgctgctagcgctgggttggctgcacctccgcgagctgctgccgctggcccgccgcgcggccgtggtaggccccctaaagtgaagcctgcaatggctgcggctgtaggagcttgagattgtagggatttagtagtgctaattaatttgatgattatatatttatggatgtgttcttgggtatttaggttgttttgcaacggcttcttcaaagtgattatgagctttttaatgtttaaaaaaaaaactaattatgaaaccaaaaaaactcataatcactttgaaaaggagtttgtttgtaacttctaatgtaaatttggtcttcgtgcttaaatttgtttatttgaatctcttttgtcattcctttaatggaaactcgctcaatttttatatggatgaattagagttaaaattaatttgtattttgaacaataatttgtattatgcgtgactacaaaatgaaaatttcaaattccgccgattctaagatgttcggagagattctctgaggaggtcattgccccaatttgtcggagagttcaaaaagaaatggaaccttacaaataaggtcgctaggataatgagatggaatggatttttgtaaggtcatcgccccaattt

SEQ ID NO: 104983 - DNA, 585 bp, Mimulus guttatus
  Intron number 3 from transcript mgv1a012609m (locus mgv1a0 12609m.g) derived from phytozome v7.0 (chr-ID scaffold_109 ; pos 714484 to 715068)
acattaccaggtagaggaaaagtgatgctcttcatatgcacgatgttgatttattttgattataggtgcatattgtacttgttattcaattctgtgcttaaagttccattatgatttggcggttcatgatcttggtgtagaagttcggtttttcctatgaaagtttgcgtatcttgacctatgctatggaagctattaatgactagattatactggagcatgtattatgtacttctacttgcttttggtagttggtggctgacgtcagttgtaacaagggttaaaaatgttttggggttagcatagatgggaatatctacacaaaacagaatttcccttgaaaataatttgtacatacgcatgtgtgatgcatcctattttaagtgttaggggaaaaatatatccaaaacctcaaatattatggccaccaaatatcaaaaaaattgtacacgacatattttatttctctctctatctctacttgggatcaaattcttatatgatataaatgagcttttttctctgaactgagagtgctatatttgcgtaggagggagacattcaatcatcttgcaagctggctgg

SEQ ID NO: 104984 - DNA, 799 bp, Mimulus guttatus
  Intron number 1 from transcript mgv1a007109m (locus mgv1a0 07109m.g) derived from phytozome v7.0 (chr-ID scaffold_31; pos 1300229 to 1301027 reverse strand)
atcgcgttgctgtcaagagaattgagaagaacaaggttcagatcctttttttttttttttttttttattatttcctttgatccttattcataattgcactagggggaaaagtgattatctgtttcttctgattatagggaaaagtgatttttggggatcatattttataattatccaaaatgattagataatctgcttaaaagtcaactggaatcagaatctgttcttcaattatttttggatgatttccgattgtcgtgacaatacggagcaactattatctatttgcatataatgtggcttcagttttgatactttgtaccattttctaatgattccaatggcatttgtacactaataaaggtgtttggtttgtatgaccaaattatttagactcgactgcaaaatagacttctttattaaatttgctcgagatttaatcacttctctaagaatgctgctcatgtagattatacctgtctaccggaaaagaaacatttctgtatgaagattgaaattttcgaataaaataattgttgggaattaaaaatgaatcttcatgtacatgtcggcttgtagttgattagatctttatcggaactcgtgtcgggccaaggtatttactaatgcaatattgttcgcacgtatttgcccactttgattctcttagaaagaaacgttgatcaattaaagatatgcatttggatatagttgaagtcgtgtgtatttttttttcgagaagaatgaaaatatttattaattttcgttatcgtgacgatatccttaaattgtggggcag

SEQ ID NO: 104985 - DNA, 963 bp, Mimulus guttatus
  Intron number 2 from transcript mgv1a006476m (locus mgv1a0 06476m.g) derived from phytozome v7.0 (chr-ID scaffold_82; pos 803324 to 804286)
ataataaggtagttgttgtgcgtaatcgaattcattatctttcataggtttgacaaacatacaatttgtgtgctcctagacctgattgaagcacatggtgtttataacatgaattgatatgttgtttttgaatatgaactggttacttcgtctagtatgtaacacattttataggctaaggctctagggtgggttgtagtcattagctataatcatgaagtaacgatgaggatgaggaaggagagtgaaagggttgtcttaggttataaagtgtatatcactgtttatttttcatgtgcgccgactctaatttagtttcattggcggcaacaaccgagttgtttcttcttcatgtcttgcaacttagtttttctttccttttttaaactaggaattttgtaaatggatcgctcttggggttttccttgtatgttttatgtaaaacttgaacttttttttgatcatatgcttattttctagtgatcagaaaacttaacaataacaccttcgaataattttcatgactaaaaagagcatctatatgaaatattgcttccagtgtttgtactggttttctgtgagtactatgttacgtttgaagtctttctcgataatagtccaatctatgattgttttagtacaatgactcttgaactttatctctgtgggtgttggtggtgttgtttttattattttgacatttttattgttgtaatagattagtattaattaggcatattcttctattgaaaattatagcttgcctacataggttcttcttcctcttttttctacactgcaacaatttaaatatcaagctcaggcttctctcatagtcttactattttactcgttattctagaagggaatgtatttgctcgttatatgttttaacctcgatgtatcttctcaaatgtttgacaaacagattgaagaggccagatcaaaaggggttgaattaga

SEQ ID NO: 104986 - DNA, 630 bp, Mimulus guttatus
  Intron number 1 from transcript mgv1a024125m (locus mgv1a0 24125m.g) derived from phytozome v7.0 (chr-ID scaffold_23; pos 1806933 to 1807562 reverse strand)
aactactgagactggactggagtctcttgttgatcgtatgcaatctcttctccttcttgattaaattatcctattattttgaatcatttttaagtgccattaagttatgtcgtttaaaatctgttattagataaataagaaatgtcgtaatatcgttagtcgttgctatgtcatttttttttccacatataaataatatgagattgttaaaccactaattgcaggtagttcctttacatatatatgtgtcaaaaaatcactaacccctaaagattcaagaaatttggttcttaacccaagtaacagtttatataattaattatcgcttcatttagttagtaaatactttaattgagaaaaatattgatagcaataatatgtatgtaagtttctagaacatccaaatctcatctgttacctgttgaatcataggtggtataaactaacggactctttccttactttttactgtattttggttctgggtagcaaagtatattctgagatgtgttcctcgattgtaggagagcatgatagaagcatgttaagacttcccccaaatatgaataagagttaatgatgtttcctcgttgtttttgtttttgccagaagcaatttcagttatcacaa

SEQ ID NO: 104987 - DNA, 910 bp, Mimulus guttatus
  Intron number 1 from transcript mgv1a020239m (locus mgv1a0 20239m.g) derived from phytozome v7.0 (chr-ID scaffold_155 ; pos 46035 to 46944)
ccattcgagaagctcaagagcccagaacccttcaggtacaatttgattgatattttgtttcagattgattgcaaattgcgttagttctgataactcaattagcttatatacaggaaattgggaatcggaattagggctttttgtttaataagaaagaaaattggatgttgccatattgaatgttaactgttgaaacctttgtctgcttgcttaatcaccgtattaatctgcctcgtttggttggggagattagccgtgattaactaaataacggaactctctgtttgatgtttggtatccctaataacttgtcgggtcgacctacaaatattatgttatcatggtttatcttgccttttagacatgtatttttattggatcttccaaggttcgataatacaatttggtatcattagattatttaatttaatcccgactaatcttatcttggcaaccaaacgaggccttggatgataatccatctacgctattttgactagtatatccttttgttgtaaaacataccatttgttcaagaagaggaagctctgcaaatcatgactcgtaaattggctttgccttcacctgatcacagaccgttaccctaatggataatcttcacatcagcgtaacaaattcaacgaaaaaaatggatagtgctgcttactgatttaataattgtcatccattattaaatcctcgcatttttttattcgtttttttttggggatgttatttccatgaaagttaaatggtgagatactttgtagagggttgccctatttagaaaggcgattatatcgaagatcagtcgtttccgcttatttctaacttagtttcgtctggattatagctgtttttacgttgattaccaggaaatatcaattgccgccaatttaccacaaaagga

SEQ ID NO: 104988 - DNA, 1015 bp, Mimulus guttatus
  Intron number 1 from transcript mgv1a013228m (locus mgv1a0 13228m.g) derived from phytozome v7.0 (chr-ID scaffold_17; pos 1317175 to 1318189)
cgaggaaacacgtttcttacaggcgggccgattgatggattcactattcggtacgtgttaatttccgttggctttgcgtattggattgaaggatttcgacttgaggaattgttaattataatatgatcctatgtttgaatgtgttactgttaactaagaaatatcgaatctttgctttgcaatatcaaactttggcaacaattttcatgttctttctgcagatcaaaatcaattctttttcgatatctgagcttgtagaactatttatattttgttacataagatatgttcatgtttccttttctgcaatcatttgttgaaagtgtgtcttttccttcagttatgattgcgagtagctcatagcttccgatgaatgcggcgagtttagatatataactctgctattcttttcgattacaagtctttatcttcccaaacgaagtgccctgattctgaatacgcgagttaaatctcatcctccctaaatttccgtttcaaatccaacttctattattagaagaaattggttataaacaaggaatgtgttaactaacaagaagctcaatgtaagtaaacacggaaaatgattggtcaaggaatacaagtatatcccatactaatattgtcggagaagatgactgtaatggaatgcctctgcattctctctgtttgttccttctcgtgagagcggagttgtctatctgtgataattctataaaattagggtggttcgttctctttctgaattagtaaggttgcaatttcattattatcatgatgtgagagaaaacgcacgtttaaatcgatgatatatataatagccgactccaattagttggaggcaaacgagctttggcaataatgcttactcaacttcgtctgtaaaatttcttggagtgctctgtttttttttttttaccgtgcgctgttattacacgatattttgacacagttttttgttgtttcttgtctgcgctcaggaggaccagtaaaacggaaacactcttaggaagaa

SEQ ID NO: 104989 - DNA, 1020 bp, Mimulus guttatus
  Intron number 1 from transcript mgv1a005944m (locus mgv1a0 05944m.g) derived from phytozome v7.0 (chr-ID scaffold_26; pos 518936 to 519955)
cgtcgtcgcttgaggatattgaatcttcactttccgttagttttctcgcatcttttgaattccgatttttttttcctgtcaaaattatttgttcaattgttattttttggggagattttgaatcgcgtagctgaatttcgtatcaattcgacgggatcgaggttttgaaaatcgcggattcatgttatctgaattggatcgactatccggcgtgattgaatattttgtttgattgaagtttcgatttgttatttagaaattgaagtgaataattcgaattagagaaatatcgattgtgttttggataaggtttacatcgtccgattacactctgattcgattttgtggatgtaaaattagattttgaaactatgctcctgcatgggtaaattagtaaataatggtcttcgatcggggtaaaatttcatctttgatcagttcagtacgtaacatgggggtaatcaagaagggaatccccattttgtaaagaattaagcacatgagtttaacataaagactttgtgatgactgacacggataaaatagaatattcaccgtatcactgatcctatgtgataattctaaattttttccttgtatatgtatgtaatttagaaagtatattctaagttttatgcattttcacagtgctgatggagacaaagcatattattgtgttgcgcttgttgttaaattgatattatcctcttgctatagtttgttttcgattttttttatgcagacaaaattgctttgtcaaagaatgtgattcaggaagtggtatttaaaattcccttccgtggaatatactcagcttagagctgcactttctacaagattttcaatgcatatgtgcaaagtgccgtaaatgctttctttaataggcacatcattctgtcgcaaaagacaagcatatggattctttaataggcacatcattctgtcgcaaaagacaagcatatgcatcctttttcttaattgaacttaatcattttttttatatttcaaacaggcatctat

SEQ ID NO: 104990 - DNA, 303 bp, Mimulus guttatus; identical to SEQ ID NO: 103885
  Intron number 2 from transcript mgv1a012789m (locus mgv1a0 12789m.g) derived from phytozome v7.0 (chr-ID scaffold_261 ; pos 112122 to 112424)

SEQ ID NO: 104991 - DNA, 830 bp, Mimulus guttatus
  Intron number 2 from transcript mgv1a011179m (locus mgv1a0 11179m.g) derived from phytozome v7.0 (chr-ID scaffold_75; pos 219584 to 220413 reverse strand)
cacgaagtttttcaggttcaaatctcaacctacctaaaacaatactttaaatttaaatgttcacaaagtgacggtagtgctcattgtgattgaactaattattttatatatgatatacagctgcaacaactgagttatgtaatacagtaaactcattaattaaccaatttcattctgcataaaaaacagaaattttatagcaatgttaaaatcatccagagtcgataaatatctggatgcacatggaagagtaagattttatcgccactacctctcattagatacaagtaattttgattttaatcatttgtggtacagtgtagttagcatattgtttattaataatataatatgtatagcatatctagcatgtgagtgattatgaacttccctcattgtgtacgagtactcgaattgggtattctatacctattagatgatctaaaaatttgccagattgtgcatatctatcttctatagtctgcatattatgtttaaggttagccctttctgtttttaaaacttttgctttatttatggtttccctgtgagataggaagataaaatgaaacaataaacatggtttggtaatacttgtttttttgtatgtgtgcacggttggggagatttgaatgaagataaggtaaaatcgttggttaatatgagaacacgactagcttcaagtactaatcgtagtatttctgttatataattaatatgatgcttcaccgaaaactttggagcagctgagggaggatataatttgtaatttgttttccgttgtattatttgcagcactggtggttgtccatttggcgaaaactgccact

SEQ ID NO: 104992 - DNA, 487 bp, Mimulus guttatus
  Intron number 1 from transcript mgv1a015582m (locus mgv1a0 15582m.g) derived from phytozome v7.0 (chr-ID scaffold_336 ; pos 11440 to 11926 reverse strand)
tctccggcatcccccaggagcacctccgccgccgggtacggttgtgctttctgctttttctttgattctccgatgttgtttcccgatctatgatttgttatatgacgatacgaaattgattgatttctcagtcagattaatctggaacgtgtttttggaagaccgaaattatagattttatcaattgtttctttttttttttttttttttttccttcagtttttgtatcaacaattacttcttcgatgggagatttacgatgtttgtatgttagggtttcgtcgccttctgtgctttgttaaatgtcaatttgaaattgattgatttatcattcagattacatgaattggaagactgaagttacagaattttatcaattatgtgtgtgtgtgtgagtaacttttttttcgacatcctttttattgtttttctttttgattttttttttataggttctgatatattcacctgctcgaaccgctacgca

SEQ ID NO: 104993 - DNA, 404 bp, Mimulus guttatus
  Intron number 1 from transcript mgv1a000985m (locus mgv1a0 00985m.g) derived from phytozome v7.0 (chr-ID scaffold_96; pos 268864 to 269267 reverse strand)
actctacctcagttcatcgacgccaatccaatcaggttcgtctctgtttatatataatatatatatatatatatatgtatgtatgtataggtgtatgcatatatctattctgtggggggttttcgccgcttgagttaatcttcgcctgtgtatctaaaaacgttaggatctggtttcgccgctagggttaatctttgccggtagggttttgttctatctaataaagttgggatcttggatctgaattttgactgattttagggctgccaacattgaattaaatttgatatatatatttatgttcgttgtatgaaattgatttgatgtaatttgaattgtattaattttttttatgtcaattatatgcagatttcttctctaggagattgctgagaagttcatta

SEQ ID NO: 104994 - DNA, 276 bp, Mimulus guttatus
  Intron number 2 from transcript mgv1a008845m (locus mgv1a0 08845m.g) derived from phytozome v7.0 (chr-ID scaffold_157 ; pos 392636 to 392911 reverse strand)
atactaccgcctcacgtgaggagaaacaggttaactttttatttcgagaaaagtgtataaaatttatgatttaaatttttttagccgttgtagtttgattacataaactctgctagcatagtactctattagttcaggaataaaaaatcttctctgaaaatgtaaattgagtaagaacgtaggcagcaacatttccatgaaatagagttttactgtcagtatatgttaattaagtttatggaatgattttcccgttatttttttgtgcagcttctg

SEQ ID NO: 104995 - DNA, 637 bp, Mimulus guttatus
  Intron number 1 from transcript mgv1a008845m (locus mgv1a0 08845m.g) derived from phytozome v7.0 (chr-ID scaffold_157 ; pos 392967 to 393603 reverse strand)
tagaaacccttgatcctgacgtcattgcaatacaggtattcttttctaaagtgttatttttctaatgttggattagtgcctgccaagtgtttgtgaatttgtttttcttttgatgcttcaaaatgggagtggctggtttgagttcttatgaaatcttttttggttgcattgtttgcttacagtgaattcatcaaagtttttgcttttgtagttgtacatccatgtgctaaacgattcttgtaagatttggcgaacgtctaatgctgtttgagtaggaatttatgatcttggaatacatgttacttgcatgggtccaatcagaaagtcatttgcttgtattaatattcaattgcttcaatttattttttgttgttgcctatatgtaagtaaacatgttttgtacaagaaccgggcctgctttagcataaagtcttttagttgattgtgcaacgtttcccacgtaaaatatttgtggaacatctactcctatttgttgcattctttctttggaattcatttattattattctctttgatttgtagtgatcttttcttgttcccttgtaattttgaattttgttacttggaaccttggacaagagtttatctaacttgataatggtggtaggaagttaga

SEQ ID NO: 104996 - DNA, 1022 bp, Mimulus guttatus
  Intron number 1 from transcript mgv1a025111m (locus mgv1a0 25111m.g) derived from phytozome v7.0 (chr-ID scaffold_112 ; pos 725455 to 726476 reverse strand)
taaggataccacaggagcatctgcttccgcatcaggtaaaagttgcacaaaacaaatttgctatcatttttatttttgaattagataaaatctctatgaacaattttaatttgattttctgttgtactagcaatctaacattcatgctcttaatttaactttttggatctgttgttttattattattttatcaaagtatgatttaagtttacagatcttttagatatctcatatagagattgttgtttgaattaagtaaaaattatattattgtcggctttcgtatatgattctattttgattacttttatatttgtcaagtaacatactttgattaactcttgttttgacgacgcacgacacgcgttaaattactttatttgattctgggtttatatacttgacttactattttttcttttatttttacctttttgcacgatatatcttaagtagaaatgtcacaaaaaataatcgtatttttttccgtaaaacttaaatcaagatggcgttcatgatgcagacaaaagggttgggattgaacaaaatgggacaagtcaataataaaaaaaatcttttaagtaaaattggatactatattgcatcttatggattttatttatacatgtcacgtatatacatatccatgaggtgtattagataaaaaaaatgtgagatgatatatacttgaagtgtaatagaagaataaaagtttgaaagattaattgtataaataaatgcaaaaaaggagagtaaataaacatggttgtcattatttttttgttgttgaaacgaattaaatgcaataaattaggggttatatttgctttttccatagttggtataccattacttcgttttttataaatatatgaagaaaataaaaattggtccgaaaatgtaaccaaacatttcgtcaattttaaacattatgttttctttacttcatatgcttttaaataaaaatatacaattcattcatttcaggcacaatcgacccaaattcagtagcccccaacctc

SEQ ID NO: 104997 - DNA, 736 bp, Mimulus guttatus
  Intron number 2 from transcript mgv1a007079m (locus mgv1a0 07079m.g) derived from phytozome v7.0 (chr-ID scaffold_125 ; pos 288985 to 289720 reverse strand)
tgtgaagaaccttccggataaagtcgttgttcaccgtaagttattttcttggcttgctctcgaacattatggtatattgtattattacattagagatttccgtacgtttgttaagttctcgatgcctgtctattaattgcttgtcgaaaaatacggatgctaaactttgcatttgtttttaccacaactcatagtttcttttagggttgggcatgggtagggtcgggcaattatcggccagtaaatattatttcaacgttaagaaaataagaattacaattaaatatttataataaatttttattattgaaaaagttgattggccgatattaaccgaccagccgacttttgagtaagctaaaaaccacagaccgacacattcatatgtaggtcggtcaaataccggcccgacaacaaaagtatcggccaaaaaaagcgggtcgaaagtgggttggttggccgataaaaccgatccatgactgccttaatacatatctggtcaaggaaataattttgagtataatttgactctacatatctttttgactctacataatttgactcgtgttttcatagacatcttttgtgcaaaactgcagtgttgttgtcatttctattccttctatctaaattcaaaaaaaagattttttgtgttgttttgaagactttaaggtaatgttgaacatgtgattgtgaaataggcagcgagtgcaatccatcaaggttgactttcgac

SEQ ID NO: 104998 - DNA, 880 bp, Mimulus guttatus
  Intron number 1 from transcript mgv1a014483m (locus mgv1a0 14483m.g) derived from phytozome v7.0 (chr-ID scaffold_273 ; pos 216201 to 217080 reverse strand)
tgtataaacgcgacccgcacgagaaccccggcattgtacgtaactgtgtttttctcctttgttttggttcttcattcggaagaattttatttgtgcctgaactttgaaggttttgaatttggtaccgatgcctgatgatttttataaattgataccttattaccccgaaattattgtttatatatttcattgaaaaacctggccgatggaagcagagatttatttggcttgggccagattttctgatgctatgcatcgtcgtatgggggtgttgtgaggaacttataaacaaagattatcttcattaatcagggtaatggagctggacttgtgatttgtggaaatattagagttaaacgaaagaaacgaagagggaaagaacatcagggatggactttgtcgttctgatatgattattttcttgagacatgcattcaatagttacaagttttcaaacattttgaacagcatgtggtatttagcatcgatttgctgtctaattacttggagggtttgattttaagtcatggcacggaataattggaaacaacttgagctaggaaactttattgctgtaaatgtatgctcccaccatctttgaatttcggctcatatgcagtttatgtgctgcatgtagttcttcatgattgattaacttgacgagaatagagtttttggaaggcacaaagttgtcaatatagtattgacattcactcattagcagctatctcatttaatgactagaccatctgtcgtttacctgcaatccatcttgaattcataattttgatctcttaatgcaacatcgatcacattaaatgactctggatatattttaattgcagaaaccaattcgaaggggtgccatagggcatacact

SEQ ID NO: 104999 - DNA, 777 bp, Mimulus guttatus
  Intron number 1 from transcript mgv1a023726m (locus mgv1a0 23726m.g) derived from phytozome v7.0 (chr-ID scaffold_382 0; pos 2963 to 3739 reverse strand)
caaggtttactccttccccccttggtttcaaactctactataaagtttttttttctttttttttataactattttttttctaaaaaaaattgttttcattaatattagtgtcttgacctgcaatattaccgtcggagacagtaagttttttgtacaattatttttatcgtcttggtctgcaatcttgttgtcttctaccgtaatattactgtatcggacaataatttagtgagaaacaaaagtcaacggcggttgaccggctgaaaaaaaaaaatcagaaaaaaaatttaaaaataaaaagtcacatgccggaaaaacgcacggtcaacgccggaatttggctgggaaaaaaaaaaattcagaagaaaaattattttctaaaaaaaatatgttttcaaaaaattatgaaaatatgggttaatgtgatatatttgttaaaatacggcgtcaatgtgcaatattgatgaagttaaagtataattgatggaattgatgaatattatattatgaagggtattttagacaaaagacattgagatgaatttattagcgtgactgttttttatctgaacctatttgcatttaagtcccttggcattaacatgtttgccatttgtcctatagtaagtgaacctggttggagtacttaaatttcaaagtgatcaaaaaatgagtatttgataatccatttctcaaatggtggtgctcgtactgactctcggcaaaattaaactgtttgcaggaaaagtacacagttccgtcgaagtcgcgcatacg

SEQ ID NO: 105000 - DNA, 755 bp, Mimulus guttatus
  Intron number 2 from transcript mgv1a004735m (locus mgv1a0 04735m.g) derived from phytozome v7.0 (chr-ID scaffold_154 ; pos 168546 to 169300)
gggaagtgtcagtggaccagtatcacaaatacaaggtcagttttgttttttgtttcttagttcaatatccaaacaaatatccaatcaaactgtcctttaatttgcagagataagttgaaccttttgtgatgtcatatttcagtttcgaattttgatacaaaatatgccctttctccactatttatatttttctttaatctattttcttttcttttttcaaaaataaaatcaagtatgcatcatgtttcttctacatattttttattataagaaattcattatatatatatatatatatatatatatatatatatatatatatatatatatatatataaataatataataggaccaagtgcgacactgacatttcaacaatctttgatcacgttttaggttataagaatagacaaacaacaatttatggtccaaaagaaagaaaattatgcaactggaccaatccttcacttttctctagtcctcttaataattggcaattgggaccaacatagaaaaaaaaaattatcaagtattttctttattttactctacttaaaattataaaagataaaataaaatgacaagttcaacaaatatagacaacaacgagactgtaaggcccccgtttggttggggagattagccaagattaactaaataataagataaaaattgtttagtttcctggtagccttgtgtatcaacacttaaaattgatacttatcttacactttcaaatttttgtatacacagg

SEQ ID NO: 105001 - DNA, 728 bp, Mimulus guttatus
  Intron number 1 from transcript mgv1a000229m (locus mgv1a0 00229m.g) derived from phytozome v7.0 (chr-ID scaffold_101 ; pos 616548 to 617275 reverse strand)
gtactcctctccgggatcaaagaccgccttgacaagtaattaaatccaattttttttttttttttaatactgtgtgtctgcgttttttttacgtacggattcatctactatcgattgtctctcaattttatttttgatttacgtccggtcctaatttcttcaattttgtgatttcctattttaattatattaaatttaataaatacctcagtttgattaaaattgatctgctaattattgcatgtggagtaaatactgcttacatgtgttcactgttcagtagcatttcatttaaatttccatgttaattacttttcaaattttgtgtttaatgactaattaattacttttaattacttgatggagcaatgtcctataatctggtaatgatccttttcggttgatagtgtaaaaggattgagtgagatgaaaactaaaactaactgtttttttgttatgaattgacgtttgctgaaagcgatttattcttggttattgaatatgagaatgtagctaaagcatatttatctttcagttgtccatgaaaagaacactacagactgggaaagttttactaactcagtactttcatctaccaaatcattaatatatttatatattaatatactgagattttttatatattttttttctgaattgatgtgtcatacgtgttgaattactatcatttagagtgggtttggagattccaaaagttgaagtccgat

SEQ ID NO: 105002 - DNA, 917 bp, Mimulus guttatus
  Intron number 2 from transcript mgv1a016430m (locus mgv1a0 16430m.g) derived from phytozome v7.0 (chr-ID scaffold_646 ; pos 11828 to 12744 reverse strand)
ttagccaagcaactcttttacactcgtcttgccaggttacttatccacttccttctcctataaactctctcctcctttttttttttttttttctttttttgcgaggtggttctgtttgaggtgaccgagttcctatgtgttcatctttttttttttcttctgcatgatttcaactgttaattttgttggactgtgtgtgcctcagtcggagatggttcagaagttgtgaattccttcctttttaaggttgcgatcacaatcatttttatctatgattgttagtgtacagacgtaaattaccaaatgctttgcaatttgcatgccttgaaattcaagaaatgtgaactacacgtgaattgttattgataagcatttgcataacaggaaattgagtttggtattttttttaaaggttcctgaatttcaaagatttcaatttgaggactttttggaggcatctaagtcattaatgtaattatggaattatgtgctgttaatttttgaatcgtttaagtttctgtaggcagccacctttgcatgatttagatgacagtggagcataaatgcatattattataatcaagtaattgtatggcagagatgccaagttaaacgatcataaagctaagatgttgatatttaaggcatttaattgtgttggcgttgaattggaactgtcatcatctattgccaattttgtatggggttgtccgtcagatggaaaagattgtagtaaccatattgttatttagtttgttcgattaacttgctgagctgtgcgagatttatgtactgcattttgaatcttcgatttctctaaatgtaatggcaaaggaataagttatcattagtgttacatatatatatatatatatattgcagcattccagggagaacagagtcattctggaaggaaa

SEQ ID NO: 105003 - DNA, 743 bp, Mimulus guttatus
  Intron number 1 from transcript mgv1a017097m (locus mgv1a0 17097m.g) derived from phytozome v7.0 (chr-ID scaffold_16; pos 1934601 to 1935343)
gtggcgacgtgagggggtgtgtgccataaggagctttttagcataaaagaatcccattacaactcactactctctctctctctctctctctctctctacataaattatcgacctcacgtgacttacacatggcgcacgtgaattaattcgtccctcacactaaacactcacaaatcacaattaggggatgattaactggttaagtggtgagtgactgtgaattaacttgagatccggcccgtttaagttgtctgaactcaaacccggatacgtcctaataccaaactcaacacactataattaatatttagaggataaatttcctttttttttttttaaataattactttatgaataatttaacaaatagatttatatatatagataaatatttttataaaacttctcaagttttttcaagaattttcaccaagaaatgggcaaaaaaatgtcgagatcatgacacttcttcttctgttaagatgattaaggggccacaaaaaaaaaaaaccggctaaaccctgagacgataaaaaattccgaccacatgctgtcctaaacaattccaactgaagctattcctgcatgaacaaaaccaagtaaatatgataattatacgagaatgtacattcgaggcgaaactggtcagtcaatcagtttacggaaaaggccgaaactgaattgctaatatacttgattaaacgcaagcacactgttggtatcaaacaatatttgttttggtc

SEQ ID NO: 105004 - DNA, 961 bp, Mimulus guttatus
  Intron number 1 from transcript mgv1a012342m (locus mgv1a0 12342m.g) derived from phytozome v7.0 (chr-ID scaffold_196 ; pos 338415 to 339375)
gagcaggtgggttagtcaacgcctgcttcaaagccggtggtgacggtccttgcggcggattcaccgccaaatcggccggaacagtccaccggctttgaagaaggcgttgactaaaccacctgctccgacgcctcagccacaggctccggcggtggtggcggtgattccgcagcaaggacagttaccaccggcttccacgaaggcggtgaggctaccggcaaggccaggcctcggatcattcggacagaagacagtcgttaaggcgaaccattttttggtctcggttgctgatagagatctgaaccactacgatgtaagtgtttttttgattgagaatgtgcttttatgtgtagagaagttttgtctgcgattgcgtatttgtttgtattttatacacatctcttttcatttcatgtatgtgttgctgtgtgtgtgtatgtatgtatatgtgtttttgtgtatgtataattatatttttttacagatctcttttcatttcgtgtatgtgttgccgtgtgtgtgtatgtatgtatatgtgttttttattgtgtttttgatttgtgaatagatgcctctgtttatgttagtgttcattcaagatgcataatgcagtttttcgtgtttctctgtgttttgaatagaagagtaatgcgttccgatttttcgtaattgtttcgattatctttattttcattttaggttgctacctcgaagaaggtatgccggatgataatgaatcagcttgtcaaatcctttcactcctcacatttgggcaagagacaattggcttacgatggaaggaagattgctacactgcagggacattgccctttgtctctaaggattattcttattcttatcaccgagcttattcttattttcctttttatcttcttacattctcctttttttgttttccacgacaggattaattaagagagtgtgcgaaaccgagttgggc

SEQ ID NO: 105005 - DNA, 485 bp, Mimulus guttatus
  Intron number 1 from transcript mgv1a006422m (locus mgv1a0 06422m.g) derived from phytozome v7.0 (chr-ID scaffold_21; pos 657718 to 658202 reverse strand)
gagcaagcctatttcatcgcggcggccggaatttggtaggtggagaacatttcttcttaattttccagataattaccaaaattgttcgccggattatttaccatttaaagcttaattgagacgtaattaatgataattacctgtttttcatttttttgaattcttccaactcctcgttggccttatcggtttatatatattatatctatatatgcgcgctcgtgtgtgtgtttgtgtttatctgtctctggtaaatatccaaattccaaatagatcagccttcactaccactagttattatccattattgatgcaactcagcatctcaatcatgtggctgtaaatattttttttctataattcatgtcagaattactgagctgtatacatatatatatatatatatagcagtatatttgtgctgtaagattgacaaattaaaaaaaggcctaattttttttattcttcttttattagcagagagg

SEQ ID NO: 105006 - DNA, 931 bp, Mimulus guttatus
  Intron number 1 from transcript mgv1a011019m (locus mgv1a0 11019m.g) derived from phytozome v7.0 (chr-ID scaffold_113 ; pos 102357 to 103287)
ggaggtaatactcaaattgctcaataaattaatgcaatatatcattttatggagattgcttggattagtaaaatatcaaattaagcttaattataaattatgacttattttacatattcaaacatgtgacttagtgttcatgccatacatgactagtttggaattttattttttatattttaagttggtgtttcagggttttgtagatgttacattcgatgaaatacatttagtgactttgtaccattgattcatacataattatatatatttatgtacatgtgtgtttagtgggtggttatttgtattgatctacagtgcaaaatcacctaatgcgctctcaataaagaagtaagatgtattgggtaaattacaaccaccccttgaggtatgctcaaattacgaaaacccccttatttttggataattacaactattccttaactatgaattttcttacacgtccacccttatggcgtcaaatttagtggaatcttctagatcatatggaatattctcaagtttgtacctattttaacccattgagctctacattttgaagcaaaatgatcataagatgtgttttatgacttgtatatatatttgattgtggtgcatcaaaaaccgcatttttgcacaaaagtcaaaacgagtacaaactagagagcattcatggaatctagaagattatgttgtaattacccacacacgatgggtttttttttcataatttgatcataccttaagggtgtggttgtaatttaccctttatttattttaatttactattttagctttattttagaatcctaggatggagcatgacccacccggattgagaaccggatccgacccgaaccgacacaaaaatcatcctttacgcgtcatttcaatagttaagtatatacctctccgtaatttgggtagagag

SEQ ID NO: 105007 - DNA, 754 bp, Mimulus guttatus
  Intron number 2 from transcript mgv1a006673m (locus mgv1a0 06673m.g) derived from phytozome v7.0 (chr-ID scaffold_54; pos 780290 to 781043 reverse strand)
cttcttcaaaccctttcatttcaaagcttgtcaatgtaagtttttgcttgtctgtttgcataatccttcaggtgtggttctcagactggtttgcagcactcgggctttcactgtctccgtttctgttaatcatttaagctgatcatgaagggcctgcttcgatatatcttgttttactattttttattttaacgcgttctctttgtgttttcttcatttttatggactgctgtttattgattttaatagtctacctcaggccctttcgacagctttgtgtttaatcatattacttgcaagcaagaccatattcttgaaattaaagaacatctattgtcatcattttactattttggctgtaattcactctttgccaataaatatttctacatatttgaatactgacccaacttgttagattatttaatttctaactaatcctctttgatattttgttttctgatcagttggcatgcttcacagtatttatatgaagttttggataagcaaatactaacctatttatctagctggacttcttaaacttttcctcaaattagttgccatttttgttttttgttcagctgacatgtttcacagttttatttgtgtggttttgcatcatttaaacgaatccttacccatttaaccagcttgaaatgttacactgtttcttgagttagttagttgataagatttgttttgaggcagcagtgaatgttttgcttcacagttttgtccattcgcaggcagc

SEQ ID NO: 105008 - DNA, 639 bp, Mimulus guttatus
  Intron number 1 from transcript mgv1a006673m (locus mgv1a0 06673m.g) derived from phytozome v7.0 (chr-ID scaffold_54; pos 781082 to 781720 reverse strand)
gctccgccctcgaatttctcacgacaaaccccaaggctagggtttatcttttccccctttttttacgcttgaatttatgctaattttgagattgtttgtttccgttttcttcatacataggaattgaattgagcttggcgattttttgatttgatttgatttgattttttttccccgagttttaatttcagattttcgcaaaattaaattctagaattggatcagcgtttgaggggtctcaattctaagatgaataagtttgttcgactattttgactcaattttgaacttgtaattagttgagtgaaatgggttctctgttggaaagcagccaattgagtgctgggtgaatttgggttattgaagttacttttgcacctaaagtttgcaggttctagcaattgttatgtggattttttgtgctgtcctgttctaaaattgattttttttttcttcgtatcgcggaattctgtttcttttaatgtttttttcgtgtgcataatattgttcgcatttgcatctcgtttaaaaataaataaatctaacttcgccatgtcaatgggacaacgaattgcacttaaatctctcaatcatgttattgcaggaaaatcttcttagtccaactcagcggttgattgc

SEQ ID NO: 105009 - DNA, 629 bp, Mimulus guttatus
  Intron number 1 from transcript mgv1a005397m (locus mgv1a0 05397m.g) derived from phytozome v7.0 (chr-ID scaffold_26; pos 1123333 to 1123961 reverse strand)
cccctcggcggcaccggtcgacctgacgccgtcgggtgcgtttgtcaattttcgtttcgattttctcttttccgttttcaattgcttaaatttgtgcttggagctttttttttttttttttttttttgtgtttttaatttaaattgcccttagaatggatagttgtgaagttgtgcatacttgaatgtagtggcgaaatgatttcttagtgaattgatgcttggattcaattgtttgaaaaaaacgaaattgaagtaggatgtgcttatgttgtggtgaatgttgcttctggtaatcaattcaatcaaatcaattcaatgttgcttctggtaatcaattcaaattataggagcttacggggttgcgtttagttctctctgatagaatggaagaattaactggtcttaatggggattagatgaagtgaagtactgtgtacttagttacatattgggcatatgcacaggtgaattattaactactaaatagtcatgcgtaactatgaaaggtttctacattctgtctaagcatcctcgtggattgctgtcggttttgctcaatacacgatgctgtatgttttttttgattgtgcaggctctattacgctcgagtaggcattggaacgcctg

SEQ ID NO: 105010 - DNA, 811 bp, Mimulus guttatus
  Intron number 1 from transcript mgv1a013042m (locus mgv1a0 13042m.g) derived from phytozome v7.0 (chr-ID scaffold_48; pos 1110357 to 1111167 reverse strand)
caccattctccagagcgaagctctctctaaggttttttttcttctcttgttttgcttaattttttttttcatatatatatatatatatatatatatatatatatatatatatatatatatatatatatatatatatatgaacatgaaaaaggggtgattaggggttgtagggaggagattactgcggccgcctacggctgccggatttttttttaaagaaactatttgttcagccaccagcaaatagtttctttaatttttttttacaaattatattttttttaaagtattgttttttttaaggattttggtggacttgaattaattgtttcacaaataaaggataaattgattaattaattaattaattaaagttatgaattgaatttcacaaaaaaaaaaaaaaaaaaaaaggaaaaaaaccatccaaaaaggtgtttgtaattattcatatttttgaattatagttaactagtggagagttgacttggaaccgcactttatacatttgaatgcagtgtgaccttttttgaaaagacttagaagaagaaaaattgataatttccttctattctgaatattccttctggctgcaaatttcttcgttaccaaataaaaataaaaaatataaaatcaaactatcaaaacctgattttttatgtttttattatctcgtcaaattataaatcaaaaatttattttcttgtttagttacgggtattttattaacataattttatttttattgattaataataatgaattttaaattgcagtatcttttggaaacaagcgcctacccgagagagca

SEQ ID NO: 105011 - DNA, 697 bp, Mimulus guttatus
  Intron number 1 from transcript mgv1a021114m (locus mgv1a0 21114m.g) derived from phytozome v7.0 (chr-ID scaffold_46; pos 1083971 to 1084667)
gaagcgtaagaattaactagctgaaatgtcttaataatttgcacatcttacatctgcaaaattttatatattccttttttttttctcgaaaaagttgcggtagttaaattatatttattattatttttttattatcagagatttattattactatacctacacataattattatttttttcttagccgaatttagtatgaacacaaatggtaactaaaatgcataggtccaaataaatgtgaagctctgtagcacggacacgtttcgtgtcggacactcgaggtcacctgtcagatactatataggtcattttacagtttttgaaaagttagaaacatgtttgaataacaaattttcaaatatttttgttgattctctaattatttacaggatttaatggtcaattgcagattgataattcatatatagctaagatttattttgaatatttttgtataaaaatacataaaaataatttatatataaataaaaacttatatatatttatatagcatatttataaatatacccgtataattttaatatttacacgtttcccccaagctcccgtatccccattttttgagatatgccgtttccccgtatccccgtttctatctctgtgctacatagatgtgaaggcgataggctacttctaacacgtgtcactttgatttattcttaggtttttcaagga

SEQ ID NO: 105012 - DNA, 392 bp, Mimulus guttatus
  Intron number 1 from transcript mgv1a009788m (locus mgv1a0 09788m.g) derived from phytozome v7.0 (chr-ID scaffold_303 ; pos 107229 to 107620)
aactcaaaggtgaatttctctctctctgaagacttcaacccttgaattgttagattcagggatgcaagtacttcaaaattatacaatgaattttggaatttgttgttataaacaaaaattgaagcagatttgatatgatttcattgctcgatttgttgatttcatatatattttttatataatacatgttagcatctttaatggaatattccgctggaaaatgggatcaacgagtgattgagtatgtttaacaactgtttaagaaaatccggtagtttgaccgtttttgaataagttatcttaagtttgatctggtttggcctttttgcccaaatcgaatatgttttgatcatataattaagaaaagccgttaatttttgtgtcgagttcag

SEQ ID NO: 105013 - DNA, 568 bp, Mimulus guttatus
  Intron number 1 from transcript mgv1a007152m (locus mgv1a0 07152m.g) derived from phytozome v7.0 (chr-ID scaffold_168 ; pos 269188 to 269755)
tccaacccagttcagttttctttcacaattttcaggtctcctctcttctcagttttctctctctgttttactggtaccagcatttgttttttattttttcaatttttaaggttgattctttttacaagaacctatttgattagtgattatgtttattccacggatttatgggttattgattatttgatctgtaccatgtgcttcaaacttggatgcgaaaattcactgtatattactctgttttcattttttttttaatttttttgtttacttaattcctgataaattcggagtgggtagtgggtactacttgaaggattaaactttgatataggtaataagaaatgttttaactgattaaattttatgatttgttctttgcttgatatggtggcaaaagattcaacctttacgccaaataatttcttgtttctggattttttttttatcaaaatgctatggattttctatgtgatctgtattttgaatcatatgccaattttatttattttcgatttgtaactgatttttctttggatgtagaaattaggttttagaaagaaaagaa

SEQ ID NO: 105014 - DNA, 948 bp, Mimulus guttatus
  Intron number 2 from transcript mgv1a023359m (locus mgv1a0 23359m.g) derived from phytozome v7.0 (chr-ID scaffold_232 ; pos 221359 to 222306)
ctggagaggttagttcaaaagtactatctttgttattctgcatttaatgaatactattattattattattattaatccataaactaatccatttcttctttgtaacatgtacttgtagaatcagttgaatccactattataatagatcttggaattcaatttgttataacatgtactcaatttgcactataattgagatgcttaattattattataatatcattttcatttcatggggctaccacaatcggctctcgctcacgttgtcttttttgtgaaagttgtttagtcaacgtatattaattactcgattaataactttgactccttaacattatgcttatcggtataagaattggtgcttttaactggtggtggttgaggttgtcagcttattattctattaaactttaaacctgattttttttttcttttcatggaagatttgttaatttcttgaatgaataattattacttgtaattgcatgaataaatggtttggttgtgcatattcgcatgttcggagaaaaaaaaaaagaggacattttgcctctgggtaatggagtcgaggatatttaatttattctcatctatgctgtttggtaaaattaatgaagtaggagtaataagttgtttagtagagaaaaaatagattgtgattgccaacaaacctaggatttttttgcaatattgctgctacattgcttgtatcaatttagtatgttacattaatgtgaaatagttgaatattatctatttgattataacaacaagtgttttaaatgctcggtgttgcagtaaaggctgagtcaacatgcaagtatgaccgttattgaatcttgaagaactaaaattgtatctgaaaaaacacaaaaatattgatgtggtttgatttacttttctggtattgatttggttaaaaagaattgggtggtgttttgctgcagg

SEQ ID NO: 105015 - DNA, 259 bp, Mimulus guttatus
  Intron number 2 from transcript mgv1a013575m (locus mgv1a0 13575m.g) derived from phytozome v7.0 (chr-ID scaffold_36; pos 1738374 to 1738632 reverse strand)
aactggtttgtttttatttatttattttttttcatttttcttgataataaaaagtcaatctttgaatttatcaaaaaaaaaagtcaatctttgattgaaatattgaattttggtttatttcaaggattgacctgatttatatatactttgtctgaagattttgtgggttgagattggtttgttgtgttggttttttattattttttatggtaaaaattgtgatgattattgtaggtgaataggacgatagacttagttt

SEQ ID NO: 105016 - DNA, 875 bp, Mimulus guttatus
  Intron number 1 from transcript mgv1a009622m (locus mgv1a0 09622m.g) derived from phytozome v7.0 (chr-ID scaffold_27; pos 624179 to 625053)
attggttttggtagaagaagacagcctcacaggtgccctttatttatttatttttccccctaattatttttagatcccccacacacactaacacactttactgtgtgttgggtgattgcagttttgattttatgcttcctttttggttggctgtgtaatttgattccgaatgttgtttttttggcttgtttgaattttaactctgccagtaataaactaaaggattaatcagctaaaagtgtaggtgttttggtttttttagttgtctttttcatctttcctttggttcttgtggtcaagctttttcgttatcttatttatttatgttaaaaggcaacaaaaattctgtcttgatacatgttctagagtcatctgctttattctggtttgaatttttaatttaattccgttatgaagaacaagttgcttcgagtttcgtggccttgctttgttcgattcgtttgtccgaaagcatgcatgattacatataaatgcatttctgttgagcaaataaaggagatgggaagcttttataccggattgacggtttttaaccgtatactttgacacatacgaacgtggtggcagtggatcgaagatttctcgaacgattagtattttacgacatgtgggatatatatatacgtcgaattttgcatgcctcttgttcttgctgcacaagctaaaagataaaagataaaacgaaaaagaaactttagatttgggtatccatctttaagcgtaaccgttgcgaaattggattaatatgtatattcgaaaagctgctataggaaacacttcttgcaaaaacttaatcttgtactttttgaaaattttcagttgtggagaacctgagggcatttctgaaatatcga

SEQ ID NO: 105017 - DNA, 254 bp, Mimulus guttatus
  Intron number 1 from transcript mgv1a025430m (locus mgv1a0 25430m.g) derived from phytozome v7.0 (chr-ID scaffold_13; pos 1805459 to 1805712 reverse strand)
ccaacactctgtatgtcttttttcttcacttaatcattcttttttttttttttttggtgagggtgctgttctgaaatttttactgtatttttgagattttcgtggtagattttttttttttttgatggattaattgttgaatatttgtataagaatagctttattcagaggtgaaattagtaaatattttttctctatctaaatgcagtttatttaattgagatgcagggcatccgattatccgaaggagtacg

SEQ ID NO: 105018 - DNA, 463 bp, Mimulus guttatus
  Intron number 2 from transcript mgv1a025324m (locus mgv1a0 25324m.g) derived from phytozome v7.0 (chr-ID scaffold_13; pos 1089593 to 1090055 reverse strand)
ctctggtggaagaggtatacacactttgtgctctgtttgatttgcggattctgcaagacaaagtagtagctggaaagtacagaattgttatttaaatgcagttatattctaatgtcacatatttgaggggaactgtgtgcgggtgtgtgaatgataatgatggtttctgtgaaataaacttgctgtaaaaatgttcgtcttcttcaataaatgactatttgtggtgattggtgttcactgactgtatttaactagtttggttttgcttccaaagaatacatagacactggattgtaaattgtattatcatattgaaacctgaagtcattgatgtttgttgtatatgcatatatgttcatcatagtggaaaactgatccttcattaatgttataataaacatgatctacaaaagttacttttattgctattcgattgaccttgaggaagcaaaatgaacaggca

SEQ ID NO: 105019 - DNA, 655 bp, Mimulus guttatus
  Intron number 3 from transcript mgv1a015436m (locus mgv1a0 15436m.g) derived from phytozome v7.0 (chr-ID scaffold_204 ; pos 102201 to 102855)
ctaaattaaggaacggattaactggaatctctaaggtatattccactacatattttttaatgattcgttttgaagccaacaatatgagacgaacttatatattatttacgttgttatcgtttttcagctgtttatgttcagttacagacggaagtggatcatatttatccacttcaaggccgtaatttgaatcccattatttcgttctcttatcaaattctaagaatatcaaaagaattcctttgagtagtcttggtatcgacaaaaatcgaagactttttttaaataagtacacttctattcaaattattagcatgctcgagatattaaatgttaaattttctgcatcaaaacattgcatgttcataaacttcagcaaacgaacacacattttttcatcgttttctatttatttttatttagtttttgtgatggatacgtgacttgtagttgacttatctatatgcttcttgatctcggaactgaactccagcaaaaaaaccctttgcccgtctttggatgtgcaattagtagaattcgatataagattaagctatttaatttattattttccgcttatcatttaacgaagattttatgaattattaattataatgcaggcagaggaaaagcacttcgaaattcttggccgact

SEQ ID NO: 105020 - DNA, 685 bp, Mimulus guttatus
  Intron number 3 from transcript mgv1a011649m (locus mgv1a0 11649m.g) derived from phytozome v7.0 (chr-ID scaffold_427 ; pos 41176 to 41860)
acttacgaaattctttggaacccttccaatatacagtaagacgatgtcatatttttttaattttattcagataaacaaatcgactcgtgttaaaaatagagaactaggggcgatacttgatttgatgtttgaaccccgaccccaatcattctgttgtggtaaatgttaggtaccaactctcctagtgaagattcgttatatggttaaaagcattacggtatcacaaatatataacattgtacatgcgtatgatattatttaaaacttatgagattattcataacccttttgagacaaataattatttaagtttatttgaagattcttgatcaaataaccatattaaccaagaactgatcgtaaaattgatatatttatcgattttaaaaattgcattgaaaattgtccctatttaattttatatttcattcctctatttttatcatgtttttctgtttaatttctatattttatttttcactcaatttttgtaatgtttggaaggaacaaaatacctttgatatgaggagaaactttttatacgatttatttttaattaattttatttcttatattatttaaatttaattaataatcatatatatatttcatttcttatatatatgtttgggggaaaatagaagatacataatcattggattacaattgtataggtttcttgtgg

SEQ ID NO: 105021 - DNA, 910 bp, Mimulus guttatus
  Intron number 1 from transcript mgv1a007846m (locus mgv1a0 07846m.g) derived from phytozome v7.0 (chr-ID scaffold_89; pos 506514 to 507423 reverse strand)
gcgtcaccaaactcaacaggcaagttattacacattttcttgatattcttatttttattattattattattattactttattttatttattttcttacaggcattgtttgatttgtttctgtcctttaattcttccacatgtgtatctatccttatctgataatgttggtcttacattgctctgtatatgtgtatttttattaggtaaacaaattactgtcacccctgaattaatattaaatgatgaagaaaaaatggttcatgtttgtgtaattacaaccacctatcaactatgaatcttcttacacgtacacccttattgcgtcaaattcaatagaattttttagattccgtggaatattctgtagtttgtactcgttttgttaaaaaaaatgcaggttctgatgcaccacaatctgatatttacaagccaatagacaaatcttatgatcatgttgtttcaaaatgtcgagctcgaatgaggtaaaacgggtacaaactggagaatattccatataatttagaagattctactaaatttgacaccgcaatgatggacgtgtaagaagattcatggttgagggttggttgtaattacccaaacatgaggggagttttcgtaatttgaccttacccgtggggtggccgtaatttatcctttgaaatattcaacaatataacacaagaggtaaatctctttactaataattttgttactaattgttaagtcttatgacttagttacaataattcaatcaactgaggttcatttgattataaaatcactcaaccggtggccgatttcgatcatttttatgcatataaagcgtgtgataggattacattaaatcaaaatatgctgctacacagttcagtttcaggatttgtatctattccagatatcaatcga

SEQ ID NO: 105022 - DNA, 773 bp, Mimulus guttatus
  Intron number 3 from transcript mgv11b018047m (locus mgv11 b018047m.g) derived from phytozome v7.0 (chr-ID scaffold_1 4; pos 420532 to 421304 reverse strand)
tacaacaacataattcaaggtttgctaaagaagaatgaggtttccaaggcaatcccgttcttagaggacatgcacaaaaggtgattctatgccgacgcatctacttcatccttgttaattaatcacgtgcaaggatcaaacaaagacgatattcttttggaaatgatgaagaaacttgtgccaaaaatgtaaattaattatttgggcttctcaaatttaataaggttttgcttatttaatatttttgcaggtaacgtagctgagatacaacttttgtatatgtacttctgacttgtgagtttttcggttgtcgcaatccttatattatgggtggatgagtggcgtaggaaagataacaagccgtcggtattttgactagaaagaagagaaaaatttggatatgtgtgcttccctaatagatattcatttatcaaacatatggaaaatttaactttatatagtcatttatttcttttgtttctatggcttccctaatagatattctaaagggttaatgagtgataccattagttttgaaaatatatacgaggaggtccaataattttcttcgtcatagtaaaaaaaccaaattgtgatcttaatttgtgagacctcccaactgggtaactgtacctgttttgccctttagtttgaataaatgtcctaacccctaaccttctctcttcctcttcctcccgtcgttacatctctccttctctctacctcttcatttctctctctaactctttctcgccaaatttcagcgacaaaaa

SEQ ID NO: 105023 - DNA, 535 bp, Mimulus guttatus
  Intron number 1 from transcript mgv1a024704m (locus mgv1a0 24704m.g) derived from phytozome v7.0 (chr-ID scaffold_63; pos 788416 to 788950 reverse strand)
ccgtttctaaggtatcgctgtttccgattttcgattcaacactagctatgcatgtctgaaatgcaggtgtttacttgatttgataatctatgtgctctgatgtacttatctcagttcacttaattttgctagcaatagttaaggtaatgagaaaagtttgatcttttaatttttgttctggggagtgtcaaatgtcgtttgatgcgtttgtacgagtgcgatcatgcatgcgtactagtattcagtaattactgacaaaaatatgcttatttgtgtccatttttgctgttgagttcttccatagtgatagatgtaagatttggtttccgtttggtgttttttagttgtagttttcttctgcttcctgagattgtcatcttagtcgaagcttgtctggaactacgtgaatggtatgaaattatctaatttgagtaacatgtggtttttctatgcaatatatttgcctatagttcctcaattgatatattacttaatgcttgatcgaagtttatattattttggtcaggttgaaaaa

SEQ ID NO: 105024 - DNA, 610 bp, Mimulus guttatus
  Intron number 1 from transcript mgv1a001981m (locus mgv1a0 01981m.g) derived from phytozome v7.0 (chr-ID scaffold_781 ; pos 9666 to 10275 reverse strand)
aaatcttttctgccaaaaaagtatcttcagcttctgtaagcactccatttactcataattaaattggtggttttttttctcattttggtttttttagtgacattgtgtgtatttggatatcagtatgtgcatatcactatgccatgttgaatgcgtatctaactttgaagttttgaattatgaacttctttaatcgcctcggtgcattgttgttaagtgtcaagtttctgtaatgtttttgcgaatgaaaatgattagcttcgggcctcgtatgggaatattgatatttgatagggattgataagattgattgaattgattacaattacaccgcccgtaatatgataatataatatgcgattatcttatgtttgagattcgcgattataaattccctgtttcgggtaatatccttcatcgtaagattgtgcaacaataagggtcgagtggttttggactaaatattcttcatatgcttggttaaaaacccatcctgattttttttaacgggctttaaaccgaaaccttgaacatttcacgaatcttgattacattgtcgatcaagccatgtcctaattcctaatttattccgccaaatttaaatttcagg

SEQ ID NO: 105025 - DNA, 628 bp, Mimulus guttatus
  Intron number 3 from transcript mgv1a012875m (locus mgv1a0 12875m.g) derived from phytozome v7.0 (chr-ID scaffold_18; pos 1552744 to 1553371)
aacgtggctatctgtcacaattgcggccttcctgggtaaatttttttaatatttttttcttttatgtagatgctatgttcattgaagatatttaatgatgttctaaccattactgtctaacatttttcttggctaagatcttttgagtgtattagttgtgttttgatatacgaagttcattaaatcatatgatgtttaactagtttgccctcacatgaatttgtgctttttcttatatacagcataaattgttcgctatctctgtggtttttgttacctagagcatgaaatgcgtgcaatctttgtatgtttgtgctgtaaaatggtggattgctgttaatagactcaatttcctagctttctgtaatatccatgactttatctatatgtatacattcctctgtccttgcctaaacttgtattccatatcacatctatcaaccaccattgatctttgaataatctaatatattctatatgagtttgtttccgtttatactggtcaagatctttaaataatctaatacacgagatatttgaagaagattcactattgataatttcaccgatttgtaattttgcacctgtgtgtctattgggggattttgagcaggcatattgcatcaga

SEQ ID NO: 105026 - DNA, 829 bp, Mimulus guttatus
  Intron number 1 from transcript mgv1a005855m (locus mgv1a0 05295m.g) derived from phytozome v7.0 (chr-ID scaffold_160 ; pos 453257 to 454085)
ggtggccgaggtgtttatacctacagggctggaaggtcattgtcacaatctattcctcttcttctgttcttatttgtttatattcagttattattctcacttactttcacaatcttttgaaagcagctatattttttgaggatttatatgattctgtcaaaattattgtgaaactatgaatgttttgcaaatatttgtccgttatgttccgaatgttgttcatgggctcatcttcaggtactggattaaggcaatgacttagtggtgctgatccatacttggtaaacataaatctaattgggcaaaactaagggaattagattgattgtagtgcatgttcaatgaacaccttttacttttagtacggtagtctaacataatttttctggtgtttgattcatgtcataaagtttttgaaataatcccttttttcatggctctttctttctgcccataattacgatttatgttcgttgtaccagaaaagttattgaagaaatgaaaggtgaaagcacctggacgccttgtgcacttttcgaatattttttttacatacttgatacctatgcactcaagaggggcagaaaagtcatattacatttcattcaaggataaggtgctggcagtaaggtgtcagagcttagcagttaccaatccttgctcaacattttacattttttgtctagatatttaagatatggattttcatttttaattgaattttctgtttgaaggtttcttaatattgtgtttaggtctgaagggatttcttctggattgcatatttcgactatctaactttaccaatttttacacaggcctctggaag

SEQ ID NO: 105027 - DNA, 769 bp, Mimulus guttatus
  Intron number 3 from transcript mgv1a007542m (locus mgv1a0 07542m.g) derived from phytozome v7.0 (chr-ID scaffold_28; pos 1233787 to 1234555 reverse strand)
gagacaacgttgaggtgggctcactttcttatttgatttaactttaaacgtttatgcatgacacctagtacgttacaaatggcactgttgatattttattttttattttttagaacaaattgactgcttaatttctgggtgttgtgttgttaaagagattacaacaaagtgctttcagatctgatatgaattacctcaaatacagatgcgtttccatctgctatttctcatttcatcacatattgccgtactttttagatcactaaattgctttatttatatgtataccattattgttattattgctccggtgccccgattaatgtgatggttattcttcagttttcagatgtgagacgtaaacagatttttttgtataatgtgtacacacacgtgtgtgtgtgtggatttatcttatatatgtatatatatatatcaatgtaaatcatatatgtatatagtaaaattgcattataatttgtctacacagtattacataaagttttcaacagtcactttcatgttttttttttctgtgagaacatccagattgcttcatttgatcgacactcgttacagaatactatgttggctctaaattatactacctatatgtttccatattggatcaacaaaatgcgagtgcttaacctggaagctatgtgaaattttaattatggctgttaatttgattcaggttttcacgtgttttgtggtctagatagtttctaattatgctatgctccaagttaggttgactacagaggtt

SEQ ID NO: 105028 - DNA, 553 bp, Mimulus guttatus
  Intron number 3 from transcript mgv1a015646m (locus mgv1a0 15646m.g) derived from phytozome v7.0 (chr-ID scaffold_206 ; pos 332243 to 332795 reverse strand)
gttcgtattacaggtatgatttgattggtttacttgtcttatatgttaccttttttgtatgcagcttgggggttatcctttgttgatcacatgcatgcatgttcgtttttgtggttattgtttataaagaattcgttacctgttttataactttaactggctctagttaattttaacctgccaagtacgattatctactatgtgcgtgtgtgtatgtgatctcgtatttagttgtagatatcagggcagaggatgaaactaatttgaatgggtaatttgcatctgatactttttgctgatgctacacgaccttgtagacctgatttatcatccgatgttgatatcacgggtaataaaaaatgttgtgaagttcttcgtaattgcgtactatatacaaattacctgaaattgattcacctttctgctgattaagtgtaggctaatgtttttttaatgtttagttgttctgagttacattcatttcgtaaaccctaaattattttagatttttttcttctcaagtttgatgacatttgatgtaatattaggtggt

SEQ ID NO: 105029 - DNA, 375 bp, Mimulus guttatus
  Intron number 1 from transcript mgv1a000885m (locus mgv1a0 00885m.g) derived from phytozome v7.0 (chr-ID scaffold_115 ; pos 297773 to 298147)
atcgtgggatcagaggacttgtcaacttccttcaagtatatggttttttcccatgctttcttttggcattacatagagaaaaatatacactgaatttcttcgtttctagtaatttaatattaatgtgatgggattttttttattttttttaatttttttaatgttcaaacttttttatttttatttaatttttataatgtttcctgttattgtttgtttgaattttttatttggtgtacttaactgtgtttagtttgctctgattatacagatgctagcaaactttgctgtcaattgccgaaaaaatcggaatcgaagcagcctcaatcaggtcttccagaagttaccgataacaaaattttgcctgccaagcgg

SEQ ID NO: 105030 - DNA, 471 bp, Mimulus guttatus
  Intron number 2 from transcript mgv1a000304m (locus mgv1a0 00304m.g) derived from phytozome v7.0 (chr-ID scaffold_223 ; pos 168683 to 169153 reverse strand)
gtgtagccattgccactggaaagaatcttgctcaggttgttattttccttcaatgttttattttttatgagatgcattagccttttgttttcaattagattttggcctgttggaactcaatcgaaattccgttagagagctgaaacttgaattgctacagatcataatcagttgttgtaataaccctggctaattttatgtattggctgattacaacatagtcatttaacttagggtgtgcaatcactctgttgtcattggtgaatgtgacctatgataagtgtcacataaccgatagaggaatcgtctcactcttctcctcccatacttccttctacttcatttacttttatattacatcaaacttgtacatagctatccgttttcagaccctttttcatgctttaatataaactccaaaaaacatgaactcatttttcttaatgatgtcatagatttgcagcgaagaat

SEQ ID NO: 105031 - DNA, 408 bp, Mimulus guttatus
  Intron number 3 from transcript mgv1a011692m (locus mgv1a0 11692m.g) derived from phytozome v7.0 (chr-ID scaffold_104 ; pos 295229 to 295636 reverse strand)
ccattgccacccaggtatctatcttaatattattgagacatagttctttaatctactggcatttttcatcgtattatttactcgttctatctaatcattatcatgtttgactggaacgacaaaggatctcaattcttatcatttatcactgattaaatacttgaatctgattaaaatttgttagaaataatattatttgcaaataagaggtgtttctctcattaaatcttctatctctgagtacgttttcttgaattttgactattaaaaagggagtttatgctttggattttgttggctgaaaaagggagtttatgcacatgagtttgttgcctgtgattcagtaaagaaaacttttgcagtacagatttgatctggtttgttcttttacagattcgccggttagcc

SEQ ID NO: 105032 - DNA, 556 bp, Mimulus guttatus
  Intron number 1 from transcript mgv1a011745m (locus mgv1a0 11745m.g) derived from phytozome v7.0 (chr-ID scaffold_220 ; pos 407933 to 408488)
gtaacgatagaataaaattgataagacaccaactcttgattgtaaactagttgattttgattgaattaactttttaattcaacttaattccgtaaattaattttaccaaacttgttttctttttatagggtctaaatgaagagtgcaaccttcgccttcaaaataaatcatgagtgccaatttaatcttagtattggaaataaatttctagaatactctatcaatgctgtaaattattttatagaaagtatgtaacattttatattttatagaaagtatgtaacgttctagagaagccctggtattttctcttactcatgtttatttatttaaaattgatcttattttctcttactcatttttatttatttaaaattgatctttttatatttataaaatataaaattcatatatctaaagtataaaattgatcttagcccaggctagtaagtccggcccaaaacaaaacaaggcccggtccgtaacatatatatatatttgagaatttcttcaaacctcagttggacgtccaaaccctagcaaagttgcggcattc

SEQ ID NO: 105033 - DNA, 821 bp, Mimulus guttatus
  Intron number 3 from transcript mgv1a011745m (locus mgv1a0 11745m.g) derived from phytozome v7.0 (chr-ID scaffold_220 ; pos 408672 to 409492)
acctgaagctgtatgtaataattgtctttcgttcttatttaattattcttttctttattttgtcgctattgattcatctgctgtttgatcatttacacgtttttggctaattcatttctagctgtccaatagacgattatttattttttatttttttgatcgtgaaatagtgttcgattgtactgggtaattcatttccagctgttccttggttgaatatttactttacatatatatatatatatatatatatatatatatatatacagatatcgattattgtttgaaatggaattgtgtttggtaaatcagcttagtttgcagatagtttagccactgttcaaggttaattgaatttttttcccctaattactcgaccacaattcgttcatagaatttgaaaatgtaagacatgtgttcatttactaaattatattccctcttcaaagaggatcaatcattcatcgtatcatttcgtttgttcaatatttttagtttccctttgtctttttattaccattaaccagatgcagtctactgcatccagcatcgacgttgtcgttccataatgagaacatagcatgtctaatgatacaatagtagaacctcgataaattaataacctcgattaaataatagtttctcttggtcccgactcgttgaaaacatgttaaactattaactcgataatttaatgatttgctaaattaatagaattttccctagtcctgactctattaatttatagaggtttaattgtatatcctttgcttcttttgatttcagtcgggtattctgggataagaggatctcccaggaag

SEQ ID NO: 105034 - DNA, 950 bp, Mimulus guttatus
  Intron number 1 from transcript mgv1a011570m (locus mgv1a0 11570m.g) derived from phytozome v7.0 (chr-ID scaffold_206 ; pos 227583 to 228532 reverse strand)
agagcgtgagtgtgaaagtacgagagatattcccggttagtgatgaaccggcggctgagcctcccggtttgggagggatgaagcggttcgtttctgggcggcgttcggggtcctggacctccgatgattttagtcaggcggtttccggtgacttggaacggcggcgtgggtagaacttgaaaggcgggatggcggctgaagaaaaagtaatattccgttgtggttgaaaaaggaggtgttggatgacgtggcacgcgttgaataactgttaacgaaccggcaggtttttttttttacagttaactttttttttttttttttttttttgcaaatgtttgatttgtgttctataaatttttgacatggcggtacatattatcgatttaccttaatgtaaatatacttgttttggattgtattttatgcttggactttcttctataataaaaaatattaattgtgtccccgatggtctatagtggttggagcgaagtaatatgtataaattgatcgaagttcgaattttcttactccactctaatagagttatcaagcgagtattacaaatttaaccacctaaataaccaataagaaaataacacttagggcaattaaatatatactagccttaattatttttagttaacaaccatttaatacatattgattggagcaaataaatttataaatatatcaaattaaaacattaaatatcaaataaatgtatgtttcattttgatattttttagttggagttgctctaacttttttatgtctatctcaattgataatgaatttaataataatattctaaatggatatgcacataatcacacgcacgtacatgtatatctacgtgtttggtgtcattatattaataataaaatattaatcgatgtattttattgggtgtagcatctcaatcaccgtaagactcgacatctccaccc

SEQ ID NO: 105035 - DNA, 554 bp, Mimulus guttatus
  Intron number 1 from transcript mgv1a008270m (locus mgv1a0 08270m.g) derived from phytozome v7.0 (chr-ID scaffold_24; pos 990926 to 991479 reverse strand)
attctcgtcagtggattgagcgggtgattcttctccgtacattcataatcgtttttttttaattgttctatgtgttttgagctttcactcccattgagtatgtgtttatgattttttatagctctaagtgtacgcagctctgcatgattgattgattgatttcggtgtcttttgtttctcgagaattttcatttaatttattcaatcttgttcacgatggtttgtgttcagtctttgctgaatttggattcccaatattctatgttgtttatgtgattgttgaattgttaacttgttatttgttagctgtttgtattccaaggggggataatttaagtgtgtagtgtatgtgtgtgtgtgttagcacaaatagtgggggagattgaatcagattcgccatggttcgatcagggtagattgttaaccggtgtttgtgaattctgaaaacggttgtcgaacgattttttttttaatccaattatttactactgtgccttctcttttgatggatttgatattatctaacaatttctggtgtggctattttacgacag

SEQ ID NO: 105036 - DNA, 497 bp, Mimulus guttatus
  Intron number 1 from transcript mgv1a018583m (locus mgv1a0 18583m.g) derived from phytozome v7.0 (chr-ID scaffold_55; pos 833776 to 834272 reverse strand)
taccaaaagggtaagttctttttctttttctttttatttatttattattgttattattattattattttttatttttattattattaatattttgtttcccaccctttgatttaagttgattcaaactgcagatagtttttcgtttcttgatcaaagggttttttctttcgttcaaaaaatcgagctttacgaaaatctatgcatatcgataatcatgcaattaaatatatatgagcaagacaaaataataattattggtccctcatttttcaaagacaagaaaatctttttaggagaaaaaaaaataagaaaaaaaggtgtagtagcatgagatcatgactttttttacttgctcccattggtagttttcacacacactgtacgtgcattgtgtgtatttatacatacatacatacatacatatatgtatgtaatgtgtgtgtgtgtgtgtgtgtgtgtaggtatcagcatcaaagatattgaaggagacaaataa

SEQ ID NO: 105037 - DNA, 1051 bp, Mimulus guttatus
  Intron number 1 from transcript mgv1a024196m (locus mgv1a0 24196m.g) derived from phytozome v7.0 (chr-ID scaffold_42; pos 1199489 to 1200539)
aagaagattaagattgcacctcaatcccataatttgtgagtacacacacacacacacaccagatatgtagaatgtgtgtgtactgagtatatatgttcgcatagttggatgtttttttttggggggtatttgtttttgtattattttgtggaaaatgggttttaagaataatttgtgccagaaagggagtgatgtttgttttaatttaaaaatatttcaagaaaattatctaacctttaaaacgatgacgtttaaagaagaaattgaggtaatgttccctaagtttttggatgtgcatttccatttatttattttgtttaggattttttttatttatttaatgtttgtttatattttgacactcaaatgtctaaaaatattgaaaaaaaaaatttattttgaagaagaatctcaaaaataaagtaatgtttgtttgtactttgaaaaatgttgccaaaacattgcccgagaaaccgaaaaccggggatccgaggaaaaactcatctcggtaatggaatttatttcctaccggaatcgagtttttgttcacaaattagttgttataatgcagaatgttttacatatacattgagaaactggattcagtttaatgcataactaattaagttattgtttccgcatttgacacgctactgtaattccttcggagcatttcgttgtagtagcaatctaattaatgcttgaacttgttcgatgttaaatctttactctcgtctcttgattttaagttgtttaattttcttttcctttttttttcttaattaacttgaagatgtgatatgattcacgacagagatgaaataacggtgaacagtgatgataacttacccgagttcttcaaagtttacgtatccgaaatttattctgagagaatggtaaaactccatttttttcttgctatcgatgatttatccgagttcttgtataatatgtacaagaatcgatatctgattagcctagtagtggttgatgaatattgttcgattgaattgaaggatatttaatcgtttgatcgatctttttttttcgt

SEQ ID NO: 105038 - DNA, 1018 bp, Mimulus guttatus
  Intron number 1 from transcript mgv1a016062m (locus mgv1a0 16062m.g) derived from phytozome v7.0 (chr-ID scaffold_32; pos 778717 to 779734 reverse strand)
ctctattgcccaattgctggaacagaaggtagttttattttttttaattaatttatttatttttaatctaatttgtttcaattgcctattgtttttgggggtggttgtttcttgttgtgttgttgatattattagttgactgaattggtatcttcttggaatctcttgtttagattctataatgtctcttgaattatatgcttctcctttttttaacctctgtttggaagtttgtttcatttagcacccctctgtgatatcgaataccgaaaaaatcttcgtattgttaatgtcagcaaaacccttataacgcatttatttagcacacaacccctaaatagtgagattttagctaaatatattgcttttttggtaatatgaacaaaaagatgactcttttcaacaatcagagtaaacacaaggttgttgaatgcaataatgttgagataaaattacatttttgtgtttgattgtttgatttttgctaatataatacaagatgactcttttcaacaattataataaacacaagggtgtttacatttttgtgtttgattgtttgattgtttgatttttgctaatattaataacaagatgacttttttttttcaagaattagagtaaacacaagagtgttgaatgcagtaagaaccattgatcttgtgatagaagtactcttttcgtgtttgattgttcgatttttgctaatactaataacaagatgacttttttcaagaagtagagtggacaaagtagtgttgaatgcaataaacccgttaatcttgagattgaagtactcttttcgtgtttggttgtttgatttttgctaattttaataacaagaagacttttttttttcaagaattagagtaaatacaaggtgtattgaatgcaataaacccgttgatgttgagatagaagtacttttttcgtgtttgattgtgttcggtttgattgactcgtatgtgttttttctattgcagctctgagcccgtgggagacaattggatcagttggt

SEQ ID NO: 105039 - DNA, 964 bp, Mimulus guttatus
  Intron number 1 from transcript mgv1a019119m (locus mgv1a0 19119m.g) derived from phytozome v7.0 (chr-ID scaffold_63; pos 1195596 to 1196559)
agagctattagggctaggtatgtaaattttcgtcaattttgttttacttctcctgagatgcttatgaagcaggttattaatactcattttattagcttgtatttggtgaaattgtcgattttaagatcaattttatacagcactagtcaatttttgtaatttgtgttatacttcttaaatcatagatgaagactgagttatcactagttcactacacatttaggtctcgtttggttggggagattagccattattaactaaatagttgggttttgattgatgtttggttatgttatatgacttatcttgccttctaggcatgttttgtattggatctttcaaggttcaataatacaattgagttttattagattatttagtcttatcttggtcgatcttatcttggcaaccaaacgaggcataattagacttaaggccttgttttgttgagtagattagcagccatgatttactaagttattagtctttatttgattgtttggtatctccaataacttgtcgtgtcgacccgcaaaaattatgttatcttgtcttatcttactttctaggcatgttttttttattggatcatcgcaggttcaataatataattgtgtttcattagattatttaatcttatcttgggtaatcttatcttggcaaccaaatgagaccttagtcttttgtcatctggcgaaattgatttgggttttcagtgtaattacgagcagggtagttggagattttaggtgaataaacgctctgaatttaattaaaggatcgattcgttaaaatgaatcagttcttcagttctgctgtagtaataaccttagaagatacttgttaattctttcgatcccttcttcgttcgatcgggctttatcttgtattctgttaaactgtttagatgtatttcaacgaaatcttatttttcgtcgttggttgtgttttagatacaatcctt

SEQ ID NO: 105040 - DNA, 988 bp, Mimulus guttatus
  Intron number 1 from transcript mgv1a016197m (locus mgv1a0 16197m.g) derived from phytozome v7.0 (chr-ID scaffold_22; pos 1184137 to 1185124)
cctaaaccagcttctgcttaaagcaacaaacacaggtattaatcggaattaaattcatttattttttgctcgaattccagtttctcaattttgcgaaggatcttcaatttttttttttttaattaattttttttttcctgcacgatctgattgatgttcaagttatgaaaactctgtttgagaggccgttatatgattttatatttgtgcaatattgcgtcttgtgctgtgggatttgttctggaagccctaattttgttttgaaactacgaatttgccggcggatttgatttatttctgatttgataatgccttgttaattcaaaatcctacttgagagaatggttttcctagtgacccctgcacttatccttgttgtaattgttggagattacaaattgcgagttgtttgtcggttttctttccacactcgattattggggaatttgttcattgaattcttagattctaaatcatagaaagataatctttgttatctagaggaattaattactctcgattagccagttcgagagcaaatagcgttacggctatagttaactatgatatcctttagctattattggttagagaatttgcgattctaagagtttgctgtgatagcttgtttttcacgatcgctctctgctttctgaatgaaatgggattttgtcgatgtcaaaagagatcgatgagtcgcgaggttataaaaattttagttgcgagtgtcaaaaatatgtatcgaaaaatgtagacgagtgtactaagagagtgctaggagtaaagaagttgataaagctagatgttccgtatttgctagttatatggttgctgatatgcatcatgccgttaaggagtagtagtactttatttcgttttgtcgattgggaactaataagaaccgtatgataaaaatgtaactatgttgagatttccatgttttaacttgtaaataacattttattatcagtgcagcagctataaagac

SEQ ID NO: 105041 - DNA, 998 bp, Mimulus guttatus
  Intron number 3 from transcript mgv1a026590m (locus mgv1a0 26590m.g) derived from phytozome v7.0 (chr-ID scaffold_169 ; pos 496744 to 497741)
ccggtgtcaggtaactatttttattttataattttttttcatagatcggcattaatttaattttggatggttaatcattaagtaatctattgatttttgtattggttcttattagtatgtaattgttgagttgctgattgatgtgaagtttttgttgctaattgcttgctcgtttggattgtggggatgtcgaattgtggcttgttaccgaatcctataagaaattgttggtttggtgttcgttgtctgataaattgtgtgttttattattcttttggtaacttgaatgttttaatttgactttttgtttcccttgtaaatcttttatttctaagttatttcgattttccatagaaacttcaatagattgtaggttctactggtcgattgtgagggtattgatctatgcctgctcgtcttatgtgcttatgtgttttcttcagtgggagtccaatctatcaatttattcaaatatattcccaaaaagtgcaaacaaaatttgattttccgaaaccttaaatatggggggttctcgtgaagcgagaatggcaactgtatagaatttagtaaacttaggcctcgtttggtcggggagattagccatgattaactaaataatgggactttgtttgatgtttggtatccccaataacttaccgggtcgacccgcaaatattatgttatcatgccttatcttgcctcttaggcatgttttttattagatcttccaaggtccaatgatacaattgggtttcattcgattattcaattttatcttgcctaatctaatcttggcaaccaaacgaggcattagttgatcgtgctattatgttcattataggttttgtttctaatggaactggattgcttctttatttattgcctgttcttttgtcataattcataaccgagtttctaataatattatttcttattaactgatcttattatttcttattacagagccaacgcacaacagccgaagctcttcgtgggta

SEQ ID NO: 105042 - DNA, 521 bp, Mimulus guttatus
  Intron number 1 from transcript mgv1a002218m (locus mgv1a0 02218m.g) derived from phytozome v7.0 (chr-ID scaffold_168 ; pos 254028 to 254548 reverse strand)
ttcgggtatattttcttctcttttttttattgggatttgtgacagtgatagttttgttattgtttctggtattggtttgaatgatgttcttatagttactatcatttgttgatttcattccatgccctgagatcttatgactatgatttgtttgtctgttaatattttgttttaaattttttatggtattattcttcttggtatttaatgttaccattacaggatgttaattgatattgattttgttttgcagtacaatgaagttttaggcaagggcgcattcaagactgtgtatgaatttgtaccttgcccttttcttttcgcttcttttatcatcttgtacattttatcaattaactgtcgaattattaatccatttgtttattctaggtacaaagcgtttgaccaagttgatgggatagaagttgcatggaaccgaatcaaactagatgatgtgttgcggtcacctgaggatttggaaaaattgtactccgaggttcatcttcttagacaactgaagc

SEQ ID NO: 105043 - DNA, 951 bp, Mimulus guttatus
  Intron number 1 from transcript mgv1a009308m (locus mgv1a0 09308m.g) derived from phytozome v7.0 (chr-ID scaffold_3; pos 3736210 to 3737160)
tcaagcagaaacctctcttgcttagagctttgcatgtatggattttttcgttttagcttcgtttgatgttgtgcgtttagttgttcttgatttgggtttttggtaaattgggttttcggatgtgttttctttcggtgttttgtgtgcatgtatgaatttcgttttagcttcatttgatgatgtgcgtttagttgttcttgattgtgttttggtaaattgggttttcggatgtgtttttgttcggtgttttatgtgctttgtgagtgcttatactactcgtctaactcgtgtatgtattggtctatagcatggttagtgcaatattattggtttttgagttttagatgtttaaagactttgatgcaatgttgattcaatggtttcaatgaatcgtttgcgttaagaatcttacgtgcgatagaaggtgagttgcatagcactttgaggaaaggaaatagttatagttttccatgaggatatctctagctcgtgagcctcggcatacaggagaacatcgataaattaataacaacttgcttaaataatagtttcttctggtcccgacttggtaaaaacctactaaattatagttcaataactaaatatttcgctagtcccgactctattaatttatagaggtttaactgtagttcattctaactaaagatgattattattgtatgaattgacttcctttatttattatttttttttcatgtttttggtgttttggatcccaatcgtatgttctaattttagctattgaataagaaaaagcgaacacttcaaaactattttaatgaacttgcttgatttttcgtcttttcaagaattgtgcctttgcttatgtgctacaatttctgctattatccatgactatattttctgctattacctttagtactactcgattcccgatagtatcgaacttttctttgatagggtttggct

SEQ ID NO: 105044 - DNA, 328 bp, Mimulus guttatus
  Intron number 4 from transcript mgv1a013409m (locus mgv1a0 13409m.g) derived from phytozome v7.0 (chr-ID scaffold_36; pos 1014140 to 1014467 reverse strand)
gttactagtaagttaattgcattagctcccatattattataattctaaatttcgtgatctactgatctgctccaagagtgttgtttgccgaggtcttaaatcagctcacttttctcggactaatgttttacaatatacttttattgtgttttgcttctttcaatctgaattgttgggaatgtaaagttatttgatgtattttggttctgtttggaatctcgatatttacacttcagcaagtaaatactatttaatgtgtatgttctttgaagattttttctcgtcttattaacatgaaactgatttgatttgaattgtttcagcatcc

SEQ ID NO: 105045 - DNA, 609 bp, Mimulus guttatus
  Intron number 1 from transcript mgv1a004071m (locus mgv1a0 04071m.g) derived from phytozome v7.0 (chr-ID scaffold_29; pos 522609 to 523217)
gtgatactttctctacgttttctctcgacaaacaggtattcatatatacctctatatattttttactagaagcaaacgtctttgactttgcaacatgctacattgaattagacgatgcgccctatcgtgtatagttaacgtaaataaaaaaactatggtttcaattttactaggtacaagaaaagtatgaaaaggccatagaaacattaaaatagcatatatattatagttttatcatattttaagcatgacaaaaaatcttattgcattgcacttaaatattttggagattaatggcatcgtctcatattatttttaagagacaccgataaaaaattccaaaataagtaaatattcataaatattatataaaataatacaaattttaaccattttattaaatatttttatattagatatgatgtatacaagtataatttatataagattgtggagaagaaacaaaaaaattatgggttaagatacatatttacaaaaactttaggggggccaaaagtaatattcaaaaaataaaatgccaaatacctaaaaaaaaattgaatcttgcaagaaaactatggtttcgattttactaggtacaagaaaagt

SEQ ID NO: 105046 - DNA, 787 bp, Mimulus guttatus
  Intron number 2 from transcript mgv1a004071m (locus mgv1a0 04071m.g) derived from phytozome v7.0 (chr-ID scaffold_29; pos 523423 to 524209)
gctcttaaggcaacatcagtatcaagtttcttgcagtatgtccttttcgttatcttttttaatttatccgtctaatttgcaaatggatttaattaattataattcaaataatatgaaactaatatgttgaatttttttacttttttttttgggtaaattacaaccaccctaaggtatggtcaaattataaaaaacccctcatgtttgggtaattacaactacccctcatctatgatcttcttacaagtccaccattatggtgtcaaattcaacataatcttctctagtttttactcattttgtgcaaaaatgcagtttctgatgtaccacaatctgatttacaaaagcaaaaaaaaaaacatcttatgatcatcttgtttcaaaatgtggagttcgaatccaataaaacgggtacaaaattgagaatatttcgtataatctaaaagattccactaaatttgacaccacaagggtgtacgtgtaagaaaatttatagttgatggggtgactgtaattacccaaacagaaggggttttttcgtaatttgaccatacctcaggggttggttttaattacccttttttctttgaagatttggagcttaaaaaggtgcaatggactgaaatatttatccaaatataaactcattgaatgaaaaaatatgaaaatattagttacagtctcggtaaattgaatcaattaatatttcgtaccaattttaaaattcgatttggttgacgccatcgaaacaggtgttttcgacaagttcacaaacaaagacaacaaa

SEQ ID NO: 105047 - DNA, 738 bp, Mimulus guttatus
  Intron number 1 from transcript mgv1a010842m (locus mgv1a0 10842m.g) derived from phytozome v7.0 (chr-ID scaffold_197 ; pos 409826 to 410563)
ttatcggatccttttactccaagactaaagcagtgagttcttcttcttatttgatctccgttcttaattatacgtttgtgaatgtgttgtagaacttagatttgaatctagtgtgtaatgatgtgtgtagagtttagaggtgaaaatcggaatggaattttttattcgatttggattcgaatatttccgattttggaatagtgcttttcgttccgaatcccaacttccgatttccgatctgttttgaatttgtttttagaaaggaatacgtgtattagattccgatttcagattcgattttagttttcgaatatatttccgaaatcgccatttataatatcagtatgtttcatattaaggtgactaaaacatcggaaattccgaattccgccaatttggatctacaaatttgtaattttggaacaaaatcgtttatgccaattcgcgagttttggaacaattttttaattccaatttccgatttaatttttttggtaatagaattgggaattagtttttcacttccgatgatattcctttttatcgtataaatcttgcactatggtaagtatagtttgttcttggagatgtagcgattatccatgttagaaattattgtatgatttgtagttcttggtgatttatataatataatttatcgcacaatttgttataattaattacactattacggttgtcgaaggttgaggatttactacacaactacgagaacgtgtg

SEQ ID NO: 105048 - DNA, 732 bp, Mimulus guttatus
  Intron number 4 from transcript mgv1a013989m (locus mgv1a0 13989m.g) derived from phytozome v7.0 (chr-ID scaffold_15; pos 1085670 to 1086401)
aagtggatcttgaatcacgattggggaagactcaggttagctcctcgtttggcaattttgaaatacttaccattagcagactaactgtttgcatgtaatggtatttatgttatactatcattgcgctactgatgaatgaactaggtgaaattattttacacctgattgtttaattcgagttatattaaatatctattgattggttgttgcgatgtatgaacatattcaattcattaggagctttccacaatgagtggttgaggattcgtcctctcggatttgtagttttaaagctgaaattccgggcttagattgagaattattttgattaagagatcataacgaatcaagattgtagaagaagaaagagtaaaggtctggctttagcatcaattaatacaactggaatcgggatcagttcctctgttttaagttatacatctgctactaaatgttcactattttctgcatataccgcaattatacgatgtttattgactaaaagcatagaaaatagttttaagagatgaactagttgatttgtaaggttatactgtttttatttggttatattgtttttcagcagtaaaatttccattgtattgcttttgtttgttctttattctgtaatcttgtataagcacattcatatgaatttgtattgatgcattaatgattttatgtgtttcttttgtaggttgtgactccaattgcaccacttagtcagcaggt

SEQ ID NO: 105049 - DNA, 855 bp, Mimulus guttatus
  Intron number 1 from transcript mgv1a024241m (locus mgv1a0 24241m.g) derived from phytozome v7.0 (chr-ID scaffold_7; pos 1790658 to 1791512)
gggagacgtgaacgaggagacgtggggtttgactcctatttttttcctttcatgcattgtaaacatatgggaaaattcgtgttttcattatatgattttcttcttttttttcaagtaaagggcaatttagataattcatattttatgttagggttttgtcgttaaatctagtgttgtgattgtaataacaaaaatatgatgagtttttttcgcaatttaaccttacactgagggttaccgtgatttgtccgattatcaacatttcgttaattatatggacgatatgccaattggtcaaacattcgaggattatttaatgcatgtcacgtttaatttgaattgaactcttcttgcatgacaaattttattcaactcttacataagttctttggactgcccatactccatagatgcatcttcaataaagacaattttataggagaaaaatatgacacatgaaaaaatgattttaaattactagtttccgattttgttgacatcaattatttatgaattgattgttagatgaaacctgttgatattattaagtacacaaagggcccctttggttgggctgatccaatgtgattgatctcacaatccatctggatcttagatttggttcagcccaacccatttccggattgatcctgggcccgggctcccatcccttaattactggatctccgatccagcctatggaggtaagattgggtaatccaatccctctccagcccaactctctaaatattttacttaaatgccctgaccatttattcatatttacaaatatacaccatatatatatcgatttattcagccccaaaaaatcatcggagttttcacacacatact

SEQ ID NO: 105050 - DNA, 623 bp, Mimulus guttatus
  Intron number 1 from transcript mgv1a014177m (locus mgv1a0 13860m.g) derived from phytozome v7.0 (chr-ID scaffold_151 ; pos 319039 to 319661 reverse strand)
tacgacaaattcgacaacacttatcaggtgagcgatcaattcgttttctggagttgcagtttaatatttttaatttttttttgaattttacattgttttgaaaagaataatgcaatgagtacggatctggttcctgattgttgttatttggtgtgatttttcgaaaaggaacatttcgagttgactttttgtagtttgatttttcaaataggatcgataaaccttcaattgaatgtgataattatgatttgtttattgaaattaaaatgtgttaattttgaaccttgaatttaagttgagcctagaattcacgatcgttgtaatccgctgttcggaggctgaacttgcaaagtatgcagttgcaagcgtttatgtgttcgattcagaagttgcttaaaataatggaatatctatgatatgttatgtgcaacattttgtttgtttggtttctgatctattattgcttggtctggctcttagtatttcgatccaccctctcatgaactaaaacaaaggcattgaaaataattaaatttaatggaaaatgcgttcggatttctatttatgtttgacattgatgttgttttcaggctactattggtattgatttcctatccaagacg

SEQ ID NO: 105051 - DNA, 1019 bp, Mimulus guttatus
  Intron number 2 from transcript mgv1a002197m (locus mgv1a0 02197m.g) derived from phytozome v7.0 (chr-ID scaffold_703 ; pos 15930 to 16948 reverse strand)
tggagagagaaagaggcatcaccatcaaattacaggtcatcggtattataagttcgaagaaaatcatttcgtatgtgtacataaagtatgtgctaactgctttgttgccaaatgccaaattaagatgaatatatggagaaaattgtttattagctgcgtgttagtcagcacatgtatgttgtttatgtttcgtcatagcgtacaaaatgcatgtgacatagtaaagaatttattcgacatgtaatagttgaaaagttatggctttaactcttcatgtactcaaattagatgcagccgaattaagtcgttgtagaacttatatggcatgaagacttgtataaagttgttttatattgacttggggaatacatttaggaactactaaaggttacttgtgaatagggaaaaaatgacacttgagtagaacttagttttctttcttgcaagggatatcatgtaacttcaatagtttcaaggattttatgtgtcaagctaaggtatcacaacctaaaaggccatcctatttgatgaaagaaagcgaagaaaaaataaaataattgcaatcaatagttgtaataaattgttcgattggatctcaatccaaatcttgatctagctacaagcatgaactttctttttaaatatggaaagaaaaaatgttaaaaaccagggtagcttgaaatctatctttacctactagcactagcatgttgcatacactgtctcctatggttggttttcgtgatgctcgcctgcattctcacatagtgcaaacttgagaatctacaatatcattttttgtcatctaaaattttctctatttcattgtaataagtttacttttcatttgtctccctgtaacttagaattccaaattttctatatgatgagtaaaatctaaagtatgaaccctcaactgagtctgttgttttcattgtgatattttagaagagtcattattgagttttggattttttttttttttttttttttttttgttttttgtataggctgcaagg

SEQ ID NO: 105052 - DNA, 882 bp, Mimulus guttatus
  Intron number 1 from transcript mgv1a010140m (locus mgv1a0 10140m.g) derived from phytozome v7.0 (chr-ID scaffold_87; pos 724093 to 724974)
tacctgttgttgctggtgttgtcattgctagtggggtgagtgaaagagcttttttttttcttacatctcaattcttgaaaaaagatcaaatttttatttaattggaaaaaaagatttcgactttgttttgtattttttgatgggatgtgatttttgtgatgcaattgttgggtgattgatttcttgattaggaaagatccgatcttcgattgcgggcttttttcgcctttggtggaaaaaagatttcgactttgttgtgtgtttttgatgggatgtgatttttgtgatgttgttgttgggtgattgttcttgattaagaaagatccgatcttcgattgtgggctttttcgccttttgtgtttagtgagtgtgcttgctgaattgcttgattttttatgtatcctaatttcaagattcgattttttatggtgtcttggttggtttgggaaatgtggatcagatctgaattcttgttttctgaatttcattgtctgaagtccgacatgctaatcgattggcttcatgggatctgtatagaattcaagtgtagggaatgggaaattgaacgggactctatttgtgctggccaatccatagatgtagctattgcaatacaatgttggttttttagttgtttttacttgtcggttatcaatcaaaccttccaaagctctcgtcccacatcaaatccgatcaaatattcatgtttcgagtagctttaaaacctttctttgagctctcaattttcgatcatagaccgtttgagctttcgtgacatctccaccatctatagcttccaacaagaaactcacgggttttgtaattgttttttgtcattggcttgcagggggagccgagcttccatttgtacggatttataat

SEQ ID NO: 105053 - DNA, 688 bp, Mimulus guttatus
  Intron number 1 from transcript mgv1a008228m (locus mgv1a0 08228m.g) derived from phytozome v7.0 (chr-ID scaffold_44; pos 435754 to 436441)
attaaagaaagctggtgcttctggtgtaagggctggtaaaaaattctacttaatttctagctctgtagctgatgaattttacttgggttcttcgaattttgaaaattgagctcaaggtgttcgatgaattgtctggagataccgaatcggttttttttctttttcttgaggaagtggtatgattttgtgggtgttggataataacagcaaaatgttgctactatgctgggatcggattcaattttcgagatctcgatttattaattttgtttttagatgttcaattttgaaaattcttgctgtctaggtctatgctggatcaagatagtctatcggaaaatagtgtggtcaatgttaattcgatcgtatatcctcgataatcagtcggtggaggcttcatacgaaacacatttaagttcataaacaaattaccgcaagaattttgctcacagaagcagtttccgtttttaattgaacattggagacatggatatgatgataaatgattttcttgctgtctacaaatctcttgtatgattcatatggatcgtacgacgatttatgtttttggctatttggattttggttgaaataagtcgggttttatctttagaatctcgatattaatttttcgtattatttttttttcacaggagttggaggatattcgtatttatacgagccgtta

SEQ ID NO: 105054 - DNA, 873 bp, Mimulus guttatus
  Intron number 3 from transcript mgv1a005758m (locus mgv1a0 05758m.g) derived from phytozome v7.0 (chr-ID scaffold_126 ; pos 91918 to 92790)
tccgctggcttcaagtccagacctcctccgacgttgtaagccttctatgcatcgtctgatttttttagctcggatagattggaaagatatggtagtcatcagagctttgttaatttcaatattaagctttaatggctcctttccacagtcctcgaagaaatgaataggaaaaaaaaagttataaatgatcatgaaagtgtattttctgatatatatattgttgtcaaacatgatactaaccttcactcgattatagtaacagacaaacaaaacttaagaaaattgtatttccctgtctaataacgacaacacaagaagggatagggtagggatacggggaacagaagaaatttttccaatttatacatgaatcattaccgtttttcaatttttatttgccagtctcatgttaagaatactaacttattaagtatcaagtattttgtcttctctaaatcttaaatgacatttagaaggaggttcagtttcataacatacagaatgtcaggttcttagctttagaaaactaatgtaaggtaataactaactttttcgcgaagaagaatggagtggtgatttgtgtagacagcaaaatttgaatttttacctaaaattcggaaaaattgacctaatttcgaggctcaagagattggttagatatggatgtgggacccaaatattgcctaccgaatgcagaatactgattctgttcttttccaaattaataattcttgatatacttatgatggttgcttgcttcggtatccaattttttcttgttcttaaagcaactaatttgatatttgctgatgtgattgtactatcgactcatctgtaggaccttcattctcagctaaaggaattgattccaga

SEQ ID NO: 105055 - DNA, 1006 bp, Mimulus guttatus
  Intron number 1 from transcript mgv1a004205m (locus mgv1a0 04205m.g) derived from phytozome v7.0 (chr-ID scaffold_60; pos 905621 to 906626)
ctgcggtggcaagggcatataagggtaattctgcggtgagtatatagtaaaagaaaattttctatttttttctctgctgtaattaatatcgggaaaaataagttttcatcctccaagtttgcaccaatttcatatttgacccctcatgttcacggaaatacacatttggtcactcatgtttcaaaaattcaacatttttagtactttccgtctttttttactaataccaacgaaatcaagcgtttctccatcactgccttaactaaaaaaccaacgataaattgatgaaaatggccaaatgtgttaaatttttgaaacatgaggaaccaaatgtgtgttttgtgaacataaggatcaaatgtgaaatcggtgcaaacatgaggggttaaaattgtaattaattttcccaattaatatctatactttctttattacaagtttatctgctacttcttcacctccttctatgtagatctttcatttgaaaatacacacacactcacacacatgcaaaatcatatacatatacatatgaaaacgtacacaccaagatttgagaaatcgtgtatgtttgtatgtgtgtttttggtgtgtgtgatcatgtgtttatgatgtaattactactgtaatgtgcgtgtacgtgtttatattgtgtgcttagtgcttgtaatgtaacgtgtttttggtttattttgtgtgtgaattttgtgattttatgttataagtttgttttcattacacaaaaaatgagactacttcataacagagatgggtcttactaaatgtttttaatttaaaaaaaaaactaataataaagaataaaagaggctaccttcttttcttttattaattttcctttttctttatttttttttatttaaagaggatagttaatcgttccctaatttttattcttgttatttgtaattaaatataaaatcctatgttttttaatttaatgatcatataatttagctacgatgtttcgaatttccaggtggtcggc

SEQ ID NO: 105056 - DNA, 752 bp, Mimulus guttatus
  Intron number 1 from transcript mgv1a009249m (locus mgv1a0 09249m.g) derived from phytozome v7.0 (chr-ID scaffold_106 ; pos 75382 to 76133 reverse strand)
gctcgtaatattagtaatcaccctggatttcacaggtttgcattatgttttttatttccactaattaattacagatatatatatatatatattaaattactctgtactaatataatatgcaatatcttgatatcttgtgtgttaaattactacaatttcgtcttctagaatgtgattgggtacactaaacaaataactttggtaaacagcaataaaatctttttttttttttttttttttttacttgcataataataccaattaggctaaactttatgtattgtaaagagaaatatcaaatatgcaccaaactctattttatttatttcattttatttaggtgcgtaaattggactaattaacaatttcgaaaaacaagtcactttttttttactgaagtggaaaactaattccaattccgtttcttaaaagaaaataggaaatttttggaacgatgcggttgaatttacgaattttcaaaatctaagtctatgtgcaattcaagacatagactaatattgatattacaagtgtactattcggaaaatattttcagaaacttaaatcgaatatcgaaaggaatgcagtatgtattccaatttacgttccaaaaaaaatcaaaaaaccggaattcagaatggaaaatatagttccaaaattcaaattttcgaaccggaatcaggaattcagaatatctgttccaatttccacccctaatattcgttcattaataataattaattgcgacgcag

SEQ ID NO: 105057 - DNA, 871 bp, Mimulus guttatus
  Intron number 2 from transcript mgv1a002889m (locus mgv1a0 02889m.g) derived from phytozome v7.0 (chr-ID scaffold_85; pos 763005 to 763875 reverse strand)
gttaaggccgctatcaaggttctttttctcttgttaaattatcttcaatctcatgtttcggaaaaaaattaagttaagttcgtcattagcaacatgttaatgaaaaaaatgcaatcacggtagttagctttcacgttgggttcgatttgagctatctgtatgcgaatgtagaaatggtagagttgagttatgaattatcatgcttgaggattccgcataatatgtccactacaatatttcttaggttgttttttgctttggcttatagtactaaagctactacgagataactctattgcggtgtacacaatgaaattagcaaattctgaaatgatttggagagtttttgaattgtttgaaaacgaggggtcattttgtagtccgtgttgttcggtaaataacaaaacaatttgacctggtccagaatgtttacgttgcatttaaatctaatatcagttgacggatgagcgatttttaatgttcttatagatatgaaaccgcgacgtccctgtttttctattttgttggatgtctcgtgtaaatacggaaaaaagatatctacatattttgcaaaagtgtcgaatgaaagtcataggatgataattaagaactatgttattctctagtacatagaactcttagtttgttcgatggaaaaatgttaaagaacggtacctttggggcaagtgacttaataattgattttagaagttaaaaatgtgttttgcttgggtgaatgtttgaacaattcctgattttcatcactttggcgccttgtaattttccactcgatttggtcggtttagtcattataacttgcattttttcatgtgcagcggggagtgtacttcgaaatcacatactctggtct

SEQ ID NO: 105058 - DNA, 1018 bp, Mimulus guttatus
  Intron number 1 from transcript mgv1a007434m (locus mgv1a0 07434m.g) derived from phytozome v7.0 (chr-ID scaffold_2; pos 4061368 to 4062385 reverse strand)
tcaatcggcgtggtttggtggtaagattgccgattggaatcatcgaatgggtttctgtatttacattttatacggtttttttttaggtctgtttgtttgagattgtgttatttgattgcgtctgtcgtattgtgattgtctgaggcattgaaatgtatgcagcatataattatcattttgttgctaatttctcctcgcattgccaccgtaatctacataaatttctgatatccttttccgacctccttttatggggtgccaccccccgtcttttatgtctccacgaattatgcgtcatttggggatgttttaagattctgattgtattaggccttggaatgaaatgcattgatatatttggtagagttctctttatgctgtggttatctatgtttatgcttcctgtgctcggggttttaacaaaatccttcgtaattagaagataacccatgcaccctcgttttaaggttataggaagtaaagaaaccccgctttgaccttgatcgtactgtgcattgtacatgaacgaatgtatttgaaaattgggaagaagcatttatggcagagcatatggcctgtgctgacttttttaaatcctagatgtggcgacttcccctccctattccttggaaggctaaaaaatataaggaaatttgttgtgccgtgagatagcaattgattagtgtatagatatcattgaaagatggggagaaccagttctggttggtcggagacctacattaacaagtgtagaatagctggttttcactgaatagcattctttggttcagttatctaccgttaaaatggttctggtgaggtctttgtaaaattgttacagttttaaattgcgccgtaaaatgttttctgacactgaaagtcttgtaatagtttggtactcctctaatgtagttctcatggtacatgtgtatgcatgtgcaagataggacatgctgatattctgaacttgactgatattgcaggctcaggcacctccacccggttattttgtgcgctt

SEQ ID NO: 105059 - DNA, 1014 bp, Mimulus guttatus
  Intron number 1 from transcript mgv1a009205m (locus mgv1a0 09205m.g) derived from phytozome v7.0 (chr-ID scaffold_44; pos 1535311 to 1536324 reverse strand)
agccaccgtcttctacgacactcccgccactcttggtttacttcccatctctttctttctttctttcttttatgcctattacctgttcgacaatatgtctagctgaatttatgctccattttcggctgttgaattgaaaaaaggaaaagtcggaagatatcaaattggtgtttgggattcttattttgaattttcaagtgcaagattcttacagaagtatggcagctttgaattatattaaaggaatcaacaaaaaaattcattaccaatccagtctttgtgaacaattttctactagaagaaatcttcggttcacatttgttgttctctggacatctggaacaaattgcaacccaacagttagttgtgtgaacaaaatcgagcattaatcattttccgataaagagcattaattaatccacactccctgtcattccaaatgagtccaagaacagcattgatattgctgttgaaccatctacattgtgggaactccgaataacctaggtttgaacaggatgtttgttcgtacaaggattagaacaaaaggcgatatacgtatttcatggaacacaaattatgttcagaaggggcgaacatgctcgtatatttcatgttttttatttttcaaaatatttcttaatgttgctaatattccatgcaaggtgttatattcttcttctttctgtttgtttataatgcgctagatgatcacgggaaattatgaaactgataaaccaggctcgagaacacaaggatttgtgttaaacgacaattgtttgtatcgagcctttaggtggttatttctattatctaattctattagcacatgaaagaaatcgatttataatacaacattgaagtgatatttatatgcctttttgttttatctatacaaaatttcttctcatggtcatttgtatacgtggaatcgtaactttttcttttttgtttttctttttggtgttatttttttcagataaagctgagagactattggctgaagcagcctca

SEQ ID NO: 105060 - DNA, 988 bp, Mimulus guttatus
  Intron number 1 from transcript mgv1a011748m (locus mgv1a0 11748m.g) derived from phytozome v7.0 (chr-ID scaffold_41; pos 221599 to 222586 reverse strand)
cagtctactgagtccaccatcgaaagagtaagtcgaaattctttcgagtaagctttcgggtttcgatgagacgtgctgttagtcgttcaaatttgatgattttcgaataatttagttgttaatttgttgttattgattccattttattcctagtttatgaaatcattgctagaattaatcattctagtgtgctcgaatctcgatagtagaaagggtaaattagggtcatccctgaggtaaggtcaaatgtcaaattacgtaaaacccccctcgtgtttggttaattacaaccacccataaactatgaatcttcttacatgtccacctttgcggtgtcaaatttagtggaatcttctagattatatggaacattcttcagtttgtacccgttttaccccattcgagctccacattttgaaacaagatgattataagatgcgtctcttggcttgtaaatatcagattgtggtgcatcagaaactgcacttttgcacaaaacgagtacaatctagaaaacatttcacaaaatctagaagactatgttgaatttgacaccataaggatgggtgggtaaaaagattcatagttgaggggtggctgtaattaccgaaatacgaggttttttttttcgtaatttaaccttaacctaggaaggtggccgtagtttacccattatattaatgtttccaaaacagtaaacagcagagaatgattctgacttctgatataaaaaaaaaattatacaacggatgcgatagtcgtaaaccacgagttaagtttgtgagtcccgttcatgtttgaaaagcatatgtaaagaagagccttatcgtataattcaattcgacatgtttttgatatctgatctacttgtctggttatcctctgcaaatcctaacttattttttttaccgatttcgtatctttaatgtgtgaatttgtatctgtctatgcaggtcatatttgactttcgatttttggcacttctggc

SEQ ID NO: 105061 - DNA, 509 bp, Mimulus guttatus
  Intron number 1 from transcript mgv1a007547m (locus mgv1a0 07547m.g) derived from phytozome v7.0 (chr-ID scaffold_36; pos 187130 to 187638 reverse strand)
ccgttttcccttcaggtatgtatcgcttcttctttcttcctatcgtcgatgttagatctgttttttttccggccgtttgattgattttcgtggatttttggatgtgtttttccgatttaatttaattatttgtgctcgaatctttattttattgttttgattgatgtttttttgtttgtacaaacagtttttattcaattgttttgatgttcttcgtgaattgcctaatttttaatttaaatttttttggggatttttgagttgtgagtatagctacggtcatgatttagtttttgcggtgaaattagttgttatgaatctgattttctgatgaaatttatgtgttattagaatctgattttgattaggatgattaattaattaacctatttattgtatgtgatttttgtttctggttgtttctctctcatgattgagtttgttactgataaatctctctctctttggtatcaggttgtgttaaattacgagttaaaaaaccgaataat

SEQ ID NO: 105062 - DNA, 836 bp, Mimulus guttatus
  Intron number 1 from transcript mgv1a026523m (locus mgv1a0 26523m.g) derived from phytozome v7.0 (chr-ID scaffold_1; pos 2024025 to 2024860)
tccttttgtcgggtctcattgtcaacctccttcaggtatgcgtgcccaccaactgtttgcttttttgtttttctttggttattttaatgttgtgtttttttttttggatctttcgagcttttgatgatagttagttaaatcaagaatgtgggatttgtgtgtgtatgtttttcatgtgggcacatgggaaaaaaaaaacacatttcttagccttttgtttcgttggcttgttcaaatcattagttgcagattcttggcttgcatttcgattttggaaaaaaaggtttcgttttcgagaaaccgaaatgattggcttattgcaggatcacgtaattggaagaaaaaaaattgctttgaaaatgaattgtctgaacctatgtcaattaaaatttgtgtctaattgtgggctgttagatactatctggaatacttggggtcacttaacagacttattaggctatttagaacgacgaggactaattaatacgatcgtcacaaccacaaggtttagtttgcaagttatttccttaaaatatgatcaacttcattaacatttaactgctttcctcggttcgaaattgtgcaatttttgaagtaaagaatgaagacgaccatttagattgcaatagtcataatatttactgtctgaagttatatgtaaagaatgacgagtagtcgactactacgtggtcgttaatattaatgaaaatatataatgtctaaagtactgcatttttttaattcaatctgcttaacctggtacatttacagaattccttacacgtatgcacaaattttcaggcaattctattggtccttgtccgccccctgtcgaa

SEQ ID NO: 105063 - DNA, 442 bp, Mimulus guttatus
  Intron number 1 from transcript mgv1a020935m (locus mgv1a0 20935m.g) derived from phytozome v7.0 (chr-ID scaffold_6; pos 513047 to 513488)
ggaattcaggtgacgaattacttctcttgacaatgtttggttctgttttcatttcacttttattttttcgccgaaacaaattagtgattgttaaagtttccgaaaacaaattcccgaaacaacttctagagttcatctatctttggacaagatttgcactgttgctacggtaaatatatttgactgttgttgcagctaaaatcgtcatcactaaaaaaagaaacagacgtcactttatttttttcaaattcttcttctacgatacttttattctccaattattcccgcaaaacatctttccccaaaataaaatgaaaataactcatccaaacattttttttttgtaaatttgtcgagtttctttattaatattattatttttaattctttatatgaaattgttgtagtttaagaagaagaagaagaattgtggtgagttgga

SEQ ID NO: 105064 - DNA, 540 bp, Mimulus guttatus
  Intron number 1 from transcript mgv1a013011m (locus mgv1a0 11721m.g) derived from phytozome v7.0 (chr-ID scaffold_8; pos 2576636 to 2577175 reverse strand)
tctgcctaaagtctctagtgttcgaaaatttccaggtgtgtttgtcaaatgggggttgtatttggggccgcatatgattatccatttcgattccgttttaataaagatggtggcattgtgtgtttgattctccccaacattgttgtaattggatacttggtaaacaatgcgattctagctgaattttattccaatatttgactttgctgcgcgaatgtgacaaaatgcggggtttttttttttccgtttaatgttaattagaagataatgtttttatctatgttcgagattccaacttcaaacaataatattattataggctagtgaacatgatttgttgccacttgtatctgctgcacctaaaacggatcgcctcttggaaaaattagattgtatgttctattatgccaccgactagtgataatacatagtatttagtgtttgaaacattctatcattacaagattggaaattgatctattctaacattgccaccaatctgcagatctgcactgtgaagacgtgcatttatctagcagc

SEQ ID NO: 105065 - DNA, 684 bp, Mimulus guttatus
  Intron number 1 from transcript mgv1a022402m (locus mgv1a0 22402m.g) derived from phytozome v7.0 (chr-ID scaffold_567 ; pos 25910 to 26593 reverse strand)
cccaactgctaataagttatacagtgatatcacaggttaacatagatctctgatgttgttttgatgaaatgcataaaactttgaagctcaacaaaacttttttagcctcgataccaaattaaaaccaacgacctatgaactattcttttgcacctaacatattttactctctaagccattttcattaaatcaaaaggaaacagcgttcaacacttcaatacttatttccaaacagcgatggccaatacatacacgcaaatgtatggaagctcattgaccaaatattcctctagaatttgaagaatatccatcaaatatataacaccgtgaaaatgaaaattcttattttccattatccactgtaagctatattgttcaagatgcaaatcctgactatcttcattgttccccgcgcacaagccataaaaatgatagaaatctgaagacttttttggttattcgaatttcaagtgttttataagggcacgtaataagtgtcaacaaatgcatgagaaaatcaattttcttcaataccataattaattgtgttcaataattaaaatttacattactgcaattatcaaagtctttcaggagaataattttgctctaaaagtatttaggcttcatgatgttttttggggagcatcatgatagttatatcttatttcgtattacaggatt

SEQ ID NO: 105066 - DNA, 827 bp, Mimulus guttatus
  Intron number 1 from transcript mgv1a014370m (locus mgv1a0 14370m.g) derived from phytozome v7.0 (chr-ID scaffold_18; pos 1560289 to 1561115)
cttttttcgcgttgttcagtccttgcgattggaaggttagtaagaatataaatgcaattcctttgaaattttgttgtgttatgtattcggtgaggaagtgtatttcaatctgttacttctgatagttgattagttatgagatagaaattttgaatagattgtttgagttttggatatcgtgatttacggcactttaattcggagtttattcatattttgcttcagtaagccagcaattcctttgtagctaaatttatttgaaatgatatatccatatcacttttgtttcacacataaatatgctcatatcccgggatcacatgctctgaattttgttagggtagtgtgcaatgtaagattacccttttcatcaaatctatttgctgaaaattggagaaatagtaaacaatttatgcttccttcgaagtttgttgaaatagtttttaccacataaccgtacaattagctgatgtatgaggggatgatttatgcggtttgtgcattttttttggccaaatgtttatgtacttgagaatgatcacatgtttgggtgcgggctttcggttacgggcggcatttatttagtgcattaactcgaaaagttgatgattctcacatgttcacatcgaatggtgattttgaatgtcaagtacaatttatgttttgtgattagagtaattggtgacattgcggctaaaatatttgtttgctttaataagaccttaccaatacttaataataatggcgcactaatcttgattctgattcacttgttatagccatagttgtttctgacttaagttttgtcttcactaggtctaaatact

SEQ ID NO: 105067 - DNA, 733 bp, Mimulus guttatus
  Intron number 1 from transcript mgv1a004289m (locus mgv1a0 04289m.g) derived from phytozome v7.0 (chr-ID scaffold_90; pos 205127 to 205859 reverse strand)
tcttcgcttttctccaactccaccccgccttcaaggtaaattacttttttcttctgcttctccgattcggttgtttatctatggtgtatactattcgctttgatttttgatagagcgcgtgtatttgatctggccaatttgattagggttagggttaggttttatgtatttatttagcttcggttcgtggtggaattttgtggtttttgatggtggcgatttttattgattatcacaatttgattagggttaggttttttgtatttatttagcttcggttcgtggtggaattttctggttttttagggtgacgatttttattgatgatcacctgttcttttgtatccctgaattagaatctggtcgtagcttcagattaatactgagaagaaatttttttttttttttttgtgtttttattttttattaaactatgtcatagtatcgtgatggacaaaaaaaatcagaatctagtgtaatgtgtccaattgaatgtaagttttgtctcggaatttagtgggattagctgattattgtagatggaaaagataatcaattcagtattaacggaagatgttaaagctatttgaatgaaataaggaatgtgttgttttagtatattgtccttgcagttattattagctattacctcttttctcttgatcctactgcatattgaatttaagtttgtatctactgttgatgtacttatgttttatttttggaattccag

SEQ ID NO: 105068 - DNA, 672 bp, Mimulus guttatus
  Intron number 1 from transcript mgv1a013387m (locus mgv1a0 13387m.g) derived from phytozome v7.0 (chr-ID scaffold_2; pos 4445259 to 4445930)
ccggtgaacagtagccggagatcgctttcagatctgtatgtttttttttcgcctattcacgtttagcatttttagctataatttctgcaatacaccatatgtgcgagttgattcgcttggactcagtaattagttactgaagttagatttctgagatcttcgaatatatagctggatactatactggatattgttctgaattgtttattaaagtgtggttagctggttattgttcaaaaagtgtgattttgttggaggaattcaactttataaacaggtttctaggtgataatgtgaattcttcgatcctatatttagttgaatgtgtgaatccagttggtatttgtattttaacctgctttgtgttttgagatctttctgtagttgatcttcaatgtttatgcattttaccttggtgtcggatcacaagtcttcgagaattacttccaactgttgagaagaatattttctggattaatttgaattgaaaatctgtctcgttgcgaatttacatcaatctgtagtatagcatagtagtgttaattagaagtttgatgtttttttttgtagcaacgcttctttaaatgggggaaatttcctctgattttgtgctttcaaaattcaaatactacgacctatgtagtgatatctgatattgattacacatggcag

SEQ ID NO: 105069 - DNA, 840 bp, Mimulus guttatus
  Intron number 1 from transcript mgv1a004380m (locus mgv1a0 04380m.g) derived from phytozome v7.0 (chr-ID scaffold_45; pos 1471397 to 1472236)
gaggagggtcttcgaatccttatttacctcgtaggtcctcgaagacttcccttattgtttctagagagaaggaaagatttttctcctccacttttagatacttgagcagaaagaaagtcggaatgctgattttggctgtgtttgctctcttggctttcctcacgggcttcttcacagtcaacaaaggttcgaccttttggtcttctttctcgttttctttctgtcttgaataactttccaatgctatgatgaatcgaactatttgttaatcgttaataattgaatttaattgatgttataacttatacatggtgggtttatgtctaatttagttatatttccttgagtagtggagtttatcatctctgtaatatatatatatattatacacatatatgttgtggattttttttcctctctcgttttcttgttttaaataactttccaatgctacaatgatcggaatcatcgttgtagatttttgctagtatcagattaaacttatttctgttagacttagatgttaatatatatggtgcacttatgtctgattcagttatttttatccgagttctttgatttgtttatcttgtcttgaatatctttccaatgctatgatgatcgagtattattcacaaattaactaatgttaataattgaaaaaaagggagcggaaagttgttctttgcattgcattagccagtatatggcgcgtttatgtctaattcagttttctgtaggttgatatgtttatatatatatgtttatatatatatattattagtaatggagttctttttttcagaggattatttggatagtgctggtttgccgtttgat

SEQ ID NO: 105070 - DNA, 535 bp, Mimulus guttatus
  Intron number 4 from transcript mgv1a012601m (locus mgv1a0 12601m.g) derived from phytozome v7.0 (chr-ID scaffold_13; pos 2551953 to 2552487)
cgataaggtgattaaaccattcatttttcttatttccattctcttggttttctttaaaattcttcattaagaacatctttttcaatgtcgtatagttatctgatattattcgttgcatttattataattctctactctagagatgctatagagaccaacatgaaatatattctgttgtgacgatctaacaagctctttggcagtttcaaattttctgggccatgtctcacactagagaaagcaaattttctgtatcacattagtattgaagcgtttttatgacaaagacagaacttgtaatacactttgggacatgtgcactatcagtttcctattttgggacatgtgcactatcagaacttgttatattttttatgcaatttccttctttgattcatgttgttatggcattgtcccagttttccggccaaaatgggagtaaggagttacaccttgttatcattaactagttacactaattctcaaaatgcacatgataggttggttggcctcgtaggccactgtcaaagctagc

SEQ ID NO: 105071 - DNA, 326 bp, Mimulus guttatus
  Intron number 1 from transcript mgv1a004923m (locus mgv1a0 04923m.g) derived from phytozome v7.0 (chr-ID scaffold_1; pos 1688623 to 1688948)
aacggtttccaacccgataaggttcatttctcttctcgatctttattcatttaaaaaaaaaaatgtttatgtttgtttgttttcttttcttttcaaatatagcaatttttttttgtttgaatcatcaagtgatcgcaaacgcaggataattaattaatcaagtgaaatatatatatatccaacttcgtaaaactcttgtcagtttttgttactaacattatcatgactacaatacattaaaaatgatgtctttaattaacatgtgtgtgtgtgtgtgtgtacttgctgcaggttgcagtgtacaagtctttggtatcggagttcgc

SEQ ID NO: 105072 - DNA, 946 bp, Mimulus guttatus
  Intron number 1 from transcript mgv1a004135m (locus mgv1a0 04135m.g) derived from phytozome v7.0 (chr-ID scaffold_1; pos 100141 to 101086)
caagtgtgtaagtgtttcttgattatcaattaaaattactacttaattgattttcgtggttttcgaatagctactcgtgaaagtcgttattgtgtgtgtgatgttgtagttgtgtgcatgctgagagaaaatggaataacgggctaatgttccgtttgagtgtgaccactgtcgttttcgtatctagacgatttatttcaaattgtctttttcttgatcgttgttcttcgtaaaattggaatctttgtttaaatttatgtcggcgaaggatttgcttgtgtggttcgagtgtaacggaatattcccggttttaaatttggcggcattctttctatattatcctagtgtccgttaatcgttactttagaattggacacgtgtttactagtggagttcggtttggttttatgtctcttcgtgtaacgactaattaaaacgcatgaacacgaccaatttgagaaacgacaaacatttattagacaaaacttagaacaccaaaatatacgagaaatcagattttcggtatagtagacaagttgtggctttatatggtgagtctgttgtacaccaacaaggctcttatagtatatctcatttatttattacttcattaatctcgtttgtgtgagctgtcatttttcggaaattcgcttaatgcaaattctgttaactaattaaaaaacaatataacttgtgatatctggttcgagttttgtatattgagatatcactctgattcttgaaccaaagataatatgaacaagaaccatagtacattagattcttgaaattcaaccgattcttcgaatatattgattgcttattggaatatatttcctagattctttttgtttctttcacaaaaatattgtaatttgatttgaatttttcttgttggggtgctatttcagggactggtacaatctggagaaatcaaaaagagtaa

SEQ ID NO: 105073 - DNA, 335 bp, Mimulus guttatus
  Intron number 1 from transcript mgv1a003171m (locus mgv1a0 03171m.g) derived from phytozome v7.0 (chr-ID scaffold_8; pos 2951965 to 2952299)
gataaaaggtttgattattttctcactcaatcagttcattaaactctttataattgctactgaaatagagtatttactttgattcagtagctttcttaatttatattttcattgatatgctaaatcattatcgaacttgaatgatttactctgtgatatttcgaggcatagaagtgtttatatgttctattgtaacagatatgatacacgattttgctttgttattatctcccctttatgctggtgatggatctcatagtctccactgagtccctttaatatttgtaacattgtcgaatcttgtcttcatagtttgttagttgtgggcaggattg

SEQ ID NO: 105074 - DNA, 314 bp, Mimulus guttatus
  Intron number 1 from transcript mgv1a002166m (locus mgv1a0 02166m.g) derived from phytozome v7.0 (chr-ID scaffold_8; pos 567950 to 568263)
actaaagcaggtacgccttttgtgcttctcctatttttttctcttttgaaatttgaattatagcttgtgtttcggtatatattgattttggacgcgattggaattgattgagttttgcctggttctggtagatatagaatcatttaatgtagatctgatcgatatatctccactctccagttttgttgtttttttagctgtgtttgcgtgtattgagaagttttaatgtcttcggtgtgatttgttgtactgatattgttttcggtatgaatgtggcagatctggtgaacaacttgggcacaattgcaaggtct

SEQ ID NO: 105075 - DNA, 806 bp, Mimulus guttatus
  Intron number 1 from transcript mgv1a010327m (locus mgv1a0 10327m.g) derived from phytozome v7.0 (chr-ID scaffold_8; pos 2918885 to 2919690 reverse strand)
ttggagaatcgcactccggcggagattgtgaaaaggtatgttgattttgaatttgtagttttgtgattttttgttgatagttggagttttcgttctccgtgtgtgggtttccgtttccttgtgatgattttcgtggttgtgtggtggtgattggttctgcaatcgagctcaattaggtttcctgcgccgtttttgggcctgtaattagggtttttggtttctaatcaaattccatcgaggcaatggctctgggtgggtattttagtttccgactgctttccgcgctaatttggtggcggatagtggttcgacaaggataggattgttcatttcactgtgaatctgcagttggaatattggggcaaactgtggggttttttttcttttttctttttccggttacttggcggcaaaggaatgtagttcctaggcgtatagggttttctcaggagttttatcaaccggttctttttagtaggtcaaagtcaccataaagttgggcataaaatataattggtcttctctgcctgattaagtttggccgtggatatctaacttttttggtttaattgaatccactagaacggggtatttcttcaaaacaaaattgtgattttacagaaaatgatatcagtgatgaaaattatttaaatctcgacggtccaattttcatagtggtttctggtaggacttcagcaaattattgggctgattgcttctttgttacctctagattcatttgccgatctgtctgttgttaagacaatagtctctttacttaatggtttttgcttttcttgcagaac

SEQ ID NO: 105076 - DNA, 973 bp, Mimulus guttatus
  Intron number 1 from transcript mgv1a005499m (locus mgv1a0 05499m.g) derived from phytozome v7.0 (chr-ID scaffold_4; pos 1032387 to 1033359 reverse strand)
tccgaaactcacttgcgatccggttttcctcttcagtacgcttactccctacttttttcaacgaatttaataattgaagaaatatttggttgttgagagttttaattcatatttttacccaattcactgtatttaaatttgatcgcttatgatttagagctgttggtatagtttaataattgtacagtggggacgcaagctttacatctgacttagaactatattactcaactgctactgcagttcgttttagtgttttactattttcgagactacgaatcgaactagttcttttggttgatatttgcgtctgtgatgatttagagctgtgtatacttggatacgtaacagctgtgtatacttggatacgtagcgatttaggactacgcatcgaatttaggcattgattgcgtttgtcgtagaccaggttatctgtatttatttctgcataagtgaaccttgacgatgtctcttttgtacacttgtgccactaccaagaatatgctgttttgctaaccaaaattgtgatattaatctctgctcatccgaagtttcttaagaagatgtgtttcacatacatttcatataccttattaagaatatgtgcttcacattcatgctcatccgaaatttaacaaaatgcaaaaagaaaacagaaaatgttcctttagcactttaccaaaatgttactgtaagatgtgattttcttgtagttttgaggatttaaaattttaatttaaaatttgtgattggtcagtcaatcttcaccaagtgaaattcatctttgtattcaactttggaaaatatatagtcgtgaaagatgcatcaaataagttgatcgtcagtgcatgcgaccataccatttctctaatatcctaaatatttttgactgaagaattaatgctgactcagctattttgaattatttatacttgcggagttttaatttatttgcagagcgtttcctactcag

SEQ ID NO: 105077 - DNA, 617 bp, Mimulus guttatus
  Intron number 5 from transcript mgv1a005425m (locus mgv1a0 05326m.g) derived from phytozome v7.0 (chr-ID scaffold_60; pos 1336504 to 1337120 reverse strand)
gccacacgaaactcttgcaaaacatttatttcactgtaagtacattttacgccatatctcgttagattcaccaataagtaatgcttcttattctgaaataattgtctgggatatcgataagccagttgattggatcataattcatctcacataggatttgtttgagatttcagtttattcgacagtatccttgtagtgtgacctttatgtcgaactgttacatattaatatgacttactaatctcgatccaaaaacttaagctattgcctacactacgagatttaaagatggaaaatttattttgtttattctcattcaaatttatgttcgttcgatagcatatgagcaggctgattaggccaaaagatgccttaattgaacaaagcaacctatgcacacaaactcgaaataaatcttcattatatcctttagtttatttcctatgcttttcctatccttaccgaagatattttctatatatttgacaaaatgcccgtttttcatcaagttgaagagattattttttgcttctacttttaacctcgtctcgtttagttagttctttttctcaattaatgtggttcatatcaatattgatgcaggggaagcacaacct

SEQ ID NO: 105078 - DNA, 744 bp, Mimulus guttatus
  Intron number 1 from transcript mgv1a016797m (locus mgv1a0 16797m.g) derived from phytozome v7.0 (chr-ID scaffold_2; pos 3603013 to 3603756 reverse strand)
ctgcagaacctgcaacagctttacacacactataggtatatttatgcatatatttttcaatctttggctatattcttatctgggctgcttttttttttttttttttttaatacatatataattgtgggtaattcaattttattgtgctgaattttgcatattaaaatatttgcaaaaaattattggggtcaaatgtttgtttgatgggattttaactggtcaatcttggcatacatggtatcatattatgttttagtttcttttaatatattcttttttttgctttgtttagttgaaactattcatgatgggaattttgatatccagaacaaaatttaaaaaaaaaaaaaaagaaaaaaacattttgatctatgtttgaagtccttgataattggaactctaagagcaaaaattcttgattttcccctaaaatcaaactagggttgtgttttctttattgcaatttgaatctaacaatttcccttgtgtttgtaatggcagttggatttctatggacaatggcatatggttttagcaatcaagagaggcagcatttgcagatatttaacatagcattgtactcggtaaattctcggcaattttcatcttgtcgcaacttcggttcatcatttgcttgaaagatcgattttgccaatttaaacgagtttcgatcaacatagatcaaaaccaacaccatcatcgaaaggttttatcaatctccaagatcagggcttgaacagcatt

SEQ ID NO: 105079 - DNA, 163 bp, Mimulus guttatus
  Intron number 1 from transcript mgv1a014931m (locus mgv1a0 14931m.g) derived from phytozome v7.0 (chr-ID scaffold_333 ; pos 24562 to 24724)
tcttcaatcagagacaggtaattttttttcttttttttcttcccctctgtttatgttcaattttgccttttttttttaggtcagagtttttttcatgatttgattattaattttgtgtgtgtgtgtagcccatcaaatactgtgtggtggatttggtgaaagc

SEQ ID NO: 105080 - DNA, 688 bp, Mimulus guttatus
  Intron number 1 from transcript mgv1a004383m (locus mgv1a0 04383m.g) derived from phytozome v7.0 (chr-ID scaffold_161 ; pos 522614 to 523301)
ttgctgttaaggtcattcctaaacttaaggtgtgaatttctctctctctctaattatttatttatcagctaatgcctaattaattaaattaattgattcgtttacggcgatctgatctgcgcagaaacgagtttttctaatcgttgttcgtgttcgtctacgtatttttcttgtcgaaataattaatgacatacgaataaattacgcattagttacgattatccacgtatttcccgtttgtcccgtgttattatatgaggtgatcgatcgaaccaaattcaattcgagggaatgtagatacactagagattgtcctgcgaaattgaattacgaaaattatttgttgaaacaaataaataagttactattagagaataaactcggaaagaaatgcaataaaccgtcgcgaaaggggattcgaaacgccatgtggcgaaaaaagaatgatgtatagaatatgtaagtagtgcttcacgaccaattaatgaatccacgaacatttacgaaatttgtgttacgcgaaatttcataagttatcataatttatttatgtgtaattcaataattttacttcggaatttttgaatgagtgaggatacgtttcgtgtttcgattagttgcttattgcatcaaacactatcatatgttttttattctaatttttctgattgaactttgaatttactag

SEQ ID NO: 105081 - DNA, 566 bp, Mimulus guttatus
  Intron number 3 from transcript mgv1a009989m (locus mgv1a0 09989m.g) derived from phytozome v7.0 (chr-ID scaffold_13; pos 481267 to 481832 reverse strand)
accccgagaccaaacagaggtcgctgcttttccaggtatgcattcgtcgcttctcgtatgttatattttgaacaagttgtatccaatctatttataaactcttacctattgcaatttgcacagtaagtagctcttattcatttttgttgttgttgatttataaagaactgagcctggtgtattgcatgataatcgatacatgatcaagtaagtatgagataattttgatacatggaacacagatgctagtactgcgtgtttctgtgattttgatgtgtaattattcatgccaactatcacgagtatatagctatttcatgcattgcctattttatttttatttgttttggaataagttatattgttgtgatgtttctatctggtcaatgaagaaagaacttagctttaggaacttttccagccaaaatttgtttatattttttttttgggattttattaacttgctgaagaaacttaattgatatttattgtattggccggggtaaataatattatttggtacttttgcagatagaataccccgagattgaagataatacaaaacc

SEQ ID NO: 105082 - DNA, 1011 bp, Mimulus guttatus
  Intron number 1 from transcript mgv1a015847m (locus mgv1a0 15847m.g) derived from phytozome v7.0 (chr-ID scaffold_36; pos 708920 to 709930 reverse strand)
aagaggactctgattcaggttcgtatgttgttctttctccgactttttttaattttttttttaattttattttagtgttgttttcatctagtgctcgtgtatgtgagcttaattgcatgtccctgatgtgctgtatttgttactatctgcttgaattttactctcagaagcatgtagtcatattttcgtgtttattttcctttgttctctggctgaaattgatgaagtcgatgtaaccaagttatattgggtggaggtgggtgggtgggttgggggttttggtggaagattgccttagcgaaagaattttataatgaattaaagccaaatccggagcttttttcgattattgtataaatctagtttagatgagctttagttgcatctaactagttttttagctcagagccttaaaaaattacaaagaaaataaaaataagtgttggagcttgattgatatgtatatgaacttcagtataaaatataaatgagcttttgacaatcaattttgagttttaagaaggttggcttgttttcagcctagtgcatatatacgttctagagaaaaaccgagcacttgaaaatctgtggcttcattaatggttattaaaagtgagtgtttgtttatttttgcagctgaacatcctcaatgcaaaacctaacaaagaagtacttctgtgttttgtttcgttttttgtatatatttatttttcgtttctttagatgctaatatgctaaataacgatagagaacgcagggatgggtgagtgggggaatagatggaagtggaaagttgcaagttatgggaagagaaaatcgaatagttactctctttttctctccaaaattttttcaccctctttttttcccttgttcctggaattatgtctggtgaagtatgttctatggttagacaaatgcccaagggaaaacaaaactttaatgcctgaacatttgtttctttctttctgaccttttatgtatgtttcttgtcacattcttgtttggcag

SEQ ID NO: 105083 - DNA, 813 bp, Mimulus guttatus
  Intron number 1 from transcript mgv1a005086m (locus mgv1a0 05086m.g) derived from phytozome v7.0 (chr-ID scaffold_21; pos 1923076 to 1923888)
aggtaatataatttgtttgtaatataatttgtttcttgattatgtttgtatactgtatataattaggatttattttttgtaattttgattctctatgttgtctatttagtgatttagtcatctaagttattatatttcaatttcacatgcaataaaattgcaatttagcagttgttggttcactacaaaaaaaatctttagagtgacaacacctatttttcaattgcatagccaataaaattgtcactatgcttgtcactgatggggtgtcgctaatgctctatagtgacaataaataaggattaagtgacaacaaaaagagctataagtgacaagaaaaaaatattgtcacttaatgtatagattaagtgacaacttttgcatttgtcacaattgtggtgtcgctaatgcaactttttcttgtagtggttttatgttgcttgatttttgcatttcatgatgtggcatttgttggattttgcttgtacggacttttagaagttatgaattcttcatcaaacttactgttcatagaattcttaatctgtgagttacaaatcaaattaaaggaccatttataatatttaaaatattcgtataagtgcattcaaatgagtttgttaaaactaaaatttctggcaaaacaggaccaaaattgctaaatttgcaaagttattgcacgcaaacttgaaatagcataaccaaaaggactaaatcactgaattggttaatatagatgatctaaattacaattttctcccatataactatgtcggttttgtgaattttaataatcattgtctgccttaggtt

SEQ ID NO: 105084 - DNA, 625 bp, Mimulus guttatus
  Intron number 1 from transcript mgv1a012750m (locus mgv1a0 12750m.g) derived from phytozome v7.0 (chr-ID scaffold_18; pos 482788 to 483412 reverse strand)
ccggccggttttcttccctaccggaaaatttccaggtatgctttgcaccgatctacatttatcgttcttcaattttttttttaattgtttggccgtatctttcgagatttcccgcctgcagttgaacagtcgaaaaaccactatcatttaatccggaagcagctctctgttcacaatcagcatttttgattaacgattgattcaactatattttttttttaaatatagtaaaatattaattatatgcttaccagttaccactaggattcacttttagtttaaactggttcgaacgccagatttgagattgagaggcatcgttcattctggtgattttgtgcttatgaataagttagctgttaattgactatggatgactaattgactgttaatccttaattagggttacttccactggcttactgccttaatttcttttgaagcagggctatgtttatttctatggcatttgattcaaatttgtcggttcttcacctcttcggttgcaaaaattaaataaaataaaagaaaatattagtagcagtaattaggaaggttagtggttaacattttcttgtttttgcttgtcgactaggttatacaaagtgaacaaaagaggaacgat

SEQ ID NO: 105085 - DNA, 276 bp, Mimulus guttatus
  Intron number 1 from transcript mgv1a024525m (locus mgv1a0 24525m.g) derived from phytozome v7.0 (chr-ID scaffold_499 ; pos 36909 to 37184)
ctctacagcccatttgccggaactcaaggtctttttttttttttttgttttttcttttcttgtaatatttgtggtgttctcttttatgattatgatacatgttcttgattttgattttttttgtttgttttttgataaagggtttaattagggcaaaacttgtttttaggatttaattgatttgatacaatgcatcaatttgatttgatcaagaattatattaatgactataaatgattattaatttgaatttgtgtttattacagctttgcttcc

SEQ ID NO: 105086 - DNA, 378 bp, Mimulus guttatus
  Intron number 1 from transcript mgv1a010728m (locus mgv1a0 10728m.g) derived from phytozome v7.0 (chr-ID scaffold_7; pos 1272820 to 1273197)
actattctcattcatcagcctgactttggtaattttctttctttttttttttttttaattattttttcctcataagtaattcttgatcctctctctctctatatgtatatatatacttttttaattaaattaagcaaaataattgcagtttgattttaatgattatttctcttcagtcttcagatccatggtttctttgattattttctctatatttgaagtttattatcccttttttcaattgttatttttttctgaatattggtacttttgcgaaatttatttatttaaaattatttagaatttctgtttaatttattattgtgcctggaaaaaaaaacaggaattgaagtggaggaaaagaaggttccaaactca

SEQ ID NO: 105087 - DNA, 667 bp, Mimulus guttatus
  Intron number 2 from transcript mgv1a010728m (locus mgv1a0 10728m.g) derived from phytozome v7.0 (chr-ID scaffold_7; pos 1273241 to 1273907)
ccaattcttttggccataactttaggtcttttttttctccttcaataatcatttaattatgcacctaaaacttgattaaataatatttaattgaaactaaataaattctttgcttcaagaatctaatttatgatgattgattatggactcatctatgccataaatataacatggtttcactttgaataattgagggaaaattacagttttcgttcctcaattttgcactcatgttcacaaaaattacatttagaccctcatgttttcaataattcaacccttttagccttttttcataaattattaagacagttatggcaacatacttgattctgttagtagtaacagaaaattgaagaaaatgattaaaagtgttgaattttttaaacacgagggtcaaatttgttttttttttttttttttgaacatggaggacttaatgtgaaattagtgcaaatttgagggacaaaaattgtattttacatctttggactttggacaaaaatgacaatttaattaatccctcaagtccaaatattttatgggcctaaatatttgtttggtccatatcccaaaaaagcccttcaaatttctacaatttatttatttttttatttgcaaataaaatattcagaaatataaattatttcaatatgaaacagagatt

SEQ ID NO: 105088 - DNA, 377 bp, Mimulus guttatus
  Intron number 1 from transcript mgv1a006908m (locus mgv1a0 06908m.g) derived from phytozome v7.0 (chr-ID scaffold_36; pos 940026 to 940402)
ggcggatctccgcgacaaattgcaggtcctcaaaggttgttcgttcttcatcattcgtttttgttattcaatttctaattttcttcgattcaattttccccctcatttttaatttatataacaaattcgaacatctagcttctgtagtagtacatacatcaaattccaattagcaaaatttctcaactttcatagtctaggctgtcaaactgaaaaaatgaactgtttgattgaaaaagttttaatttactgcaaatttcacctgatagtttgagttattttgatccttaccctggataattaaaataaatgttttcgactttttctcggttatcgttgacaatgcagcttgccaaggagctgaagttgtttttcac

SEQ ID NO: 105089 - DNA, 638 bp, Mimulus guttatus
  Intron number 1 from transcript mgv1a004215m (locus mgv1a0 04215m.g) derived from phytozome v7.0 (chr-ID scaffold_89; pos 481921 to 482558 reverse strand)
ttttcttgctcctcaacttcccttgctcgctctaggttagcttctctctttctttctctgaataaagatgcagtctttatcattatttggttgtattaattcgcagttttttttatttggctgaattgtgttttatttgggttggttggttttgtaatttaaagcttgaatttttgttttgcaatcatcgaaaagaatttagcggaagttggttcactttgttttgatccaaagaatatttttgtatttgttgtgcacatgtgtcattgtgtgattactgtatatatggattgattcttgaagattattgtgttacttgatctttgattgtttcactacaaggggttttccgttttccttgatcccggtttcgaagaaatatacggcgaattcgtttaccccctcgcagtcgagtcttgtgccagtttgttggttttcctttgcagaattagaattaggcagagatagaaaaaaaataatatacagaattccttgtttgatgtttgacagttgcgattacgtgcttgtgtacgtgtttgattttcgaaaaaaattgcgtagaaatggccgagtcttttcgttctaaatctgtatcttaatttctctggaaaatttcagactgctcaacggtctccgtt

SEQ ID NO: 105090 - DNA, 927 bp, Mimulus guttatus
  Intron number 1 from transcript mgv1a011177m (locus mgv1a0 11177m.g) derived from phytozome v7.0 (chr-ID scaffold_60; pos 1121692 to 1122618)
ctttgcccttgtctactgcactgccggaatctcaggtcccttttctgtgtgtgtgtgtgtgtgagaactattttagctatgttttttttttaatttttattattattattattattattattgggtaattacgaaaaaatccctgaacttaggctaaataacgcaaaacacccctacttattcgtaattaccaaaaatcccctgaggcttgtttccgtcttgaaccaatcccttacggtgtgacttttcacggatttttttttatttcgtggtatagactttatatattttcttttatttctcagctatttaacataagatattataatagattgtacacattttctgataaaaactcaatcaacagttaattaaggggggttttggttgttacgtataggtggggtgtttttcgttatttagcctaagttcagggtgtttttttcgtaatttaccctttattagggtgtgtgtgtgtgtgtgtatatatatatatatatatatatatatatatatatatatatatatatatgaatttgtttgttattttaccaatttttaaaaattattttatatagtagcattcttcagggctgtgtacacataaaaaaaaaaaaaaaattatttgccagagttgaaagaatcttgaatgacactacttattccctactatattatgggattgatttggattggattggattttgattaattttctactgttaattaattaattatgttatttgtcagttactaaataatcaataaatctactcttcaattggttgcgggcttgagtcaggttaaatcttgtcaaccgaaagattttactaacttctactattttgtcgacaatcggtcgaggcataactaattaataaattaattacaggagggcacataaaccctgcagtgacattcggtttg

SEQ ID NO: 105091 - DNA, 998 bp, Mimulus guttatus
  Intron number 1 from transcript mgv1a026314m (locus mgv1a0 26314m.g) derived from phytozome v7.0 (chr-ID scaffold_89; pos 60297 to 61294)
aatccccaaaatattaagtacgatacattattaaaataatttgaattaatttaattttttttgttatgcttaaaatacggttaattattatatatatgacattttaattaaaacatatcaatacaaacttatatttgaaatgtcttgtgaacctaaaaaaaaatttcggggcgctgtcccgaaccccaaaattttagctagccccccctacattttcatcctgattccgcccctgccagcctacatctgctgaagaactccccatcaatatgatataatataattattaatatatatatatatatatataatacatatatatgtatatataaatatgtataaaaatgattatcacgtgtttgaaataattgatgaaagagatgtttagatgtgtaaaggccagttcacatcatgcagcaaaaaagccctttgaagactttgaaaacatgtaattaactcctttttattttttaaattaagtgtcgtttaaaagtttcgacgtgcaagaaaactaataatggatcgtcctagagaaataaaataaaatatatattataatacgatctaaacgttcgattgtgtgaaataatgtaccattaataagggcataattggaaaaacgagtgacgtaatatgaaacagaaggagtatttgtagtttatatataagtggagcatagtttccttttatttgcaagagaagtcgattttcttcgagggggtgaagaaaaaagtgcagcttcgtttcgtccaatttcaaaaggcaagtgttcttttttctttttatcaagaattacgaaacatcgatatctgtcgatctttttcgagattttcgaaacctggatacatcagttttcgattatatatgtcacacgataatctgatcgatcgtcgtcgtttgaatatttcttgcagggttttttgcagttcatatatttgggatcatgcaagtttcaagcttcagaagtttagccgacttggtacgacaaaatttctcgg

SEQ ID NO: 105092 - DNA, 528 bp, Mimulus guttatus
  Intron number 1 from transcript mgv1a009209m (locus mgv1a0 09209m.g) derived from phytozome v7.0 (chr-ID scaffold_476 ; pos 44683 to 45210 reverse strand)
aattgcccccttcttgcaggtattattaacggtaaattgcacttaaccccctgtggtttgagttttatgcacttaaccctgtgtagtttgagttttgtgcacatgactcccttttatttttaatataagcacccatttgataaataatcatgctcattagaaatacgagatttttaaaagtacaaggggtagtgtgcacagggttcaaaccacatggggtaagtgttatttaccatattaatcttgagttttattagagatttaaatattaaatgattgaaatcactaacaatttaaaaaacataacacgaaaaacgtgaaaataattacaaactactacgtcgttccaaattatgtcgctttagagaaagaaaaaaaaaaatttatgttatctgtcatttaaaagttccaataattcattacatgcatttttaagcaatagattccggaactaattatcacattcttcttttccgtacgcacgatttacaagggaatcatctctagaatactcgaaacacgtcgaga

SEQ ID NO: 105093 - DNA, 743 bp, Mimulus guttatus
  Intron number 1 from transcript mgv1a007421m (locus mgv1a0 07421m.g) derived from phytozome v7.0 (chr-ID scaffold_8; pos 2305909 to 2306651 reverse strand)
tggtaatgttgttttctattaagtttcatgtataattgttttggtttgaaatgtatagttgaatgatacgtcattctgttaaatatatttttgggatttgtttctcaagaatgtggttgttaagtgacataagaatgcagaatgtcatattgggatttcattttggttttgcttttttgtgtaattcttgatgatcttggtccactaggtgtcttctggaatttattagtttgtgaggaagagagtttgtggtaataaacttgattcttgtcatacatggaagtttgatatgagtactgtgttatttcgtggtcaatcatggttggaaaaagtttttcagttagtagcataatctataagacttatctgaactcaattgcctgtgtgtttgagttgaattgagataattagacttgtctactaatgtgaaccatgcttagccggtcgtgtttactcatccacctagaaaagacagaatgtagattcgtcaatctactacataatacaaatgattgtattttttttcttgaatatgatccacttgattgggctgctttagaagttacactattcgtcaaaattgcttgttggtaaatgtttatttgattttctgattaattttcatttcagttgcactttgctcgggaaaattgaaactataaatctttattatgtagtctgatgttatcatgtgtacctgttttccaggggttataaacgatttttcagaaggacttctctag

SEQ ID NO: 105094 - DNA, 915 bp, Mimulus guttatus
  Intron number 1 from transcript mgv11b018965m (locus mgv11 b018965m.g) derived from phytozome v7.0 (chr-ID scaffold_1 1; pos 1655156 to 1656070)
tttcttggaagaaacgcatccctgattcagatgtagtcctgaatttatatttttatgatattttcaaaatcatgccttacaatttcatctcagtaaataggtcgccttgtctataagtttaatttcttgctgatttatacgcatttaattttgtactgtggtacaaacaatctgtaacatttaaaactggaatttagaaagttccctacactttgatttggatgtatttctgacaccgacacatctgtatcttgcacagatgcttaatgatttgtcgctccgaagaatatggacaactgagcttgtgcgcgttagaatcacctgagtaggtcctccgaatagcagtactgctcatcgactaatgcacggtaatacttctctcttctttttatttgttccaagtttagttccagtagtttttacattttcatgagccttaagaaagaatcttcttacaggacacaatcatgttatttatattttcctcagtctccagtcaactgtttcaatttacagattttccaaatattctaaagggaataatttgtggaatacttattattttcatatctgaataccttccaacaattatgacttgctattttcatatatagattttcaaataccaacgtggatcgaagaagagagtaagaaagagaaaacaaaattccggactaaaaaggatccatagagagcaagtaccagaaacatatatgttgggaaaaatgatgaaaaagtgagaataaaacaagggggaggtaaaatattacgtgatttggcgaaattacccctgacttggcacatgggagttgcgcgtgtgcaattccggcaagaattcggccaaaaatgtaatcggtgctccaaatatgtgagttcaggggtaccgtgcaactttttgtagtggtgaagtgcaaa

SEQ ID NO: 105095 - DNA, 892 bp, Mimulus guttatus
  Intron number 2 from transcript mgv1a001992m (locus mgv1a0 01992m.g) derived from phytozome v7.0 (chr-ID scaffold_2; pos 1325838 to 1326729 reverse strand)
ggttgtaaggctcgtcacgccttcaaggttttctctttccccagattccttctctaaagttttcttttaattactacttcacatctaagagtatgcatctgctttttaacttacttgcatgttcttaaagatgtgcacgctgttcttgcggcagcgcgtgcgcatgatagtctttgcctccatttctagaacatctaatttggggttcattgcctaattgcggatattagtactgtttacgcactcgatctgcaataattttgtagtcctgtagtcaataccttcgatttttttgcttgtgtttctgtacatttcatattagtttcataaattcctttgatatctgagcaatagaaacatttttttcacctcctaacgaaaatagtgaaatactgctgccttttctagttataaactttttttcaggaggaaatatagatgtcttcatatgtctgggttatttcttataaattcgaaagtgatctggttattggctctgagtctgagttcccgtgtggttgatgcggatttataatttttggatctgtgacttttgtaagcgattgtgaatatctgcaggtttgatgatttgtatagagtatcttgtttttagtaattggaatcttaacaattaataggtagcaatctcctgaagaaactgctgaaatatagaaaaaaataaattgcactgcatttagtactagaagggtcttgttttccagagtaggaaatatgtaatgaccgtacgcatctgtacaagttctgttatggcatcatgatctttttattcatatttattttgcatacatcatttacatccatttttaagtcctttctaatgccaagtccttcaattcctgtcgtgcagattagccaaagggtatttgaaaga

SEQ ID NO: 105096 - DNA, 684 bp, Mimulus guttatus
  Intron number 1 from transcript mgv1a002024m (locus mgv1a0 02024m.g) derived from phytozome v7.0 (chr-ID scaffold_13; pos 1085171 to 1085854 reverse strand)
tggactacaaagtggaacacgaaaaattattacatgggcaacaactattagattattaattattacattggttatttttcagaaaatagaaatcctgaatttagtaagattatctacgattatctagcttgcaacattagattctagtacttattcaaaaaaaaaaaattcgttacttggatcaaataaaaaccgttttttttctcccaatatatatattagataccctttagttttttttttttggtaaatttcactttaccccttctactttggctcaatatcactttatccccttccactctcgattacatcgatttgccccttttacttgaaaaattgtctcaatattgcccttgtcgttagttttcagacttttgaccttaataccgtttgatttaagtctgaaaattgcaaaaaaaccacccctccggtttaagtaattattaaaaaaatggaaaatagggtatcactaatttccccatataaatataccccttgagctctctcaaaccaagcctgcagtttttagtggactactccaaatatgttctactaaattgtgtatacacatatatgaatatatgatacatacatcaaaacctatcaattttccttcattctcatcactacattttctcttccatatctccactacacgaaatgagaagcccggccaggatc

SEQ ID NO: 105097 - DNA, 496 bp, Mimulus guttatus
  Intron number 1 from transcript mgv1a002541m (locus mgv1a0 02541m.g) derived from phytozome v7.0 (chr-ID scaffold_82; pos 535900 to 536395)
ccgatcgtatttccaagctcgtcgccgccgatcctgtaatttctaattccttttttttttgttgttgtttggggttttggaattaacttcgtcgatgatgaatttatcgagctggatgatattcgacggaattattttgagaatttccgttcgttatacttgatttaattgtaaaaaaataaatcattttgctatcagtgatttagatccctagataagttcttatcgaaatcgattgctgcagttgatctttatccttttattttttctatgtagacagcgttagaattgaatattttgaaatttaagaatcgtgggatgggacctgatgtactgtattggaatttggaataaacaaatggggagtatcaatcactctgattttacacaaattaactttcgaaaagtatataactttttagtttgatcgtctttttcgactgaatgttaatatgatctaacttatttcgtttgcggatttagggatttcggaagg

SEQ ID NO: 105098 - DNA, 517 bp, Mimulus guttatus
  Intron number 1 from transcript mgv1a006482m (locus mgv1a0 06482m.g) derived from phytozome v7.0 (chr-ID scaffold_273 ; pos 52339 to 52855 reverse strand)
tttatcccaaagggtgcgtgttcgtacgcgccactgttttttcatttatttaattttttttttttgaaaaattgattatcttaagctgctgctttttgttatttgcctgtaaatgaatccatgtttggctgcgtgtttatacatcttgatgagtatgtgttcttcactttcttaatcggtgttttgattgcgattatgaacaattggggttttgagtgattcggttgggctattttaatttaatcattgattcgtattaatgttgatgttagaaatgctgattggttgaaatttcaagggaattgttatcgtttttcaataaatttttttctaaaaatttccacaattggaattgtttcgacgaacattattgcacgtttttgtacatctacttgccaatttgaagaaactcgattgagatcattacgatgttttctaactactcatcgcattttattcgagaagcttgttaaactattttgttacttacaacctatatatttatataggtactatc

SEQ ID NO: 105099 - DNA, 854 bp, Mimulus guttatus
  Intron number 2 from transcript mgv1a016148m (locus mgv1a0 16148m.g) derived from phytozome v7.0 (chr-ID scaffold_4; pos 3974801 to 3975654 reverse strand)
agaggacccagagcgatcgattcgtctccgtcaaggtattttcatttcaatttattaatctccagaattagggttcttagcggaatatgatgatagtaattttgtcgccccagtcttaatctgcatctacttgtagatgtaatgtggtgattgacgtttttatctgattcctcggaaaaatgttcttcgtttattctgtgtgtatatgttgccccttttttctttctttgttatgttttttgtatgttgagattttgcaagaagaggcgtgatgatacccaaaccatacacctatctgtaattgaatgatgattatacaaccatgcactaccatctgatctctcttgcttatttgtatgtgtgtgtatatatttatctgtattatttcaaattttgagatctggtcaagcagtctgtgatgaatttattaaaaaaactagctgatttttccagtgattatcataaatatattcaccatctttcggctgagactgttgtcatatgattttttttttgcttttatttgtagttggtggtattagaagtcagtgtaaaatgtatttgcccatggtatctaatttccagaattatattttgtttctggtgatttcgttttgttgggcgtaaatgaatttgggaacaggcctgcgacacgaatagcttcattaccaataagctttctgttactatattcctgcctacataaaaacagagtcttgttttaattccatatttatatgttcgattgatattgtttcttttgattgttgaattagagtacgataactaactttttactgtgcaattcatccatgacaggaaaactggcgtagacccaagggtattgattcccg

SEQ ID NO: 105100 - DNA, 462 bp, Mimulus guttatus
  Intron number 1 from transcript mgv1a007827m (locus mgv1a0 07827m.g) derived from phytozome v7.0 (chr-ID scaffold_12; pos 1841683 to 1842144 reverse strand)
tcggacgcttttcttctcacctcaaaattggaattgtgagatttcattttttttgtcaaattattgattcaatgttgtcttggttcttattgaattcttaggtagcttgtatctttagctgttggatgcttatggattggatattactgattttaatcagtcaaatgtggggagtgatagtgttgaacattaatcagatatctgttgtttagttctctatcgttaacttttttcgattgggttttgaatttttgctgcaagcatctaattatcttcggattctctgtttggtgtccgatcattctgttatctttctaatgtatggaatggaagtgttgaattgtgcactttgttgtacatacagtttgtttactgatttaaaatacagagattgggacggcacatctggtattttattgctgactgtaatgtaatattcttttttccaggttgggttgccta

SEQ ID NO: 105101 - DNA, 933 bp, Mimulus guttatus
  Intron number 2 from transcript mgv1a010597m (locus mgv1a0 10597m.g) derived from phytozome v7.0 (chr-ID scaffold_2; pos 3998732 to 3999664)
caatatctagagttagccgctgctgtgttcattaggtaagaaaaaattgatgaagggatgcaatttttgacctgactgtgaaatttgcttgtgtttgattttgtggggaatgttataaacatgatcgagagtccttagtaattaacccaattccttttatttagtgtttgagtgattgttgggcttgtctttttctaaatatttgggtaagagcatgactgtaactattgtttaattttcttcattagaagctaaatgtgatgatctttggacacattgttccaaaagttcgaaaggattttagggaaaattctacattttttgtgattgaagactcttgtttatcttcttgctgtatgggacttttattatattcccgtgtggttaaagtgcaagctgaggttgtagattttgacgttcgacgtggcatgtacttctcttcccctttaatgtttcttgcgttgacaaatttttgaaacagtttttgaaagttgattctgtctacgccgaagttgcttcattgttgatttttcctttttcgaggagtgaagtgttgttcgagaagagtatatcaacgtatacatcacacacatgcattagaccatatgaagattctgtgtaactgatagaaaatcttgtagatgcatccctcaattggaatcgaaagatgggacgtaggtagtttccatgctcagctcaaatatacattacaaaagctactgggaactttttctggttgtttccatgcatttcagttgacatgtgttctttctagttttcgttcttcctatcgtttcggatcttcatggatttcggttaatgttttctttctatttgcttaaatcgcacatttgctcaattgttttcatagttatctgcattcatgatggctccatatatatatatattcagacaggtgatttgatttttagt

SEQ ID NO: 105102 - DNA, 600 bp, Mimulus guttatus
  Intron number 3 from transcript mgv1a010722m (locus mgv1a0 07908m.g) derived from phytozome v7.0 (chr-ID scaffold_79; pos 248112 to 248711)
atcggagaagcatattcagaaacttctgttacttggtatacatacttacacgggatctgaattttcattctgctctttgttaattgattttgatgtatattagtgatcaaatgtaatgtaatctaatacttgcatttaccactttttaaaacgtctttgaatacatgattaatcctcttgcaatctcctagatgccattgattgtatgttaatattttcaatcagttgagtttatttataatttatttagcaacataaagttgaagatctttcttcactctttgactctgcggtattcagaataaactgttgaatcttcctatgtttcggagtggttcgtttcagaatattttttgattatgagcacccattagcaatttaatttgaaaatagaaacagatacttctttcatgttggtttctgcaattaaacttccaaattcattcagaattactgttgcaaaaagcacagtattgaaaattttctcctcaccttcgatttcgatcttgttttttctttatttgtttgatattcatgtaacatgctattacttatttgtgataaggtgctggagattctggaaaatccaccattttcaag

SEQ ID NO: 105103 - DNA, 710 bp, Mimulus guttatus
  Intron number 1 from transcript mgv1a007449m (locus mgv1a0 07449m.g) derived from phytozome v7.0 (chr-ID scaffold_13; pos 1539828 to 1540537 reverse strand)
gctggagcagttccttcttgggcattgttcaggtacccttaattatttttatttttattatttttattttatttttatatttatttttatattttttgtggttgttgagatggtgatcggtggcgtagcttgtatagccggcgccgccgccgccgcagccgctgaatgagaattgacagtgtgtgatgtaccaaaaccctgattttgaacctcaattataataatatataataataatattattgactaggaccattattttaagaatacagaaaagctgcagatatctgaatctgactcagtcacacgtgtcaaatagtcagcacatgattaagtcaaaagtaaatcctaggtgtaaaacacatgattaagtcaaagcaaacacattcttaggaaaaacaatccacaatttaagccaagaaattttcatttgccaatgaaaacctctgttttctttaactgtacatctaaaacgaatatatataacatcgacatcgacgcttatttgtactcgctagtatttatcgagactcacttcgtttatatgaatccacaaaaaaaaaacacttatcatgaacttgtgaatcgaaatacgtgcgcgctattaaaacaccaatgtacgattattgcttggttcgtaaatgatttatatcgaagtacatttgctgattttatgtaactattgatttatatatatagtcatcgttctt

SEQ ID NO: 105104 - DNA, 661 bp, Mimulus guttatus
  Intron number 1 from transcript mgv1a007055m (locus mgv1a0 07055m.g) derived from phytozome v7.0 (chr-ID scaffold_24; pos 1223696 to 1224356)
ccaacgtcggcaagtccactctcttcaacgccgtcgtacgcctctttctccccttcttaatttttatttctcgaacgattgaagtaatttaaacagttctctcattcttctcgtggttcaaaatacaaggatgcttgagttgaagaattagttttgaatttgtgaactgttggatagaccgggaatatggtgaattgctttccagagctgttaattattcgattatgctgctaattatttgttaattatttgtgaaattatgtggaaatggattttattctctattgagccctggacactaaattgtttggtactttttattaattattttatttgtctatctcgattggggtttgatgtcgattagaaggtgataaatccaacttattttgcactattaccttaattttaccttgtactgtaaattctcattctcgttgttactctcctgctattatccgtgttttatattagtttcgtaaaaaggcgagcaattatgtaaaaattcgtatttaatatgcttacattttcgattggagaacttgtagtaaaaagtgaagtgtcaaatgtcggtattcccatctatactttgatgcaaatggataagccttgtctagctccatagtaactgaactctgattatattatttataggttgaaa

SEQ ID NO: 105105 - DNA, 582 bp, Mimulus guttatus
  Intron number 1 from transcript mgv1a016916m (locus mgv1a0 16916m.g) derived from phytozome v7.0 (chr-ID scaffold_98; pos 488188 to 488769)
atctgaataaggttagatccagtcacttaaaatagaaattcgatcctttttttctgtgtaaagtatttgatacataatcattgccctaattatatcccctttctcaatcaattcaaattggggatcaaattcgtttgttaaatttaactgtaaacaaatattatctgtttgattaattaaaattatcgcattgttaattctcagaaatctgtgctgttttggggattttctgattgttggtttgaaaatctgattgtaagaaattgaatactttgtagtagatatagtgtaggcacagacaaatggaaaaaaagatcgtcttctttgattttgattatcgatgtataacttaatcacgactcacgagcgataactagcacgtttatcgggttttttcttttttttgatgatgttcgtttaattgcgttattttctcgattcgtttgatgttgataacttaatcacgactcacgagcgataactagcacgtttatcgggtttttttttatgatgttcgtttaattgcgttaattttgtcgattcgtttgatgttgatttagctattgtccgaggagaaaaaag

SEQ ID NO: 105106 - DNA, 800 bp, Mimulus guttatus
  Intron number 2 from transcript mgv1a000491m (locus mgv1a0 00491m.g) derived from phytozome v7.0 (chr-ID scaffold_30; pos 1575156 to 1575955)
ttgagtccggccagattccgacggctcggattagagtaattattctttatcccttagggtttatcagaatttaatccgactgaatttcaatttctttttgtgaagttaattctgtggtttcgtcgagtgatcagttcgtaattatcgaattaaattgatgttttagcaatattgtttggagatgtttgagtgcttagagtattttggattttcattcgacttcttattggatatcaatgtagaagcaactcatatggtggaatagcgtaaatcttcatgtggtttgtattgacttttaaaaaaatgtttgaccgcattttttgctttcagatgataaagtcagaatctgatatgttctagctgtatttgttcggtatttagtgtcggttaattgaaatatttgcaaatagcaattaataaaatgatttatttattatctactgcgggggcaaatgatttacaccgataagatctttgcgacagaagtatgttattacttgccttttgtagtttcttttgacgtaactgatttttggtgccatttatatcaaaatgcaaaactcggtgttctccttgaaatttatgcgtcaccgtcggagttagtttgggtagttgggagtctgtattactgcaatctacattggaacttggacgagagctagaaatggagcctgatgaaattcagtcttatatttttcgttcgagtttttcctttctccacgttgtgtcaattccaagattagtgttacatgagaagaccgtttcatcaatatcttgcattattttttttcaggttgaac

SEQ ID NO: 105107 - DNA, 463 bp, Mimulus guttatus
  Intron number 1 from transcript mgv1a001570m (locus mgv1a0 01570m.g) derived from phytozome v7.0 (chr-ID scaffold_82; pos 562269 to 562731)
atacggagctcgcaggtaggggtttctgtgtacgcagtgattgtttatgactatcagtttttaattggtttaattttagattgtttatgattatccgcgtgcgccgccgtcagtttttaaatctggaattctttgttgagttacctcatattgttgatttccgagccatttagatttcgtactactcgctttttattgatactggtctctgtttccggtattgatttatattatacctaatatttgattgaattcaaactttttttttcttcaataattttaaagtttggctgctatatcaatctgtttacactgaggcgctagcaaattttagaatagactcgtttatgagcgtatgtgaatatgaatatgctgctttttattccctacagtgcagccatatttgttaatctcactcgtgtttgtcctacttcaggtagaatatttagcctactatcaccaa

SEQ ID NO: 105108 - DNA, 701 bp, Mimulus guttatus
  Intron number 2 from transcript mgv1a016992m (locus mgv1a0 16992m.g) derived from phytozome v7.0 (chr-ID scaffold_102 ; pos 403043 to 403743)
ctaggtatcaatttctctaattttttttttatttttctgtgcttttgattttgtatttttgttgctaatgtgtagtgctgatatgggattttttgtatttttgttgctaatttgtagtgctgatatgggattttgttcttgttgcatatgcaaatattcatgttcttcacctggttttaattcgacaatcgagatttcggtttgaatgtcgatttaaaataactttttctgtatgaggtttatggttgaagaactaagatgtattcaattagatgatcattggtgtcaaaaaaacagattaactttttttttgttttttttttaatttaatcttgtcggcattataagtatttgatacgtgattttcagcactgttgtgttcgatccgcgtttcttcaattacattagatttagttgatttggccatggttaaactatagtagtcgaacatttttagcacccgtttttttaaagtggtgcacagtcacttaaacgataagaataaggctaacttcgtgtaagttgaatcgaatatgaaatcgaaccactcttataccttattattcttctcacttttggttgtgcaatggtgtaacattttcttttcgacttttttcagcttcttatacttacaaaaatatatatattgtttatatcggattcttgataatagtggcattgtttcttgaaaatcaggttgc

SEQ ID NO: 105109 - DNA, 736 bp, Mimulus guttatus
  Intron number 1 from transcript mgv1a000011m (locus mgv1a0 00011m.g) derived from phytozome v7.0 (chr-ID scaffold_2; pos 2881349 to 2882084)
aggttttctccaccaactccggctatcaacttcaggtatttgttttgttgttttcgattgggttgtctgttgagtatatggttcaggccgacaatctacgaggttctatctgcctacttattgtagtaataagattgtatatcccatgataaaatttcaattgcatctgagcataaaaatacgtgcaaggtaccttagcatgtgacattctttgactctcgtgagaatttttgtatgtgatgtctgggaaaattatctaatcactcaaatagtcaaatgatccaatcagtttcttggtctttcgcagtataacatattttaagcttttcttttttactcatccatatgcatagatttgatcaataattgaaaccaaggaagacattcgtaattatggaaggataaactcagaattttttcataattaagctatgtattggtcttctctttggaattctgaatccttgctcctgtgaagagaccgaagagcaactcatttaccatgtttacctcttttaacccattgtacgcatatgtctccaccaatgctgccaattcattgaattttagtctagttttatttgttttggttatgggattaatgtatcgtttctctctgatttatgatgagatatgtaataactcacgataaactatttttttctccatcaattaacatttctaatcttgtttttttctagcgaggtcggcgacgaggcaattttgaaggcactat

SEQ ID NO: 105110 - DNA, 454 bp, Mimulus guttatus
  Intron number 4 from transcript mgv1a023562m (locus mgv1a0 23562m.g) derived from phytozome v7.0 (chr-ID scaffold_29; pos 188637 to 189090)
atttcatcttcggagcggggcaatcggtttacgaggtaagcccgataatcgttttcttgaagatacttaattaaaatataggagtgattaattaattattacatgatgatattaggggttgttaagtgtcttaattacctttgccattctcaattattattgttacctttttcttttatgatggcatttaaattatttaatgaatttcctctatttattacaaaattgacataattcaatgatatgtgcacaaaatctttgattttcttgcatagttatgaattaatcaatgtgttgagattacttactatcaatatattagaatataattatccctttatgcctatgttaaattaatcaattaatgcaattcctcaattttgttttttttaattttttttaattttttttttaatttttaatttttaatttttttttttttttgaaaatagag

SEQ ID NO: 105111 - DNA, 781 bp, Mimulus guttatus
  Intron number 1 from transcript mgv1a011089m (locus mgv1a0 11089m.g) derived from phytozome v7.0 (chr-ID scaffold_36; pos 1509875 to 1510655 reverse strand)
tggcgatcgccaccgagtctcaagaagaacaccaggtgagataaccaacaagcttcgttcaatttttcttttttgacgagtttttagggttctatgatgatttttaattttgctatttctgagaatggatttttatatatctgctttttctctcgttttgctttcgttcctttctctatctagaatcttcttcctccttttttccgcttgttgtttctcctttatgatttattttggaatggaggcttagctcaccggacaaaaattggggatgataatggagattggagaatgttaaatccggttaattaataattaattgttacctcccctgatttttctttgttttcaaacataagggaacaaaataattgcaattatgacttttgaattcaaatatgccctcatgtaacaacagttagaataaaattttatgcttcacacgataatgtatttgtgtgacactactggaaatatcaaagtgaaacttggaaaattgcatattgattctcctttctgcattagagatacaagtttgcaaatcgattcacgattcttcgaatccagattccagatcagtaatctatgccaattgtaagggttgtgctttaattttgatcgcgtatagccaacaattttgtaacataaactttatattttcgaaggcactgagcacaatgcaccattatttcttgtgtcatatgcttgtatatgtaaaaatgtatttttttccttttttttaatagatttcttcggagagcactgcagcagagagattgag

SEQ ID NO: 105112 - DNA, 928 bp, Mimulus guttatus
  Intron number 1 from transcript mgv1a004307m (locus mgv1a0 04307m.g) derived from phytozome v7.0 (chr-ID scaffold_173 ; pos 17842 to 18769 reverse strand)
ggaagttcaaatttgacgccgatcttaagcccaaggtttttcttttcctcttttttttttatttaatttttaatgggttttcttgagttgatctgcttatagggtttttggattttgatagatttgaaatgggcttttgcttgttttgtgaaatcacttggattctgtggtggtttttgatgtttttggcgttgggttttttgaatgcttagatagattgaaacacatttcatctttcttatgaagttttcgaatgtctttttcatgtgatccttcgaattaaatgaaatgaaataaaaataaataaaaaactatacatgatcaattttatttcttctagaaaattcccaatttcttgactagaaccggattatttggaaaagagttaccattgatccttcactaattctttcccgaagaaaatcagtgtacattatttccaattatctgggcagagatgttttaacacagcatttgccactgaaattatcctagttttcgcatttttttattgagaaccgaacaaaaagagggaatatgtgtcggggttgaagaggtgggcttttttgtaaacttgcaaattttgaccaatgatacttatttagatgacacaagcatcacgttgatttcgtgccatttagtctcattaaagagatacaattctgtcgaactgaggtgtgacaccgaatttagtcattatgacaataattacagttctcttaacacaaattggaatattcgttaaactgcattgatctcctatacttaggtttagaagttgagatttcttgatacaaaattgaattcggatccagtacctaagttcttggcatttcattactgaatttgttatcattttgtacagttttttttcaccaagatttgcaattattttttcttacttatttctcctttatcgtatgcagat

SEQ ID NO: 105113 - DNA, 988 bp, Mimulus guttatus
  Intron number 1 from transcript mgv1a021835m (locus mgv1a0 21835m.g) derived from phytozome v7.0 (chr-ID scaffold_281 ; pos 108219 to 109206)
actcgctgccccggtctccggggaatcattccgaggtcattttttattttatatatatattttttttctactattcatttattttattagaactattatgctgcagatcatatatttccatctcaagtcctatgattaattctgatgaaaaaaattgggttgttaaattaatgctcttattttaatattttttttttttgttcaaaaaacatgacaaatatcttctttacacgtgtcaggattcgtaaataatttttacaagctaataatatgtttcgaattgccgaaaatccattgtgttaaaaattagcaagaagtaccgaatgttgtgttttttaaagcacacattgttggcttgcctgaaatgatcaaattacccttacaaaagaaatattaaaaaaaaaacagaacaaaaaaggaaatgaaaagaatttcagagggtaattttgacttttcaagtcaaaaatacagttgtactttcacaatccacacgtgcatcgcacgataagctggtatgggttttttttgctttgattatttttcacatgggtgttcttgctaattttttttaacaaaaggggtttttagcaattagagattagacatgggtagtttttgaaaaaaaaccccatatttttacaacatctaggtgtatatgaccggtaatccaaacgtaatcaccaatcaaattattcaatttttttatgttttatgtagttaaatatgacagatttagttagttcgtcttttttttttttttttgtattttgataaattgatttagttacttttcataataaataatcgaacaaaattggtttacaaatacgataactgtcaaacatcgattttgttctgaaatttgatatattgagaaatataattgaaggattattcttattatatatttagactgaaattaaaaacgaaaaattcgaaaaaataaaacaaggaagtaattgtttcgtttcgcaggggtataacaaag

SEQ ID NO: 105114 - DNA, 354 bp, Mimulus guttatus
  Intron number 1 from transcript mgv1a023446m (locus mgv1a0 23446m.g) derived from phytozome v7.0 (chr-ID scaffold_80; pos 53920 to 54273)
gcagcagacctttcattccctcaacaaggtttgtcttgtcctttcctaaggcttttcataagtagttatcaataagatggtttattgcaattagtactcaatgtggtatattcaattgctaaatgatttgatttgttttagcacaaaaaaaaataaaaaaaatcaaatcatatgagcaataaaataacacgggttagcgttttagcaattcgatacaacaaaagggtattattttcaataaactcaaataagaatctatattttcgacgcctctttcacttataatttacatgtacttcttctttgttcacattaataggtgtgtcaagatcagtttcagatacaacaccggca

SEQ ID NO: 105115 - DNA, 757 bp, Mimulus guttatus
  Intron number 3 from transcript mgv1a010157m (locus mgv1a0 10157m.g) derived from phytozome v7.0 (chr-ID scaffold_26; pos 187533 to 188289 reverse strand)
ccctgggatttaaaatccaggcttttactgataaggtatgattagatcctttaatcttttgtgtcgcctattattggcttaaataatggcatcatggttatgtgttgtaacttacattaattcggtcttggtactagttttattgctcatattgtggcgtatcaggtcgacgtacgtatgttactacaataccttttgatttacagaacagaaagaagatttattgtctcaattttgaaaaaaactacaaaacgaatacaagaagattaattatgctttttgtctgtgatttatgcacaaactttgagtcaaaatccccagtcgttccggttaataggaaatactcaaaatttcaccttgtattccctctgctttgtgctttttaagctgattaacagctgtaagattttcaattttgtaacactacatttggttagtgattccgagtcattggggcaaggtgattgaaaattaaagtaatgtttgtttagtgattgtgggagacagagacgtcaaatcttgtatgaatggttgtatcaaatgattttttccagcattatgaattgtatttctcaatgtaaaagaaaagaagatataatgatcttttttaattgtgggtcctattgtggagaaggaaaatatgatgtttaatacataaaagtgaaatgggagggagaggagacacgagctatttatttatttaattttttgagtggtgtttatgcacaggtgaaagcaggtaatttccccacagcag

SEQ ID NO: 105116 - DNA, 769 bp, Mimulus guttatus
  Intron number 1 from transcript mgv1a010157m (locus mgv1a0 10157m.g) derived from phytozome v7.0 (chr-ID scaffold_26; pos 188490 to 189258 reverse strand)
aacacttcgattccgtggtttgacattgtttccaggtactttctctctactatggcaccgtcgttcctcatttgtgtgtgtgtgtgtgtgtgtgtgtctctctctctctctctctctctctctctctagcattgcataaagctgattgggggagttcccactctgctaatatgcaattttttgttttgaattggttacctttttttttttaatcgtccactgtgatgctttggttatgtagacgcagggtttgattttttggtgttagggctcaaaattataggattggagaatgttgggatttgaatataacgaatcatggttactatgtttgtcccactttttaatttgtgatgaaataaaaagaagtttgctgtttcactattctgtatacaacgtaaatcatgattttgtaaattgaaagataaagaatcttggagtttatgataacagatgggaaagcgttgctatatttagcacttcagtttcggttttactgagaaatctactgtcacagaaaattgaaataggagtgtcatgcttcgattgatattatattggacatccgatttaaaatttgattaatgaggagaaagtaaaaaggttttgttccttgaaacccgaaggaaaaatgggttgtccgttccatggtttgaatattttgtcccattgttcttgctgtcatatttctcatttgtaaaatctgtgtcgtaatttatcttcgtatgctttaggccttaggtatttgattgtggttgaattcggtgag

SEQ ID NO: 105117 - DNA, 381 bp, Mimulus guttatus
  Intron number 1 from transcript mgv1a012808m (locus mgv1a0 12808m.g) derived from phytozome v7.0 (chr-ID scaffold_1; pos 1496552 to 1496932 reverse strand)
cctaacatttccccgtcgatcagccaaaacaccaggtaatcggaaaatctcgatttctttgttttcttgttgaagaatgtgttaatttatcgcataaattgccgattcaatctaaagaaaaaacggaatagataatcacgcaatgctatctgagctcggaaaatcttcttttcgtttgtggtggttctgtattaatcgccgatgcactgccgattaaccgtttgaggaatgggatttttttaccgaattttgcaaacacttgtttttagttgctatagttttgatgtattctcttctaattggttgttggagtgtgttcatatgttgaggattctttttgttgcagagttttaataaaaaaaaaatcggagaatcgaaaat

SEQ ID NO: 105118 - DNA, 953 bp, Mimulus guttatus
  Intron number 1 from transcript mgv11b023676m (locus mgv11 b023676m.g) derived from phytozome v7.0 (chr-ID scaffold_3 7; pos 7773 to 8725)
ggcctcctgtgagtaattatgggcctcgatttcttaaaaatcggcccattttggattgggtcaaatcaacccatataaacttttgaatttcctttttgtttttaataacctatatatataattgtaaacaatttttttcattatgcatccttttttttaattgattttttttcttcacatggactcgaaattcatcgagtaaactccgctctcgtgaaatagcttgtaaactgcacaattgatgtaaaatctattaggccaacaaaaggtgtaattgctatattcttactttcaactattccaattcattgtaataaacatgtttcttataagcaaattgatatatactccctccgtttctcattaagtgttgtttttggctttgcacaaggattaagaagtttaataaacgtgtcttgattttaggtaaaatatattagaaagactaaaataacctttgttatttaatgatgagagttaatacttatagttgtattaataagattaaaacatgaaaaaatttatttaatgcagtattggaaatctaaagtgacagataatatggaacaaaaatatttaaaaaaaaaaagacaattattgtggaaccgatggagtaataaataaaacgaaaaaaggggtctacaacaaatgtacatccaattaaagaatttatatattaatttcaaaaattaaaaaaaatgatagtttataataaaaccatacgcctaatacacggagaaggcacgtagttttctagtccagatacacacacacatcacgtagttgaggtgggcacggacaataaataatacttaactattaaatactacttgattcccccaaccactctaaactctccctataaatacaaagtttttttatttatatcccaaattcccaataataaaacaaaaaagtcaaaaactcaaaaacctaatcggaagaaactacca

SEQ ID NO: 105119 - DNA, 805 bp, Mimulus guttatus
  Intron number 1 from transcript mgv1a006155m (locus mgv1a0 06155m.g) derived from phytozome v7.0 (chr-ID scaffold_398 ; pos 63270 to 64074 reverse strand)
ttctcccaatcaaccctcgtttctcttctctcgttagtatatatacatttctctaactatattattattattatttattattataattaaatgtgtttattgcactcggctcccctgtggcatgtggaatttctgaaaaaaatactcgtgttattttatttgcaaaaacaccctgtgatccaaatgtttttagcacacaacccctaaacaaagggtactacttgctaaaataaaatattaaatcataggagttttttgccaattaaataacatgatgtggtttttttagcaattcgatataacacagggtaatagttgcaataactctcttttaaatttgtttgattgttatttatttataagtgtgattaattttagggtaaattatgagaaaaccccttgaacttaggctagataacgaaaaacacccccatcaatctgtaataatcaaagtccccctctaattaattgttgatcgaattttttaacaaaaaatgtgtacggtctattatacattgtgttaaataggtgagaaataaaagaaaatatctgaaattgtgtaaaatatcttccatggaataaaaaaatccgtgaaaagtcgcattgtaaggggttggtgtaagacgaaaacaaacatcagagaatttttggtaattacgaataggtgagggtatttttcgttatttagcttaagtttagggggttttcgtaatctacccttaattttataaaatagtgggtgcatgacaaattaaacaaaaaataaataattaattaatcaattaatcacaggtgaagggcaaaa

SEQ ID NO: 105120 - DNA, 787 bp, Mimulus guttatus
  Intron number 2 from transcript mgv1a012688m (locus mgv1a0 12688m.g) derived from phytozome v7.0 (chr-ID scaffold_32; pos 1102256 to 1103042)
gcatttcccttccaaggatcaacttcaattcaagagtaatcattttttctctctctagaaaatttaaaaagaaaaaagggggtaaatagcacttaaccccctgtagtttgagctttctgcacatgacccccttgtacttttaatataagcacataaccccctatggtattccagttggtaaataatcatgctcattaggggaagaggaaattttttaaagtacaagaaggttatgtgcttatgttaaaatacaagggggtcatgtgctgtaataaaagtacaaggggggtaagtgcaatttatccaaaaaaaatatgtgaataaaatagatatgtatagttgttaattgattctaataatctaaagtttgttaattgtttatgtactaacttacttaattgtcatgggacctggttgataatcggtccaattatcttcggcaatgcacctatattatagttttcgattttaataattttgtgaattaatttgttataagtagttcctttgtcgaattcgttgaaatataaatatcggtgtagggctaacttgtgttagttcatgacatgtgctgaaattttgaaaatagtgacaataataatatatagccttttgtgaggtcagtttgaattacggtaaaatattgtgaattttgtttttatggactaattaacggaatttagtcggaatatttggacttagttaagactcgaaaacataattgttgatgcaactacgttctgatggtgcagaatttgtggttcatctgctcgacaagactattgca

SEQ ID NO: 105121 - DNA, 559 bp, Mimulus guttatus
  Intron number 2 from transcript mgv1a022797m (locus mgv1a0 22797m.g) derived from phytozome v7.0 (chr-ID scaffold_483 ; pos 46790 to 47348 reverse strand)
ccgtttcggggtagaaatcgagattgttgttttctgatgacgaagacgtcggagatggtgtgaagctggttgagtgaacatttttgtttattttggagaagatggcttttttgaaaaggtcaaggattgaattgaatttttttgaatatagaattttggggcgaatctgtaatttttgaaatttataattagaagggcattttggtcctttcgggtttaaaatacacccagtcgcacaatccgcatgtggagcacacgataagctggcagggcccttgttgcctttgactaattttcatacggggctattgctaattcttttaacatgatgatttttagcaattttagattatacaggggtggtttttgcaaaaaaaaaaaaacataatacaatacaacctgtcggagaattcgacaaatggaggagcaccattaacatgaagatggtaaaaaatttggaggcggaaatgatagatgcagtatacagatttcaagatgtaatagaatctcatgtcttaaatcagttccactcaacacaatccgaagaagctgggagtga

SEQ ID NO: 105122 - DNA, 779 bp, Mimulus guttatus
  Intron number 1 from transcript mgv1a022797m (locus mgv1a0 22797m.g) derived from phytozome v7.0 (chr-ID scaffold_483 ; pos 47363 to 48141 reverse strand)
gaatttacaaattttactcgtctctgccaaaaaaggtaaatcaaagataactacatacatacgataaccgaagtataaggaacatatatgctagttagtcatattttcctatcggaaaaaagccgtgtttagtctcttgatttcatatttcaaagaacttaaaaaaagccctctgtttcattacttgaagttaggtgtaaaatactcccctttgacagttttcgcggagcaaaatctcaccttagaaaacacatagcaaatgaaaagaaaatcgaggattgttataagcatatgcagcctcgaaacacaatatcaaacatcaaataaaacgagaaatggagggttgcgtatttatgaaattcctcttaaaattctacatttacatggatgggggtatcttttctctgtcatgtgcggtgcacatgctgttttccgtcaaacaaccccacccccaacacaactactctccatgaaagctctctaatggtgcatcaaccgttgcacacattcgggagccgtcgtctacctgcaattgcaaacgtctggatcttgatgtcgtgagggaggtacggtggttatgatggcggcggctgtggtggaggtggttttggagtcgacctcactcatgtacgaatcaaggttcacataatttagaatcgagttttgggaggtaagctgccaaccctcgaaccccagaacgaattggagccggtttagatctattttgtgctgccgacttccaagcgacgccgtttcggagttcgagtgctggttggagg

SEQ ID NO: 105123 - DNA, 717 bp, Mimulus guttatus
  Intron number 1 from transcript mgv1a014815m (locus mgv1a0 14815m.g) derived from phytozome v7.0 (chr-ID scaffold_44; pos 282608 to 283324)
gtggagttctcgttgacagaagggcgttggtaatttttttaatttactttttttttttttttaatttctagatctctgcgagaattgtgaaatttcaattattttttttgttttgttgatatggttgagaaattgagttttcgatgttagataattaggatgtgaatcagaaacgaatttcgactctcgcagattctgatttgaattttttttttataataattttggaaccaagtttttttattctaatttccgaaattctgatttccgatttttcagaattttaatttcgttggaacggaattgaaacaagttttttatttctgtaaaattttggtattattaatgaagtgttgttatttccaatatgatccaccagattttttttttactttttctttcctaactagtcagattgcagatttaacatgtggaggggttgtatgtttttttatacttatgtattgatattttatatataattattggcaatagaactagacacttgtacagattaattgtctgattaagcaagcattatatcgtattatgaatttagtttagactttattgatgaaataaatctatatagatatagatttgctaaggaaggtccaaatataaatagacatatatggatttcttcagagtgttgatataccatccccatttgtgtgtgcagattttgcagttagaagccgaaggtatcccaagaac

SEQ ID NO: 105124 - DNA, 829 bp, Mimulus guttatus
  Intron number 2 from transcript mgv1a014815m (locus mgv1a0 14815m.g) derived from phytozome v7.0 (chr-ID scaffold_44; pos 283384 to 284212)
gtttaaatattgttaagcaggaagtaagtgttcaactctgaaatggttatttgtcaattatttaaagtgtccgtaaagtgttcacttttagatttaaataacacaatgttcttttttcgagcttaaaaggaaaaattacggattgtgaaatgaagttgttttggtttggtggtacctcttcttctttattttatttttcgctttcttagttcaactaacaataattctggatattgttgtccccttttctcccatttaatgattttaaagtgcagtctatgaagttttcgtaaaaacatttactttttggattttgtttcataagcatggaattatagttggcggctagcttttaatatctatgttgtctacttggcatattcttacgggatatttgtttggaagcatttttatttcgtttttattgattccccaaaacaaaattgtatttattaaacttttcaaatcattttctcaaaacaatttcaaaagtttctgtgactgctacagtaaaatggtaaaaatgatttgacttcacgaaaaaacagataaatatcacttcatctttcaattgttttcttctaaaatacttttttctaacacctttaaacatgatttgactcacacagtgtattttgtctccttccaaaatataagaaaacattactttcattctcagattcttctcccaaaacatatttcctcaaaatgaaatcaaaataagtttcaaaaggcttccaaacattgccttaattcttttatattattattcacttgttatgtttctgattcaggatttgctgtgccaagtcaaaaaccatcgcaacaa

SEQ ID NO: 105125 - DNA, 512 bp, Mimulus guttatus
  Intron number 1 from transcript mgv1a015076m (locus mgv1a0 15076m.g) derived from phytozome v7.0 (chr-ID scaffold_75; pos 535773 to 536284)
catagatctcgagttcgattactcgtaatgattttttctttttgattttatgaataaagcatgttcgctgtcgccgatcttctgatagttcttctcggaacagtttttgcgtattagaacagcgatttagtgtttgttagctgtagtttgtttggatcttttaatggaagtgaagtttcagaagatcaagtaatttagattactgagggtttatctctaatcaataatcctgctggagttttttttttgagtaaaattatcgttaaaaaaaaggctgaaaactttgaaaatttgaagtagtatgtgttagcaaggagggtaatagcactgataagagtggaattttattttttcatggatttaattttcaatttcgtggtggttagttagtcggggttttttttttgggtgtgttttgcttcttagtgatggattattgaagggaacaattatcttaatatgctgtttttctgttaggtttcttttgatcaaaccggcagcaaatcgatcat

SEQ ID NO: 105126 - DNA, 492 bp, Mimulus guttatus
  Intron number 1 from transcript mgv1a006755m (locus mgv1a0 06755m.g) derived from phytozome v7.0 (chr-ID scaffold_60; pos 23849 to 24340 reverse strand)
cctcggagaaactcctgcgaaaacgtattttctcgtttctctcttcatatctgtcggttcatacttgtctggattgtgattttttttttgtatgtaattttagtttctttgaagttcttgttgtttctttgatcaatgggttctccgaatttgatttatcttcatcgaatttttgatgtaaatattttaattatgtgatctatttatgaaatttctctgtttttcgtgattatgttttttttttcttttttttttcttttttaatttcgcaatactacaatatgtccgttcaaattggttgaatttgtgaaatatataaaataatatatgtagcgatttgtatattttggtgtttgttctgttatacacaggtctgtgattatgaattggggctcacacaattgcataaattagggtttgaagaacttaaccgagtgtcgttttttttaccttcaattgcagttggacagattcataccgaatagatccgcc

SEQ ID NO: 105127 - DNA, 742 bp, Mimulus guttatus
  Intron number 1 from transcript mgv1a006650m (locus mgv1a0 06650m.g) derived from phytozome v7.0 (chr-ID scaffold_48; pos 280292 to 281033)
atccaagtcttcgtcactgtccgggtgaagatgttggttatgaatctgattcctaacatgtgcacctcgggctaattccccagcgcgcgctatattaggttcgcccctcctgttgttgccattgagggcaattccctgtagcaactcccgaagttgttgcagctcacctcgaatctctactcgaaattcctctatagtctgtcgagattcttctcgagcgagcttgactgctgcctgaatgttatcaacctcgaggtcatcgccatcgcggttgtcgtctccttgtttcgcacctttcgccatctaaccaggaaaaacctcgctactgatgccaactgacgcagaacggaagcacggtaaagaattaatttctatgaattaatcctatcgaacacggtaactctggaatccaccagataattgagagaaaactcaaaaattttattaataatgaaagatgctgaaaaataaatcctagagcaactatttatactaaaaaaaacgaaaaacctaatcaaactaggaaaacgagaaaattaccaaaaaaaaggaaaaacctaatcaaactaggaaaacgagaaaattaccaaaaataaaaataaaataactcctaaacctactagaataccgaaagttggaaacaacccaacttgcggaattcaaatcctaatcaaactagaattccgactccgccacctctgcatcaggccttccggaaacaagtttctattctccaacgaga

SEQ ID NO: 105128 - DNA, 971 bp, Mimulus guttatus
  Intron number 1 from transcript mgv1a013391m (locus mgv1a0 13422m.g) derived from phytozome v7.0 (chr-ID scaffold_22; pos 366444 to 367414)
ggggtttgttttttcatgccctaattccaattttatcgatcctttattttattttttaatttgtatgttatggtggtgatttaatgcgtgctcaattgttaattatgtgaacaaaatgaggggttattatgctaattgttagagcgtcgatcttttcggaatttgttgcgttgatttttgtggctgatacaggtttttgaagctaaaatctttcgtttttatgaatccgatttttttggcttataattctagaacaactttttgcttattataactgcagctggatattaattgtgcgattactagtattgttttagcacttaacttagattttttgagggtatcgaatcaaatccttatccttttggattttggagggatatagccatctctctctctctctctctctctctctctctctctctctctctctctctctctctctctctctctctctctctctctctctctctctctctctctctcttgttggatatattgcggaagtatgtgaacaagattaactaggaaataatcgaggagtacgtatctcctacttcatattttactcttattaatatatgttaaattacaagtaaaaactcatgacctatttatactagtctaggcatatgtagtacatgcatcatattaaatatattcatcatgaatcctagatatacatgtatctaacaattcatgtatttgcctattcattatactatcatacattgtacatgcatgtggatattctagaaattgcattaatatttcaacatctctctctctctctctctctctcggagagatgattgtttatttgattcgttgttaatctttgccattttgggcatttttcatggtatattcattttcgttactggtgaaattgactgcacgagaattgagacatcaagatatattttttcttcgcagagcaaaagaaacagaagctttcggatatcaaaaat

SEQ ID NO: 105129 - DNA, 926 bp, Mimulus guttatus
  Intron number 1 from transcript mgv1a008724m (locus mgv1a0 08724m.g) derived from phytozome v7.0 (chr-ID scaffold_4; pos 371996 to 372921)
acgtccgccacaacgtggccgcgcttgggaaaaatgtatccgctctttctctttaaatctctgtattctgaatttgtcgattttcttcggatgtggcagatagaaccaaaaggcttccccaatttgataatattcttaggcctcgtttggttgataagataaatttagccaaaattagactaaataatcgtatctaaatccaattgtaacattggattatgggaggtccaataagtaatctcttaaggcctcatttggttgggagattagccatgattaactaaataataggattttatttgatgtttggtatcctcaataacttgccaggtcgcaaccaaacgaggcctagaaggaaacataggaaacataggacatgataaaataatatttccgggtcgacctggaaaattattgggtttagcaaacatcaaacaaagtccaattatttaactagtcataactcatggctaatcctcccaaccaaacgaggccttatagttatacgattcttgtgcacagtattcaaatatctcatggttttataattgatttaaatttcaatttgtggcttcttttgggcatggctttgctagagttgaaaattggtgaagttggatgagttatctaataagcactcgactattgatataaaacattacattggataatgtcacttggttcaataatggctaaaaattcttacgtatatcgagtgtactacacacttttggtggtaacgaggtagtgaattgcgctaggtggacctaagaattattccatttattgagatgtattatcaagtgcttatcgggaaactaagccaacttttccagtttgaactctatcgaaatcgtgtcccttttgccacattcattgcttgtgttgtaggtagcggaatttgtgacggcggtagagcaggaggg

SEQ ID NO: 105130 - DNA, 650 bp, Mimulus guttatus
  Intron number 1 from transcript mgv1a008135m (locus mgv1a0 08135m.g) derived from phytozome v7.0 (chr-ID scaffold_64; pos 301014 to 301663 reverse strand)
ggaaatttccagctttctcataggtacaatacaatcccaccctttttaatcttttaacttttaactcaccgaggatttcgaaatgtagattaagtttttgttacgggaaaccctcaattgggattcttagtctgaaaggcaggcaatttgttacatcttatgtattttgtcatcatgtttagttttgtctgtgattattgtttctagtcggtgcttaattagtttgatttttttatttttttttataattagcagataaaaaatatgtgaatttgattttcagttcagagttcagacagatatttagttaattatactcatgataattagcatctgttcttagtttacattcccatcagtgtgaaactgtttaatctagcttcttctgcaagtttcgatcactttcttgacggaaaacatacatgtatactatctcgtttcttcgtttcaaagtcgctacagttttcgtgcgaatggcctttgattgatagcagttttcggttttggtttgggctctaaaaacgacaataggcgcaatagatatcgtgttagttattcgtacttagaatctgtaaatcgtaatttcccgagttaattacatttatgatttcacagaattgtattggcaccgctgactaggcaaagatcgt

SEQ ID NO: 105131 - DNA, 820 bp, Mimulus guttatus
  Intron number 1 from transcript mgv1a025407m (locus mgv1a0 25407m.g) derived from phytozome v7.0 (chr-ID scaffold_15; pos 678189 to 679008 reverse strand)
gcacctggccgagcctccaaggtacattttttttggctcaactttttccctaaaactatccagtgttctaaaaatcggccgaggcgaccgattaatcggtcttcgaggcagagacggaccaaaacctttacgattttagtgtgaaggtttgaaaaatcgatcttttgccgttgaggcagtttgaggcggtctgaggttgtcaaacctttaaggcgggtcaaactcggtggcaaaaatctgcaaaaaatcgattttttttttttaataattcaaaataaaagttgggattttaataaaaaaaatatgagtgtatgctctattttgatgttaactattattgttgttaagaactaatgatgtatgccaggaatgttcaagaataaatgtaaattcaaaagatttgcctttttatttatattttataaggatatttatgtattatgatgttattattattaaacttttattatgttattaggatatatacatgtggagatataactatgtttaaatatctttttttagatatattttgagtatttataaataatatctagaaatatattatattaaattttaaaaaccgatttattttatgatttatcacagattaatcaccaccgcaccgattaatcgtgagtcggtgcctgatcgcctccgacccgattaccgcgctttttacaaccttgaaactatcaattaaagataatttgacagtactacatttttcgatttgttacgaaactcacgaagcttgtttaatttggggcattcgccgttattttgtacccactaaaccttgtccgcaatttcctaggat

SEQ ID NO: 105132 - DNA, 407 bp, Mimulus guttatus
  Intron number 2 from transcript mgv1a014416m (locus mgv1a0 14416m.g) derived from phytozome v7.0 (chr-ID scaffold_178 ; pos 42816 to 43222 reverse strand)
attccgtgagtcttgtttcttgaatttctctcttttcacttgtttttttttttttttttttttaattagatttagttgttcgtgatttttgtttatgcttagctaattacttgagaaatacatgcttacgatgtttactgcaccggccgggaggtattaatttttgatattaaatatgttgcgaaatggatagagggttttggaaattgtgcgatgttattttgcacgataaatgtggatgaattttccatctactcagttacgatcttcttttagctttgtttacttattgatttgcttgtttcgttagggcagggggttaattaattaattcacctcgtcttgaaaatcctaatttaaaaaaatgttggtgtgttatttgcagccttcggtgagaaaacagcata

SEQ ID NO: 105133 - DNA, 262 bp, Mimulus guttatus
  Intron number 1 from transcript mgv1a008078m (locus mgv1a0 08078m.g) derived from phytozome v7.0 (chr-ID scaffold_16; pos 688475 to 688736 reverse strand)
ctgtttgattttaggtactttttttttttttttttttgattttctttcttcttgtttttttaattggttgtgtgtatgtgtgtgtgaatttgtgggttatatgcggtttatgttgttatgtacaatgtacccaattttaatgtttatatttggttgtgtgcatgtatgaacaattgacaattctgccttttgggttaatttattaattaattaattgattttttatttatttatttatttttggtgtgaattatacagatta

SEQ ID NO: 105134 - DNA, 645 bp, Mimulus guttatus
  Intron number 2 from transcript mgv1a010464m (locus mgv1a0 10464m.g) derived from phytozome v7.0 (chr-ID scaffold_13; pos 1442661 to 1443305)
attggaagtatattttaggaggtctcatttgtcaggtttgttcatacatactatgtttatggttgtgatctctgtctgagtttatctatgctatgtcatagatttataatgcatggtgaaaatgttgtgttatgtagtctttactgaaattcattactatcaagaaccggtactttggaaaatgggatttcgattgtgataattacttattgcttttgagctgtcgacggttctatacatcaaatttaccaatctgagttaacggtcgaaacccgcaaaaaaaaaaaaaaagaaaaaaaatcggtgaaggaaggatttcgatttcgctgttgtgggttgcatatgaacaagtaggataataggatattagatatagttatttgtaattgtattacactcaagtagttatggatttgccatgttgtttaaatatggttttaaagaacctttgctaaatgttataacatagtaactagggactatgatttgtcgaatgaacactctgtaatctgtatagggagtctgatgcatccttgttcttgtacaaaagtcgggattttttctcgggttttcttcaaaatagcatttttattctagattctaatacgtggcatcgtccatatttttcctgtcaatagtacattc

SEQ ID NO: 105135 - DNA, 774 bp, Mimulus guttatus
  Intron number 2 from transcript mgv1a014836m (locus mgv1a0 14836m.g) derived from phytozome v7.0 (chr-ID scaffold_781 ; pos 3947 to 4720 reverse strand)
tgtttatcaaactgagaatactactcgctctgctggtaataattaatttcattcattctttatgtaaattacggccacccttgagataaagttaaattacggaaaaactgaccatgtttgggtagttacagtcaactcatcaactatgaatcttcttacacatccacacttatggtgtcaaattcagcaatatcttctagatagtgtgaaatgttctctagtttgtactcgttttgtaaaaaaatgcagcttctgatacaccacaatttgattttttacaagttaagagacacatcttattaccatcttgtttcaaaatgtggagctcgaatggtgtaaaacgagtataaattagagaatattccacataatctagaagatttcactatatttgacgttgtcgcaaggatgtacgtgtaaaaagattcatagttgaggggttggttgtaattacccaatcataatgggtttttctgtaagttaactttatctaagaggctgaccgtaatttgcacttcattcttcttcttttaagctacatattttcgacatttattaattatttttttgttttttttcataagatcagccaagtataatatttttattaaagaagagagagacttcctattgaatttaattagtgacacatatatacatatcattacttgaaccatacaacataaagaattattactctatgaaaaaagattcatttaatttatgtaagcctgaattagttgcttatttgcaggaaagcaaattctggtgagt

SEQ ID NO: 105136 - DNA, 629 bp, Mimulus guttatus
  Intron number 1 from transcript mgv1a022802m (locus mgv1a0 22802m.g) derived from phytozome v7.0 (chr-ID scaffold_701 ; pos 5701 to 6329)
cgactgtcgctgagctgctcgacatagctgacaaggtggggattaaaaaaatatatatattctttcgtttttttgttcacatgttggtgctatttttatctttaagggtaaattacaaccacccgaggtatggccaaattacgaaaaaacccctcttgtttggataattacatctacccctcaactatgaatcttcttacatctccacccttatggtgtcaaattcaaaaaaatcatcttgattccttagaatgttctctagtttgtactcgttttgtgcaaaaatacagtttatgatgcaccgatatttacaagccaagagacacatcttatgatcatcatagcttcaaaatgtggagttcgaatgggatcaaactggtccaaaattgagaatattccatataatctagaattccactaaatttgaaaccgcaagggtggacgtggaagaagatttatagttgaggggtggttgtaattacccaaacaggaggggggttttcgtaatttcacatacctcaggggtggttgtaatttacacttatcttaattacgtttatggttaagttattctacttgatgatgtttttttttttgggataatattgcaggttggacccgagatctgc

SEQ ID NO: 105137 - DNA, 566 bp, Mimulus guttatus
  Intron number 2 from transcript mgv1a015154m (locus mgv1a0 15154m.g) derived from phytozome v7.0 (chr-ID scaffold_65; pos 22178 to 22743 reverse strand)
cagaggttactgcaataagagaggttagaatagaattgtagccgcacccgaatttatactgttcgagatggtttctgttaaaaatgcttgctattattcaataccaaactgacttcaaaaacatacacgaactcaaaattaatgttgaaattggagttagaaaacaaaatgctgaattggattagtagcaaaaggagggaggacagaaatcttatagaaaccttgtaccaattcattatactggctttcttttattggagtgggatgaacggtggccttatagaggtcgtacaaacattagtcgtaatatttcccgatgtgacttgatcattttcttctttttgataagaagagtcctaaatcgattaatgtattggataaattacgtgaaactttttgacttggcatttcttcttgaacaatgatgcatcgatatgtgattatttactgaggttattttatgtgtcacctttatgtgaaatttatcgagagggagcaatccacttatttaggcttatcatgcattctcaggcttgcaagaagctgaacaggattgagctctcgga

SEQ ID NO: 105138 - DNA, 826 bp, Mimulus guttatus
  Intron number 1 from transcript mgv1a015154m (locus mgv1a0 15154m.g) derived from phytozome v7.0 (chr-ID scaffold_65; pos 22877 to 23702 reverse strand)
gaagctgcaagttagcctccctactttcaaaactctttgttttatcttttcaatgattttttaaattgttttttttttcaatttcatgctggtttggggttgatcgcctgtattttgaatattgtgggctatggtgatgatcaagatgcttgggttgggttatttcttgcatgtatcatctaatttttattccaatctggtctagtttcctatttctttcttctgtgtactacactaaattgctttaaccaatgttaacatatgtttcatctaattcaaatgtaattcgttaaagctctatgaattttgaagtaatgaagaagtattttaaaaggatcgacgaaattgtgtagacactatactatttgtttataataaaggcaagaaaaaaaaactgactgggcagttgggaatgacttaaccagttgctgttacacaaagtacggcactcgattaagtggaattgtgcattagtacaattttttctacatttttctctttgctactaaatgcctctttttttgaagtataaaaataaaatatcttgttagtggcactgacatgcaaaatatcaaagctaatgatacattctgtccaaactctttgtaatggatgattatatgttgaataaattgttgttcggcgttcttagtacatgactaactgtttgctgtagtctcaacttgtaaagcaacaaattttcatgccttaacgattaatgtgatagtttggaaaagcaagagtgtaaattatgaatgaatagtaacaatatattttgtaatgggcaacagctgttcaggatagagatcaaaaattcttgacgaaa

SEQ ID NO: 105139 - DNA, 819 bp, Mimulus guttatus
  Intron number 1 from transcript mgv1a012883m (locus mgv1a0 12883m.g) derived from phytozome v7.0 (chr-ID scaffold_193 ; pos 127346 to 128164)
ccatcgatttcctctctctgtgccaccgtctcaaggtaaccaactgcgcctaaatgctaatcatgaatgtgcgattcaattctatgtaatggttgtttggaattgaaatctggtggcgagtttaatttatctaattttacacattttttttctgagttgttaatggcgtgctgtatgattaattgattaacattggtgaatcctgaaagttttgttattctttatcaacgagaaacaaatagattgaattcgttattgctaattacgcttttgcgttcacgttgataaatcggagaaaaaaacgtgacatatgatttggtttgcggatgttctatagttaaaagcagccgaaataaatgaagagaaagtagagatcaaaaaagttaccatggcattggcagatatacacttcattttattgcaccgatcatttttattcgctgtcatccatcttttattcctctatgattactgaatttggattcttaagtacgaagtacgtttatactgggttaaattcagcagagatagactagattagttaaggaaactaaacattcttgtatccacattgaatcctcttccgtctatggtgattttgcatataaatttccatttaacatttagcaagctcgttgcagttattaaattatctttgtgtcgcctttctattttggtcctgtatattttccggtctatgtgcagttgtttgcgtattagagtttatatgattctgcggacactacaccttctgaatgtttgtttaaatgtctcacttagtcgagctttgcaatcttactagacaacaaaacgagcagg

SEQ ID NO: 105140 - DNA, 949 bp, Mimulus guttatus
  Intron number 2 from transcript mgv1a006729m (locus mgv1a0 06729m.g) derived from phytozome v7.0 (chr-ID scaffold_41; pos 1535614 to 1536562)
ttttcttttttcccacatcaaaggtgggttctttggtaatttctctctctctctctctctctctctctctctctctctctctctctctctctctctctcttgttgcatgattgtttaaatgcttatagttttctgggttttctgtgaatttgacttttgttttgtgttccccaattgcttatatgaaattttgtgtgtgtgtttatttttatttttaatttttaatttttttgatttaatttttttggggtgtttggataatggaggaaattatgagttaaagatttgatttttatgagtgacagactttttaacaattgaattagtcaacagggttgatctgtatgttttaatctcagatgaggggaaaaattgagttaagaatttagaataaagattttttttttgttacaaaggaaagataacaatttgcaatggagggctttcacaattcataatccaattctattagggttagtaatgattatagaaaaaaaataaaaaataaaaagaagaagctttctagaattactgcccggagtgtttcgacgaaacgtggcttctgtgaggattaatgcccagctattacaggctttatgtgggcgtttatggtggtcaatttactcgattttacggactttggtgtcaacttataccgaaaattgctttgaaatatattatagcttccttttcattacaacggcgaattcaagaaaataagaagcaagggtaaataattattcatatctacaagaatgtagtttagttgcaatcttgaagtgttatataagtttattacaaggattctcagcttacttttcctagtctttataatcatttcggtacaagattcaagattcttgctttacgttctatttgattaaacttttattcgtaaatgatgttattctaattatcggtttacttacgtgacaatttattccagcaa

SEQ ID NO: 105141 - DNA, 830 bp, Mimulus guttatus
  Intron number 1 from transcript mgv1a021416m (locus mgv1a0 21416m.g) derived from phytozome v7.0 (chr-ID scaffold_109 ; pos 58972 to 59801)
gcaagtatgaagtcataaaacatcaaaatagaagaatttacggtggaaaaacccaagaaaatatgcatttatgtgttttttagctagagtatcgtttttttccaaaaaaaatcccgcacagacgcagtcgacatgtacatgtcgaattttataggcaaaaatcgacattgagatgtcgatttttagtacaaaatcgacaccttagtgtcgaaatttaactgttagcaaagtagtccaaatatactaaatttcgacattaaggtgtcgaatttatggacatatattcgacatcttaatgtcgaaatttagttgtttcatatttaaaaaaaaaaaaaaaacttccgcgcagacacagtcgacatgtacatgtcgaattttatagttaaaattcgacattgagatgtcgattttggagtacacaatcgacaccttagtgtcgaaatttaactgttaccaaattagtccaaatatactaaatttcaacattaaggtgtcgaatttatggacatatattcgacaccttaatgtcgaaatttagttgtttcatatttaaatggcaaaaaggcccatcacatgggacttaaatgcattttagtccacaaaaaaaacggtctctcaattaagcccatccccatgtctttagtctaaaataccctcaataatataattcttaacaattccacccattatgctctaacttccttaatattacacattgaccccggatttaaacaaatatatcacattaacccccaaaactttttttttcagaaaataattttttttggcttgtaggtgctcatactcttggaacttctcattgtgccact

SEQ ID NO: 105142 - DNA, 1002 bp, Mimulus guttatus
  Intron number 1 from transcript mgv1a008490m (locus mgv1a0 08490m.g) derived from phytozome v7.0 (chr-ID scaffold_73; pos 1042847 to 1043848)
ctacttcatttctaggttttgttcaccctgtcaaggtatttcatttttgaccgatatattcctccaatttattattattgtgtgggtgtgtgtgtgataatatagtctgagaaagttgataattttgcagcaatggtccattatttcattgcatttgccaaggttatgagttttactcagtactcacttgccaaataagggctagttttaacaaattttgagctttttgctcttgatttctcagacaatttttaaattctttgccaaaactaagtaaaattacatgtcgccccctactgcttttgctctcgattcgattctcttgggtggtgtttgcaaaagctttttaaaaaagtagattatagttagtgattgtgagcaaagttagtaataattgcttattactaaaagttgggggtgttttaatccaagttaggattatttttctttaatgatttccctatcagatggccttttaaactaaatcagataggttcacatgcatatagtctgtatttacatatgcttgtattcctacggtaagaacgcagagtttgacgtagacggtgttcgatagacttcaattgtgtttttttctttcggacgaaacgttacgaaactcgcttgttaaccttattatgttgttccccttcatgaatcttgctgtcaggtttcctattaggaattctacatcagggtgataagcgcacagttttcataagggatattggacctatgggcatatggcacttcaaatttatttttatacatttttcgtgtgcatttattatacctcataatatgttgctacaagtatttagttctatcttttctgctaacaattcaattcttttggctctaattttcatgtggcattttagcaaacagattctctgcatgtaaaaacataggtctgtctatgtagttggaaaacagacttccactaagttgttctaaaattccagacatctttttttcttttttttttgtgcagtttaaaaa

SEQ ID NO: 105143 - DNA, 645 bp, Mimulus guttatus
  Intron number 1 from transcript mgv1a014214m (locus mgv1a0 14214m.g) derived from phytozome v7.0 (chr-ID scaffold_66; pos 228080 to 228724)
gtgcacgtctgtgtttatcgcaactgtaagcccgcgtttcttcatacaatttccaatacctaaatgtattcgtttttttttttttgattcgtagtaatttgttaatgttgctgtttctcgcacttctggccactatttcgtagctgtatattctcaaaatcatgtactttctcctgatttgagattttattttttgttaattgaatatatatctattttatatggagtgatctttcaggcttcagctgattcctgcgtattgttttcaatttgccctagaaattattttgtttaggttaattcgttttgattttgtttcattagcagataacagagtgtaggatagattatatagcacatttattggaatataacactgcaaaatattgactgccgttacaaagatcattttttgatctgaattattatttgttggagcactctctttaaatttctatttgtgtatagtttatgttcgtagtttgtttgctatgtgagagaaaatggaacgtacatttgaatataatgccatacatttgaatcgatgcctaaaataaagtgataattatatgatatggaacaaaataatgaacaaacaccattaacgagctattgtgaagcgttattaacatgtgctttctgcag

SEQ ID NO: 105144 - DNA, 657 bp, Mimulus guttatus
  Intron number 2 from transcript mgv1a007176m (locus mgv1a0 07176m.g) derived from phytozome v7.0 (chr-ID scaffold_396 ; pos 7612 to 8268 reverse strand)
gctctggtgagtttacaccttttaacaaaaatatttaagtgacgtttgttgcagaaatttcgaagcattcgccttctgattttatgatgtgaaaaaaaaattgattgataatctaggaatctgcagttttctttgtctatttgaaataagtgaagtgtttttttctcaatttcaaattgcattggtgcttgtttaaatggcagtttgtatctttaattttgaaccaacttcggatttttagttgtgacccagcgtgcatgcttcattctcgatagctatgttagtatgtgttttggtccttcagctcagaatttgtatcttacaaagcacttttatttctcctgaattaactttgttttgtcttggggctttattttatgagcatttgaccggatattcatattgagtcagattgaggcagtatcccttatgttttgtaggatatgggcatgattccttgtattttattgttgcaattttcgttagaaacctgatcatttgatcaatcacttaaaattggaattgctcttacagaactaggaaaggtcatcaatataaagaagtgtgaagaatctctctgtgacaacaggcaaattatataataaatgcatccaatcccggttgttgatcttatttgttcttatatgtaggttttac

SEQ ID NO: 105145 - DNA, 936 bp, Mimulus guttatus
  Intron number 2 from transcript mgv1a016234m (locus mgv1a0 16234m.g) derived from phytozome v7.0 (chr-ID scaffold_125 ; pos 768425 to 769360)
ctggcagaattcgcattgactacactcagtaagcaactaatttaatttaattaatctcctcttgttagttaatcttagggttaattatttttttttcatgtaaaaattaattttgcttcaaaaagtcagtgttcatttgattatatcgtagacatcgaaattttgaataaattactaattaataaacaagacaaatctgacattattttaggtcttagattaaagttcatattggaatttaaaacgtctagcccagtctaacggtctctctcgacatctgtcaagaaaccctagtttgcggctataaaagaaggtattcggtgcataaaaaaattagactcacatagagacgagctatcaagctcacgtctcgagcctccgcctcgaattcataacatatttgaatttgaggtgtttaaacagtagaacctcgataaattaataacatcgcttaaataatagtttcttctggtcccgattcagtaaaaacctactccattattagtttgataatttaatatttcgctaaactaatagaattttgctagtcccgactgtattaatttataaaggtttaactgtttatacttatttgattcaagaaaaagcttctaagcccttgaatcgattttagaatagaagagaagaatcgggggaattcccagagattgtaatccactttcgttttcattaataaatttatcgggtttcctatttgtctttgtatttatatattttgcagactcgagaaatttgtggtttacacatatatatatatatatatatatatatatatatatatatatatatatatatatatatatataaaagattattaattgcccaataaattcatacaattgatgcttagaccaacgctttacatatgctaatgtttattattcttgaaatttgcagggtctgattaaggggacc

SEQ ID NO: 105146 - DNA, 931 bp, Mimulus guttatus
  Intron number 1 from transcript mgv1a007637m (locus mgv1a0 07637m.g) derived from phytozome v7.0 (chr-ID scaffold_123 ; pos 115318 to 116248)
gaatcacaaagaattagaaggccgcgttcgatctggtttgcaattctgaaaaccctaattttccattgttttatcttatgtaatctcagaactgtgctatttgagttttttttttctttcgatctacgcgttgctgtaaattttccgtggttcgttctacttactgcgttttgtgcttgtgtttgattgaagtcataatttactggatctagttttactgctagggttttgttctggtaatggacggtgagataagaaattatgaatgtcggaggattttatttatatatatatatatttttttatagagatgcaaatgtataggttttagggttttagaattatctgataaggtgttggaagtagtcttcatttcgtttactctaaaaaggtatgttgttgagtcgtaaggtattaagcttgatattttgaagtaattggggttttcaattgcgatttgtagttctttttttggctgcaatctgagtctgtgactcttactactcagtaagccggtcttccgagcgatttcttggaacttgttagtcttatgtgaacgtttttctggaattgtttgctctgatttatttcaacgtaggagcattcttagtaattagtaacaaatgaaaaggcgaaaagacgctgtatttaggcattatatgtttccccattctttttcttttttcctgtcccttttcataaggtttggggtgtggcggagctgtttccatggacattttgaataaatatgctgcattctctttgttttataatagatcaaatctaaaccgagattaattgggcaacatttttagctctatgatatgtaatgtgaccgacttcaagtttgttatactctattgttatgactaaagggcaacgtgtgatttgtacagttcgggagaatttaagatctacaaagaaggagtat

SEQ ID NO: 105147 - DNA, 225 bp, Mimulus guttatus
  Intron number 4 from transcript mgv1a001028m (locus mgv1a0 01028m.g) derived from phytozome v7.0 (chr-ID scaffold_75; pos 430594 to 430818)
gtcatcccggagaagacttctccccaactttacaggtaccttattcatatattattctattttcttttggattttgacttcttagagtgtataatatggtgatttgtttactatcattaatcttattttcatgtgattgttctgttgctcaattagttactgcattaactaatcttaacggcttgtttcttggcagtataattgacggtcaagttaagactgtag

SEQ ID NO: 105148 - DNA, 861 bp, Mimulus guttatus
  Intron number 4 from transcript mgv1a015572m (locus mgv1a0 15572m.g) derived from phytozome v7.0 (chr-ID scaffold_185 ; pos 162905 to 163765 reverse strand)
tctctgcagaggtttctggagaagcggagagaaaggttggtgtttgtttcttctttttaatgtaatttccatgcttattttttttagattttctttctaattattttctttaattttattttgtaaattggtcaaaactttgaatataattttctataaacattactacattatgatagcaattatccacgtgtatagagattgctgttgattgagttcaatatatatattatatatataaactctacgtaagccgagatgcctctaccttttttctcatttttaaataattaaaatagtactaaatttaaatcacatgagtaaacaatgtgagaatcctcaggctggctgctaataaacatgatttgactcaaaaaaaaaaattgtcttcgtaaaatatttttaaaaattttatccaaaaatattcaaatgttactctttaatcataagaaaaataattcgacttgtacagtaaaaaatgtatttactaagatacaaactaaattcacttttatctttcaaattttccttacaaaatacgttttctcaacatcttttcagatatgatatgagtggttatattacaaattgtctcttcttaaaacacaaacaaacaaataatattttattttcatttttttctcttaaaacatttttttccaaaataaaatggataaaagcttacgccaaattaatattagaaaaaagtttgaccctgacctctttttcctataatcttttattttcttttcttatttattttttggaaatccaatttgtgtatttatgattattagtaatttattgtagaagggcagtttaaaatataaaaatattgaattgatttattgcaggctgatt

SEQ ID NO: 105149 - DNA, 807 bp, Mimulus guttatus
  Intron number 1 from transcript mgv1a021756m (locus mgv1a0 21756m.g) derived from phytozome v7.0 (chr-ID scaffold_69; pos 964760 to 965566)
ccgttggagcagctgcagcaggtactctgcctataaaaaaacatataacacacactcaggaaataaggaagaagaaatagaggaaacaaaaagttataatttgatttagcctattaactattcaatgattttcttattcttgttctgaggtctcccatgtgaaacaatgggtcaatcgctttgtcttgtctgaaaatggatgttattaattaaactagttggcaatcaagaaattctataaatttcaaattacaattctgtaggaacaatccataatgatttttttgggtatggcattttagtctgtccgggaaacaagtttatgtataagaaagagtaaacgctctactactatattgttagtttcttgctcaagttcaacagaacaagatgttactagatatcacagggccaaaaaacactcttatttatctgttcctcacaggctagtttgcttaagcattatacatatttttcccaataaaagctataaacttttcctagttgtataagtgagattttaaaaaaaatttaagcccacaaaacttcaattttcaagaaaggaggaagaacattgaaatattaaaattttctaaatattcactcaagatgtggctgtatctactactattcagttctttacatggaaaaattgtgttgaagtactagctgaaatattaccatatactgggaaagtgcaaacagattcaagatgcaccttccagaatgtaggcaatcgactgatgaacgttttgttgcacatgaaatgcaggtctggacctactgaagaacgttgaagtgcaagca

SEQ ID NO: 105150 - DNA, 1014 bp, Mimulus guttatus
  Intron number 1 from transcript mgv1a025249m (locus mgv1a0 25249m.g) derived from phytozome v7.0 (chr-ID scaffold_47; pos 215441 to 216454)
cgtgctttcttctgcacttcttcttaatccgcacggttgtctggttttacagtttatatatgggacggctgtccgaagctctttgtagtcaactttggccggtttttcaattcttgcccgttttttatccgtttttttaccgatttttcttccaaacgtccgatttctcaactcgcacctatatagaacaagtcattaagcactataaactcaataaaatataacaaaaaatcttgtaagagaaagtaattcgagtgtaaaatctagattcaacaggttcctttcattacattttttctcatcccactctcacaaaaaaattgtaactaaagatattaaatttggagattttcagaaaacataaaaccgaaaagaaaaagaaatcaaacaaaaaggaataaaaagagcaaacgcacaaaccaacaaggaatgaatgaagaaaataaaaacaacagcaaatacacgcgcggcaaacaaatgaaagaaaaaaagcaagatgttttcccctctttctgttttcataatttctaaggtactctgctgattgttatagttccaccccggttttctcgtattattttttttgttttaaatctcagtgtctgttgcgtattgatttttttgttcagtgtattttactttgcacaccaagtgtttgtagatatgtcacttcgacgctcaaattgcatatctttgattttttccgacagtgcttttgagtttatcacaatttgaatggctttattgcatatgtttggttttcatgcaggttcgtttcattctgcaattaaaaatgtcatactataagaagacaagcacagaattgacttatctacagaaggaaaatctctagttagaagtgaagcaagattctttatctgtttcatggtatgcgttttccagtcgtttcatcgggtcccaacctcagcaatgtgtgtcgtaaattaaaggattcgtcgtcaagcggcagatggaaagaggtcctttctcactacagagagataaaacaatcag

SEQ ID NO: 105151 - DNA, 501 bp, Mimulus guttatus
  Intron number 1 from transcript mgv1a013834m (locus mgv1a0 13834m.g) derived from phytozome v7.0 (chr-ID scaffold_83; pos 473364 to 473864)
gcgaaatccgtgaattcgtcttccttctaaccctggtaaatttctcaatctaccaaaccctaaatatcagttttttttttaatcatacagttcgaaatcctgtacgaaattcgtcaattcgttttatccttttgttaattttaaattttcataacattaaaaaaaaagtcgccatctttgatatgcggttcgaattttgtcgaaggattgattgcattagtggaaaattaggtgctaattttgagttgaatttcctctcctttttattgtttaagcggaaaatttatgtgctaaattttgcggatttaatgttattgaaattatgaactgataatctattggagattcttcagtattacctatgtgtttgtattgagctttttgttctgtttatattatatgctgttttgggtataaaatttattttccaggtcttaaacgatttaccgttattgattaatttcaggtttctgtattgcccggttctcgtgtaccaaatcg

SEQ ID NO: 105152 - DNA, 817 bp, Mimulus guttatus
  Intron number 1 from transcript mgv1a005399m (locus mgv1a0 05399m.g) derived from phytozome v7.0 (chr-ID scaffold_89; pos 498592 to 499408 reverse strand)
agctcaaagtattttccggcagcgaaatcagcaaggtgagcaccgtcgagaaacgactatcgatttgtattcggttaattaatacgaattgaattttctctttcgtcgaatactataaactcaaatggcatgtgtgtgtgaattatcggatatggaattttttttttaagtgcgttgtttgttgttcgtgtgtttttgtttcataaatcgattcatatgccttcccatgtttatttgcgttgtctgtatatatatattctaggagctgatagttgaaactcgtgtcattctctgatctaatttgattcgcccaaatcgtgtttgtgacataagattagctcctggatgacagatgggagaaatattaatgttatccaagtcagatttctttcaattcggttgcgattcggttgcaaagaagggttatagatatatgtggcagtatgtatgtaattttttttgtgaatataagtttattttattttatactatcaatatgcttggatgttcttgctcttgaatgtttaacaagtgtagtggatatgtgcgtgtcttatatgattatgattctcgggtttgatgtgcccacgaagaatgaggacttagtcttttaggttagatctggatgtgaggcaaaagatttgaggtctatctaatcaaatttaatgaatttatttcttggttttgaatccttaaactcaaaatcgctcgatgtaaaaacattcttttactgccctcttgatattgtagatgcatattataagtagttcttggataactagaaaatatttgttttacttctgtttgatttcagttc

SEQ ID NO: 105153 - DNA, 511 bp, Mimulus guttatus
  Intron number 1 from transcript mgv1a013446m (locus mgv1a0 13446m.g) derived from phytozome v7.0 (chr-ID scaffold_1; pos 1171770 to 1172280 reverse strand)
cttccttcaccgtcaacgccgttaagtctgacaaggtttggtttttctttttttctaaatatttttttgttcaacctaatgtttgattcttttttctgggtttttttttttttttttagttttacattatgaatatttattatcatttctggcagtgttaaaaattgcatctttaatataaatattgaatctttattgcattgcatgcatgttcttcctactaatcttgcattgatcaaaccacacaagttgttaaagttcttgccattaatccaataaatggatcttatttagggtatcgtttattccgtaatttttcgagcatgctcgaaaaatcttggaattaaagaattattgagtgctccaatcttgatttactattaacttggccctaattgaaactgcataaacaaacaatgccttagtatatatatagattttgtacattcataactcctctagtataatttgtgcagccaactttccaagtggtccagccaatcaacggtga

SEQ ID NO: 105154 - DNA, 520 bp, Mimulus guttatus
  Intron number 2 from transcript mgv1a009787m (locus mgv1a0 09787m.g) derived from phytozome v7.0 (chr-ID scaffold_204 ; pos 434894 to 435413 reverse strand)
cagtggctgaaaatctattggatcgattggaggtcaaatcaaacccttttttattattttttttttgaaattatttttggacatttgatctttagcaaataaaaatgttgagcaaatgatgttttgagtttgactatgatttaaattgtcattatttttcgaggttgaccttagtgtataaagtaatcaaaaagatactacttttgaatttcaatcaaaatatttttgaatttcatagtatgatagtgtagctaattcaatcaaaatatttttgaatttcagtttctgttaagtagaacaacagaaatcgaatttgatagaagaaattcattgaaaaaaaattagatgaccctaataataattgtattggttattggacgaatataaaacagattctcgaactgatcgcgcctggtgtcagtaaactgactgtatatgtatcatggttccagtatattcgttgaccattgttgtgttttcttacattgtaggattgtaagaaaacatttcctacagcatt

SEQ ID NO: 105155 - DNA, 589 bp, Mimulus guttatus
  Intron number 2 from transcript mgv1a008650m (locus mgv1a0 08650m.g) derived from phytozome v7.0 (chr-ID scaffold_7; pos 2470488 to 2471076 reverse strand)
gttggcttttcgataccaaagctattgctcaaagggtaaaaccgtaaaatacgtattagatttcgatgatttctgatccgattttaattttttggaattatttctataattttcttttttttttcctttcgcaaattacacttgtaaaatcactattatattttatgtattttatattgtaaatgactaattaatacaatgaaatttttgaattctgctaatccgacccgaaaatttccaattttggaacaattttattttttaatttcaatttccaatttttatgggatggaattggaatggttttttttcttctgaaagtgatattttcgatccggtatgttcgattttcaccctagtatagccgtttatttgtattttaggcgaaaatactaattattgtatcaatcaaatcatgtctttaaataagagatttgaaattttcttttcttccaaaagatattgaagtccaattaggtagttttgcaattttatttttatttttatttttacttggcctttacaagagatatataatagttatttattgccatataataaatttttttgtagtgtggggaaagtagca

SEQ ID NO: 105156 - DNA, 514 bp, Mimulus guttatus
  Intron number 2 from transcript mgv1a015387m (locus mgv1a0 13328m.g) derived from phytozome v7.0 (chr-ID scaffold_4; pos 2765619 to 2766132)
gaggactggggtatctattcacttcatatctgtttttatatttgctgcactgatcagcttctttagtttgcaaataactaggtttttgttcttgagccaacagaaaacttaatggatttgaaattggattgtgtctataaattattctctagtaggatatatgttggattggtttagactccgttctttgcgtcagctgttttattgaatttataaaagaattcatgctctctttctaaagatatgattttttgaagaatgaactagtgcagatttttacgactgtcattattatttttatatcaaaacgatctatttttgccttctataatacatctgaggatatctggtgttttcggtttgaggatccaaacccagttcagcacaagtgttgtgttttcgaactagataatatttacagacccttatccatctctccatatcttaatttagggagtacctcaattattttgcaatatagttagattgtaacaaatgtatggtgtttcagaag

SEQ ID NO: 105157 - DNA, 876 bp, Mimulus guttatus
  Intron number 1 from transcript mgv1a005536m (locus mgv1a0 05525m.g) derived from phytozome v7.0 (chr-ID scaffold_22; pos 268550 to 269425)
tttgatttccaggattacagacgcgcgatcaagaggtaaaatatcttccattattctttttccgatttcggagcttcattttgtgtgtagatgacaaatctcattgatttgtgtagaacgtatttattcagacacagctgtgtgtgttagcagatgctgattcgtgattgaatttctgtctgcgtgattatgttcgagtttaatacttgttgatctgagacgagcagtcggaaatttacgggatctttgttgatttgggtttttattttaattttattgatttgatctctcatttgatgcgtaattctggtgttagttgttttgattgcgcgaattttggtagatctatgtgaatttgatgaagtatagcatctgattcgaatttttattcatgtgtggttttacgtaaattaattgcaagtagtggatttggagctgttgtgtgaaagtgggctgtgtatgtgatagatctggtaaaaaaaatattgtaatttaacctgattaatttctgattagtgtgaaaaaaatggtggtgtgttggtttcgtgataaattttgtgtcttcgaggtgtcgtggttttgttctttgttttggttccaacaaatcagatctgatttccgaaaaacgatttccttacgaaatactatgattctatttcgattgtatcattaacaaatgatactgctggagtgaatgacttttatgatttctttcgtgtcgtgagaatgctgtcgaaatattggtatcctgatatgtagacgtaacctaaattccgcgtctttctttgtgttaatgttgcagcagagggtaattttttttttttttttgaaatgtgtacattcgaaattttgcaggtcactaagaacaagtgaaag

SEQ ID NO: 105158 - DNA, 853 bp, Mimulus guttatus
  Intron number 1 from transcript mgv1a004184m (locus mgv1a0 04184m.g) derived from phytozome v7.0 (chr-ID scaffold_170 ; pos 143044 to 143896 reverse strand)
attttgtcctggtaaatttattttattatttttctttctgatgctgggcttttcttttacttgatgggtttatttcgtaaatatacaatgttcttgagctagatctctctctttctctctgtatatatgtgtgtgtgtgtgtgtgtgtgtgtgtgtgtgtggtgggttggcttgatgtatgcagattgggtttagttatagctgtacttgtgctaaatttcatgatatattgtttattttagtggtaatcatgtattagatttgtatcgtcgtttcgagtttcttgaactagggatttctagaatttcttagtttgccaatcgataatttttggaattacatgcattagatttgtatcatcgtttcgtgtttcttgaactagggattttctagaatttcttagtttaccaatcgataattttcgtattaatttatcatcttcatcaataatgtacttcactgtgtgtgtgtgtgtgtgtgtgtgtgtgtgtgttgtagaactctgtaatgcaggcttgcatttagccataaattttgtattaggctaaatgtacgcgtaaaataaatcgcccgtttctcaaaggttgaagctttatatattcaatttcttgttctcttcatttgttcgaaatgaccgtcttttcacaagttctaaaacattttttttttagtttattctttcagtcttgagctcggtgtagctgacttatagtgaaatgaaatcccgtctttgaatatgcttattacggattaaagcttcttttggctgtttttttgttgcaattttcgtttatcgtaaattttaatttctcgatcaggtaaaagttcaaacttgggtagacggaatagaaga

SEQ ID NO: 105159 - DNA, 615 bp, Mimulus guttatus
  Intron number 1 from transcript mgv1a022282m (locus mgv1a0 22282m.g) derived from phytozome v7.0 (chr-ID scaffold_2; pos 388179 to 388793 reverse strand)
gctgctgaggtgtgtactatctctgttttcatttttggcatattctcgtgtttatccgttttttgccatgtaagcacatgcagatgtacgtgagtttgtctgcatggcagttaagaacgtaaaaaaaaatcgtgatattatttcaggtgagtaattatttcaggcgcacttttgtgacgaagcaatatcctgtactaaaatgaccattttcccgagtttacgggaatgtcggtactatggtttatgtcattgctattgttgtcgataccaattccttcctgattttggattcccgacaagcatatggttttttcctttcatgatatttcgttagctctatatgcgataacaattttcctttcatgatatttctgacactatttattgttcgtgttttatcgacttccctcatttttgattcttttaccacccctcgatctatttcatgatattttgttagctccatatgcgataaagattctacgctgtcgtgttgtaaagatctatgtactacattgttcttgttttatttaaatttcttcatttgtcatcttattcaatacccgtgtatctatttcagttgcctggccgcacggacaacgagatcaagaacta

SEQ ID NO: 105160 - DNA, 714 bp, Mimulus guttatus
  Intron number 2 from transcript mgv1a010943m (locus mgv1a0 10943m.g) derived from phytozome v7.0 (chr-ID scaffold_18; pos 108331 to 109044)
accaaggttctgaggttaggaatcaacgataggtatggcttcgtttactatccggctactctttgtattttgatttatttatttatgataattatgggtaaacagaatataatgtagaattatgagcaacataggtagaaattgagaagatagagagagaaagatggaagaacagagagaaagagagagagagagagatattgttgaattattaactgttgttattttattggcgtaagatccgctatctattggtttgggattgatgtgtgcaattgaggaataggagtgaagacggaaattattaatgcaattgatcgagttaagataaaatacagtgatgtcttttgtgttggtttaatataagcattttccatactctataagtatgttattttgttctcgtgaacgatttggggagggtttacagtaatttaatactctatgaaaaaataaatttaagatgaaaggttttatgtcgtggttttataatatggaagttccacataagttttcactgaaatgtttagctcgggaattaaggttttgtaattggcaaacatacatgcaagtgacaaagttttgcaggatttatcggccatacatgagctcctctctcgtattatcagtttatcatctaggttttctgtacttgttgtacgagtacgactttattaacctagattttctgttttgcaagggtagagttattta

SEQ ID NO: 105161 - DNA, 855 bp, Mimulus guttatus
  Intron number 4 from transcript mgv1a016383m (locus mgv1a0 16383m.g) derived from phytozome v7.0 (chr-ID scaffold_429 ; pos 38557 to 39411 reverse strand)
cacaagtaagttgtttgtttcgtattctagtactcgatcctcgtggaaatatgctaacgtatgatgtccttgtctatgtaatttatgctggaattttgtctcttggtacgaaacttctgctaattgtacttagtaagttgtattggtttgctatttgatgatatgctaacttttatcggtgtttgtagttgtccgtatattaggttttatagtacttaaagctcgttggttgtcttaaacgattctgttttttttttatgcaaagtatgatatgcctattagcaataatagattatggtactaatgagttttcacgaaattctctggctaatcaaattacggcccaaccccaaaagtaaggccaaattacgaaaactcccctcttgtttgggtaattacaaccaccccctcaactatgtattgtcttacacgtccacccttacggtgtcaaatttacctactaagtgaggagtttttcgtaagaaaacacatagttaaggggggtggttgtaactacccaaacataaaggttttttcgtaatttgatcttacctcaagggggtggccgtaatttgccctaaaaggtatcacaactttagaagttccatcgagcatttgatagtataaaccaatattctttcacttgttctatgttttttatctcgttacaggcaaagctaagcaatcttccatttagcaattcttgtacatgctttttttttcgaacgagcattcattgagcaattgtcatatctctgcgtttgtatatatttcgagtataaaataattgaatattcgtttgttgaatttggatgggcagggtatctcttggagaaaacttagacggtattagag

SEQ ID NO: 105162 - DNA, 909 bp, Mimulus guttatus
  Intron number 1 from transcript mgv1a022599m (locus mgv1a0 22599m.g) derived from phytozome v7.0 (chr-ID scaffold_121 ; pos 407306 to 408214)
gatattgaaggaagggtaaacaatttttcttaattgtttcgttattttatttgtgatgttatttacttttcctgtttggatccgagaaaaattactgtgtacggaagctgtatacttccttcatcctccatttcaaattcattttcgtttatgatatatcactaaattgcatttcccactaattatctctccgttaatttcttatttttttccgtttgtgagaatccatgtttttaatattttatgagtaatgataaaattggaaaaccagtaattaatctagaaattctgaagtgatatataaaacattttttttttaatttttccgaaaatcgacatttaatttgaaatggagggagtaatagtttacaaatttcaaatgtatgatgaatttttcaagctggaactcgtgagaacccttggagtgaaatggggcgagttaacatggtgaatcattactttatgtttttgttgaggatatagttttttgcatttggggtgctcagttggagaagaaggaaattagaaataactggggatcatgaatagttaattaaattaccggaaagtttagttgcattgagctttgatttatgaatagtatttaaagaagtaaacatgagaaaatgcagttgttgaaaaagtcaatcttttgaaatgtttcacacacaaagaactcattaatacacagaggaatgtttcctatacgtgagggaggagttcgatgaaattctttcctctcaataggtgcttaataagtgcgctacagaccagcattttctatgttggtgtaaatatttcctggcagcgtaccaaaagtgttctgttctattgagttttctgaatttatagtgtttccttttgttttctccaggttaatttatttatccactgctttgttcgggttca

SEQ ID NO: 105163 - DNA, 593 bp, Mimulus guttatus
  Intron number 2 from transcript mgv1a004819m (locus mgv1a0 04819m.g) derived from phytozome v7.0 (chr-ID scaffold_11; pos 806327 to 806919 reverse strand)
cgaatttctgcagaggattcttcatctttttctgggtaatgattcttcatcaagctgtttatttttgatgggcttttattatgggtaaatagtgtttgaaattggattgtggagttgcttcttgaatcataattgaatgtggggattgaattcgaagctcctttgcgaatttttttttcgattagagaagaatcaagctgtttattttgatgggattttagtatgagtagatagtgtttgaaattggattgtggagtggcttcttgagtcatgattgaattcgaagcccttttgcgatttttgtttttttgagtagagaagaatcaagctgtttattttgatgggattttactatgggtaaatagtgtttgaaattggattgtggagttgcttcatcaatcatgattgaatgtggggattgaattcgaagcccttttgcggatttttgttttcgagtagagttttgcttctaaagttggggatttgattgatgcctgatgtttgtaacttgtgtggcatttagccgaattttgattcagaaatttcactattgctcaggatacaatcgcgtacctaaaaggcgatagcatttc

SEQ ID NO: 105164 - DNA, 286 bp, Mimulus guttatus
  Intron number 1 from transcript mgv1a004819m (locus mgv1a0 04819m.g) derived from phytozome v7.0 (chr-ID scaffold_11; pos 806980 to 807265 reverse strand)
aaacaagtcactactcttgggggcctccctttgatgtgagtttggaagaataacccatcttttttttttggctttgaattcaactattattattattattattattattattattaattagttgccctacttttctgttcttcctgtttgttgatcttgaaatgctcgccaagaaaatgggcaccgagttgatttgatgcgcctcctcttttgctctttattggctgattttgtcaggtttactgttgtactgtgtttaattatgtgggtatcttttgtgtcagtt

SEQ ID NO: 105165 - DNA, 514 bp, Mimulus guttatus
  Intron number 1 from transcript mgv1a018126m (locus mgv1a0 18126m.g) derived from phytozome v7.0 (chr-ID scaffold_5; pos 2956577 to 2957090 reverse strand)
ttggcacgtgtggtattgacgaatacgaaaccagggtatttgtggctggagactataagtggtaggcatattccttggattctctgtcgggaaaactacagttttcatccctcaagttttcactgatttcacatttagtctaaaaaacacatttggtgacatttggtcctcacgtccaataatttaacacttatagtcatttccgtcaatttactgttatttcgttgtgatgggcacaggcttgattccttagttttaatgggaaattgatagtaatgactaaaagtgttgaattattgaagcataagcaaccaaatgtgttttttgtgaacatggggaccaaatgtaaaatcgataaattttcccattctctctctctatatatatatatacataattataataaggatactcgtactttgaaagaataatataattattctttgtagtaatagaagatgtttgaatttgtacaagagactaataatctattttaatggaaaaaattgttagt

SEQ ID NO: 105166 - DNA, 716 bp, Mimulus guttatus
  Intron number 4 from transcript mgv1a004731m (locus mgv1a0 04731m.g) derived from phytozome v7.0 (chr-ID scaffold_38; pos 1408902 to 1409617 reverse strand)
tccttgccgtcgtctacgatagctttaagagtgaggtatttttctccgtagtttactattcttttgaatattggaatgtaatagcagttaatttctttcataatcatttgaataacattaacagtaataaccaactagtctcatctaaaacatttatgttacagaattagcaataagattagacaatttgaatcaagaaaattgaagattcatatgaatatggaagtcgtatttctcgtgccattctattcagtagctttaagacagaaatactacctccatactgaaaaagtgattcagattccggccgaaaacaaatgtgttactttttggccggaatatgaatcactttttaagtggttgaaaacactccttagtccccaagtcattccctattttttttagtagtagataattttatttgaaatatgtgaatattattaaggtacaaaaaaataaataaatgataagtgaataattttacagtttaactttatatctagcaaacagaacaatcatatgtgggcaaatgcagtattgtcgtgctgcattatactgaaactgaaaatatagtgcagggtccaaatcctagttgagatgtagtgatagcctggtaacgtggtgtgtctaacttattttcagttaagttcttgtaagtaactaattaatgttcttttttagcttgttaaacaagtggctgcgaaggataatcaaag

SEQ ID NO: 105167 - DNA, 1036 bp, Mimulus guttatus
  Intron number 1 from transcript mgv1a014093m (locus mgv1a0 14093m.g) derived from phytozome v7.0 (chr-ID scaffold_854 ; pos 9350 to 10385)
ttaagatccacctgcttagtatgaaactgggaatggttgtcgaacgcaatttgctaagcaaaatccagaagactgagactataatgcaaaatttgaaattcattttatgtgttgtcatttaaaatcatattcctaaatattcataccatgtctaaattatctttcaatacaaatgcaatgttatgctttatttggattaacaaatttttgaagctaagaaattaaaattcaaaacattaaatcaatttaatatacagtatttggaatttttggttttaattgattttctatacttaaatcgttcttcaacttcaaattcacattgtattaaatcgttcgaaatgattcatttgaattattttctcaacaaaaaatatttaatacaactgcatgtttaggaaatcttaacaaatcataaagcttgaattcacacaactttaagagcaatattttttttcttcttatattatgatgaaatgctaattcaatataattggaattcaaaaaatcatctaataatttaatatttttcatcgtaggtgtattttcgctcaatatacacagttcaaattcaagttctattttgaccatgatcccgcccgaatattaaaaaaacgtaaaaaaaacaaaagaaaaagtaacaaagttcgtcggttgttcagctcatcttgaatcattgtaatcgaacatcccatggtagaagtatgattaaaatagtcagaattggtgcaacattccttgcataaatttgtaaatactcccccctgaatttcttattaatgcaacatttaatatgtagtgaactgaaaattaaaaaaaaaaaaaaaaaagtgcccttgtaattgactttaataaaatttctccttgtagcccgggtcaaaacaacaacccgacccgcatttaaaaaaccaacccagaaaaaaaacccggagatatgtaggcataatgaaatgtcaaatgtaaccctcaatctagggtacattaagagaagctgattctagggtttcatcgttatccactccccctcttctccact

SEQ ID NO: 105168 - DNA, 524 bp, Mimulus guttatus
  Intron number 3 from transcript mgv1a000007m (locus mgv1a0 00007m.g) derived from phytozome v7.0 (chr-ID scaffold_1; pos 3269707 to 3270230)
ttgcacaattaatttccatgtaagagatatttttttcttcacctctttataaatgttcgaaaaatgcatttcagtggccacatattctatcgtttatgatgtgctacatattgcttcattgccaattattaggtttctaaagagccaaaactggaaaaggttcagtttatagaattttaaatcaaactattttcacctttttgaaaggccgtgatagtttaacgcaaccattttcccattgaaacttgtcaatgttttttggcttcatttatcagtgattttcttttttcagttttattactaggtcatattgtacattctccatctgtttacagttgacctctagatattcattttgagactaaaactaatatgaactttgtaatctgtacgaaatatgacaacttactaccatcttatcttgctatgagttttaactttcgtgctgaaaataatatcataatctggtgctgttactgcaatttgcaggttagtagagacacacattttttcttttgttgtcg

SEQ ID NO: 105169 - DNA, 830 bp, Mimulus guttatus
  Intron number 1 from transcript mgv1a004921m (locus mgv1a0 04921m.g) derived from phytozome v7.0 (chr-ID scaffold_87; pos 1050196 to 1051025 reverse strand)
tcgctaaacacttcgacatcgtcgctcgttgccaggtgcgtagtttctgtaaatgtaaattgaatcttcttctgtttctgcaagtggaaaacgctgttcattgacagtttattagggctgtggtataaaattcagaaactcaacacgtgtgatttttcttcataatatagatgcgcttcaaatcagtaggataatatataattaaaattggatcaattcatttctgacttagggttttcacttggatttgaatgtggaaaaaacattttctcttgatgaattatgtcaaggattgtatcttatgaatttgttgcgaattatgcaaacatttttctgccacctttatgacttcagttttgttctgctaaaatacatccatggttgcattgagttgaaggaggtctcattgtttccacaggttgctcgtatacgaaactgaaatgttaagcgtatattcaattttaccaataccgttttgtcttccaacgtgattttgacccttttctagtcgagtttgggcaacttgaatcagctatattggatatcgggggacaaagttatgcatgaatgagttccatttttgaattttagatacctcatgtttgattcatgcatatctttctcactcgatttccagttttggtgattcaagttggattagaaagctaactctaagaactgcaaaatctgtgttttgggttttgccaaattcaaactaaaaaaatggtcaaaatcacgtttgaagttgaaatagtagtattaaaactgaaatggcatttatcacatcccatatgaaaccttcaacatcgtttaattacagggtggagcaa

SEQ ID NO: 105170 - DNA, 823 bp, Mimulus guttatus
  Intron number 2 from transcript mgv1a008767m (locus mgv1a0 08767m.g) derived from phytozome v7.0 (chr-ID scaffold_132 ; pos 291058 to 291880)
tcagtgcatcttctgccccagattctttatttgaggtaccttaatttttctgatttcattttttattttttatttttttttatatctgatgattcatatagaagattatcatatcaaagtagttcaatcaatttccagccaatgatcttatcacattgtattctatgttcttcacacacctctaagtttcgaatgaagccgagaaacgtaattctaatttatcgaggcattaattagtagatgaagtttaaattccaatgtaatatgtcaattatgatgcaaaatgtttcaaacatcggaaaagaagaaaaaaaactcgtgcaggcatcgtttgttttaacacaaaactgtttcggtaaactttcttgaaagtcttgtttgtttgccggcggcatatattcatactccaatgcttttcgattttgattgtttctatctgtcgtcttcgaaggtgtagcacaattacttgaacttactatgattttaagtgtaacgagaaattatagatagaaagaagaaagcatgggtataatcatgtagttcgttcgatcaactgttcaatttctcgcttcgatcgaatattacaatgaccacctacttatataaataagtgaagaaataataaaaaaaggaaatcagtcaaattttgattaaagaacaaatttttatttagtcccaattcttgaatgaacatatataaatacatgtctatgtatatgtatatattcgaacaatgttaacagtaagtaaaatattaaatgtattaaaaacattttaatacggttcagattgcagcaattgtgacacagccaccgtcgggaag

SEQ ID NO: 105171 - DNA, 354 bp, Mimulus guttatus
  Intron number 2 from transcript mgv1a006968m (locus mgv1a0 06968m.g) derived from phytozome v7.0 (chr-ID scaffold_255 ; pos 213440 to 213793)
ctgcacggttacgtcggcgtagaggttcaaacgaggtaatgtgtcttttataattgtttcctatctcaatatataagataatctatgtcctcgttttagatttcaagagattgtaaggcagacaatttcagaagttatacttccatagtattcttcatgcgtaacgtagtaatatatagttgtgattatgctgtaagtgtaagcaaaaaaaactgattagcttcgtatgttaaattggaatagatccataatttaaactgttttagcctttgaatttgctgcttttaaaaatcctcgtttatttgcctttttcatttctacaactccagttccctccagaagttgatagagcaa

SEQ ID NO: 105172 - DNA, 699 bp, Mimulus guttatus
  Intron number 3 from transcript mgv1a006968m (locus mgv1a0 06968m.g) derived from phytozome v7.0 (chr-ID scaffold_255 ; pos 213988 to 214686)
gataggcacctccctggtttttggctcttaaattggtcagtaatttaacacgttcacctctctcgagtttatgttaatgatgatttacttttttgccgtttggatgttatctctctgcatatgaaaagttagagtctagcttctctaatattctaagttgtttcgactttaatggtatctcaattatctttccgagttgtttgtttatgttgaacttgttgcaaactagttccgtgatgcacaaagctcgtggaaattcaatatcataatatattcctgatcttaactttcttgtaaaaatcgatgtttttctttgtttccttatatttaacatagagacatcaaccctacatatatgttcatcttcattcgactaattttcaggaggatccacttaatttacattgttactagcttttcttcaacatttgaagccatgagaacaaaattagcagttattagctaataggtcaaaactagttgttcgaaactttgtagagttgtatgtaaagctaatatgtcatgtgacagatgatattgaacgttaactacaaattgtctgtgatggggttctgtaccttatacttgaatttggaaccaataaatcacatatagtttatgcttgaattggatttgatttttgttgtttgtttttcatagatcaatgcatttgttttcaggcacttcttcttcacggcg

SEQ ID NO: 105173 - DNA, 445 bp, Mimulus guttatus
  Intron number 2 from transcript mgv1a011132m (locus mgv1a0 11132m.g) derived from phytozome v7.0 (chr-ID scaffold_18; pos 322219 to 322663 reverse strand)
gtggagagggtttcatcgcttctataccgtttcaggttttcctcttcttaattgcccatttttttgaattttggggtttcgaaaatgtttcaattatctcgtaatcttgttaatcggtacaagtgtttgttttgttcttccttgtgatcaatgtatttatttgatgaaacaccgtttcgatcttagatcactaattgcttatcaaggggcttttgtagagtttgtagtttgaggtttatatataaccccgtttcgatcttagattgctcgattaatagggttacgaaaacatccattcgtattcttttcaacatatgcattactaatagaatcgggtgcattttaaaattttaagatgcgcgtaattggaattgaatcctgttctgagttatacctcgatgttggtgcaggtcttgagttggagaccgcgggctgtttattatcc

SEQ ID NO: 105174 - DNA, 925 bp, Mimulus guttatus
  Intron number 2 from transcript mgv1a015996m (locus mgv1a0 15996m.g) derived from phytozome v7.0 (chr-ID scaffold_92; pos 557410 to 558334 reverse strand)
acaagggcgttggttctgttgtagctgttgaccaggtttgactattttcttttttatttttttgactaattaattactaatgattgaatatatagaatatgtgtttaggggaggtttccattggattaaataatttatatttatctatataaaattaatatgtttcatacactattcaattagtagtaactagcattttttccgatgcacggaatattatttaaaatttggaaaaaataattaatttaatacataataagaaaatatagtacataaaatttaataatgtagtaatattcatattatttataacatgtttttttcaaatattgcagattaaaatttataatccaatatataactaagatttaacaaatcgaatttctatctttatctcttaagatttgaaatatattgatgaaaaataggagattgataattattgaatattatagtaaataaaataaatagtagaagaaaatattaaaaataaataattaccgaaaaaccattagggttttttaaggttgcccaacatttctttcttttatatataagatgtaactgttcaacaattcataatatcataaaaaatatatatatactattcaaatattattacttttcgcttatcaaacaagcttaataattcaacattcagacacaaccactcttagctattcatacgtggactgatattaatgcaatcaaacatagtctaagtagttatttaggcaataaatattaatttttgtaacaaaaaacatcctttgacattaatgtatacacaatttaatatatgactatttttaaatgtatatttacttaagtttaaatcatttatatgattattttttgatgtaattttgacgaatattatgattggacaggataacaagacacggtacccggtggtggtgaggtt

SEQ ID NO: 105175 - DNA, 835 bp, Mimulus guttatus
  Intron number 2 from transcript mgv1a009609m (locus mgv1a0 09609m.g) derived from phytozome v7.0 (chr-ID scaffold_107 ; pos 818923 to 819757)
ttggcgactcgctgcaggtattaatattaaatgatacatttcattaacatccgattgtcctgtctagtaacatttcaattttgaagtaggactttttgatttgcagtcaaccacgaagtatagatagtaaatttaaaaaatctaaaacgaaaccgaaaccgaaaccaaccagactaaaataaagaaatagagtgtttcgtagatggtacgcgtgttttaaaaagacgtgtatgcgcctacactactgcagtagaacctcaataaaataatactttataaattaataacctcgtttaaataataattttttctagtcccgacttgataaaaacctactaaattattagttcgatggttttgctagtcccgaatttattaatttatagattaactttgtactaattaaatatgttttttttgttattataaactttttttcacaactttttgcaatgatgtgaagtttcctaggtttgacttaacaactatcacggaccaatattatgtaggcctccctctcttcaagcacgcggttttttgttcgactttaatttgcaattctttaattgattaaataaatctttggtagattcctcgacaacaaggttatcaaatcaaaaataatacctcgtggataaaacctaattgtaccacatacattgcatgttgagtgttttattccacatcacaattaaaaaaaataaagaaaaaacaaaatctattttgagtagtcattgtgtaaaattctctcttctacctcaattacttgtaaattatacgagagatgtaattaatgattgctggttgacttaattatgtttaaaatgtgcaggta

SEQ ID NO: 105176 - DNA, 882 bp, Mimulus guttatus
  Intron number 1 from transcript mgv1a022265m (locus mgv1a0 22265m.g) derived from phytozome v7.0 (chr-ID scaffold_197 ; pos 314514 to 315395)
gcccctgccccctcctcgctatatgtacgtccgcttctctctctcctctctcctctctcctctctcctagggctcaaattcgttctgtacacgtacggatgtgagcgtaactgcttcaatacatttattttctcattcgattttggaataattccatcaatagatggtggatttttgttacttttttttttgattcttccaataaccgagtgagatttggttgtgatagtatgtgaatcgcatttccagggggaattgatgaaaacgaagttgtaaatcttgattgagtatgaaacttgatcgatttctatgatttgtatgcaaccgttactgtaattagttcatcatttgcgctgatgtttttggcattggttattgcttaggggtaaaacaatgtgactgtagttatgtgtgtttcggagggtttttgattataccctattagtttttggtccttttagggtaaaagttcttcgccactatgattaattaaggagtatttactaatttgaatctacatcatgtttagcagagatatatttatcaaggttggcaatatcgtttggtgaagtttcatgtttacagcatgtttaaatgatgtatactggcacttgatattgagatttttctagtgatgctttattaagttttctgtgcataatttgacatcattattttctattttatttaaaatgtgatgcatcgaggttttgtggtttttcgctttcaaataagaagctattttgggttggacatttttgttcagaatttcacatttacagactttgttaataatatattgtcagagatgattgtgtttctaattgaatgacgcatgttgtgataggtaatcttctttcgctaaagaacagtttgaatttg

SEQ ID NO: 105177 - DNA, 439 bp, Mimulus guttatus
  Intron number 2 from transcript mgv1a018406m (locus mgv1a0 18406m.g) derived from phytozome v7.0 (chr-ID scaffold_213 ; pos 346114 to 346552)
gccttgttcggaaaatgtaagcatttcttattgggaaaattacatttttacccttcaactttgcatcgatttcacatttggtccttcatgtcacaattatttactgcctttggccatttccattaattaccgttagtttgttagttaaggcatttatgaacacacgcttgattccgttagttctaccagaaaaatgacggaaatgactaaaaatgttgaatttttgaaacacgagggaccaaatgtgaaatcaatgaaaacatgaaggacgaaaacgtattttccctatttcttatgaataatcttcataatcaaatgattttttttttggttaaaatattcttattactaaagtaattttttattatttattattattaatattattatttagaaatctaattaatttgtgttgtgttatatatgataggtgaagaac

SEQ ID NO: 105178 - DNA, 729 bp, Mimulus guttatus
  Intron number 1 from transcript mgv1a010633m (locus mgv1a0 10252m.g) derived from phytozome v7.0 (chr-ID scaffold_11; pos 2137589 to 2138317 reverse strand)
ttgttgctacggcgcacttgttaattgatcttcaggtatgttcttgttgtgtaaaatgcaataccacctcacaaagaggaatttctgttttttttattttttttaaattatttatttcagcttttacattttgctagtatattgacagatcttgttaaaattttctttttggggatttttttccactgtatttcactatatgtgtggttgtcagctactgttctggatcttctttgattattctacctttttaattttttaaatttttatatatttcttatttatccttgtaaaaatcttcatcgctgatttttttcccttgcctggtgattgatcttcgaagatgttcttatttatgcttaatagtattttctattaattttcatttttcatgcaaactaatgcctgttttgattttttttaatattattttttgtaattaacacggttttaggttaattaaacgtttgttaaaaaaaatgtatgtactctgaagaaaatttgcttgctctgtttttaatctccggcaagaaacagggtttcgtaccaaaaattatcgtaatggtcattaaaattgtatcttctagtattttttatgtggtgtgatatagcatttgtgccctatgatgatcattatccagtatatatattgtatatcgtgcttatgtgattcgaaacgagtttattcgattttacagatattcgaacgattacacaaaatcaaacttg

SEQ ID NO: 105179 - DNA, 606 bp, Mimulus guttatus
  Intron number 2 from transcript mgv1a002036m (locus mgv1a0 02036m.g) derived from phytozome v7.0 (chr-ID scaffold_79; pos 146790 to 147395)
tacttgcaaaatcaagagattctgaccctacagtggtattatgttttgtttatctgtcaaatgtacattacatgatatagttcgtgagttatgcttgattgtgactatatacaattgtaaaataatttaagaaaatgctttgtttttcatcagtcgaaagggtagctagatataaagtcagtcaagttggttctttttcaccttgatcactctgtagaactttctaaagtgccaagtagatgataaattggtaaaatattagtagtaaatgaccagtgtaaatcgaagtttttcgtgttggtggcagcacataggcaaattgtggtatgatagttgatgggaaattcttcatctcacgtattcatatcaatcaatcagcttttgcttttccagatacctccctctttatctgcacctatgtgtgtgaatcaatgagcttatctccctactttgattgctattgattgccgtttagtgaatgttatgtttctctttatttgtgattatattatacctttccttgcacacagatttttttacggctttcctgaattaacattttatggggcagttttacagggtacaagtcggcatacaatcaccaga

SEQ ID NO: 105180 - DNA, 779 bp, Mimulus guttatus
  Intron number 1 from transcript mgv1a003892m (locus mgv1a0 03892m.g) derived from phytozome v7.0 (chr-ID scaffold_1; pos 3157162 to 3157940)
atttcctccgactccgccggcggcgttggcggcacgtacgttttcatttagtctctttcaatcgtagtattcgtatcccctttctgtttctttcacaattatgcttgcagtatcgaatatttggttgtgattgtttgaggataacttgcattgtttgcttgatgattgtcatgataattcattatgtatcttcagcagctctggttcatgttgctagttaatttggtgaacgagatctaacttttccgtttccaaaatcatttcacttttaaaggtgaaatgtttaaaacttaaccataagatggaattcggtgtttataatttattttctttttgtaataggtttatttgagggagaggttgtgaacttaagagttccgagtcaaattcttgtagctgtttaaattgttgaaactataatttttcttctgcctatagctttgaattctgagaaaaacaaatacagggaattattctgaacatcaactcacggatcttgcttcgttcttagttaaaatctataagttttggcaaatgaagcctaagtgtggcagtgtaatttgacatgcgtcatttgaatgtctctcaagggccatgcagtttatttttcaatttagattcttatattgcattttatcttacagtaacatcttgtctgactgtaattgaatatgaggagacatctgataagaagagcattttatatagcactgttcaacttagtgagttccttgaagtgtcttaatactctctggtgaatgaaggtgtgtgctccgtgg

SEQ ID NO: 105181 - DNA, 423 bp, Mimulus guttatus
  Intron number 3 from transcript mgv1a002684m (locus mgv1a0 02684m.g) derived from phytozome v7.0 (chr-ID scaffold_130 ; pos 904075 to 904497 reverse strand)
caccagtggcccgcaaaacatcagccctacaattggtaattttattcttgtcctaagagtgatttctttttgaatatgtgcttgtgaatgttagagtaattcatcaatattcctgtctcaaaaaaattaatttttcatatctttaacattgatactcattggtaaatagagtttaaattctccacattctttttgacatttaagttccatttaagttatactcagtggcgaagccggaatttttaattcgatatgtaggtagttgaaatttgcaacttaaacttgatgtttatttctccatgttgcatttttgctccatttgagtgtaattttttttcttttaactttgagcatcaaaatggtgactgagtgatttgatacctgatatttttttcgaataggacttcccaagttgagaaaaga

SEQ ID NO: 105182 - DNA, 576 bp, Mimulus guttatus
  Intron number 1 from transcript mgv1a002684m (locus mgv1a0 02684m.g) derived from phytozome v7.0 (chr-ID scaffold_130 ; pos 905002 to 905577 reverse strand)
atctgatcagataagattcatcatctcagcttcaggttcgtgcgttttcctttttttttttttttaatttttttttaattttctagttttcagtttttaatgcattgcatgctctctgttcttcgtgtattttatacagaatttttgattttttgaatttttcggcagtaatttcttatgtttatgatgtttgatgtggtttgagtttcgattcgagagaatgtcaggaagtaagggtttgcttagatggtggattacgtacaatcgcacacacaaacatgtgaaatacgcctgattgtttttttcagcttcgaattacatacatttacacgcatacgtgtggatgtgtgtaaattatgtatgaatgtatggtaggataggatatagcccgggggatttcatcggatgtttgtataaatgtataaaatttctgtgattttttttcagtgtttgggagctaattgcttctgcttatatgcattgctgtcataatttttgaattttgtaattgcaattcatacaagcttgcaaattttgttctgtaatagtttctgaaacgccttttttccgacagat

SEQ ID NO: 105183 - DNA, 633 bp, Mimulus guttatus
  Intron number 1 from transcript mgv1a015488m (locus mgv1a0 15488m.g) derived from phytozome v7.0 (chr-ID scaffold_90; pos 657113 to 657745 reverse strand)
gacttctgccaagtccaccggctttagctattgcagtacgtcgccgtttttttctgccccctggtttttgtagatctccgccttcaccattgatttaattgccgggttctaattttacattttctcgtttgttctgttactttttggattagggttttgcggattatattgtcgattagaggagttgatcgggttttttgatttgtctgtagcttttcgttgatttgcatgcctattgatccagtaaattgtttgaatttaaaaaattaggttgaaattgtggtcaacttcgtgaaaactgagtacttgcttcttttctgaaaaaaaaagggattgtctttattgctggcagttgcactcaattgaactttcatggatttgcagtagactattactgaagtctttgatcatgttcatgatatataaataaagttcgagttttataccgttcgccttcgtttcttagttcttaaatgaggcatttccattttctttacatgataatacgaaatatcggggctatctctgtctcgttttctgtttcgttttggtgcttatcagtgtttattaatattgtgttgtagttttatagttttttgttgtctaaataatttacagataagaagactgact

SEQ ID NO: 105184 - DNA, 605 bp, Mimulus guttatus
  Intron number 2 from transcript mgv1a008161m (locus mgv1a0 08161m.g) derived from phytozome v7.0 (chr-ID scaffold_162 ; pos 421941 to 422545)
aaaagggaaagaagaaaaagacacaggtagtttttaccttcttattgtacatttatatactagtatgtaaattttgccacttcttttttccccaattgttgatgcttttaacacttagaatctatttgtttcgagatgaagtactgagaactgaaaatcagttatgcaaatcttttatattgggagcttagagaagaaaaaggaacagaatactcaaagaatttacctcattttcatgtattttatacagttttttttcattcaccacatatttaacagtaatgtgatcgtgccctgctagtttttttcgctaagcaacatagtattaggcaactcgtgtattgggtaaatccttcacttataaatctgttggtcgagcagtaatataggacttttgagaggttgctctgtttcgatttctcctatatttatggtaatagccaataggatctttgagcagtactggacctttatgaggtagcttcacatatttgtattctctataactttaatgcgctcttttgaacttcttgtttgtgtcattatctttctattccccccaactaacaggtagaagaaccaccactagatcaacgtgttttggc

SEQ ID NO: 105185 - DNA, 988 bp, Mimulus guttatus
  Intron number 1 from transcript mgv1a000287m (locus mgv1a0 00287m.g) derived from phytozome v7.0 (chr-ID scaffold_80; pos 470044 to 471031 reverse strand)
tctggtggaagtatcatcatacgagctcagaagctgtgagtagatctcctacttgaactgtgtgtaatataatgccacaacttttttataccttaataatactaacaatgccaaaaataaggacctcaaaactatgttgatacaataccaagtttaagttattaattattatacttccacatgtatagagattaacagttttcaacaaaggtgaggtcaatcttttgatttaattatgtgagatatgcattacagtatagttattactttatattttgtttatgcttaatgaatgtttttacaaataggattctacaggtatgaatgtattttgttcgacttggtatgagattttcctaggaagggtctttccaaaattattgctgaaattaactatacagatgtaatatatttcttgtatctatagaaaatttgagttttgatgtataaatacatgtctctctatttgtgcgatcagcctcaggcaagggaacccatggtgtcattgttttcgtatttgttttgtatactgcaatattctgagggtctactagaagatagactaaaagatgatattctatcaaaactgagtccaaatgaatattagatatcctatgcaaccgaaggaattgcagtaatgattcaaaaataaaataaaactattcaattcacgacataatctccgtggatttccaaaagatcttatggatttcttagttaaaggtttcaattttttcaggaccaataccttaagaccaacacactttacacttgtgcagaagtactgaaaactagataaactgtactatactggttcaattttctttgctttttgttagataatgactcaatatgttttgttatgattttcctttaagctaatttttacttggaacattgagctatctaattaaatacagtataagtttcactaatgtggtttaactgaacaggaggggctttggtgtcataagtgcagctggtggga

SEQ ID NO: 105186 - DNA, 546 bp, Mimulus guttatus
  Intron number 1 from transcript mgv1a013820m (locus mgv1a0 13820m.g) derived from phytozome v7.0 (chr-ID scaffold_228 ; pos 363333 to 363878)
actcgcctttcgtttcatctcccaaattatttcaggtacccatcttttttttttctcgattttttttttgaattgttattgatttttattgtcgaattcgttctatttgaatagcaatcttcttcagtattgcttattggattaaaaatggtttgttgattgcttgttattaccatttgttgattgttatgcttcttcggttgatcatgtttttttttttattatttaaattcattattttctggggtgttggggaattaaaactacgtaatttagcttgcattattcccggaggcaagttggattaacgagtcgtaaaataaatttaaataatttttttcttgattgtttgtgattaccgtttgttatgcttctttggttactcatgttttcatttttaaagaaaaaaatcttgtcgatttggtgaaatcttttttcatttgtgggctcgtttattgatgtcgaatcttcgtaacttaattttatccgcgcctgaaatttcgaacgaggcctgaacacgattttgtcgatttcaggttttaaaaa

SEQ ID NO: 105187 - DNA, 500 bp, Mimulus guttatus
  Intron number 2 from transcript mgv1a000257m (locus mgv1a0 00257m.g) derived from phytozome v7.0 (chr-ID scaffold_87; pos 448505 to 449004 reverse strand)
ctgctgctaaagtaacatttcttatccctttgattagtatagtgtaactgctttttttcttatttgtagaaattgttagtgacaataacttaattagctgctgacttaaaccattactgaatgtatatctatgagctatttgagcgaatcttggggatgctgatagtggtgcgatgtagattatgcattcttgtgaatgtatgacttgaaaatctcgactgtttacatgctcattttagctggtatttttttatttattttttattttccggttatggccttatagatctagtattgttgatgatttttaaccaaatacgatctttgcacatagtagtcgactattgatgtaatcctaaagttgtttgacacacctttgcagtttgttgtttcttttaaaagaattaagtcgttttgatttctgcttagtggagaatacattgttaatcttctataatggtgtaggtgttagcttccagtaagaagaaacggcctgtaga

SEQ ID NO: 105188 - DNA, 774 bp, Mimulus guttatus
  Intron number 1 from transcript mgv1a002851m (locus mgv1a0 02851m.g) derived from phytozome v7.0 (chr-ID scaffold_18; pos 197028 to 197801)
tgctttgcctaattttgttcttgttgatcgtggaggtacatctttatttatttatttttttaattttgtttttggttacagtttcccccaaatttactggtttagttaagttcttagtactgttcccccttttgtggcttcaatttaataatcgacctagttaatttgctaatttggggttggaatttgaatttgctttctttaattttagttcaccggcttggcttgttttaggtctttttgtttgatttttaggcctactcttttaattagttcagataatttcattttcgcgtgttagttaagttagcacttgggcaatttcatttatttagctatattatatggttggagaactcttcgaatttcaagggatttattttgtcttacatttgtagtttttccttttgaggtttttaagactgttaaggtaatcctatggtggtgggattttggtttaattgaacatgttgtctcacggtgttgaactcaattatgattacttgtaaaacttagctatcagtcgaaatttagaaaatcatgattttccacctttgttgaatcttgattaattttctcttgatccatgtattgcctataacttaagttggattggatgcactcttgtaatgatttctgtgtttgtgccacattttcgttcacacgtgtgattgtagaaaagggatccttttggtttgagttattttaggttaattgtaaaaattatttgacaacttgcacgtgtgctgcagattgctttttcgcattgaaggt

SEQ ID NO: 105189 - DNA, 725 bp, Mimulus guttatus
  Intron number 1 from transcript mgv1a009851m (locus mgv1a0 09851m.g) derived from phytozome v7.0 (chr-ID scaffold_122 ; pos 73434 to 74158 reverse strand)
tcttgttcaatccccacctcattctcaaggtaaccccaattcttcatctttttcattttttcttccacatttatttattctcatgttttgcttctattagttagcttaacgatgttttgattcttttgctcaagtgttaatgtctgatgtgaaattcatacttgatctaatgctaatggtgctgctggtccagaacaaattagaacccaccctgcaaatggagctctgttcatatatgtaacttatttgtgtgacattgcatactttagttgacaagttcgttcaaatgctcttaccgtttatgttttcttgactttctgcaatttgtctgttgatttgtagaagaacatgttcttcactttctccgtctgtatactgcaaaatccaattattattattattctcttttcagataccaacttagatagttacacttagtttgttggttttttgccttactggttttctcaactcattacatctatatcatgtagttcgtgttacacttgttcatcagtttgctgtgtttttgctttgttagattgtttgtatcacgtttagtttttgtttgtttggaagttaaacttaaatgataaagagtgacttctcaaggaatcagaatcatgtaattatttgactttgtgtgttttgcaataaagtaacatagctttacattttgttgaagcacagcacaaagacctgaagcgtttcattttgtcggcatt

SEQ ID NO: 105190 - DNA, 180 bp, Mimulus guttatus
  Intron number 1 from transcript mgv1a023301m (locus mgv1a0 23301m.g) derived from phytozome v7.0 (chr-ID scaffold_68; pos 1098487 to 1098666 reverse strand)
caaaggtgaccaacccttctaattatttttctcttttcgtttcatattgtttgatttcatgtcacttaaattcttgaaatgccgataattttttatttttttttttcgatcttcgttaataatgtatcggaaaaaatcgtaataggtattggaaggtcttcttaagctccccgaaaacag

SEQ ID NO: 105191 - DNA, 278 bp, Mimulus guttatus
  Intron number 1 from transcript mgv1a000583m (locus mgv1a0 00583m.g) derived from phytozome v7.0 (chr-ID scaffold_4; pos 1693568 to 1693845 reverse strand)
gccgaaaacaaaaaaggccaagaacaaagattgtggtatactattcttctttttggagattttgtcgattatttatgcctgtcattttcttcctttgggatgtctaatttttggaatttgatttgttgtttcttcactctgattttcggaatatgcaatgatcctagtattgataattcttatgattgctgagttcttgatttggttattttttggattgactgatgctttattcaacaacaggcgaaattcttctaacaatttgtttctcgacaaat

SEQ ID NO: 105192 - DNA, 546 bp, Mimulus guttatus
  Intron number 1 from transcript mgv1a000218m (locus mgv1a0 00218m.g) derived from phytozome v7.0 (chr-ID scaffold_44; pos 411584 to 412129 reverse strand)
atcaaattgaacttgtgctctccactctcaaggttggcctgcgtaattggggttttactagttgaattaaaccattaattttgtgaatttgaatttgttgttgataaattggagtggtttcagtactgaatatgaatttgttctacaaggatgaagtatctagtacaatttggtgcaaacgaaatagtaatggcggtattgcatttactagtaacataaacaaagaccatggtaggtaattagagtgttggaatattttcgagaaaaaaatgagtatgatcgcgaagaacgaaagagcccttcctaccttgaggagtgccaattatgttgagattttttttttctttcttcgataaaatgccaatgtatttcatcaagttcttgtttgctgacggtgcagtttatcagaagctaattttcttcaattgaagtgatgtattatgatatttataaatgttcatagcattgaaaaccatctttaaattgaggtattacatgtgaatcattttttgctgttttgttatatttattaggagaattcaactt

SEQ ID NO: 105193 - DNA, 727 bp, Mimulus guttatus
  Intron number 1 from transcript mgv1a008755m (locus mgv1a0 08755m.g) derived from phytozome v7.0 (chr-ID scaffold_89; pos 643020 to 643746)
tcggcaacacttgctattgcaacagcgttctccaggtttttctttttttttttctcgattttttcgcttttatttatttcatgctttttattattgtgtctgaattttaggttttcgagattccaaaaaaggtgtagttttttaatgtagggtttaggtttattgagcttttgacattcgtgatgtgcctattagatagtttgattgctttgattttgcttgccctaaggtcaattatcatctgggcatgttttttttttttgattgatttgtggtgcttaaagtttttgatggtctgattaatttaggcagaaaactgtagcggatgctcgtcccgtttcgattgattttatttttcgaggaagagatgtttatacttcatttaatgatatgtaaggtttttatataacacgaaggatccgatattaatgttgtgggtggaggtgaaatggtgtggtgctttttgaggtttttgagagagttgtgtatatttatgaggttataatagtcaaagatctcacgaatatcgaaaagaaacgttaagaataagaatcctgcatgcaattttcgatagagtcggttcaataatgaaatggatgttgcatgttaatgctacaaacgtctacatatgctctgagaatcttgtatattttttctttagttttacgatgaatctgtttgttgtgttccaggctctttacttctgtgtaccgtttcgtgaacaatt

SEQ ID NO: 105194 - DNA, 998 bp, Mimulus guttatus
  Intron number 1 from transcript mgv1a001630m (locus mgv1a0 01630m.g) derived from phytozome v7.0 (chr-ID scaffold_36; pos 368782 to 369779)
gcaaccggcgagaaaactggtatctctaaacccaggtgagatcttttttttttttttttttttttttttttttaacttaggtagaaactaaaaattgagatgaaaaaaaaaaaaccaataaattgaaatgttacggtggtgattttatacgttttctattgaattcaattgatttcaggtgcacatgtgcatggcttctttcttctttttctttgtctgctgttactttttcttttttcttatttttcagggtaaattacagccacccttggataaaagtcaaattatgaagtaacccctcatgcttggataattacaaccattccctcaacgatgaatcgtcttaacacttgtggtgtcaatggtgtcaaatttagtagaatcttttagattatatggaatattctctagtttgtacccattttaccctattcgagctttacattttgaaacaatatgatcatatgatatgatgtttctcttggatgaatggcttgtaaatatcaaattatggtgcataaaactgcatttttgcatttttgtacaaagcgagtacgaactagagaatattctacggaatctagaagattattgttgaatttgacactataaggtgtggacgtgtaagaagattcatagttgaggggtagttgtaattacccaaacatgaggggttttttggtaatttgatcttacctcaggggtggccgcaatttacactaatttttatggattgtggaagaaacgggttttagtgcttgtgagttttttgagttaatgattcttcgacaaagttgaggaattatatagttcaaagtacttcatctgtttctttgttttcttttccttgaatggcgactttttgttagagaacaacagtacatatgaggcatgatatatcaatgcattcactttcagatatcaaattgctagttcgttcggcgctaattaataattatacgtgacatttgctttttataggggggatatccataggg

SEQ ID NO: 105195 - DNA, 779 bp, Mimulus guttatus
  Intron number 1 from transcript mgv1a008130m (locus mgv1a0 08130m.g) derived from phytozome v7.0 (chr-ID scaffold_3; pos 3830113 to 3830891 reverse strand)
tgattcctccatcggaagttccaacttcagacaaggtaccataaaaaaaaaatcatatttacatttcgaattcttaaatttatatttgccattcttattatatatactaaaaatttcaaaatttttaaattagagaatttttcttttcacttttgtccttaattaacgagaagggtattttagtcattctaaaatttaggcataattattttattaattgggtaaattatggccacctcctaagataatgttaaattacgaaaaaaaattctctcattaggtaattacaatcaacccttacaatggattttcttacgcatctacagccttatggtgttaaattcaacgtaatcttctagattatgtagaatattttctagtttgtattcgttttgaacaaaaaatgcagtttctaatgcaccacaggtccacaatctgatatttacaagctgagagacacatcttattattaccttatatccaaacgtggagttcgactggggtaaaacaaatacaaatttgaaaatattccacataatctagaagattatactaaatttaaccgcaagggtagacgtgtaaaaaaattcatcgttgatgggtagttgtgattatccaaacaaaagggactttttcgaaatttaaccttactcctaattcaccttatatttaatagctttcttaataggcgcaaattatttcaagcatgaggagaaactaattaaatcaaatataatttaattttttatttttctgcagaaggtggtggttcaacaagc

SEQ ID NO: 105196 - DNA, 723 bp, Mimulus guttatus
  Intron number 1 from transcript mgv1a013902m (locus mgv1a0 13902m.g) derived from phytozome v7.0 (chr-ID scaffold_8; pos 1214092 to 1214814 reverse strand)
ccgcccgtcgcagccgtcagccaccttcttccgccgtgagtctaaaccctagtattcgaacatacgcttttggcttatttttatatatgtcgcgagtgatgcatataattaaattgattttttttctttcacgctttgaaatgttgatttgctggaatgtatttagcttgtgttttgtagaatcgccattgttttatctctttcctttttgttgcttacgaaaatgtatgagcttgggtttatgtgaacagtagtgaattttattgatgtatttgatatatcacatgttctatttgattgggtgttcgtattgagggcatttgtagccttaatttgccttgtagatttttttttgcttattttcttcaattttagaaaattggattccaaaatggtcatttttttaattttatttgtgaattacttttattatattaatttaatgaaattttaaaatttggattccgaaatggtcattagtttttttatttgtgaattatttttattttatcatgtttctcgagtggctttgaatgtatgaatatgtgtgagtgaataatttaatgaaatttacggttctatctcaagtgttgaaatcgaccgtgaacaatactgtgattcttttcatattttttcgttatcttttctctgtattgtttcggttgaagttgttatggtatatcaagtcctataatgcaatttctcgtgtactctaggtaaaca

SEQ ID NO: 105197 - DNA, 707 bp, Mimulus guttatus
  Intron number 2 from transcript mgv1a003357m (locus mgv1a0 03357m.g) derived from phytozome v7.0 (chr-ID scaffold_16; pos 272390 to 273096 reverse strand)
gattggactatcgcgatctcgaggtttttctttgtcttcgtatatgcaaatgctagttttgtgcctctcgattttttgttgttttattagtggattatgaattcttgggcaggcttagtttagtttaatatcagattttgcggtagttgctttatatgatgctgtgatgctcgagattttaagtagggtttgaatgcgtattacggagattacttatttttcgttatgttatgaataacccgggatgtccaatctgtactatcacgaaaaaatgttaatctttaaaaaatgcaaatacaagtacttacttggcaaaagattttatggctactattgaggtgtatattcgatgtttgacttttttattccattttatcctttttagttgagtttcatagctagtgatatgtttttgggtgaaaaaatatgcagagtcgatcaaattctctgcagttcagtttttttagtaaagcaattttgacattgaagttgtttaggttactattatgattagttctattgtgttttatattcttggtgggattatatgttgttcttagtcctttttcctttgttttatttgtcgatgatttttccattacattataatattttccaatttttgagatgtgggatatgccgtttcttgaatgacgtgttatggtggaacagatattgatattagacgaagctgatagattactaga

SEQ ID NO: 105198 - DNA, 546 bp, Mimulus guttatus
  Intron number 1 from transcript mgv1a025097m (locus mgv1a0 25097m.g) derived from phytozome v7.0 (chr-ID scaffold_156 ; pos 4410 to 4955 reverse strand)
tgtttgcttgggctcttggtaagaaatatcatcacactctactcacgtttattgcacaatatatgcatgaaaaagttataattttgatattgtagattttttcttattaagtgttgctttcgattttctaataggtcaaacattttgtctaattttaacctaacattaataacatatatataaatgaattcattaaagaaaaggataatacaaaggtcaaaaatgggtaattttgtaaaataaaaattattattccttcaaatcaagactatctcataataatatttttcataattaattaattagagagcatcacaaacgacgctaaacaaacggagggtgtacgtacaagtaaaaaagagattttcgtttaatcctacaaatgtaggtaattatcattgtgatgcaaaaccatatactcatcaactatgtgctttaattttttattttatattttgtttccatattgccaagaatatttcgcatatttccttgaattaatataaaagaattatgagatcaaacttgtaaatttattggcaggga

SEQ ID NO: 105199 - DNA, 877 bp, Mimulus guttatus
  Intron number 2 from transcript mgv1a007154m (locus mgv1a0 07154m.g) derived from phytozome v7.0 (chr-ID scaffold_37; pos 290269 to 291145)
ggttttgaagtaattcgccgtctaattgaggtgaggttaagatctacttagtttcttaattagtacttagttttctctgctgattctgtatgggctttggtttttaattttttaactattaagtttctgcatgggtttcagtatttatcagctatcagtattaagcaagtaattttaactagttaatgtagattgcttgatcaatctacattataagctactttcttcgattctgatcaagaagttagatccttgactcgaaagtgatgggatctcgatttctcacctaataaacttgttataaaaatggctcgatgactaagcgaagcaatgtccggttcgatacattgctttacgtgatttcaattttatccttgaatatgtgtacataggagttcgatctcaaatctcggttacagattgtagtgtttgataaaattttccattggattcacctcatactatgttgatcatatgccgatgtggatctctagcaattaagctgcgatttgatcaaaaatcacgaacttataagctcatttgtaactgcaaggagaaaatacaagttttttcttatttatatattctgcttttttttattggaaattttctcgacatactgatttttgggcaagtgcgttaccatttatagtgccatttaaaaaaaattaaaacaagaagaagaagttattgttgattgcccctcgagaaaagcttcagtacattaattacgataaatacttatatatttaaggcgatatatcacctttaaacgtgtttgcttgattcattatgttttgctttctgcacttacagatttaaattgatttgaaatattgcaggtttcctcgtctaatcttgtaacgtatcggcctta

SEQ ID NO: 105200 - DNA, 739 bp, Mimulus guttatus
  Intron number 2 from transcript mgv1a010350m (locus mgv1a0 10350m.g) derived from phytozome v7.0 (chr-ID scaffold_1; pos 4383321 to 4384059 reverse strand)
ctggcgccggtgctgcggctggtaaatatatagttgtactgttttttttttttttcattagtcaacttaataggcaacaattcatgctgctcttgttccaaattgaatgcgctcttttattctattccacttgaaatatcatttgaatcggtttttttttttcctttgcaaggagtattagagaacgtagtttatttatttttgaatttggagtgtttatattatcaaatatattgaagcttctatatacccgcgtaaccaaaatatccggcagatatatgacatagaacatctagtagatgtgtaattatttttttccgatcacgaccgcactcttagggttgtaaacaaatcgagccgaacacatgagcttggtgtgataaacaatcgagtggaactcaaacgagctttaattgagccgaaaatgaatcgagctcagtttgaatttttgtaactatttaatcatacgagccatagctcattgaaactacaacaagattttaacgaacgatgtcaaatcgagtagtttggttttatttcagcggtacgcacacccaagcatcaatattcccagggcatgtgggttaggaatatagaacttctgtagttgtgtcatagatatttcctctctttcttctcctggtcttagagttgctatgtattagagtgaaattcttatgaggtttgaatttgaattggtgcaggagtgattgcagctacatttgtgtgtcctttagat

SEQ ID NO: 105201 - DNA, 570 bp, Mimulus guttatus
  Intron number 2 from transcript mgv1a004826m (locus mgv1a0 04826m.g) derived from phytozome v7.0 (chr-ID scaffold_204 ; pos 183540 to 184109)
cagtggaatacagtaagttgttcatcttcttctttcgtgtttcgataagcctacttttcgaagtaatcgattaaattgttatttatggttgacgaatctctctttcaaattttatggttgatgatcatatatatagcttttcgaaatatcgattaagttgttatttatggtggtcaaagctttcgtttcatttgtatgattaatgatcgtatagggcacctttcgtctaatcgttgcgctacttagtacataattgttaattcgacggacgaaagaaattcaactggtaagtactaatacccgtagtcgtttagaatatattttgtcgagagactttggaagattatattggaaaaactctacgaattctctgtactcgagatacatgaaatttgatttatgtgaatgtgagtaattcgtcgaaaaacttgtgattatggatcagtgtgctgctttatgtttgataagctaagtcatacttacctccattttgttcagtggcgaaactgtattttctactctgtttttgttgcagtcgtgagttcacacatcgtgtcaaatcagtttcca

SEQ ID NO: 105202 - DNA, 936 bp, Mimulus guttatus
  Intron number 2 from transcript mgv11b018501m (locus mgv11 b018501m.g) derived from phytozome v7.0 (chr-ID scaffold_1 15; pos 363326 to 364261)
caatactggaaaaatcacgtacgtgacaaagtatcgggaccgtgatcggaaaagttgacaactttaataacgtcggctggtagaggcggattgctgatcttccttagtaagtaatcaaagatgagttcttcatctgtcagcacgaaacgataacctggcgaatagtacgacttcattgctattgttattacaatcgatcgatcgatcacatattgatttaattatttctctctaataagtcatttttctttctttctgtcgaattaattaatgcatgcagatttactataagggttggtatttataaaattcggccttgtctcctatcattccacaatttcagtacaaatggacgcttctattgtacgacgtctctccgccacccttctccctttctctttttttttttcttcttttttttgtataatttttttgtaactaattgatttattttatatgtttcatgaataaaattgaatttgcaattgtattggggagaatgtatttgaactagaggtgaaagttaaagatcaaattcattcaaaaaaaggcaaaagtgtgtttaattggaattatatataaaaaaatattggaatttacgattattgactgttttttttttcttacgattattgactctgttttttttttttcctcacaccccccccccccccccccaaaaatagaccatatattcttacggtaaaataaattatatatttacatgtttttaccttatatgggccacgttggagagctaaagtatttcgtttgctattatttatcaccttaaaaagatctggtttcttccttagttttgacttttatcatttcgattaatcaactaaatttgtgtaaattgaacaaaaatgtggggataattacacttttcgtccctatacattaccacttaaacgattttcgtccctaaacaag

SEQ ID NO: 105203 - DNA, 1011 bp, Mimulus guttatus
  Intron number 1 from transcript mgv1a000579m (locus mgv1a0 00579m.g) derived from phytozome v7.0 (chr-ID scaffold_29; pos 654530 to 655540)
ggcgcatttggcatctcgcccgcaagaagaaacaggtctctctctctctctctctctctcgcctcaagaatatgtatatacggtgtttgtgtgtacgattcctatgttttcaggtggtttttgaattgagctcttgatgtatagtggttcctctgttctgttttggttttttttttttccccggagatttgactaatattcttcacagtgtgtgtgtgttttgttctattttttggggatttcaatgggattcttgattgtgtgttagtgtgtgtgtgtgtttttctattttcgggggatttcaatgggtttttttttaatccgattttcaattgggttcttgattttgtgtgtgtgtgtgtgctgtattcaggtgatttttcaaagggattcttgatagtgtgtgtgtgtttgtgtgttgtattcagggatttttcatttcaaagggattcttgatagtgtgtgtgtgtgtgtgtgtgtgtgtgtgtgtttgtgttgtattcaggtgatttttcaatgggattcttgatggtaatgtgtgattatgtgtgtgttttggggattttctggggggtgggggtggggtgggggttgtcagggggtgggggagggagaaaaatttctgtatcaagaatcacaatttgctttttaacccctgtctttatatgatgatgaatatacaaacacaacaacataatatatacatccatcaattttgcatgttgaattgcaactaaaaaacggagttgcgagaaaagcattcttttgtcaattactgtttgtactgctttttctcgatctcagaattctgctctacacaatttgtgagggccagagtaattcaattcaatctctattatcttatcacagtgtcacataacaattcttatttattttaataccgaaaatcaatagtcacacaagtggtgcatgtattctattactttatagtccattcttttttttttataactattttgaatttaatttgtgtctcgttcgatagttgga

SEQ ID NO: 105204 - DNA, 765 bp, Mimulus guttatus
  Intron number 1 from transcript mgv1a011907m (locus mgv1a0 11907m.g) derived from phytozome v7.0 (chr-ID scaffold_20; pos 2329870 to 2330634)
tttctaccagttgccccaatcaagatttggtaattcattccctctgttactgctgtttggccccccacccccactcgccgccccccttttttttttcctttctttttcctaaatttgcattttttaatctgcaatttttatttttctttgctgagcccatttttattgaagctttatgtgagtgtgtgtgtgtgtgagtgtgtttttgtgtgtgtggttttcctcgggggcaaatttcggccaccaccgagctatgaccaaattacaaaaaaaaaccctcttgtttgggtaattatagacactccctccttttaaatatttttacataaaatttatgtaattcggttatttactgaatcaaatcgtatttttagttcggtaaacggtttgaaatgttggcgtaccgaaattttggtggggttttaccaatttaatatccctaaatttacctctaaaggggtattttcgtaaaatagtacatagttgaggggtggctgtaattacccaaacatgagggggttttcgtaatatttgcccttttccttattaacaatgctaaaaaatacacatttcataatcacttgtgtggatattttttcgccggagttaaaagagtgttggacggttatggtgatttctcacttcaaattcgatcgaaattgataatttcgtttactgactcatttatccaggtgaaaaaaaaatatgatctttaagatgagacgatatataactaacttccaattttttttcgcacgtgacaga

SEQ ID NO: 105205 - DNA, 578 bp, Mimulus guttatus
  Intron number 2 from transcript mgv1a026812m (locus mgv1a0 26812m.g) derived from phytozome v7.0 (chr-ID scaffold_2; pos 444768 to 445345)
ttgagaagacaagtgagattaaaactgagagttccgtaaaatcggagggcatgactgtgaaacgctgtgagaatcttggtgagtctctttttattcacactctatatacataataatacatacacacctcttttctagtatttataaactcgaatattggttgtaatacttttcacggtgttcatcgatgtggggctggagggtaaaaaatatttattagcatgtaatataagtattttgcaatccgtattttccagacccctcggatcaaaagagtgaatatacagagaagaaaaacagtgagaaagaagttcagagctccgtaaaatcagaggacatgactgagaaataccgtgacaacattggttagcatctcttttatgcacaaacttatgtctctgtttcgtttcagtcgaaaacatgtcgtaatcattgcttctcacacacatttaaaaacagcatgttgtaccttaaaaacttgttccatcatttcaaacactgacatccatttgatatgattttatcctaatttcttgctgtaagattttcacgacgagttcaagaagaaactccagatt

SEQ ID NO: 105206 - DNA, 920 bp, Mimulus guttatus
  Intron number 1 from transcript mgv1a016727m (locus mgv1a0 16727m.g) derived from phytozome v7.0 (chr-ID scaffold_4; pos 2044883 to 2045802 reverse strand)
gaatcaccctgctggccctaaaaccagtgagttgcatttatattccctcttttttgggtttcagtatgcgttctgattcagttttgttctccgtcaacaataggtagatacatattgtgttttcttagattcagatcctagttttcaatccaatcatatacgtaatcctgtagaaaaaaactgatttctttgcggaattattgcttcttctttttttttttttttttttttttctggctggtgcgcgattatgtacactcatttatggatgtgattgtgaaaaaaattgcatttttcgaaaaaatattattggatttcgtttcaattttcaattcccccggccctgctcagaagattcatggtgtgtgcagtgcgaatttatctgtaaagctgatcagggattgtaatgaatcgacgactctcatcaatcatcatacaatgtgtagttactgagattcaggggtgttaattctgatatataatcaactttctgtctgatttattaataatacattcagctgttggctatcagaatcgaaagtaaacattattcctgagaaaaaaaaaatctacttccgtaacatgattctctcctcgaacacaccggtgaagttgtaaatcttggcatagaacatgtaaaatataattagatcgcgaaaaatctctatttagaaaatcgttgagcttccttctgtatatagttcttccgagttatagtctttcgtttttaatctacatttgttactcggggtgcataatcaaatgtatctgcaaatttgagtttgcttcatgttatcttctgatgagaatcaccttgagttttgttcacagcctgaattgattttgcaatttttcggtagatgacttttcctttttatgttatagttcatttttgggcgccgaccttcaagtggggcatt

SEQ ID NO: 105207 - DNA, 563 bp, Mimulus guttatus
  Intron number 1 from transcript mgv1a010779m (locus mgv1a0 09104m.g) derived from phytozome v7.0 (chr-ID scaffold_7; pos 848127 to 848689)
cttcaatcgtatcatccaagcttctcttcattccagtcagtatttcttattttattttattaatctctgctataatgttaatttttttttaattcctgcaacatttttatgctcctagtacgccgatcttagattttcctttttttttccgattaatttttgttacatgaaaaattattgttatctggaattagtggagatcacagtacgggcactttatttggttaaatttaggaaatagtgattcagataattatcattttgatgcagctttcttccagttttaattaatgggtagaaatcaaaattagagaagaatatcttccttgaactagtatatgcttcaccataatgcattacatgtttgctcatttcctcatacagagatcttagatacagtgtgtttgtatatccgaatccgactcattctactattcacttgttggtatactttgggggttaacatgattgtgtggtcttgtacgtgttctaactcgtcgttttttttcttctcttgaaattgtacaggttctgcgggtgattcagttggagcaaaagaaaac

SEQ ID NO: 105208 - DNA, 541 bp, Mimulus guttatus
  Intron number 2 from transcript mgv1a020311m (locus mgv1a0 20311m.g) derived from phytozome v7.0 (chr-ID scaffold_30; pos 1196438 to 1196978)
ttattgctgagaaggtctctctctctctctctctctctctctctctctctctctctctctctctctctctctctctctctctctctctctctctctctctctctctctctctctctctctctctcaagtggtggaaattggacgaatcggatttgaattaacacttttgaaaaaagtcatttttcggaagagaaactaattccaatttcattccaaaaataaatcgaaaattggaataacaataagtgtttcaaaaaccggcgaaattcagaaatttccaatttttagtcaccgaaaatataaaatacataataataattcagaaattataaggtgtaatatatattagaaaaaaaacattggaattttacgaaattaaaatcggatcgaaaatcgaaaccttatatattccatttatgatccaaataattttcattttactaaatgcaatacttttcattaattctttttttccaatttttaagaatatgatttatcttgtgtagattccaaactgtctggtcgacctctccgcattcgt

SEQ ID NO: 105209 - DNA, 613 bp, Mimulus guttatus
  Intron number 2 from transcript mgv1a004967m (locus mgv1a0 04967m.g) derived from phytozome v7.0 (chr-ID scaffold_17; pos 1491070 to 1491682 reverse strand)
atctacgtcatccaaagggctctagctctttactcgtacgcctcgcttactcttatatcctcatcgttgaaattttgttgtatagctttgttttagaagcacttagggtttagccattattagttgttacggtagtggtcataggattgttcgtgtgccgttgatttgggttctgagaatcagtgagattatataaatacgtcggttgcagtttggttttttccatcacatttcctaattttataatgttaaagaagcaattgtttttagatgacgatttatcttagtaaattgttgacaagaaaaggtcgttattggataagatgggatgtcttcaagcatttatgaagatgattttttttttgatagagtttggaaatataagcatttcgaaacttgacgagtggagtgagtagtatctttgacttgcactttaggaaataaaagacattcaataattactcggttcgttatgagctgttcatctgtgatgccaagtggcacctgcatatttaatttccccgatagtttgtcgtttaactgcaatggtgaaaactagattaaatacttgatgattttgttgacagtgttgaagaggtcgctttcagcttta

SEQ ID NO: 105210 - DNA, 528 bp, Mimulus guttatus
  Intron number 1 from transcript mgv1a004967m (locus mgv1a0 04967m.g) derived from phytozome v7.0 (chr-ID scaffold_17; pos 1491749 to 1492276 reverse strand)
agagtcttcagacgaggtaatattccatccctgaatcacatcagaaccaaatttcctctttcgtatcagaagttgaatcttctctcgtttatcgttacccgtgttcttcatttaattctcgtttcagcacaaggtggaaattccattgttaaattaaagtattaaacccatcaatggtgacttttttttttttttttgttaattaattgcacatggtaattgttgagttcgttgtctgtgcgttttttgttaattttttttttctacattaaaggcaagtgaatttttgttgttggaaatgtgattttgcaagtaatcgcaggaattcgcatctatcttatgtttggtctggtaattttgatttgcttgaatttgaatgaatactcctttaattgaaaatttcagacttctgttatgacacgctttggccagcttttcgagtttaaatatctggtgattgatcgttgttattcttgttattgttttgattcacattcaggaagattgatattgatataagccaaaaaa

SEQ ID NO: 105211 - DNA, 560 bp, Mimulus guttatus
  Intron number 2 from transcript mgv1a012806m (locus mgv1a0 12806m.g) derived from phytozome v7.0 (chr-ID scaffold_17; pos 2364724 to 2365283 reverse strand)
gtccgtcaatcctaatttcatctctgtgttcaacagtaagtattccttgtgtttttcggttttaatttgatccatcgtgtgctttgtaattcatattttactgttgtgcttgcatagctgcatccgatcgtatttgttgagtagccgattctgcttgtgactagtggatgatggatgagttttgattatatgttgaaaattctggtaattcatttggatagaagggagttggatggaagtatttagattcgatgggaggattgggattttgtatattattggaaagacaatcaaatcgagagatatggatttgaagctcattagagaataaattaattcaaacaagctcgattgattagctatggatttggattcgttagggttgtccgagcattatactttgtttctttggccttttcttgttagcaacaaatcgtcaatctttgctatgataatttcttgtcctttgctagaaccgagaagaagttccgaaattaattagccaatttgtgtatgtttatgcagatcaagtcctgcagtctggtccatcaaactcttgg

SEQ ID NO: 105212 - DNA, 547 bp, Mimulus guttatus
  Intron number 1 from transcript mgv1a013657m (locus mgv1a0 13657m.g) derived from phytozome v7.0 (chr-ID scaffold_139 ; pos 287307 to 287853)
actatttagtatcacatcttttcattcatcgagtatttttcagaacaaaaaatgagttgaagatgtcggccaattatttctctgatatttgaatcgttgttatgtaggtacttggtattttaatataaatatagcttgtgtatttaaatatgaatacttggacttgccacaactcaaaaacacttgataagttcgtgcccgacttcaaaatttatccagaagcaaacgtagaagtgtaacacactcctagagttgctcatgtagaagtatctaataaggatcaaagaaatttttcaattatttatcatttataaacgttgtattttatccatatttcaaattagtttcgtaatcaagatctgcctctcgttgttgacattgcatgcatgaattagtcgtattatgccttccttacccacgttgatcatagtatataaggtcttgaagtgacttaatgttctgtaacactcgatttcgtttgtcatcagagaaaatcaaaccttctgatgtaggcctcgagcaagacgcccaattagtacggaactgg

SEQ ID NO: 105213 - DNA, 589 bp, Mimulus guttatus
  Intron number 3 from transcript mgv1a013657m (locus mgv1a0 13657m.g) derived from phytozome v7.0 (chr-ID scaffold_139 ; pos 288138 to 288726)
cctggtccttctgatccttctcaaggtttattttattttattttattgggtaaattacaaccactccctgaggtatggtcaaattacgaaacccccctcctttttgggtaattacaaccaccccctcaactattaatgttcttacacgtccacctttgcggttttaaatttagtgaaatcttcgagattatatagaatattatctcttttgtacccgttttgtcccattcgaactccacattttgaagcaagatgatcataatatgtgttttttggcttgtatatatcagattgtgtggtgcatcagaaactgtatttttacacaagacgagtacaaactagagcacattccccaaaatctaaatgattatgttgtatttgacaccataagggtggaggtgtaagaaaaaatcattgttgaggggtagatgtaattatccaaacaagaggggttttttcgtaaattgaccatacctcaggggtggttgtaatttaccctattttattttattttattttatttatttattttttaattttttgattaatttcaggagcaaggccggcaaagatcataagagattgcgaa

SEQ ID NO: 105214 - DNA, 556 bp, Mimulus guttatus
  Intron number 1 from transcript mgv1a003125m (locus mgv1a0 03125m.g) derived from phytozome v7.0 (chr-ID scaffold_126 ; pos 300166 to 300721)
aagatccgcgatttgccctactatcaaagaaccaggtattcaaaccctaacacgaattgtctcgaattaatttgcaatttcgaattgattgtgtttcttcagtgagaatttcaatttgttttgtgatttcttgacttcttcgtgttgcccatttttttttttcatccgagctcatgtgtttgattattgcttttgtagtggcaatacgtctggtagaaatgtgtttgaaattaggtttaatcacatgaatgatcacattttaccatgtttatttgcgaagattatcgtacaatgttcgggttttaagctcgattttgggcacggactacagaatacacaacatggatattttacctagcatcgatttttcgattaattagggcttggtgaatagtgttcgattattttccgtgttcaatatgtaagagtagtagttaccttgatatttggatttctggtccattattacgttgttgtgttagtgaaaccgagacgatgtttcttttcttatgaaattccagatacgatacatacttctataaagtatttaaagtct

SEQ ID NO: 105215 - DNA, 643 bp, Mimulus guttatus
  Intron number 1 from transcript mgv1a010330m (locus mgv1a0 10330m.g) derived from phytozome v7.0 (chr-ID scaffold_92; pos 388043 to 388685)
agaggactcatcgcggcggaagtcctcgtgtccaagtaaagacctctctctctctctctctcctttccctttatacatgattgtggagcagaattgcgtaggaaagcggtgaaattattgcgtttgctgtttgattttatggttttttcagtaattggattgattcgatcggggggtttgattgtgtgggttaaattaatgatgttatacttttgatgcttatctgataaattcctcgattatccggagctggaccaattgcgttatttaatcgaagattttactccttttctgcttgttaatctagccctgtctgtatgattggttttagcgatgatgtttttttttttttcctattttttgttatttcggtaaatcaatgaaaagaactcgagaaagggtttcctactttcgtctttcctttagcaaattgtttttctggtcgataatttgactgccttattttctcttgttatgaaattagtgatgatagataagctgatattacccatcttttttttttttttttttttttttttctaaattgtttatattggtgctttatattctgaggggagtcaataattaaatttctgaatttgacacagagaaacagagttcaaagtgttcaacaagaaaccgt

SEQ ID NO: 105216 - DNA, 749 bp, Mimulus guttatus
  Intron number 2 from transcript mgv1a021503m (locus mgv1a0 21503m.g) derived from phytozome v7.0 (chr-ID scaffold_143 6; pos 195 to 943 reverse strand)
ctaactgtgagtatttatttgtttattcctctctaatattatttgtttatttctctctaatatgtagtatccatttacctcgaattagctttttaaatcatattgggaagcatgattagtgagctttaaggtgtgcatacaaatgccgggtttttgcctccttttcttatagggatttagtggctatttcagataatagtgcattgcatctgttaaggtctcgtttggttgctactatgggattagtacaatcttacgagtgcccaattgtatagttgggagggcatgaaaatttattcttctatataaacatcaaataaggtccaattatttcattaatatatctgcccaatcatacacaatgcctaaagttacgaatgtacaatgacggttcttgttgtctgtatgcaaatgttgaattttttcatctgttacaactaggggcgaaaattaaacgaatcggatcgaaattaggaaacattccaataatttttggaattgaaaaactaattccaattccgttccgatttttttttggataaatcaaaaaacggaatgttgtaaatttgaaagtaagaacttgttccaaaataaaaaattctcgaatcataatcggcagaattcgataataccgttccaatttccaaccgtagttacaacttgtaatctgaaatgtggattcaaatttgatatacatgtaaatcttgtggacaggtgttccattgttttggacagtatttttgtctaca

SEQ ID NO: 105217 - DNA, 365 bp, Mimulus guttatus
  Intron number 1 from transcript mgv1a012211m (locus mgv1a0 12211m.g) derived from phytozome v7.0 (chr-ID scaffold_18; pos 843355 to 843719 reverse strand)
acggaggtacgagcataaattacattactttttgttcatttgcgaaatcttcaatttgaattccaaatctgcatttcacgagtagcttttcttatatttaaaattgtttaatccttcatatggaaaacagcttttcgaacatccgatttttagccactccgcgtagaatattagtgctgataattttgaccagatttttcaaatttgcagcccaaaatttctgtgcatatttgcgtgaataagatgatcttcttcatagatcatcgtaattttgcattatgttttctggatatattatgttgtttatttgatctgaaaactcggttatggtctattttgcagtactgggtaagtcagggtaacaa

SEQ ID NO: 105218 - DNA, 679 bp, Mimulus guttatus
  Intron number 1 from transcript mgv1a012309m (locus mgv1a0 12309m.g) derived from phytozome v7.0 (chr-ID scaffold_8; pos 2060730 to 2061408)
cgtgagtttccgattcccatagaataatcgctcttattgtttttctttcaccgatctcgtccgatctgattctatatttactgttatttttcggtagatttagcattgtttcatgaagtattattgcagatctatatcttctttgttttgatttcattgtttacgaatcttagtgagtaatctttctgcagcggtagttgattgtatttgatctggtagcaaactgtttggcagaaatttaggtctggaaaatgaaattagaaatacttgtgttcagatctaaaatgattcgtttacaatagccgttctgaagctcgattctatgtatttgaacaactgcttactttttcgatgggatgttttggtatcggtatcgaatatagcacgataattgctagatttgttatttatgcatctgttaatttatcatatgaaggcagatagttacagtttggagtttagttagtgtaaggcctcgacttcctcttaccttttaccgtgttctcttttgggatatacttttgttgtaagtgttcattgtagtatgcacggaccaccaatagtgtatgcctttctgttttgttatgattttgtagtagattgtttgtttaattaccagatgttacccgtatgtgagcgtgtttcttgtcattgaaatgttccattttttttttctaga

SEQ ID NO: 105219 - DNA, 736 bp, Mimulus guttatus
  Intron number 2 from transcript mgv1a012309m (locus mgv1a0 12309m.g) derived from phytozome v7.0 (chr-ID scaffold_8; pos 2061478 to 2062213)
ttgtcggtgagtatatacatgccttactcaatcaaatgcttttttttttttggattcaaaatgggaggtttatccaagatgaaaaagatgtgaaattatcattggtgttgactgatttttccttgcagaatttgtatgtggatatgtacgaaaaatatatcttctctaatctgtatggataagaacaacctgctagtttctttgttttgcccatacggcatcatacgttcttcttccttcgtcttgaagcaaattggaaaaatcttagtacattctgcttattttgaatttactttgatccttcagatttaaattctggtgtaaaagtgttcagaaattcatacccacgactcctgtttacatctgaaaattattaagaaatatatgaagttagagggtttagcctgagaattctacaatttgttaaaatataatatgcatcttcttcaaatctatagtaaagatcatggaaatacttttattgcttaaagtagaacacactgatatttgcttgcaactatggctctagtatgggagtggcggaaactgagtgtctgtctttgtacttatttatattaccaattttgtagggaaaataactaaaacttctctttgggttttcccattgtatatatgtctgatccgtggaagtctaatttcttataatataattgtttgattaccttgactctgtcttgcagaggttgttgtcagccctccatacgtgtttctacct

SEQ ID NO: 105220 - DNA, 950 bp, Mimulus guttatus
  Intron number 5 from transcript mgv1a013151m (locus mgv1a0 13151m.g) derived from phytozome v7.0 (chr-ID scaffold_270 ; pos 202782 to 203731)
tccgtaaagaggttgtgaaacaggttggtataatggttgatattctctttgcagcttgatatacagttggcgttttaatttctcagttataagattttcaagccactttagtttgacttaatgttatttgaagacatttttttcttggtaaaaatggattttttttcttgtttgttacccatgcagcaatgtccactataaccctattgctacatagaatgaggttttctcaattatttcagcaagtaaagcaacaaaatttattttcatcagttttggatgatgcaccatctctgtgttgatgtttaatattgtcacccttaccaattttctttgcttacagttacagttgttgtcacatcatctttttttggtcaattctgacccatttaatataaatagaatcctgaacatgaaacattgaccactccgctgctatatgaggcctacactcccactttcgataactttatgggtgacaatatccttcagaactataggtgctttaacaccatataagctctcaaaaaatcatatagcagcatacactagcttttagtttaaccatggttaccttctactgcttcactttttggccttgtgatgacaatttattgatttcattactgtcctcaatttagatttctcggttgacatacctctaacctagatagaggctaaagggttgccagctcattccaatgtctgtgccctctacctgcgtattaaaattctgtcccttttcctaatctataccatcttctttatagcaatttatttctgaattacttgtattgttgaccaagctcctctcaagatttaatcctaatagacttgagtttccataacaattccttttgcctacagtagttcaccggaactggaaaaaaaaacctccaattgggcactcatattttttaacgtgttctgtttacagcttaaagataacc

SEQ ID NO: 105221 - DNA, 649 bp, Mimulus guttatus
  Intron number 1 from transcript mgv1a008282m (locus mgv1a0 08282m.g) derived from phytozome v7.0 (chr-ID scaffold_111 ; pos 278554 to 279202 reverse strand)
gaatcggtttgcctctttcattttgagttggttcttttttttggggtttatttatttatttgctgccgaagaatcagctcaagtttcgattttttttttatgttgctgtttatatagacgttaattaaagatgcaaactttagaagattctttagttatttgatcttttagatataggaataagattcaaaactcaatcggtagcaaaatgaaaatgactgagtgttgaaattttattcttcgtagtgtaacgtaaagtgcaagggtgctttcgttcgagggaaagtcgaagaatctgttcggtcccgttttgagggctttatttttcttttttgttttgggaatttgagatgtgaagtaatatttgtttgaattttgagaagacaccatttaaatcaagttgaaatctattttgcggcactaataattgtgatagaatcggattctactttgctagtattccttctcggattccttagcttttcagtaattattgttcgatccatattaataatcttatattgctatagctattatattaatttctcctacattgcttcttttaagcaacatcgtggagaaagcatttcttaaacttttgacgtaacttttcgtctgctttttttgaactttaggaatatacagcgca

SEQ ID NO: 105222 - DNA, 965 bp, Mimulus guttatus
  Intron number 2 from transcript mgv1a006147m (locus mgv1a0 06147m.g) derived from phytozome v7.0 (chr-ID scaffold_60; pos 1241514 to 1242478)
ctgttcttcttgcttctcaggtttcatttctttcctttctttttgggtttattgtatttagcacccatgtatttactttgattgtgaaaaaactacccatgatataaatattagcaaaaactcccctaatatgttaaaatatttatagcaaaccacccctttaaacacacattttatggggtttttgtgccaaaaaatacatcataggggttcttactaatatttataacactaatgtgtttttttagcaaatttgatataaaacagagtactaaatagtaaatacaataaactatttctttttattactctttttgttttgagtttattgcatttagcacccttgtatttaccttaattgtgaaaaaactaaacatgatataaatattagcaaaaacgcccctattacgcatgtttctagcagactacccctaaaaacacacaatttagggggtggtgtgccaaaaaatacatcataggggtcttttttgttaatatttatgacacttgtgtttttttttagcaaattcgatataaaacagagtactaaatacaataaactatttttgttttttagttatatgtccctttcttcatctgcttctattttaaattttaactgtagtatttttttattatttttttaatttctaatttaaaaaaaaattataagcacaaatttaactgtagttgaaacatgggcatgtgccttaaaataattgagttttgtttggatgaaacatttcacaatgaatttattcgaactacctctcattccaagtcgtttgaaatccttatctcgaaaatactcgtctctcgatcgatgtttttcccatccaaacgcaacttaaagaaaacactacgcatacgaagcttcgattaaataatcatgtgcaattataatgcttgtcctaaataaaaaaaaaataatactaatattgtgccttacgaattaacgataaagg

SEQ ID NO: 105223 - DNA, 442 bp, Mimulus guttatus
  Intron number 1 from transcript mgv1a005513m (locus mgv1a0 05513m.g) derived from phytozome v7.0 (chr-ID scaffold_30; pos 1650858 to 1651299 reverse strand)
ttccccatttatccgacttcattcctgatcttcctgtaagcataccctctctctctcctctttctctctctaagtcaaatatttggttcttccttctttggtttcagagctttaattttggaattaaaaaaaaaaaactacgtgttactctgtttcactgttatttacgatttgccatttcctgaattttccgttgatgctttaggattattgtaatttgctactttaatccactggtaattatgtaattttcaagcaactaattcccacttaaactaaatcacttgttgtgcatgcatcttaattacatgtaaaaaattctcagtcataaaacaataatagtataatttttcttttaaatttgctatttaattttaattcgtgttttttttttccctcttcgacagacttatccgaatccgttgcaagacaatcctgcata

SEQ ID NO: 105224 - DNA, 501 bp, Mimulus guttatus
  Intron number 1 from transcript mgv1a002418m (locus mgv1a0 02418m.g) derived from phytozome v7.0 (chr-ID scaffold_164 ; pos 285491 to 285991 reverse strand)
aattttcctccgcccctgtttctgctcttaaaaccgtacgttcctgttttttttcgagaatttcaattcccgatgaattcgattttgttttaatcttatttctcccctttcgtaaattgttgtgtggtatttctgttacggaatgtgttttttatctttacaagtgttcatttcttttgattgtgttagataacggtagattcagctaagaaaagttagtccttacttactgatcatgatcggcgtactatttgaactgatgctaacatgcgccatgtgaatttgatgaccacctttctaaaaataataataaaaataaaaattgacgaggatcttttggtctacttctacaaaaattgggatgatctccttgttttatctcatgccttggggaattttttttcctgcatgttttagtttaagtcttctaatgtaatgatttaacacagttgaagtagctgtatttttaatgctttattatgtgtattcttattcagttca

SEQ ID NO: 105225 - DNA, 671 bp, Mimulus guttatus
  Intron number 1 from transcript mgv11b017390m (locus mgv11 b017390m.g) derived from phytozome v7.0 (chr-ID scaffold_1 97; pos 256339 to 257009)
tcactgacttttgagttggcaaagttgggcttgcggtaagcgcagtgttgccccagagggccggtggattgaccaacggaccaagctaaaaagtccagaacattacacatgttcttgagatcaacacccaatattttatcttctttcaattatggaacttgcttggccacgaaatggaagcaattatttgtctttaatgatcgttgatctaaactgttatatgtaattagaattatgagactcgtacatagacgcgatgtttgaatagctctgtggtcccatgatggcgcactcaaaggaattggttggccactataatgatcttacctcctgaggattcttcagtttttatggaggtcttcgagcccaaggttaagaatgctccttcgattcatgctctggtgcctccaaatgttccgaggaattcctttaagcttttcaacgaattcgggagtgaaggagttgatattgaggaaccgtttgttcttttgattttgattgtttgttcatccagtttagctatgttagagctgggcaagcaagttcatagattagtcatagttcttgggtacgagtccagctcgtatattagcaatgcactgatttgtatgtatgctaaatgtagtgacatattatctgcagagaagaattcggtagtgtgaggataagag

SEQ ID NO: 105226 - DNA, 540 bp, Mimulus guttatus
  Intron number 1 from transcript mgv1a019151m (locus mgv1a0 19151m.g) derived from phytozome v7.0 (chr-ID scaffold_150 ; pos 206226 to 206765 reverse strand)
atcgtagtttccagattaattatcaagatttcgatgtaagttataactttcttgactttcctttatgttttttagggtttctagggtttgtgaagaagtttttcaattttttcaagaatcaaatcattactgcatgtgtgttcattaaattcagacattaacgtgaactgagttttttatcattacaagtaatttattcattaatatttcttgccagattcttaaaacagtttctttcaaagtaattgttagtacatattttttttattactaattctttttttccttttatgctttagggttttttagggtttgaagaagctaatcatgaatacgtatttttataaaattatgaaaactaactgaaatcgaaggttcaatgaattgatgttttatcatttcatatcccttcgatatttcttgtcagaaattcaatcgtctacatatatatacatttgttctgtgagtatatgttgattatgttattacataaacattagttgactcgaatttttttttctacttgttaattcggcaggg

SEQ ID NO: 105227 - DNA, 542 bp, Mimulus guttatus
  Intron number 1 from transcript mgv1a007253m (locus mgv1a0 07253m.g) derived from phytozome v7.0 (chr-ID scaffold_155 ; pos 437561 to 438102 reverse strand)
tgattttgccctaatcggatccctgctttttcaaggtttttttttttttttttttaattttttttaattttttaatttataattctcatggggttggtataaatgcgacgaattacctttctgtgttttttcaagattggatttttttttatttattttgtttttttcagtattcgagctgtggaatttgttaattttgaagaaatttggtatattccgatgattcagggtttggggttgaatgtaatgaaatatataaaattcgtaaaaaactaggttaaaattttaagccctttgttgctcaattagtgtagatatatttaattattttttgttgaatataacctgcagtttgactaattcataactccgattatacaattctgatacaggggtttaatttgatatgaattgttggaaaaaataataacagctataattctatattgcccttgtttgtacatgtctgctctgttttctttgttcgatcttttcgtaatattttataacttaaaaaactcgaaaatcatgtccacatacag

SEQ ID NO: 105228 - DNA, 557 bp, Mimulus guttatus
  Intron number 3 from transcript mgv1a011093m (locus mgv1a0 10830m.g) derived from phytozome v7.0 (chr-ID scaffold_3; pos 1956360 to 1956916)
gaactgtcgcgtctaggtttgtgaatatcttatctcgataatttgctagtcgatttctttgaataggatatagacattgagaacttggattgaaatgcgtgcacttaatgaatttttagtcgttcttgctacaaagtgacttaagcaaaatcttgaagatgcatacacacatgcatatatatatgtctgtgtgtgtatgcgtgtgtgtgtgtggaataagataattttttgttcctttgactttttttgtttttcctatctgcatcgtggattttctacagagttttcatttcgtttcttatgattaagaccatcgttttctgggacagttgctacatcatatgttaagtcttcccttattttcacaatcgtatttgtttcttgaattttaatttgaaaattgaataaggcgaggacatattatttactacttggaatcttctgtatagcacgttccacgatcaatgtagatagttatggttcaagctcgacaaaatttttgttttgtatgacacacattattgcatgtgtttacagggagattgttgtgcagttca

SEQ ID NO: 105229 - DNA, 840 bp, Mimulus guttatus
  Intron number 1 from transcript mgv1a021065m (locus mgv1a0 21065m.g) derived from phytozome v7.0 (chr-ID scaffold_14; pos 111300 to 112139)
aggtgagattgagtaatctcatccaacactcagcccaatcaactacctatattactattatgccctgaatatttatttctaattacaagactaccccgtatatatatcaattacgccctagaattttcccgtcatagcattacacagccgttcttcgttcttctgcaccgaaaaccgaaaccaaaaaccgaatagaacaattctgagaaattcaaaggaaagatcgaaaaaataaatcaattaaatttgtgcttctaacggctcacctgatgatcgggaacctggcggacgatgcttacagaaacattaatttttagacattgttaatcctcggttcgatgataataagattctccactgtggtctgtggttttttcacggaggtattttttcggataatcgactcatctaggttgtctaatacgctcctttcttcgtttttaggcccccctaaaccggagtaatcacagattgcttcaaacgcatccgagtaaaattgaagaattttgggttcatatccttaattttcctttttttatatccttaattttctcgcattgttcttacagcatttcaaattcttgaaagaaaaaaaaagatattttctgctatatgtttatatctcatgattcttgaatttcattttatttgattgtcagttatccctcttttttaattgtattcaatgcttttgtggcttattcggagtttgttctattctacaccacgacaatttaaattcatatattgattgctataaacaatgggtcatttttttttttttttttttttttttgtattgcagtatttgcaggggaagcaattgtggagtaaagttcc

SEQ ID NO: 105230 - DNA, 846 bp, Mimulus guttatus
  Intron number 2 from transcript mgv1a021065m (locus mgv1a0 21065m.g) derived from phytozome v7.0 (chr-ID scaffold_14; pos 112161 to 113006)
atgtaagtaaaatcttcgaactttttttgtttacttacttgtccttttctcctttaggtttaatttcacagatcttgttcgattgtcactaaggcctcgtttgattgctaagataagattaaataaatctaatgaaaacccaattattttatcgggcaccgagacgtccaacaaaaaaactacctaaaaggccgataagctacgatgataatataatatttgcaagttgacccgaaaagttattgggataccaaacattaaacgaagttaaattatttagctaataatggttaatctccccaactaaacgaggactcatagtctaattttatagtaagaggttcaatgccaattctccaataagcgtaaataagggatgataagaactaattttttggcaccctgaaaagttattgaaccaactaaatacgaggcattaacctcttttttttcttgcgatggcgatatattagtagcgattttgttcacttgaagcatttactaataattattagagtatgaaattgacctacgtggtggattcttgaatatcgatgtgacatgtgtttgttttggtttagttacttcttgtaatgaaatactttcatgataggaatcatttgctttctcattaaagttgatctcaattagctgactagtcgattttcgatcacccaccgaagcccctacatgtacaagaatgaatgattattagaaacatggaaatatacgtgtgttcaaatattgtggagaattctaattctcggtgggattttatatatattcaatgggattttttttgtttttgcagattgtgattagtaatttacgaggggaagtgagcac

SEQ ID NO: 105231 - DNA, 605 bp, Mimulus guttatus
  Intron number 1 from transcript mgv1a013353m (locus mgv1a0 13353m.g) derived from phytozome v7.0 (chr-ID scaffold_220 ; pos 334742 to 335346)
ccttgtccgtttggtatgcaaattaaagtcttcattttcagccattaattctttttaaataatatttttttcgtctttccattttcatcgatttggtgcatcataaactttctttcttgcttggactaaaagtcgtgtttttaatacacacacaaatatgggtctattgtcttatcgagctatgtttgagcttcgagttcgaacgagctttaattgagtgaacataaatcgagctgaaacttgataacatgcatttttgtacatattttatttatttgtttaatataattaaatccagtggagctgtgacgaacgatcttgaatcgagtatcggacagtttgttttgattttcatcacttgactacaaagtcatgattttaatatgaatttgtgtcattttatgggacgtggcatttatatatgcatgtcacatgggaattttctttgtgtgtgtggcaataaattcttatcattacattacattacatcacacgacggtcatttttcattttgtatgtattttaataaaataaaataataaatgcgtcgttgtgttgtatgctttaactttatttatttgttgccttgtatataataatgcagc

SEQ ID NO: 105232 - DNA, 519 bp, Mimulus guttatus
  Intron number 1 from transcript mgv1a006556m (locus mgv1a0 06556m.g) derived from phytozome v7.0 (chr-ID scaffold_126 ; pos 264306 to 264824)
acttgaggaaattggttccaaatcccaccaaggtataatattaattataattattaattaatactcccttctcattttatttgtcgtttttttttttttgaattatttgtcatttttaatttcgacgaagcattaattgtgtgattagttgaggaccaattaattaatagtaagggtagtttagtaatatcatatgcttcttcccatattatttggccttcggattttttttatcttcaaattatttgtcactttacaatttcaatgatatattaattgcattttcttttcagttttgccctttaccattcttaattaattgaaagataattagttcagaatcaattaattaaatgataagggtattatagtaatttcttatatttttgctttgatccatatattttgattgatttacttaatatgtgcgagtaagagcgataataatatactcctcttttgttatttccgaaaaaaaatcgataaaaaatattatttttatttttctgtaattgaaga

SEQ ID NO: 105233 - DNA, 755 bp, Mimulus guttatus
  Intron number 3 from transcript mgv1a007504m (locus mgv1a0 07504m.g) derived from phytozome v7.0 (chr-ID scaffold_6; pos 7262 to 8016 reverse strand)
tgacagcttctacggcatccaagcccgggtatttctcactgtctactctattgcatgcttactattgtcactttaaagtttgaatgccgttataaagagtcccttttcttctcaatgctgtaacttcaactagtgtcctgcaagcggagaaattaaataagccattgtcaagtgtgacaatttcagtgatattaatgtttttccacaaaaaccttgtcggaaacatcatatgagatttttgataattttctgttccaagactggagaaatggttatcagcaaatattttatgcctgcaaagtaaagattgaaccaattagtcgagagccattcattacaaatctgaattcgaccctataaatataatagctatgtgtactcaggcaatgtactccaatgtgtaaagtgcaatgcatttcttttcatcactatctctgaccttaatagcaaaaagactgatccaaatctcctcatctatcatgagttttttcatatgtgcattgccattataagaaacataaggttttgtacagtttcattaccaaatggccaatctccggtatggaaattattaattacttagtctaatgagacttactggactctggtatggaaaatcttgaactcaagtctatagttgcatctacaaatcttgcaactttactaggattcctgcctgttgtaataaagttatagctctttcttgaactagattttgagataattgtccttaaacccaatcttcacctgtaggc

SEQ ID NO: 105234 - DNA, 632 bp, Mimulus guttatus
  Intron number 2 from transcript mgv1a014398m (locus mgv1a0 14398m.g) derived from phytozome v7.0 (chr-ID scaffold_188 ; pos 401986 to 402617 reverse strand)
cctcgttcttctggcccaagaatcaacaattctaggtagtttttttttttttctgtttttatttatttctatttttattgtggggtagtaagtttgctatgtttagtggtaaagaaaaaagaattggaatagatgattcatttcaagaattgtatgtttgaatgggattgactttcttgaattttatttggattttgtgctcttaagtcaaatgaattgaaatttgtgtaactatagagcaattttaaagattcaatttgccattcattactagaatcatcgttaacttcgacaatacgaagattttcggtccctcggtttctctattagtgtgttaacttccatggatgttagctacatttcctacacacatttccccgtttcttcgaatcacttacaactttttctaccgtttactatgtgttagctagtttatatcaatgaaaggctatgcttactcattttgtttgctttaacattcgccttttgaacatcaagaaaatgcaattagctacaatttttttttttacaaaattaaaatcatgttacaaattgggatcatcagttgtcaaattatggatcattttcttgaaatccgagattttaacaatcgttttctctttgcaggacaa

SEQ ID NO: 105235 - DNA, 933 bp, Mimulus guttatus
  Intron number 2 from transcript mgv1a016553m (locus mgv1a0 16553m.g) derived from phytozome v7.0 (chr-ID scaffold_87; pos 541331 to 542263 reverse strand)
ctccccagccacaaccaccaggcacctatcccgtaaatatttttcttacggagtaggtaaactacggccacacccctaaggtaaggtcaaattatgaaaaaactcctcatgttcgggtaattacaatcatccatcaactgcgaatattcttacatgtccatccttgcgatgtcaaattcaatactatcttctagattcggtggaatattatctagtttgtactcgttttgtgcaaaatgcagtttctgatgcaccacaatatatgatcatcttgtttcaaaattcggagttcgaatgggataaaacgggtacaaactggagaatattccactgaatttaataccgcaacggtcagtggcgagtccaggaactcagtacagggggggcttcaattttcgggggttcgggggcagcgcccccgagacttttttaggatttttttgaaaataggaaaaggagaaacgaaaaaaaaaacagagaaaaaacaaattttagagttttttttgtattaatttggattttgggtgggctaattaataaaatttgggacttttttgtattaatttaaattttgggtaggctaattaataaaatatggggcttcttttgcattaaatgaaattttgggtggctagtaaataaaatttggatggactaaatagaaatagtgtataatatagggggaaaataaaaaaaaatgagagtgggcttgagtccacccttgcccaagggtggactcgcccctggcaacggtggaagtataagaagattcatagttgagaggttctttttgtaatttaaccttaccttaggagtgactgttttatcctaaaaaacaaaataattaattaattaattaattaattaattaattatgtcatttaatttaattaatgaagttgctaatcctctacctttcttatggtcttcagt

SEQ ID NO: 105236 - DNA, 856 bp, Mimulus guttatus
  Intron number 2 from transcript mgv1a012129m (locus mgv1a0 12129m.g) derived from phytozome v7.0 (chr-ID scaffold_258 ; pos 73312 to 74167)
actgttttctccgagaccaatcacggttaattttctcgattttgctgtttctcatgtccgaattttagtgccttaatgaactattattacatttggtttaaattttgattccccattgataatagaaaacctaagaactagtggctgagtccaggaatttgttactggccgaaatttatttagaatttttttgtgacaaaatcagaaattagggaaagaaaaaaaaattagagtgttttttgcattaagttgaatttaggctggctaattgataataaatggcgtttttttttgcattaatttgaattttgggtaggctaattaataaaattgaatgggctaaatatatttataggtataataataggggataaattatcaattgagggtggacttgcccctgctaagaagttctgtcttttggtgctgtaataaggagctttcattgaagtatgtatgccgatgcaatcaagaaaactatgaaaaatttcaatattttttttcaggatttttttatcgcaataaggatgatattgatatggatgatttatcttcgttttcattatttgtcttcaatgctactaagatttaaacctaaatgaactacagcttgagatcaaattgacaccctaaaatagtgatcttaccttattacagttctttgatgtgcatttttacgtgacaactgcgtcacgttgtactggctgtgttagattaacttgttgggaaaaatacatagacgatctctgcttaacttttgctatccgtttataaaagaattaaatcggtagtgaacagacgttcttgtttttttttaacaggaagtgttgcgctcgaagggaaagtggaacacaaa

SEQ ID NO: 105237 - DNA, 943 bp, Mimulus guttatus
  Intron number 1 from transcript mgv1a001140m (locus mgv1a0 01140m.g) derived from phytozome v7.0 (chr-ID scaffold_235 ; pos 117693 to 118635)
caggtatgtgtaaaattgggtcagtgatcttgattaatctttgttgttactaaatgtgtgattttgggtgaaatagaagtgcttgatttagtacatttgtttgttcgatgaggtatatcatatatcgtctctgaacgggcaacaattttgttgttctgattgtaatctgtcgagacaatctaaagtgtatcttcttaaagatactcgtgtttttttctatcatctctatctcttttgattctggtatccgacctcgagtaaaaggaaattttggacaggttctagctgcaaaattctgttttcttttaaattttgaataccaactcggatactatgccccaaatgtgtaaaacaatagaaagagtctctccagtaagagtttttcatgccatttttgcattccttttctctcagcgtttaaccttgagcaaaaaagagtatgaattctagctgcaaactcgtctttgcctcattgcctccgaatcatagttatttttttcaaatagtatgtcaagttaaaatttttttgtgaacttatgtgagttgcattctgatatctagtgatcctgaaattttagctaatatttatttttgttgaatttcttaaatatgtcaatggatgtgacggaagtgaatgaaaacaatgaggaaaaatgtcatcaacaaattctttttcctgtcttttcataattaatcgatgattgtttggttagcaatagtagttgcatgcttaatttggcgtattgaaatctgagattgatgttctaagttttgtatcggataacttgttgtcaatgtctaccatctctgtgccagggtattggatattgagttcaattattatcgctgttcttttcaaaattgtaattgatttctgtataagtctctctctttcactctctcacattttggtggtgctactcactgtgcattgttaatctag

SEQ ID NO: 105238 - DNA, 346 bp, Mimulus guttatus
  Intron number 2 from transcript mgv1a010860m (locus mgv1a0 10860m.g) derived from phytozome v7.0 (chr-ID scaffold_27; pos 1017207 to 1017552)
ttatcaattcccaatttggaaagctcgatatcttggtatgtattttatttgtttgcattttcttttagtggtatttattatttgtcactacatgaagattaatgaagtaaaagatatttaaccaatgtgaaagatcgatttgtttttgaattttttgaatttgatgattcttatttgctgcttattgttttaacataatcattgtgtctgacttgttatatgatattgctcgattttctcgctgtattaggcttttatcgaaataagaatcggcagttgattttctcttacatcatttttttttcgtgttgtttatatatatgtatattgtatatataggtcaaca

SEQ ID NO: 105239 - DNA, 507 bp, Mimulus guttatus
  Intron number 3 from transcript mgv1a003420m (locus mgv1a0 03420m.g) derived from phytozome v7.0 (chr-ID scaffold_24; pos 1482641 to 1483147 reverse strand)
tgtactacctagcaagtttcgctggtggaattccggtgagcacattgctccacttcttttaggtattgttctagtttgtcttttctgagttttttatgactttttttttgccgcaactatgatgtctagtatcggaaacaagtttgatttattggacggattttctctagtttgtaatctattggatcatttagttcacatgcatatctgttatatcttatttcatcatcttcgtatgattttccgacatatttggatgtcagtttgtagtggggaaatgtgcaacatatttcatttgcctgacattaaatgcaatgtaattatacgaacgggtgatttaaatgccaaacttccattcgcactaaaaatctccttttacttgaaaagatttgaacaattagacttagaatctgccttaattgtgtttgtatagttttttggtctctctctctctctctctaggcatcatgctgctgattttttttcaggtttttgttttgcgagatt

SEQ ID NO: 105240 - DNA, 988 bp, Mimulus guttatus
  Intron number 2 from transcript mgv1a014881m (locus mgv1a0 14881m.g) derived from phytozome v7.0 (chr-ID scaffold_7; pos 2035891 to 2036878)
ttccttgggagtaagtttatttatttattttttctaattaaatattacgtttttatttagttattctttattttttaattacccgatttacatcgtcttttaaatgataattaataaatatatatatattttctctctgtatatatttgcaaaattttttaattaactactaacaaattatcattttaaagaaagttagcattttgaatacaaagaataaaaataatatagtaattaattcactagtttaattttttgatatgttgtgagaaaagagaaagataacacatgatttagttaaataaatcctctctaaatgttggattggatcgacccgttcactatcggagctagtattttaagttccagagacccgaatacactaaaagtttaggagagggatgggagcgataatgttggaggggccatggccccctctgaccagatcgaccaattaaactataaaataaattcgaatatatacaaattaaaacgtgaaatttgttcatcattttttttattcattttttttctttcttatttttatttattcgtggccgacaaatgtgaaatttgttcatcattaatattgaattcacagacagaaaatatgagccaggccacgtttaattttccagagacaacctcatttccaccgaacacaatcatcaaattccccgaaatttatttaattttttttctatttttcttttcaattgcctcaaaacatatatgtaaataaacaatagttattttctaaagacttcctcgtttgcgccaatgttgtcagaatcaaatcaggtcgatgaatcggtcccatggtgacccaattgttaaaaaacaaattgaacaaataaaatcatgttcaattcgatgaaatcggattttacataataaaaatggattttttatttttagctttcttatattttaatatttaattttattatctttacctaattaatatgttgttttgcttacgtgtagg

SEQ ID NO: 105241 - DNA, 389 bp, Mimulus guttatus
  Intron number 1 from transcript mgv1a016704m (locus mgv1a0 16704m.g) derived from phytozome v7.0 (chr-ID scaffold_58; pos 1190937 to 1191325 reverse strand)
tgcatctccttcgagccctaagaatacctttgttggtgagttcaattggtttctgtttggaattaattaaattgagataaaatatgtaccgttctcgaattaatcaatggttttctttaaactctttaagttttgttccttggaaaatgttcttctgggaatctccacaaaattcaagaggcgctaaagctcatttataggcaaataatatgctttttgacttgtactatttttatggagttgataaaatgtttcggatatggtccctttcattgcctctttaacaacttgatgaacatgtatgatgttcttgtaacttctcttccgctcattaatatgaagcctttataatcattgctatgatttcttttagaaatcaatagacggat

SEQ ID NO: 105242 - DNA, 614 bp, Mimulus guttatus
  Intron number 1 from transcript mgv1a025490m (locus mgv1a0 25490m.g) derived from phytozome v7.0 (chr-ID scaffold_229 ; pos 255726 to 256339)
cggaggcggaggcggaggcgaacgcggcggcggaggtacggcgtcgaagagaagttattattcatagagaagccctaatcgaaggttagagggagattgtatcggtctgattataaaggaaaaattgagagaaaaaagtgatgttaataacgttagagattaataatttatatattatataatttatttttgttgacggtttttaagcgtcgagaacatttttaaaagcgtcaagaattccttttacttgaccgtgtttatgtgtcaagattagtttcaaaagcgtcaagaaacgcactttatacgatggttttgaaaccgtcgggaatacaaagcatcgcaaaagccctaaaatgttgtagtgatttacccttagtccttcagttacagcagtgatggacacaagtttgattccgttagttttaacagaaaattgacagaaatgactaaaaatgttgatttttttttaaatatgagggacaagtgtggtttttgtgaacacggatgatcaaatatgaaattggtgcaaacttgagggatgaaaactgtatttttccatatattagttgaatcttatagttcaatcactatttgcaggtaacatcattcaagtg

SEQ ID NO: 105243 - DNA, 477 bp, Mimulus guttatus
  Intron number 1 from transcript mgv1a006889m (locus mgv1a0 06889m.g) derived from phytozome v7.0 (chr-ID scaffold_27; pos 1325579 to 1326055)
attcttttggtaagaagatcttcactcaattgacccattcttttttttttttttttttaacactttcttcattttttattacattgatcttgactttgattcttaggatctttagctagggttttttttttctttatatttttatttatttgtttatttttttatttttttatttaagaaatcaaatttagggtgttcttgtaccatcaattttaatttttaatttgctctatggttaataagacactgaaatatccgaaaatcgaaaattaatttcctcgagattatttgatttgttgggatttttgcagttaatctaaatggaaaacaagcaaatgttgaaaatcgaataataggtattagtaggcataatgtgggcatgtgtgattaatgtttaaataatccgatcgattttctttttatttatttattttatttttagaagcttcaagttctggtagtgagaaaagacgaagt

SEQ ID NO: 105244 - DNA, 642 bp, Mimulus guttatus
  Intron number 1 from transcript mgv1a011192m (locus mgv1a0 11192m.g) derived from phytozome v7.0 (chr-ID scaffold_16; pos 2455089 to 2455730)
gatattactgatattacggaggtaatttttccccttttcttcatattcagtgccctaggccatgtggtttttggggcttatgcacaaattcactagtttctaactcttgcaattgcaacgaaggatttaattcataataatcaaattaattgtaaaaattgtcagttgattgtaattaggaaatcgccgatatgtataataaaaagtgggctggtgtatttgttcaattatggaaactgagattatggttttatgatgtgggaattcaattttgggtcagagaatgataggtttgcaggagcaagaaaatatggttattaggatattttaatccatgttgcaattttggtgaaatgataggatatcagtgcagttttttggatttagttcatctccaaagtgcctgtttcaaatgattaatcaaatcgtttttagtcaattagcctgtaatttcccgcactttactcttttggcatggttatgtcaattactaaaatcaagaacgggaatagattctgaagaaattgccacctaaattagtgcgcctctgtgctgtgattgcattttccaacaatgcgaatgtgatggatagttgcactactaatgatttgtaattgattcagtttcaaagtgggatctttg

SEQ ID NO: 105245 - DNA, 645 bp, Mimulus guttatus
  Intron number 3 from transcript mgv1a003693m (locus mgv1a0 03693m.g) derived from phytozome v7.0 (chr-ID scaffold_59; pos 1314067 to 1314711)
ggaaggagttctcatcccctgactctgctcgacaggttttgattctgaatcttcttatttttcggcttacattactacttcaaatgatgtatgtatatgattatgtatatgtgttagtttgtagccaccaaatgtttcggtttcgggtttcgggtttcgcttaaattaggaagattatatatgtgtaatgtagattaaagaagaattgatttacagttgcaaaacaggactatagtctactgtgacagtcttgtgcctgtacagtaatttcgttatttaattttgagtttaattagtttttgtttttaaaaaatggcttagtttggccccacataaatttgattttgttttttcgtagcaattttagtttacttgaagaatacagaaattcaagaatgtggtcttaataataagagttcttttctctttccagcaaatgactcctagaaattttagattggaagttgttcagttatattttttggtttcagtttcgatatttaccggattttgttgtcatcaaatgcgggaccaaaaaacaaaggtcaactttgttatatatgaatctaatcagcagttgttttttttttctcgaattttccaacaatagattgtcaagctaaaagctttttcgaagttcgagaa

SEQ ID NO: 105246 - DNA, 977 bp, Mimulus guttatus
  Intron number 2 from transcript mgv1a002611m (locus mgv1a0 02611m.g) derived from phytozome v7.0 (chr-ID scaffold_1; pos 34513 to 35489)
cagtacatcaccccttggactgtcaccgttgctaggtgacgaatcttgtttcattcataattttctcctgtgtgtgtgtgtgtgtgtgtttggtgaggtttgtggggaatttcgatgattcctatgcttgtgtgtgttttgtgtgtgtgtgcgtgtttggtgaggcttctaggaaatttcgatgattcctatgtttctgtgtgtgtgtgtgtgtgtgtgggttgtgggtgggtggaaatgcattggatgtgaattatagtattttcagaaaattttaattctttcaagaaatgaaaaattaattcttccaaataaaatcgcaaatcggaatttcaggaatgaaaaacttgttccgaaatcaggaattttcagatcggaatagacggaattcggaaatttcattttttatatctataatataaaataaaaaaataatattgatatcataattgtaattttcgtgaaaaaatcggaatttttggaaatgggtttggtaattagaccagctaaaaaatctgaaacgaatatgtattccaattctattttttttcttttctaaattcgaaaaaaatcagaactttcgaaatttggaaagaaaaacattgttccagaatccaaaatattccaactctatgtgtgtgtgtgtgttcggtgaggtttccagggggtttctacgattcctatgtttatttatccataataaacaaataacttgatcgtgtttttattatgtctcgagtttatttactttttaatctttcgttaaaagctcgttttgagttcctcttttactagatggatgatgagaatcgttgtagctttctggaaaaaaaaatacaaaaactaatatacgtataaatgaaaaacgagtgatgcgtttgaagatagaaatgctttatttcatctctaatggtttcgttaatttctcgtttttttttacagtggatacccgttattgcgggacccacactacaaca

SEQ ID NO: 105247 - DNA, 923 bp, Mimulus guttatus
  Intron number 1 from transcript mgv1a020675m (locus mgv1a0 20675m.g) derived from phytozome v7.0 (chr-ID scaffold_5; pos 3173743 to 3174665)
gcagtgaatccagcaataggtacggaaattctcacaaaatctaatttgcttttcaatttttgtctcatatgtttatatatatatatatatatatatatatatatatatatatatatatatatatatatatatatatatatatatatatatataccacctgctcatttactggttaagattgaatctttctctttgcttggcacgtgtgatattgacgaatatgaaactagggaatttgtggatggagactataagtggtaggcatattccttggattctctgtcggaaaaattacagttttcatccctccagttttcactgatttcacatttagtctaaaaaacacatttggtgacatttggtcctcacgtccaataatttaacacttatcgtcatttgtgtcaatttactgttatttcgttgtgatgggcacaggcttgattccttagttttaatgggaaattgatagtaatgactaaaagtgttgaattatcgaagcatgagcaaccaaatgtgttttttgtgaacatggggaccaaatgtaaaatcgataaattttcccattctctctctctatatatatacacataattataataaggatactcgtactttgaaagaattatataattattctttgtagtaatagaggatgtttgaatttgtacaggagactaataatctattttaatggaaaaaattgtgagtatgtttctgtgagcttggctatggcggacacgagttctcttcctgcaaactaggaggttaatgttgtcttcaacatctttctctataatcagatttccggcaattatctttcttcaccgggtattattctctttctatctttttcatcctacatcttaaattgctaaggagaatttcttatgataccaaaaaaattcactaacaggaagaacaag

SEQ ID NO: 105248 - DNA, 620 bp, Mimulus guttatus
  Intron number 3 from transcript mgv1a014889m (locus mgv1a0 14889m.g) derived from phytozome v7.0 (chr-ID scaffold_97; pos 921332 to 921951)
ttactcgaggtacaatttgcttgctcctaaccaatccaagtgtccatgaacataaatcaagactaaatgaaaattatatttgactttataattattggataaaaaaataaaataatagtgtggataggaatgtttggagactctttaatataaaaataagaaaatataatttcgatgttttgttctactaaatcaatctatataaaattgttttatatgatatttaataattcaattaattaaaaagtgctattatttgagtttacaatattggaagaaaaaatataatttttttttgaaggtctttgcagaattgagaaaaaaaggaaagattattgaagaaaaaaaaaaactattgttatcttgccgttattagagaaacatgggaaattagatggtacacttgattatttatcctagatggatttgaattgtaaatctacaaataatcacacgcacttatatgaagtgcttagtaggtagttatttaataaaatatacagttcaaataaataatcatgtgtagcatttaacacccggaaaatagagatagatacattatgtgtgtgtactgtgtgggtgcaggtaaggaggtgctggaatacgtagggccgaggccg

SEQ ID NO: 105249 - DNA, 851 bp, Mimulus guttatus
  Intron number 3 from transcript mgv1a005760m (locus mgv1a0 05760m.g) derived from phytozome v7.0 (chr-ID scaffold_106 ; pos 474791 to 475641 reverse strand)
gagatttaaggtattccagtgagttgattacagagtgtcagagtggctattattccttatgttcgctggtaaaagctcattatgaagagtaccttatcttctgtgtatttttatttttctccttttgcattttatgtatagtaaacaataattgggtgacagtcgatagataagaaacattggtccactcttatgaatggcctgaaccataaaagagtatcttatgatgttggtgaatttaattagtacagtttctttaggaggatttaagagtttagtgtatagaaatgacatcaaatgattgagtgactggatttaacataaataatttgtagtgaacgtgttgtttttgttcgaaagtttctcaaaaaatgtttaaggagttgtaatcttgcccaagtgcattattatcaacaaaaacaatgtttcatactttttatatccaggttttggtaatttatcctctccagtacttccttattccatttctcttgtttgtagaaatgatgatcgattttaatgcttattatatttttccattatgcttagtaaaaaggtcttccatatagcattcccagttcattatttcctattggaagagttgttctaaattggatctgtgatttttcggttcttccgaattatgctctatggtttatgacagagctcaagaaaactcttatagtgagctgctacgtctgtgttattacatgttttcagttagcttgtcaatttaattacatgctgtaagttagcatgtcaaattaattacatgtttttagttagcttatcaatttaatccaacttaatgtacaggtgctactgtttattatctggggattctgttgttg

SEQ ID NO: 105250 - DNA, 364 bp, Mimulus guttatus
  Intron number 1 from transcript mgv1a007074m (locus mgv1a0 07074m.g) derived from phytozome v7.0 (chr-ID scaffold_8; pos 3046168 to 3046531 reverse strand)
ggtattcctccggcggccaccggcctcagcagtgagttgaattaatggaaaaataggtggtttgttgtttactgattatgcctttgttttcaattaaccaagtttgattatgttaattaatcaatcaactcgtccggttaatggtaataagaaaaaaaaatcgaagatatactagatatgtcaacactgtttttgcttcaaattttgaccttatgtatccattcatgtttctgttatgtaacatgaaaatcgcataatagtagatgaagaattgtgatttcttggttatcagctaaatcatgaaattgacgacttatggaagaaatatttttgactcgcagaactttggctgcatacggtgcat

SEQ ID NO: 105251 - DNA, 1039 bp, Mimulus guttatus
  Intron number 1 from transcript mgv1a007010m (locus mgv1a0 07010m.g) derived from phytozome v7.0 (chr-ID scaffold_27; pos 810432 to 811470 reverse strand)
cgtatttgttcccgcgcaatccttttctcatttgggtatgcctttccgagttttgtgttctattagtatgttttttttttccgaagattcaatattatagctcttttgttggaatttaatcggttaaattttaaggattctcgtggtgttgaaattagatacataatttcatatatcagaattttatgtttacaccgttcacacacccgagtgtctgatgatttttggtttgaacagttgttatgtaatgatgacccactttgccccttccatttttgtgcaaatttgtaatgctttaatttgggttgacttgtatattttcgttcccaacagctattcttaaagttcagtagcatgcttaacgaaaaaaaaatcgaaggtctgactgggcaagcataacagttcaatgaaatttgattgatatttagtattacatataagcgagtatttaatgattagtagttaggtcaattagatcttgggcaaagttatgagttacatttgaatgattgcatttttgctggcagtacttttgagggggtcaatttgtaaatttctttagtagctccttacaaataccagtttcacataataccatgactttatcgaagaatagttgaatttatgtgattctgttgaagaaaattttgggatctcatgcaattgatgattagaatattgtctatcatgtaatattttggacaaggaaggctgccatctgtcatcactataatttatctccatctggtcattggatgccgtagactggttgggacccctaagaaacatttatctgtggcatacatgttcatggtttctacaatttataagatgttaaacaaaatataaaatgatgaacatatttataggatgttgctgtaagataatggtgaagttatattattgctttcctgaagatgctatttcacgttcctttttgagattcttgttcattcagaaactcactatttcctttttttttggtgtggttttttacattgcagctaccattggataaaaagaaaaggaaagcctgccc

SEQ ID NO: 105252 - DNA, 754 bp, Mimulus guttatus
  Intron number 2 from transcript mgv1a006001m (locus mgv1a0 06001m.g) derived from phytozome v7.0 (chr-ID scaffold_106 ; pos 594009 to 594762 reverse strand)
ctcaggttagttctagttaattgtttatcaatcattcttccaatttagcgtattttgtttagtgcttttctttcaataatcaatattaagtataaaatcttgaccttttacttgaataaaattgcactgtgtttaaatagtaaatactccatttgtggcttcaaataactttttttttccaaatcatttatcattttaaattttgatgatgcattagttataattttttcaagtttgcattaatcgcttttaattagtcaaaagagaatcaattgaagttaatggtattttagtcacctttatatatgtttctttgtgtaatttatgcatatctattagttttcgcaacgaccctgaaacgaagtcaatgacggagttgtatacaatggaaataattgagtggagttactaggaaaaaatagggaaaataaaaactaattcttgcaggcactaacgttgtttcgattttattcctccatcaagaagtttatttcacgtagtttggatttgaattgaatgatatggatttgaaaagaggatttgagttaatgatttcaattgcctcgtaaatcagccatctttcaaatccactacagtaactaaaaaacgagttcaatgttacaactaagaatttattctattctcatcgtaaaatgaattatccaaacaatcccattgaatttgttatcatggacttgaaaagcttataatttaccgagtaaatgaattaattcatttttttttttgcaggtgg

SEQ ID NO: 105253 - DNA, 909 bp, Mimulus guttatus
  Intron number 1 from transcript mgv1a000872m (locus mgv1a0 00872m.g) derived from phytozome v7.0 (chr-ID scaffold_69; pos 1139324 to 1140232)
aagctgttgatttggtttgtttctctctctacatctctctctctctctctctctctctctctcacacacacacacacacacacatataatctatgtataatcttttacttactttgttgatgcatgggatgggttttggtttttaatttactgggtttttttttcctttgaattttcttatatttgagaaaaaagaaaaccttttttttatagtataatattttcttggatatattgtttttatttaaaaaaaaagaaagaaagcacatgcatacatgcgggtgtgtgtaattagattgattatatgttaagaagctgtaatcacgaaaagataatatattagccttaatcgtcaataccatcttttatgacacgtgtcgtattgtgcttgaatccgacgcaaaacgttgatttgcggcgcgtgtctatcacgtcgaatttcactttttttttcatccagcgagatttttccaaccaatgattttcggccgtacaccacccaccaccgccgccaacatccccgtcattattctctgttccgccgccgtggcttccaccaccttccgccgcctccctgtagccgcgcgcccccaaacctccaaccctgttgaaatcttcttcggtatccatcgtttgaacaatccaaaattttatggatgtacttcaagtaaccaccatgccggctcttcccttttctccgcctccgctacgagtgtggtggcggcggaggtggtgccgccgctgctctgtgttcctgaatatttcccccaaattgcttctgccgccgatttcgattgtgaacggagaagacgatgattagggtttagggtttcccagaaattcttttaaaattttcaatgccatttttacacaggaaagaatcccagtcgaggaagtgttcgagcagtt

SEQ ID NO: 105254 - DNA, 754 bp, Mimulus guttatus
  Intron number 3 from transcript mgv1a007725m (locus mgv1a0 07725m.g) derived from phytozome v7.0 (chr-ID scaffold_132 ; pos 305158 to 305911 reverse strand)
ccagcccttcacaggtttttagcattattacatctttcggttattgttggtttctttgtgatgccaattgtttaaagtgccactgtgttcaaatatttgtctgtgtatatgaattttatgtctagttttatgttagttatctcacatgcagaccgcctaaaatcttttgtaatttgcctgattgtttgttcgatacattttatcactttattaatggtgacttgtaggatgatagttagaaatttggacacctatttggtgtcctataaatatgcttatcaaaggtgacatttgattttaaacaatcattaacctcgcatgtttgcatagtattaataatgaaatctgctggttatggtgtaggataaactgaaagtaacaaagtttcttacattattgtgtcttatcgaaccagttttgtttaccactgatgaaggtggatcatttgaagccagcttcaaatatctagtaataactgcagtaactatgagcatgtttttcatataaggtgactcattactgagcatggccaatagggatgcgtggccgagatgggattttccgtacgagtttttatcattttagctctctcccgctggttattttttggtcgattactggcttatacatggagtttatttattaccctctgttattgatttgtgatagattaatttccatcatccaataagaaaacatgcgtacacgaagaaccttatatatcaaaatttgtgtggcaggttattgttcggaa

SEQ ID NO: 105255 - DNA, 194 bp, Mimulus guttatus
  Intron number 1 from transcript mgv1a002233m (locus mgv1a0 02233m.g) derived from phytozome v7.0 (chr-ID scaffold_279 ; pos 24589 to 24782)
accgaggttgcttcaaatcatcaaccagtaaacgccttttcccttttatttctgttttttttctttcttcttttgatttttgtttttcatttgtaacataattaattacctatgtaatgtttgttaatggggcattcatctccttaaatgcctgggcagggaaatttattggatttgggagcttttgttggtga

SEQ ID NO: 105256 - DNA, 493 bp, Mimulus guttatus
  Intron number 1 from transcript mgv1a015503m (locus mgv1a0 15503m.g) derived from phytozome v7.0 (chr-ID scaffold_7; pos 1421426 to 1421918)
actctcaagccgacgttgcggttctccttcgtaaggtgcttgatttttccatgcttgtcctgtattttcttgtcggttccgtaaaaatattgtggtgagaaatttgtttttaggtagaaattaaaactctggagtcgggttcctttttgttagagttaataggtaaaaatgccacatgaatttggtgggactaataattatattggaagtgcttttctcatcttaccgattgatagtgttctttatgtttaatgggcagtttcattgtctctttagaagatattagtatatatgcttcactgctagcaaaaaaatattgatattattagttcgttaccatgaagaaatatccttatacaatcatgtagaaattagttttttagaatgataatttattatttttattctataacgtccaattgttttgtttgtatgtgtgtttgattggatcttctctgagatgtcttgcatttcttgtttaagttaattagag

SEQ ID NO: 105257 - DNA, 869 bp, Mimulus guttatus
  Intron number 4 from transcript mgv1a006226m (locus mgv1a0 06226m.g) derived from phytozome v7.0 (chr-ID scaffold_208 ; pos 369370 to 370238)
ttcaataaagaaagaaatactcttgctgctgaaaagtaatagtcttttttatcttgtatagtacttatgaagtcgagtaatgcatgtcttctattttcatctcttgattttcacttcatttctttatcgaccatatcttggatgttccttaactaccaattttaataatttatctgtacttaatttgcattcctatcgaataaaaaatctaacattatttggctgttctttaaagattatcggtttaaactattacataatagaacatgaacactttttggagatgcttcatctttttcgtgtgacgttagttacagctttacatgtaatacaaattcttgattccatctacattctttgaaaatactgataaaagttaatatctaatagaacatgagattcttaattcagatgcttttattctttgtggtgtaaaatttgtaagttttaacataaaaaaattgctggtgtagctgtggaaaatatacggagttcaaccttttctcatctctgtttataagttcaagagttgttctttttcacaatccaattggaaaattcaggcaattttaaatttatatcgtactttatttatttgattatcgtaaactgggtggagtttttttcccagtcccctcaacctgccctctgttttctagtattagtacaatcactggtgctgctgctggtgtagtaatcaattattttattttttttcctttattgagggtggtgggagggcaggggagttgaaaatgagcacttcgcatttgggttctatttatatgttcttcctccactgcttataccaatgtcatttgttttttaatgcagattagagacaattattttcaagttagaggttttag

SEQ ID NO: 105258 - DNA, 634 bp, Mimulus guttatus
  Intron number 1 from transcript mgv1a004177m (locus mgv1a0 04177m.g) derived from phytozome v7.0 (chr-ID scaffold_223 ; pos 80007 to 80640)
gcaaaactgtcacacaggttggtcaatttctctccccatcttttcttttagggcttttttttttcttctacaatttatggcttagggtttgattgcggaagttctgtttgactattaaatgagtttctgctgcttgttgtgtgaagagattgggttttggggatttccttgctactaattttatgagaaaaaaaggttggattttggggatgacttgcttgtcgatttgtggatttgatgattttagttggattgtatgtaaattgtgtgtttttgataagtctagcggtgtttggagtcgattaaaacatatatggaagacagtttccggacgcggtaagtttgttgccctcgtcttgtttacaagttaaaatggaaataatcgaaaaagaaaagttaatgctgtttcttaattgtgatatggtggttccttacataaacaggatacagtattcattttttacctcttgtttttaaattcatttccatagtagtcgcaaattcatgtgaaattgatacttagtcaagcagtgaacactgttacgagacattcaatttatgtacagaatttggagtgatttcgttaattctttgattaggtgacggtagctcatctcaaggataagccgacgca

SEQ ID NO: 105259 - DNA, 719 bp, Mimulus guttatus
  Intron number 1 from transcript mgv1a023425m (locus mgv1a0 23425m.g) derived from phytozome v7.0 (chr-ID scaffold_324 ; pos 62899 to 63617 reverse strand)
agaaagaggtaaaatttatttaagtatgctttgtctaatctcgtatgcattgaatgcattaacaaattttcctaaatgaatatcattggcatataaaaacttttaattattacagttcaacagtaaattatcttaattaatgaacagagagagttttagaacagtcagaagcaattattagaatttagaagtattgcgtctagtcgtctatatgtgcatgcatttcaattatagctacatacatgtatttctaatttcatttttttcttttctttttttgaagatgaagtttcttatcctagagacaaaatttgtcttttccgctttttcattaatcttctgttagcaaatagcgttttcacaaggttattcatcaaatgatcagcattttaaagatatgataaatcctttgaagacaatctaatatactaagttttcaatctgcagaaatttaatcccaatatgtccatctatgctgtaaatatacgaataaaacatgaaacgagtaataaatgtgtgaaaagataagcatttcagcaccgcatttttgtccaattctaactatcgagaaatcaaagaagaaccagacacatcaaacttaaagacagtactcggattgtttgaaacatgtttaaatttgagtcacagaggaaaaactaatccaaaatgttcactttgcctcaggtttataagctatctattggagcagtatccgggct

SEQ ID NO: 105260 - DNA, 620 bp, Mimulus guttatus
  Intron number 1 from transcript mgv1a005376m (locus mgv1a0 05376m.g) derived from phytozome v7.0 (chr-ID scaffold_16; pos 1481205 to 1481824 reverse strand)
gctctccgactaacaccgcgtatgttatattcaaattctttttttaattctttttttaatgtttgttgcatgtggcctctgatttgaattttggggatgatgttcttgtggattaattgtgaatttccatttggtttttgcatcgaattagcagaattttcgttgtttcgcttaattcatctgaatttatagccaatttgttaatgtgttgaagaacacagtgcatttgcgattaactgtttgcatcgaagatttgggggatgacgttcttgtggattaattatgaatttccactttgtttttgcatcgaattagcagaatttctgttgtttcgctcgattcgtctgaatttataggcaatttgttaatatgtgtttgaagaacacagtgcatttgcgattaactgtttgcatcaaatttttggggatgatgttcttgtggattaattataaattatgaattgtgcatcgaattagcagaattttcgctgtttcgcttaattcatctgaatttatggccaatctgttaatatttgtttgaagaacacagtgcatttgcgattaactgtttgataaattgttgcaggctctattacaccaaaattacaatcggatctccac

SEQ ID NO: 105261 - DNA, 701 bp, Mimulus guttatus
  Intron number 1 from transcript mgv11b023888m (locus mgv11 b023888m.g) derived from phytozome v7.0 (chr-ID scaffold_2 ; pos 1627692 to 1628392)
caccgtcaactccaccgtatctgctctaccatccggtcagatctctattttgttatttccgtttcaaaattcctctttcaatttaggcgtgatagattaattcccgatgtaattgtagttttcagctattagggtttcagtatttctgctatttagtggatagttcttacgtatgtgtgtgattgggaattattttatgcaatgtcggtttataagaagatctttcaattcgatttggtgaattcctttttcagtagatttgatttgtcagattcggagaaaaaaatcagtatctgcgaaaattgatgttttatacaagggaattggaatttgtatgaagatgtagatatatgttcactgacatgaatttcgaagtttgggatgtaggtcgctactatgttacatttcactcaaactggatcctctattacattctctattataggtttaggcctgtaaaatgattatagggatgtgagaatcagtaccgcattatgaatgtgagtgctacacaacatttagcccaaagcactttcggtacatgcatttagctttatatatctcgcctaatctatgatttatctgcccgtaacttctataacttgatacatgaagaagaaactatatggataacgccaaaaacagaaaaaatgagaatcaagaatactaatgaactttttcgatattattctgtcttgcag

SEQ ID NO: 105262 - DNA, 886 bp, Mimulus guttatus
  Intron number 2 from transcript mgv1a017199m (locus mgv1a0 17199m.g) derived from phytozome v7.0 (chr-ID scaffold_121 ; pos 770755 to 771640 reverse strand)
gaaactgataaggtatgccttttttcattacatattttttgcttttatatttctcatgattctgcaattgtaatttgtgttaatacttacagtttggttactatatttgtgggttttttttttttttttttatttcgagtattatatgctcagtgttaatggagttatgttttggttggtccaagattgggttttgatccatcctttgctggtagcagtaataaccttaccccctgtcgattcacaattttgctaaacctcgatttattattttttatttttgtattttttttttaattaattatagaccgtgtagggaatgagataaagatgaattttatttattaaagaacgagtgccctctgtctcaaaagacgaaattatgaatgtgtaacaaatatgttcctttgaagttcgacaaatttaacccgttcttatgtatcagtaaatcgctatgtattcgatatgctggagttacataaccatacgcgaaagtttgttattgtcttttcgagtaaatcaattgcagaaaacttttgataagctttttgaggtattttatttgacaattaaaaagaagattgaccctcaatagaatatactacagtaccggctgtgtttaatcgaggaactatgtaaaatgaaggaaaaaaacatcagtccttaagtcaagaattcgctattctcattgaaccgattggttggttgcatcgttgaattactagttgtcgacaaattacaagtatgacactgatgtgtctttatgcaagatttgattatttacattgatatattttcttcgttcgcctgtagaatgtttcttttaacaaattttttatttttaattttggattttaggagctaagtaagtttataaattactgca

SEQ ID NO: 105263 - DNA, 833 bp, Mimulus guttatus
  Intron number 2 from transcript mgv1a004009m (locus mgv1a0 04009m.g) derived from phytozome v7.0 (chr-ID scaffold_29; pos 583687 to 584519)
tctgttgaggcaacatcagtatcaagtttcttgcagtatatccttttcgttttttatttaatttatccgtctaatttgcaaatggaaatctcacttagatgatagatttaattaattatatataattcaaataatataaatctaatatgttgaattttataactgtttttttggttaaattacaaccaaccctgaggtatggtcaaatgacaaaaaccccctcatgtttggataattacaattactcatcaactatgaatcttcttacaagtccaccctcatggtgtcaaattcaacaaaatcttctagattccgtggaatgttctctagtttgtactcgttttgtgcagaaatgcagtttctgatgcaccacaatctgatatatacaagcccaaaaacacatcttatgatcatcttgcttcaaaatgtggagtttggatgggataaaacgggtacaaaattgagaatattccatataatctagaatattccactaaatttgacatcgcaagggtggacgtgtaagaaaatttatagttgatgggggtggttgtaattacccaaacatgaggggttttttcataatttgaccatacctgagggggttggttttaatttacccttttttctttgaagacttggagcttaaaaagatgcaatggagcgaaatatttatccaaatataaactcactcaatgaaaaaaatatgaaaatattagttacaagtctcggtaaattgaatcaattaatatttcgtactaattttaaaattcgatttggttgacgccatcgaaacaggtgtgttcgacaaattcacggacgaagccaataaa

SEQ ID NO: 105264 - DNA, 892 bp, Mimulus guttatus
  Intron number 1 from transcript mgv1a000794m (locus mgv1a0 00794m.g) derived from phytozome v7.0 (chr-ID scaffold_68; pos 208989 to 209880 reverse strand)
catccgccacgatttcggcgtcggcgattcgtttggtaaagggctttttccgttctgctaatccgtttaattatatgctctctctttttttttcactttaatttatgtgtgtgtgtgttttttttttctttcgtttaattacgaaaataccgatgactttgtgcttcgaattatgcctaggctgttttctcatcaattgggattgttagtttttaatctaaatgatgcctgccagccgaattttcgtgccgatttagtcgcaagttaggttcttttgcgagaaagtcgatgattttgttcgttgcacatttactgcttagtgcgcgtaaactaaaatacatttttcttttatatctgtattgtgttcttgcaccaaaaaggcgaaatccccctttttttatctgcattgtgcggctgccagaactcgatccttgaaccttgcaccaacattagtaataagattatgttatgttggggttagttgtctgtaaatttgggttgtgttatggcatctaatgtccttagctgaacttttgacgactcaaacattagtaataagattttgtacgaacatttgtttcccattacatacgcagtgtattgtctgttcagttttggtttgtcgtctggacttgcaatcaattcaatagctccttcaagaacatttaagcactcttgcatcacattatgcttgtgtatcgacaaattgcatttatcaacggtttattgccatacatgtgtctctactttttgaatttttcgttcttccctatctaactttagtgttttttcgcaattgaatttcaatttcgtaatatatttttttttcttttcgaaatttgggatcaaacgagtagatactgatctgtctgcgggtagaactggggagcaa

SEQ ID NO: 105265 - DNA, 583 bp, Mimulus guttatus
  Intron number 3 from transcript mgv1a012824m (locus mgv1a0 12824m.g) derived from phytozome v7.0 (chr-ID scaffold_106 ; pos 659964 to 660546 reverse strand)
ctttcgtagagttccaatccaccaccggagtggaggtaatcaactaattatactaatataatagcgatgagattgcatttgcacaactatttataagctaattaaatttctttgttatccggcattatattacgtctgtaacatttcgtaggggactaattacagacattctaacttatgtgtactctttaatctgttatgttaatcaagttgatcttagttataataataccaagagatagattatgatctattgttcgatgtgcgatatgttaaagtgaaatatgtttttgatctgtttgtgtaaagtaaggttagctcaccatactaaaacataaagaatttgaaattgatctgcatgtgaagaactaacgaggtttagtttaactgaaactgcaggagaatttgagattttattagaatttaaatcacaatattagtcaagaaaaaacggatgaataaaagacaatggagaacgtcgaaacttattcatgaattgtatcggctcccgaatgagttacttttgtcatctgactttggtatactatgttttaggtctgcacgttccgtttgattgtaaaaa

SEQ ID NO: 105266 - DNA, 520 bp, Mimulus guttatus
  Intron number 1 from transcript mgv1a022832m (locus mgv1a0 22832m.g) derived from phytozome v7.0 (chr-ID scaffold_8; pos 407785 to 408304)
ttaccagtccaaagttgctcatccggcaagatcaggtaataacaacgtcatttgttttcatatgtgctactagttaattaattgaatgacattaaattgttactaaggtggtatcgctaaagcttttataaatagattatgagttttttttgttcataatctattttgaaaatgatcttctgcttctcttaaaataagcaattaaaataagcaactttgagctacaatttgttaagtatttatgaccctatgttttccgtttaagttgatttttcagaaaatttgcaaatacgctcaacttttagaaataaacattataaattaatttaactcacaatctataacttctatttttaagtaaacttttgcttttagaaataaacgaataaaatcaactcaactcacactatataacttttgcttttaaacaagctattgtgaaaaccacctagatgtttattaagtgcggtttttaaatgttgtaggtagtaaagaagcagaagttgctccacttgttagt

SEQ ID NO: 105267 - DNA, 402 bp, Mimulus guttatus
  Intron number 1 from transcript mgv1a006835m (locus mgv1a0 06835m.g) derived from phytozome v7.0 (chr-ID scaffold_64; pos 1313658 to 1314059 reverse strand)
tctctgctgtttcgattctccgctcttcagataaggtgagttctttatcaatcttctttcttcacaattttcatctgggcttttgaattattgactcgattctcctcaaacgcgtaatctgttattgatttatccctttatcttcaatttttctttttgaatttacctcaaataattcaacttcttcccccctgaaatccacattcgtaatggtttgacttttgactgtctgtgtgtttgatgtttctcgtaaaaacccctgatccgaaaccgtgcacacgtattgtatgtcaaaatgcttcttagaacaagagatgaagtttgaaaaaaaatgttaatgttgtacttatttgtttccttttgttagtttactgaacaggtactccgagtattacacgaggt

SEQ ID NO: 105268 - DNA, 876 bp, Mimulus guttatus
  Intron number 1 from transcript mgv1a005007m (locus mgv1a0 05007m.g) derived from phytozome v7.0 (chr-ID scaffold_69; pos 690485 to 691360 reverse strand)
cgggtatcatcggaaaccttatttcctctttgctggtaattgaaaatgtgtgctctaattattatcctttcttttgttgtctcaatttgtgctttacctgatttagttgtgctctgattgtacagttttcgggttttttttctgttgatgccgttcgtatttgtatctcgtgtgtgttcgtgtaatgcgtacttctcgatgaactgattttgggtaggagaagggtaatgtagtgtatccgttaggggtggaaatgggaatggaatttccgattcccgttgattcatgatcccgatttgaaattttccgattttggaacagtatttttcgttacatgttccgactccaacttttccaattttttttggatttgaaatggaataaatatgagattccgattttcccttttttttttttttgaacgaaattggaattagtttttcacttccgataaaaaatcggatatctttttccgaaagtgctaattccgatctgatccatcgatttccacccccagtatccatttccgtcatatctcatgacgcacagatggatcaaattaggctaaccgagaattagaagggccctgttaagaaaaacagctcggatatagaatcatgaaactccgttatacagagtgatacaatagaattcttgaaggctattttttttttccttttattttgtgcagtgatataggaaagtgcttgtgaagggtgtttcttggagaaaaaaacgaaaaaaaaaatcgatcattttcttatctgccatttttttatcgacagccatcacagacgtttctttatcaacatgttcctaaattgacagagtattcaattttttgttcatgattgaagttttcgtttttcaggtttc

SEQ ID NO: 105269 - DNA, 533 bp, Mimulus guttatus
  Intron number 1 from transcript mgv1a026032m (locus mgv1a0 26032m.g) derived from phytozome v7.0 (chr-ID scaffold_18; pos 1259877 to 1260409 reverse strand)
attcgtctaattaccctacaatacaggtataattatgttttttgtttcatttattaattatcctgttgtggcatttgagttaggaatttctgcacaaagaaaatagaatattctttgggcaatcttcttggtgaacacaaaacattgacagacatataaaaacatatcctggagttatgtattattcaggacagcttgagggcaggcacatttttctatgcagatatttttaggatattattacctttctgtttttaatgtcacatggttttcattttccaaaaaaaagaaaaaaaaatagatgtttgtactcttgttgtatgcccctcaaaggtaaaaatcttccacgtatgcataattaggacaatgatctgttttaaatgtaaaatgagatgcaatttaactgcagtaaaaactagataaaatcagtgctcgttgctcaatttagtaacgcatttcttggagtaaacgaatgacttgttctatataatgaattatgcagtcgacgcattatcccgattataaacaacaag

SEQ ID NO: 105270 - DNA, 759 bp, Mimulus guttatus
  Intron number 3 from transcript mgv1a009621m (locus mgv1a0 09621m.g) derived from phytozome v7.0 (chr-ID scaffold_245 3; pos 1639 to 2397)
tttgcctatcaacaacccacctaatagtctccgtatatatatatatatattattatactcattatttttcattaaaataaactttatatatatatatatatatatatatatatatatatatatatatatatatatatatatatatatatatatatatatatatatatagtagaactttgataaattaataatctcatttaaataataatgttatttcggtccctggaaaaaaaatgtactaaattattatgtatacatatatttgtttgatcttgtcatgtttgaactttgatgtggggcaatacaaatttcttcattcttgatttttttagggtgtttgatgtttcttgaatttctgttgatttgattattgatattagatattagtatcccttgtagttttcttgattcaaaagtaaataaataaataaaaaaatcgtcgagggtttcggaaattgaagttcttaccgattaacgtgcgtgcatttcgtacattgagtcaaaaaaatctttggaagaatatatgtctactagttttgaagttcatgtctcgtatagttaaaatttgttcgttctcgccttcttaaccacattattatttcgggtcgatgaaaagaataattaatttaatgttttggcaaatcgacctttattactaagttaagtatactcgtaaatgttttatctttcgtataacttaatagttttatttcatcctccaaaggtgggcacaagggcttcgacaaggtcatttgggaa

SEQ ID NO: 105271 - DNA, 779 bp, Mimulus guttatus
  Intron number 1 from transcript mgv1a004304m (locus mgv1a0 04304m.g) derived from phytozome v7.0 (chr-ID scaffold_17; pos 1995285 to 1996063)
ccgtcttctcagctctccagaagttctccctcaaggtaaatctctctcttctcctgcttaaattcaacttgattcattcgttaatttattgattatattcgtttttgtctcttatacaatataatcgtgtgatctggatatgtgagatttgttggtgattgtttaattgcgtgtatgttcaatttgatagatcagcgttgataatttatgaattttgattggatcttgctttttggtcccctatgttcgaatttttcttcagtgacgattggtttcagaaaatttaggagtaaatttatgttacgaggtttgagattatgtaatatagctgtgtggtttagatctgaatatttgagctgatagatcgggttagtaatctaagaattttaattggatcttgctttctcgtgccctgagagacttgttcgtgattatttgatcaattattagggctcttgttctgtttatctgtttccatgttagaatatttccttaacaacaataggattcagagagtttgaatcaaattcatattacgggggttgagattatgtatttgattgggtttgagattatgtatttgattaggatcgagattatgtagtgtttaagattatgtatttgattgggtgagtatgcatacctagattcatgatttgatattgaggccactcagtgacttgattaactctgttctatttgctgtttctggtgttatgtagtatacaagctaaattgccgatatgccttttttttttttttttctattcttgaatcag

SEQ ID NO: 105272 - DNA, 772 bp, Mimulus guttatus
  Intron number 1 from transcript mgv1a009406m (locus mgv1a0 09406m.g) derived from phytozome v7.0 (chr-ID scaffold_44; pos 674695 to 675466 reverse strand)
ttgctcaaggtaatttatgtgattggttggtcttctttagatccccggtcaacgattgtttggtatgatcgttgactttttatcgagttatattctaccgtataaacgtatgaatatatatatatatatatatatatgtgtgcgcgcgcgcgcgcgtgtgtttttgcgagtttgtaaatttagttaaagatgaaaaactatctaaagtaatatctaaaagatctactgaaactatgttcgataagattaaggtggtgtttgcaaaatcttttagaaatagattatgagcttttttttttctcatatatatctgttttaggtgtttgtaaaattgattttagcttttgcttctcttaaaataagttgttttaagctataattttaaaagtaattcatgtacctgctttttctatataaattgatatcgctacttttttttaatttataaaaaaaggcccaattgcattttagaaaagtcatagttgactatatacatttcgtacataattcaataagttttgattaatacttttaggccgcgtttggattaagagatttgaaatgaatggatttcgaaatagtcggaaggatttgaaatgacttcaaatgtaaaaaaaatctaaaaatctccacaattactaaagaaaataactaaaaatatgagttatggatctaaaatttctcggcgaatgattaaatcgaaaccaaatcgatcaatggatttgttgctacggatgaaatccctcctttaaaaaacattcaatgtaggtac

SEQ ID NO: 105273 - DNA, 703 bp, Mimulus guttatus
  Intron number 1 from transcript mgv1a006361m (locus mgv1a0 04215m.g) derived from phytozome v7.0 (chr-ID scaffold_89; pos 481856 to 482558 reverse strand)
ttttcttgctcctcaacttcccttgctcgctctaggttagcttctctctttctttctctgaataaagatgcagtctttatcattatttggttgtattaattcgcagttttttttatttggctgaattgtgttttatttgggttggttggttttgtaatttaaagcttgaatttttgttttgcaatcatcgaaaagaatttagcggaagttggttcactttgttttgatccaaagaatatttttgtatttgttgtgcacatgtgtcattgtgtgattactgtatatatggattgattcttgaagattattgtgttacttgatctttgattgtttcactacaaggggttttccgttttccttgatcccggtttcgaagaaatatacggcgaattcgtttaccccctcgcagtcgagtcttgtgccagtttgttggttttcctttgcagaattagaattaggcagagatagaaaaaaaataatatacagaattccttgtttgatgtttgacagttgcgattacgtgcttgtgtacgtgtttgattttcgaaaaaaattgcgtagaaatggccgagtcttttcgttctaaatctgtatcttaatttctctggaaaatttcagactgctcaacggtctccgttatggaaatacgcaatacgtaaacggtgtagaatccctcaaacaaccgagtactaaagtaggctta

SEQ ID NO: 105274 - DNA, 624 bp, Mimulus guttatus
  Intron number 2 from transcript mgv1a003188m (locus mgv1a0 03188m.g) derived from phytozome v7.0 (chr-ID scaffold_17; pos 1185417 to 1186040)
tccattacacattgctgcaagtcgaggccatcgtaattggaatttttttcttcgtaactttgttcaagtgttcgatatgaacggctcacttttaatcgtcagatttattgatggttacatgctgtgactttcgttccgttagtattacattacatggagttcaccttataaattgtgtgattttgttcttccatcacccccccccccccctcgatttgcgagtgaaattaatatttggtgattatttagttttattactataatacatcaggttttgtgtcaagatgtgttaaaatttagaggcatgtcacgctcactgacggattgtaatgacctgtaatggtaatcataaattggcgaacggaggattgagatgaaaagtttggagagtctaatcatacattttcgatggtttagcatatacctacttcagatacttgaacatgctaaaaaatgtgtcatcactttgttttgggagaatttattagttggtgattctcattatcggataacatgatttctttcgagagcgtgatattcgatatccgatattcctcatccatcctgcaagtactaactgtgttttttttttggttgcagatattgtccagatactgctaaagc

SEQ ID NO: 105275 - DNA, 608 bp, Mimulus guttatus
  Intron number 1 from transcript mgv1a011879m (locus mgv1a0 11879m.g) derived from phytozome v7.0 (chr-ID scaffold_97; pos 995093 to 995700)
cggttagaagtttcacaacaagaagcaaacacaaggtaacaaacatatttatcgtgacacttgtgaaaaataataattaaatattattttatgtgacaatataatttagagctaatagcacataccttcttgtgctgtttttaatggtcaaaaaaacccttccgttaaaaaaacattagcaagaaaattccatgttgtgtattttaaagcataccgattcttatttcgatatttattgttgacttatgttaaatgaccaaattacccttacaaaagaaatattaataaaacaagaaaggaataaaaaagaattttagagggtattttttattttcaagtcaaaaaatacatttctactctcagaatctgcgcgtacattacacaataagctgttgggagttttttttagctttgcttatttcttacaggggtgttcttgctaatttttttttaaaacaccgatttgttcagcaattagagttcttcaccaaatttctttattattttgtcaatgatatttggatactaggaattgagttcttcaccaaattaaaccattgacaaacatagaccactctctcatggtgaatagttaatattttgcagag

SEQ ID NO: 105276 - DNA, 679 bp, Mimulus guttatus
  Intron number 3 from transcript mgv1a007429m (locus mgv1a0 07429m.g) derived from phytozome v7.0 (chr-ID scaffold_32; pos 830513 to 831191)
tgtgcctaatcagagccttgacaagcttcttttcagtaagttttcttgttatttatttattttattttttatttcgattttgtattgctttctatcatgggctaatgatgcataatgcaaggttcgataatgtgttaatgcaaaattcagcatcgtagacggttaggattagattggaatcttcacaaatcaaaggtttacatctttatttatgtttactagtgcaacacttcaatattgtgctgctatattctgcgttaagtaaaccttagatgtgatagcaatttactttcatctgcctgtaagagatttgattacccacgtgcataactgtgagtgtttttataaatttgtaactttgggtagaatggtaattttttaaggcctcgtttggttgccaaggtaagattagtcgataaataatctaatgaaagcccaattgtattattggataaaatagtattttccgggtcgacccggaagatattgggtaatctcccaaaacatcaaataaagtccaattatttagtttatgatgtctaatcttccccctaaccaaatgaggccttagtaatattacaacatggaagtgagattacaagttatatatactgacattacataaaatatctttcttgctttagaatccgatacacgagagttactcgactggaaacgg

SEQ ID NO: 105277 - DNA, 375 bp, Mimulus guttatus
  Intron number 2 from transcript mgv1a016751m (locus mgv1a0 16751m.g) derived from phytozome v7.0 (chr-ID scaffold_1; pos 3929590 to 3929964)
aggtgagttactgtatcaattttctgcgattttgaattcctttttgttgttcctcttctacctttgagtaaaccctagaatggtgcttagatatggtgtcgagcatttttatttcttcgatagatttagtcagaattgggctgaattttgtttataattcctgtttcttcgctcgtttttcctttttaagagttactttttgaacagatgctgaatgattttcattgctcgatagtataattatgttttagtgttttaactatggttgttcacagttgaggagctatttaatttctccagattgttctttcgtttggtgttcctgatattgttgtgttgttgtttgttttgttccccttgttctgcagtcggccg

SEQ ID NO: 105278 - DNA, 754 bp, Mimulus guttatus
  Intron number 1 from transcript mgv1a011640m (locus mgv1a0 11640m.g) derived from phytozome v7.0 (chr-ID scaffold_5; pos 1194259 to 1195012 reverse strand)
cggatttgcagttgcctcagctacctataatccaggtatatatatatattttttttttaattcttggagattttataaatattaaatcatatatatactcacctcattttaatagatgaagtgatgattccatatccaacatgcatgaatgattatgagtcgacccgaaaagctccaattttggaacaattttttcgtatcaatttcaaacttttgatttacaatttatccgattttcgattttatccgaaattttagagtcgagatggatttccagattcagaaaattttggaagtagctttataataataaaaaaaaagttagatattttttaaacagttaatttgatccatttcttgcgactgtacacggagagacgtattcgaagacatatattaagtatcaaacgattaattagaatttggtcggagctagcgtggatcatacatgggccactatttagagtcaacgacactcactgggtcccacattcgagatcccttgggaaccggatcaagacccctgcgaaacaacttgaatctcactaacaatataatttatgtttttagatgaagtggtcatttaacatggatcagagattcagaacagtcttattgtatccagttaaaaaaaatcccacgtgcaatgtttaaaagtattaaaaaaaatcccacatgctatgatttaattgttttgttttcttcttcttttgtggtgtgtaggtggctttggcatcatcaaaaccaggaaaat

SEQ ID NO: 105279 - DNA, 609 bp, Mimulus guttatus
  Intron number 1 from transcript mgv1a006124m (locus mgv1a0 06124m.g) derived from phytozome v7.0 (chr-ID scaffold_13; pos 2575863 to 2576471)
tctgttggttgtgttcatacgtcagcacttgcaaggtactttttccttgcttcatcttgctttctacttgtagattttcatctcatgctccaaagtagctcatcctagcttatgcaagtgtattaatcggcaattttcgatttatacgaattgtattttcattactaccagcacattgaagttgttaaacactttcatttgctcatgtagcatgcgaggtatcataaatctttccatatatcttttcttgttccatgatggaagaaaacattatcctgtacttcttattcgtcaattagctataagagaggatttataaaaaaaatcactattctttcattatatttgattgatttatgttaaagagaaattccatcatgcttgtctgatatcttccgtacaatatccatcacttgtagcaaacaagccctttttatccctacaattaatatttagttatgatgggttaaagatcctgtgaattcttggtgtcagtactaatagtctgtgaggttctaggaagataaattcaaagaaattctttatgcaaagtttagataaaacagttttttgacttgttgctagagttgcagggttctgtgctaccat

SEQ ID NO: 105280 - DNA, 610 bp, Mimulus guttatus
  Intron number 1 from transcript mgv1a007364m (locus mgv1a0 07364m.g) derived from phytozome v7.0 (chr-ID scaffold_48; pos 300484 to 301093 reverse strand)
gagtttcagtagagtgttggaccgtctcgatcgaggtgtgttcttctgtttcatttctcaatttctcgctttgatcactgattcttttgatagcaatttagggtttatgaggtttttatttgctgtatttggttttactgtttgttaatttttcttttgcgaccagaaattggcgagctgtattgagttctcgtttcgggaaaagttctgattttatttgtgggggttttgagctgagttttgatttaattttttttttcgattatttttttgtgaagttgaacttgatgtggtggaacgggttttattgaacggaattgtagtctaacataagagaataaaaggaattgagaggtgaatgagtgactagggcttgatcgtttcagtttgtttgaactcctaatttgagaaacaattgtttgaacttccaattgatttatgtggctcttagggttatatctgtatatatttttttatccaatgagtacatgctctattcttgattttaattttgggttttttattcgactgcctcataaatttgttccattaacttctgttcgattcttttgtagggatcttgttcagttaggccgagcttgcaaatact

SEQ ID NO: 105281 - DNA, 672 bp, Mimulus guttatus
  Intron number 1 from transcript mgv1a025419m (locus mgv1a0 25419m.g) derived from phytozome v7.0 (chr-ID scaffold_11; pos 792939 to 793610)
cgctcgtgtaaattcacacgagtaggccaaagtccgatttttttcgtttttttttcggattcgtaatctacataataagaggatcgtaaaaacgtaaaaattacctccgatctattgacgatttgcacgggctttgcgaaaaaaaatcgaaagattgagagaatttttgagttttttcactttttattttttgaaaaatggtaaaaaatgtgcctgactgtttaacatgtgcctgcacaaatcatttcagattatgttactatacaaatatacacaatacatttccacaataatattattgcagtcctttctctctccacttgtccaaaacccacccacatgagaaagacactactaaaagtagaccgaaaaaaaataatttaaaaatacaataaataacaatttcagactcatcaagatattgttgactattgaatattcaactctttgacttttcaacaaaaaggaaaaaatgaataaaatcttaattcaacgaaacttcctattacaaaataaaatcttcatctcctacattctttgcttatttccccttcttcaaatcaaagatgaacaatacccaattaatctctgcaatttccatttttctgatttcatttttgccggcgattatccccagccaacagccctacatccgacaggccacgtcagcat

SEQ ID NO: 105282 - DNA, 587 bp, Mimulus guttatus
  Intron number 2 from transcript mgv1a006649m (locus mgv1a0 06649m.g) derived from phytozome v7.0 (chr-ID scaffold_159 ; pos 170071 to 170657 reverse strand)
tcaagatcatcatcactcagctcaagaacatcgacgtaatttattaattaacttaattaaataattaattagtaataatcttgatctatatttaattaatttcttttaagtaatgaactgtgttgatcgatgagattatattctcttggggaatatttgtttttagggtcatgaggaaagtatgttggaagaacagatcaaaaaaatcactgttgtactttcccttgaccagatttttttctgatttaatttcttgaaaaactaaaaaataaaaaaaaataatcttctgaaaaataattatttgaggcccacgacatgtaacaaacttctgatacatgaattttcctgggagaaaaaaaatctgattgtactatgtaaaaaaagattagcgtacgaaacataagattggttcttgtttcagcttttttccccactgttattatcatgtcaggaaaaaaagatctagagagagagagagcttcttttaatttattattattattattatttatttttattaatgggtttttttttttaattttatatatttaattttgtgaataataataattgcagaaaattcaggg

SEQ ID NO: 105283 - DNA, 788 bp, Mimulus guttatus
  Intron number 1 from transcript mgv1a019142m (locus mgv1a0 19142m.g) derived from phytozome v7.0 (chr-ID scaffold_123 ; pos 310721 to 311508 reverse strand)
atcgtgttcttggtgtcgtgtggtaagaggaagaagcggaaacatcgggatcatatgaacttctatacggataactcccatggaaatcgaagtacgttactttcttcatgaatttcacatttctttttttttttttttaaaaatctatttatttaatatatagaaatttatagtgtctagtgataaacttatacattattaatttgctaatagaaacttcaatcattttttttaggatgataaagttttcaattttattaattaaagaaactattaaacattcttgatttttataatagggattatacacaagtagtagcatctaatttaatttttaaaaatatgtaaaacttattaattaaaatcatactctaataatatttaatttatggccattttgtttttttgatattacttttagtgcttgtaataattactattttattgcttaattatacagataattttgcagtattctataagttcgaatgtttttttttctaaggtaatgccaaattacaaaaaaacccttctcgtttgggtaattacaaccatccatcaactatagattgtcttatatgtcctcccatatggtgcaaatttaccaactgaagtagggggtttttcgtaaaaaaacatttgttataagaggatagttgtaattacccaaatataaggggttgttttgtaatttgacattacttaggggttggctgtaatttaaataaacctaataaaaaatcacacgcatttaattatattcccatgcagattccgactactacgac

SEQ ID NO: 105284 - DNA, 447 bp, Mimulus guttatus
  Intron number 1 from transcript mgv1a005250m (locus mgv1a0 05250m.g) derived from phytozome v7.0 (chr-ID scaffold_316 ; pos 59403 to 59849)
gatccatacaaggtacgtttttttttttttgtttttccggtgatcgatttgtagtaatcttcgtcttgttcaaattgattgattcaattttcttcacttaatttgtagtaattttcgtctgtgtatgtatattgtaatttgtaatcaatttttgaatgaatttttttaatttttttgtatgagtaatcaatcgctgtgtgtgtgtgtgtgtttatattgtaattttattcacttaatttgtggtaattttcgtctttgtatgtatattgtaaatttgtaatcaatttttgaatgatttttttttttcaatttttttgaatgagcaatcaatcgctgtgtgtgtgtttgtgtgtgtgtgtgtgtgtgtgatttgggggaaaatttgacgaatgaatgtttgattatggtgcagtaccgtccctcaagtgcgttcaattcaccttttat

SEQ ID NO: 105285 - DNA, 527 bp, Mimulus guttatus
  Intron number 1 from transcript mgv1a025707m (locus mgv1a0 25707m.g) derived from phytozome v7.0 (chr-ID scaffold_194 ; pos 344006 to 344532 reverse strand)
catttggtttaactcaaatcaaggcgattttggtaattttctccactttccttcatttcattttcttgttggtttgccctctgtctcttaatttactcgatgctagattcgacaccgttcagtaaaagcttgtttggacttgatttgttaacataacgaaacaaacttcaacacgtatacttttgttattgatatgatttgaaactcgatcgttgagtcgggaatcgattaaaatcaagccactcgagcttgattggtgctaacctctattgcttattatgcgtgcccctagttctgttgtttcttgaatatataggagaaattcaaatttttgtgttcaaatttgaagaaaaaaaattgctaatcatttttataggcataaaccctcttgtgatccaaagtcagacaaatatactctttgaagctaacaatgtaactctttttgtgattctctttcattgaaatgacataaaatatgctctttgattacaggatattgttgccggcgggagcgatactacggcaac

SEQ ID NO: 105286 - DNA, 476 bp, Mimulus guttatus
  Intron number 1 from transcript mgv1a021587m (locus mgv1a0 21587m.g) derived from phytozome v7.0 (chr-ID scaffold_91; pos 248875 to 249350)
ggtttgagtcagtgattggaaaacttccttttctcgatcttgattcccgtagaaattctgtaactgtgggcctagttgaagtgaagagatttgaattcctactgatatcgtagaattccttatccaagttatgtactatatgaacaagcctgagaaaaccccgtatagcttcttcgatttcacgataaagataaatatgaccaacagtgattcgaatgtatataaaaagaactccttttttttttttttttttttttttgtacttcttactagcttttattctttaaaactcaaagtttcgtaagaaatcagtttttaaatccattcgagcatttcaaataacttgaagaaggttttacaaatatcctcttatcaaaataatcttgaccatgtagaggcatcacaatagtcaatcgagtaaaatgaaatgaaatatgtcagtagtttcaaaagtctttattaaaatcccaatttgg

SEQ ID NO: 105287 - DNA, 318 bp, Mimulus guttatus
  Intron number 1 from transcript mgv1a020259m (locus mgv1a0 20259m.g) derived from phytozome v7.0 (chr-ID scaffold_31; pos 889513 to 889830 reverse strand)
ctgcaggttctatttttattataaaccttctctaattaatttatttgtttccgttttagttgctcattataatttttgtcaggttctttgcaaagaagatgtagacaggcaagggtacttaattttttgttttgttttgttatgatatgatcagttcataaaaaaaaaaaatattacattaaagccctaatatcaatataggtcaataaaaaaaaaacttcatgttgaaacttaagattgatttgaattgattgttgtcacgtgcaaatttaatggtaaaaaaaaagatgccgatttcacgtggcagaggttagttgc

SEQ ID NO: 105288 - DNA, 164 bp, Mimulus guttatus
  Intron number 2 from transcript mgv1a006690m (locus mgv1a0 06690m.g) derived from phytozome v7.0 (chr-ID scaffold_104 ; pos 598536 to 598699 reverse strand)
tgaaagatcttccattatttgccttcaggttctccattttcccctattttaattcaaaattaggttgttttatgtgattttctgtgtgaagatttgatctttaatgatacttaattacttatgaagtttttttatgttttatttgcaggaattttgggttggga

SEQ ID NO: 105289 - DNA, 806 bp, Mimulus guttatus
  Intron number 1 from transcript mgv1a010121m (locus mgv1a0 10121m.g) derived from phytozome v7.0 (chr-ID scaffold_209 ; pos 332622 to 333427)
tgctccgatcgatcgctctcgttggttgcgaaaatgtatgttttttttttttttttgctggaattgtatgtgctgcgaaattatttgaattgattgattgattttatcttttattgataggggtttttttttctttatttctttctagttttggttgaattgattgcgcttgatttcgtctgcgtatatatggttgtggatgattcctttttttcatgtggataacattaaaattgatttttgtgtttttgtcaattgttggtttaagtactcaaaattgatttgagtatttcttaaattttctctaatttgtcgatatgaggtggtgcatcgatgaagggcataagttgtaatcggacttactgtagtagttctcatgtcgtgtgtactgtctttattcaagttggtagtttatttccgaaacgaaggaatggagataatgttagacgatgcgtgttctagttattttcattgacatccgattccagtttcgtaagtatttttagttagtgaaacgtatttcttgaacagacatatgtttggccgtacgttacgttggactataaatttgtaaaacattatcgaaccttggaacgaccttgaagaaatagattatttatctacctatataagtcgatctagcatattctgtgacgcaatttcgacgatcaatttcttgatataagttagtaacctatgattcagacatgggatcgttacatttttttaaaagaatctatgacttaattgcgtacgtctctctcttttcaggtgcccgaatcttgaagttctttctatcaagagct

SEQ ID NO: 105290 - DNA, 788 bp, Mimulus guttatus
  Intron number 2 from transcript mgv1a009534m (locus mgv1a0 09512m.g) derived from phytozome v7.0 (chr-ID scaffold_81; pos 475752 to 476539)
tgcagctgcaagcttcaacctctgctgctgaggtaatatttcgtatataatgattttttttttattttttattttttgatgagttttagatctggtttttgaatttggaatttacgagttttcggttatagtgccaaacaaaatatggtggctatcggctttttttgagcattttggattttcttgtttggttcgatacgggaagtgggaatacggtattcaaatgtgttgaaacatataattaaattgtctctccttggattaagtgttgttacttgagtggttctatgagcttgtctccttgtagttggcatgttgttgcataaaagaggaatctttaacattgattaatctgattttttttccaactttatgttaatgcttttctattatgatatactttgttggttaaaatgatttaaaataaacagcatttcgtaaattacgaaattcgatcaaaccctgagcgaagtttttgtaatttaccctcgtttgtttactcatacccattccttttcctattcaaatgttaacatttcacaattccgtttttcgatttttgtttcttgggttttcacttagatccggacccccttttattttattactaccggtaagatgtccaacttgaattgaagggaaaaaatgcataaaaaaaatcttcgaacgagtcaatttccgacacttgtatttgcaaaaaaaaaaatgcacaaaaattattaattggtcttccacagaagagaactagaacggatatagttatttattaatatcatatttattgcagt

SEQ ID NO: 105291 - DNA, 459 bp, Mimulus guttatus
  Intron number 1 from transcript mgv1a006150m (locus mgv1a0 06150m.g) derived from phytozome v7.0 (chr-ID scaffold_204 ; pos 151692 to 152150 reverse strand)
tcctggtattttgttttcggcacttttcaggtaaagtaagttctgatttcccccgcattcaaattatcgatgggttttttgacttcagtatttttctattggttgatttactaatgctgatttccagattaaattgagttgttgttttcccttgctttcataaattgtgaacattatttcgttgattggtagtatctgcagttttctgcttgtttggtctctcatttggcaaaggtttcatttttgcttatactgaatctgctgcatatgtgtgtgtgtgtgtgtgtgtgtgtgtgtgtgtgtgtgtgttcttttcttgcaagatttggttttgtattcttctgctgtaaatgccaagtgtttttgattgatacaaacattggttcttggggcttaattgtattacttgtgagtggtgaccaacttggtgtaaactgtttttatgacagcgccctcgaa

SEQ ID NO: 105292 - DNA, 570 bp, Mimulus guttatus
  Intron number 1 from transcript mgv1a009862m (locus mgv1a0 09862m.g) derived from phytozome v7.0 (chr-ID scaffold_8; pos 2345750 to 2346319 reverse strand)
cggctcccctcgcccgcctcacaattctatttcaggttttctcgattcacccccctttcaacttcctacttttgtttaagatgtcgaacagaggaaaataaaaccctaattctctgtgtatgagagtgggtggggggtttgaattgagtgtcgtatcagtattactcagttgatttaatggtgtttgatagggtttattgcgtgattaaacttcaatttgaagttattcccggatttcaattgtagctgtaaaccataataaaaacagcttcaatccccaattctctcatttaagaggtcatcagcttcatgctgttaacaattttaatttgatgatgcttttaaagaaggaccagttatgccacgtgttcaatagcttactcactatattaatgtatatcaaagaggattgactaattatgaagatagatgcagtagtagtggttcagatatgttcttcaattgtcagttatatcgtataacattgtattactttgtcgccataaatacttcagttttctgacgtcgttcacttggaacgttgcgttgtttttttttcagattcagggc

SEQ ID NO: 105293 - DNA, 505 bp, Mimulus guttatus
  Intron number 1 from transcript mgv1a012338m (locus mgv1a0 12346m.g) derived from phytozome v7.0 (chr-ID scaffold_115 ; pos 93035 to 93539)
tttggtatttttccttgtgattgagtattaattttatctctttttaattttttaatacatcatgcctttagcttgttttccattccagttaggagttaggacccttgctatgtcatctcagaccttctttcttcttttacctttatacgcccgccctgtcatgtgaatgttctgaaaaatcatcaaatcaattttgtttttttattcattgtgtcccatgcttcatcttcaggtatgcccatactagcatatgtgattccgaccttcctttatgttttttgcctaatgcttttaccaaatatagaattatattacttgtaggatgaatgatgcaagagttggttcctctctctctctctctctcactgatatttcaaaaacatatttccgattgcttgggaaatttcatgttaagtgacgtattagaaccatttctaaccattcaaattgatgtgctatactcgacgcagggttgttttggaagagtttgatacgagtctatttg

SEQ ID NO: 105294 - DNA, 578 bp, Mimulus guttatus
  Intron number 1 from transcript mgv1a014685m (locus mgv1a0 14685m.g) derived from phytozome v7.0 (chr-ID scaffold_360 8; pos 2244 to 2821)
gtttaatcgctcctgcgattcaatcactcgctcaggtgagattcagtagctgtatatttataatatatccctttcaattattggaattgaatctctgaaattgtttttttttttataatgaaattgaaaagcttttttttgctatgaattaacttcacctaaacaatggtcgatggctgattgatttcgtcttaatttgaactaggtttagacagaagatcatcattgagttaattaattagggcaaaattatatgaaattccatcactagatctcataattagaggtggaaagccttagatttattatatcttcagttcaactgagctgactcagtgattcaactaagtgaaatcaaataactcaactcggatgaagaaaagttattgcaactgcatttagagtttatgccataatatgtcatacaaattggagaaatagatctggaacgaaattagtacgtgttcgatgcgtaacattctgaatatctcgctcgattttaaagaaactgaatgcttgttctcttgtgaatgcaactttcaggagtacgaagagaaactaacggttgtgaaagtcga

SEQ ID NO: 105295 - DNA, 947 bp, Mimulus guttatus
  Intron number 1 from transcript mgv1a018003m (locus mgv1a0 18003m.g) derived from phytozome v7.0 (chr-ID scaffold_84; pos 41234 to 42180 reverse strand)
taagttaatccatttcaattttcactttttttcttgtaagagttcaaaactttttcaaaaaaaataattaaaggtcaaataattataaatgcactattttcaacaattatgagaagtcttttatcaaacaatgtcttgttttttggttttttttttttttatattgttaattttttattttttagacttcgatttttttaatgattttgagtttgtagggtttgcattttataaatagaaggtggtgattggaaaaggatgattgagtaaaaattgggattacatttaggttatgaattaaataagttttacagaattatataaatatgaagggtatgataatatatttatataaggattttttttttttgaaatatttagtaatgtgaacagcaaaatattgactatattataaaattattccttcaactttggcatcattacaataaaaactcgaatattgtgagaattacgaatgttgtcttaaagattttatttgttcacatccctcaatagatgcaaattgttcttcaaaaaaaaaaaaaaaattagatgcaaattgcaatatataaaagtgcataatttaaaaacttaaccttctcttttatgaaaatggatcaaatcaattatattttttagaatttgctctcaatactattacaactacaatcaatgcataacatgacaaattaaagcgtatattcgatttatttgatgctacattcaatgaacttttaccatataagatcccaccgtccatgtgcatatatgtatgatatgtgtaaatatacgatgtaaaattactcgatgtagcatttataagacatcttcgaatcaatcacgtgcattcactatcacattcatcatgtccatttaattctcccctaacatcgttcatgttcgaccattcagattcccataccgaccgtgagaatattgtacggccg

SEQ ID NO: 105296 - DNA, 580 bp, Mimulus guttatus
  Intron number 1 from transcript mgv1a011076m (locus mgv1a0 11080m.g) derived from phytozome v7.0 (chr-ID scaffold_16; pos 1489300 to 1489879)
tctctgtcaagcccaagctccgattttcttccaaggtacaattcagccatctgattccataggttttttatcttcttctgttgttcttcttttaatttaataaaattagcttcgttttagaatgtgtggggggactgatcatattggcaaatgtgaaaagtgtgctcgtggatttattcggtgattatatgtatgtattttgaagtaattgatcttgatgtatacggaaatcgcacctcacctagaaatcctgctaacaatgattaggaggcactggtttttagcataggatgaatactttgatgcttaagttggatgtagaagagcactgtatttgtctttttagtatgtatattatcgatatcttcttttttaaacagtttcctcgatattgtttctatccagagaaagaatttcatgttacttccaacttttcgttccgggttgccaaggcctgactgtagcaaacgaattttactggttttcctattgcttaattggcttttatgtattctcatttcatcatatggctttgcattttgtagggtttgcagtcgggctcgaactgttctactgtggt

SEQ ID NO: 105297 - DNA, 570 bp, Mimulus guttatus
  Intron number 2 from transcript mgv1a007595m (locus mgv1a0 07595m.g) derived from phytozome v7.0 (chr-ID scaffold_83; pos 598413 to 598982)
tggaattggcggttttggaggacttttccctttgggtagggtttttttggttttacgtattacccgtatttcatagttttgctgcagttgttttggttaatgtgttaattacaattaatctctctgaagtgtgcatttttctttgaatgtgaattgattggctttagattgttgtttgacatttttttcggtccaacacttggacttatttaacaaggaaaagttgcttcaaattatttccgggtgacagtgagaaacttattgccttttttatgattggactccccacattcgaagatcattttcgaatttattggcattcctctcaagaattcttatagtacgaaattcggcgatgattcatagaaacatatttcttgcactcaccaaaccgatcatgcttctatatgttgttggttttattgctctcagtacttgttacgtaaatttttaccttattcattgctggttgtatcttgtggtctttcccatcttattatattgtaatctaacgatatatttcgatacttcgcaggggattcgtatctggtggctggtacagacggagtg

SEQ ID NO: 105298 - DNA, 300 bp, Mimulus guttatus
  Intron number 4 from transcript mgv1a011106m (locus mgv1a0 11106m.g) derived from phytozome v7.0 (chr-ID scaffold_1; pos 1041558 to 1041857 reverse strand)
acgtaagtctttgtgttgccacttcatctgcttaaatataaatcattcaagaaattcgggatactagttagtacatctaaagatcccattttttaattacaaactgctcatattttttttccttgtgaagtgtgacattttcgaattttgatttaatgtgaaaagaaatgaatcgagctaaagctggtctcgtgtctattttctaccgtttctgttatataagaactcaaacatctttttatgccttattagcaagtaatatttatttaataatggataattggtcgtcgtcgtaggtcg

SEQ ID NO: 105299 - DNA, 680 bp, Mimulus guttatus
  Intron number 1 from transcript mgv1a018465m (locus mgv1a0 18465m.g) derived from phytozome v7.0 (chr-ID scaffold_68; pos 782009 to 782688)
cttccggtgtggctggtttcaccgctgcttattgggtaattatttaattatttatttaacgaccataacgctttaatgtgttgcatagttaaagctccataaattaatacagttgggactgacaaaattatattaatttagcgaaatattaaatatcgaactgatgattcagtacgtttttaccgagtttggaccagaaaaatttattaattaagcgagattattaatttattgaatattaatttattgaggttctacgtaaaatgtttttttcctacccaatttattagaaggaaagataaattaaaaattgatggctaacaaagagaaaagtttttttgatttttttcttgaatcttgaccattcaaaactgtccagagatttaaacgaatcgagtaagattttcaactagctaatttagttcgaatgagcttaattgattagtagtcgatcaagaggttttaacgagtcgaatatgaatagagctcgagtagattactattttacaaaaaactttttatttcatttttctaatcgatatcgagtttcaactaatcttcaaggattttgtcgtaactttgtttgcaaaatcataattcggaatttcgttttttttctttcttgggggtggttttgaaatgcaggttggaccaaggcataggcacgacaggcaacattt

SEQ ID NO: 105300 - DNA, 587 bp, Mimulus guttatus
  Intron number 2 from transcript mgv1a010030m (locus mgv1a0 10030m.g) derived from phytozome v7.0 (chr-ID scaffold_7; pos 1707596 to 1708182)
aatattaatacagctgtacccaacagtcagaaaaggtggcctcagctttttgcatttgtttttgtttttttttaaactatttttcattcgtgaaaagaattaaataaatattccatcaatttaattactatcttggctaataattacatggctgtattgtatagtgtagcttttcttggcaatttacttatcctcatcatgttcttgtttactgtaataattttatatgcaaatcttgctttatatgtatatatatatatatatatatatatatatatatatatatatatatatatatatatatatatatatatatatatatatatatatatatatatatatatatatatatatatatatatatatatatatatatatatatatatatatatatatatatatatatatatatatatatatatatatatatatatatatatatatatatatatatatatatatatatatatatataacttgtcatagttagggtttgattagtcaagaaagctaagaactaacttgttgtaatttttgtaataaaaaaaacaggactgcaccttctccggtggtggggtggcctccaa

SEQ ID NO: 105301 - DNA, 713 bp, Mimulus guttatus
  Intron number 1 from transcript mgv1a012494m (locus mgv1a0 12387m.g) derived from phytozome v7.0 (chr-ID scaffold_109 ; pos 605131 to 605843 reverse strand)
gactctgaatcagctaaggtaaacagtattcaagttttttctccgatttctagagtattgatcgtgtttccccgatttcaattttattttctgttgtttatttgccatgaggatcttcttatttcctgtttaatttatggtttagttaatttttagtagcttccctgtaaattattgtgttacctatatctgatttgcttgtatgtttaatgtttagaaataagtattaagaaacttctgttatggtaagcgaagaacttgattatcaatataaaagttcaatggtgaaatataaagatagcaatgactgaaaatattttattctggttgcctggttttggatctcgaatcttgattgatagtttttcggtttgatcttttgagttcaagaaattggggtttagagatttgacacttaggttagtgcttcggaagaaaaatgtcttgattatatgattatccacattaagatcatcttcgtcctcatcgttcatcttttttatttttgaataatgaatctttcttgttaatctcttgcaattgaagctgttgcatcaaagttggtatgaattaatccactttcttgttggggtaatcggggacaaatgttttttctgtcttaatgtttgttatgctgcttagcttagttatttggaattaaattattgattatttgggtatataggcacagcttgcagctgcaagagagaagt

SEQ ID NO: 105302 - DNA, 439 bp, Mimulus guttatus
  Intron number 2 from transcript mgv1a000147m (locus mgv1a0 00147m.g) derived from phytozome v7.0 (chr-ID scaffold_83; pos 568141 to 568579 reverse strand)
ggttagttctcataatatattcttaaatttatatgttagttcatatcctattgttttggttgatccaccattactaggtagtgccgataaacatcattacatagtctttgttcgattgttatttggctttagattatcttaaaacctatattgacctgtacatttgcttcatattatattttgatttctaatggaatatttttatttattataatgtataactgcccaccccacatgtggtttctaatggaatattcttattacattttcattcagcattggattgatattcttattcatagactatatgttcaacacgattgaattttagtgtatactgagaagagcatgacttatttgatatgaatatcttatagtttgcgttgcacactatcattcgtgtttgtatcttacctttgcaggtctgttttttatttgt

SEQ ID NO: 105303 - DNA, 517 bp, Mimulus guttatus
  Intron number 1 from transcript mgv1a012292m (locus mgv1a0 12292m.g) derived from phytozome v7.0 (chr-ID scaffold_3; pos 2980573 to 2981089 reverse strand)
ccgagaacactctctccgcttacaaatccgctcaggtcacttttttttttcttctcgaatcattttatttttgttcattaaatttgaataatttgttggatctgaagaaatttttaccttttttcatcaattgtttgaattttttatttatttattgatctatactttgttaaacggaactatcgaaaacctacttaatttaacaacttctatcaatgaatcattagctatgaaattcaattgacgcggcggtgtttttttcttcttcaaatgtttcggtaaatgaggcattttttacaccgttgtttcgtgtagaattagatgtaactgaatgcgttaatcgagattccgatttcaaattttgcgtttgatgcaaatgctgcagctattcgtctctttagatttgtcataatctgttttttaaagcaatgatttgaatcaaatttattcaaattgttatttattaatgttctaattatgcgagtatattattttcggtgtgtacaggacattgcaa

SEQ ID NO: 105304 - DNA, 533 bp, Mimulus guttatus
  Intron number 3 from transcript mgv1a007996m (locus mgv1a0 07996m.g) derived from phytozome v7.0 (chr-ID scaffold_299 ; pos 340761 to 341293 reverse strand)
taaggtcttcgtgttccaatgttttcttttcattgtagaaacattaacggctaccatgttgttgcaacataattttctttaaattactgtatgagaagcaggtctagggtttgcagttggctcgagtcttttttgctatctataaaattttggaataaaacataaagcttgcactttgaaaggcccaattaattagactcctaggggaagaatgctagcctctcttctctctcccttctctccaactttcacttgtctttatcttctctcattaacgtcttcatctccttttttccagtatttatttgcaagcatccattcatagtataatttagtaaaaaaattgtatgtaataatacataagctaaacaaattatagaataaaaataataaacaatcattttttattgtttgatttaatcacgacacgcatttggttttactgcatcactacttactatattatatgtttaagcacttcctatcttcgtctttcaggtatcctcatcatcgcctgattggttggacccatc

SEQ ID NO: 105305 - DNA, 987 bp, Mimulus guttatus
  Intron number 2 from transcript mgv1a008573m (locus mgv1a0 08573m.g) derived from phytozome v7.0 (chr-ID scaffold_26; pos 1276791 to 1277777 reverse strand)
atcattgccagtattttcttttccaggtaatttacgcaaatagtgtcccatcaaattggtaatattagttagagcttatcaaattgataatgttgtacgactttcgttactagacttttcctaatagaatgactggtgattaaggtcaattatctttacgcttcatttgttcggtaagataagccgtgattggtacaataattcggtcttatttgatgtttgtttagtgcaataacttttcggaccgacccacaatcattcgatgccataaaagtatttctcttgtgtatatattcttatttggatgaatgtttgcaaccaaaaaaaaatgaggagactcgtagaacaaaaatattctagctaatactgcgtaccgatatctggcatggctatctcagctttttagggtaaattaaggccaccccctacgtaaggtcaaacaaagaaaaaaaccctcatgcttgggtaattacaatcacccctcaactatggatcttcttacacgtccacccttatgatgtcagattcaacgtaatcttctatattatgtggaatgttctctagtttgtgctcgttttgtgcaaaaatgcagtttttaatgcaccacaatcttatatttacaagccaagagacatatcgtatgatcgtcttggttcaaaatgtggagctcgaatgggataaaatgtgtacaaactggagaatattccacataatttagaagattctactaaacttgacaccgcaatggtggacgtgtaagaagattcatagttgaagggtggttgtaattacccaaattggaggggttttttcgtaatcagcttctagaagtttctgcaaataccaccttagaaaccaattatacaaacatgtttttatttcctttttttcattatgaattttttgcggtattcgcaaaatctgatcaaattttcaaatctcttgtctgcagctactaagaggtctaaagtacctccactcagccaa

SEQ ID NO: 105306 - DNA, 547 bp, Mimulus guttatus
  Intron number 1 from transcript mgv1a000142m (locus mgv1a0 00142m.g) derived from phytozome v7.0 (chr-ID scaffold_87; pos 366045 to 366591)
cctcaaccaaacagtcttctgatctcaaaccaaaggtggggttgactctctctttctctctcttctttctctgtgtgtgtgtgtgtgtgtcagtgtgtgcgtgtgtgttttgttcttatttgaattagtggagagctcatttttggtgtttcttgaaatgggaatgtgtgtgtgtgtgtgtgttcttgtttgaattctgggaaatatggttgttgatgtttcttgaaattcttgaaatgggaatatggggatgtgtttgtaactaataaagttttcttgttcttttggatacgatgatttttcgttactcggtctaattattattatgtgttcatcgcgataatactcgaagaactgtgtgaattctctcactccaagtgattccaataagctcatgcattggcatttctggtgttggtcggcatatcaaaatcgagcaatttcttattttaaactttggactccacagattgttcgattatttatgcaatatctacttttttttttctcaggctgcaaacttggcggatatactagcggaaaaagg

SEQ ID NO: 105307 - DNA, 808 bp, Mimulus guttatus
  Intron number 1 from transcript mgv1a009234m (locus mgv1a0 09234m.g) derived from phytozome v7.0 (chr-ID scaffold_151 ; pos 636034 to 636841)
taaaaccgcgtaccgctgaaatctcctctcagcaggtaatctccattaaaaattgttcgttccagagattgttcagtttatagtattatctactccccaacgatacctctttctgtcataattgaattaattgcacatataggtttttgatttgatgattacttgtcgtggtgttgtttatttccgtgtttttcttttatataaataattgtggtctttttgttgtttgcttttgctggcttttgctgagaaaacgatgcgatggtgaacgtattctctattggtttactttgcaacagttgagggtgaacatatgatttctgagtaaggaatactgagtttttaatctgaaatccattaaaattggtatcgataaaattgtgagataggaacttcttatgaaacgaaaacgaatgtctctatatccctacagtatgcgtctacatgatacgacacttgccctttcaccaagataagaacttcgcttgggagattcccaaattgcaccacttttgatcggttcatcaaacaggtcatatgaatttcatagtaggcttatgtaattagaggaccaaataacagccaattgagtgagttgtttgtttttctttcaatttttttcttttcttttctgttaggcctccttattcgtgccagatgtatgtgactaattttctgtttttgtttattcgtgttacgtgctgcattattcttttttatggatgctggtcaaactgaaactatttaattaaaaggtgagctaaaactattgatggtgcttttgcagtttgttgaagcaactattggg

SEQ ID NO: 105308 - DNA, 486 bp, Mimulus guttatus
  Intron number 2 from transcript mgv1a019223m (locus mgv1a0 19223m.g) derived from phytozome v7.0 (chr-ID scaffold_52; pos 211482 to 211967)
tgtggctctccgccgactcttgcccttgccagcgagtaaattctcgtcttaattttttttttctttctccgagggtataacgattcgttaaaccgtgtgcatattttctgaataaaattttatactaaatgtagtcatacatttttcacccaatcgtccagttattttaaaaaattgtgatgaattttgattccgccaattgtttgaactgagttggagcagaaattatgataatttagctttttttgttgaataaattatgcttcatgatctggaattaaaagtatctgagaagaaacagctttaccctttatgaaacctaggtttttaattgctctgagattttttaattttttttttttttgataatttctcacttaatgaggatattataaaatacaaatttcaattgctttaattgtgaaaagaaagtaaaaaacaataatttgtttccgatggtaactcgatttttcaggcagaggctgc

SEQ ID NO: 105309 - DNA, 471 bp, Mimulus guttatus
  Intron number 1 from transcript mgv1a004365m (locus mgv1a0 04365m.g) derived from phytozome v7.0 (chr-ID scaffold_16; pos 277048 to 277518)
aaaggaaatcagtggtgggggcacctctttgtcaggtctcttttcttcacttatcctctaatttatgtttcagtttaagtgtgtgtatatatatatgtgtgtgtgtgtgtgtatatttttaatatatatatattttttaatttatgagttcttgtatttacagtgttattatgtgtagattgtggagtaactgaaattggctctcatttaatgttaattattgatacagcttggaatacattaatgtaatgaatatctgtcaagtcttaaattattctgaaaaaaaacaagattttcatgccttcaaagttcaaactgttgagataacaaaaaagttatgctatttacaagtgccctttgtacaatcatttatcggaaaaaaaaattagattatcgaaggaatgaaacgaatatatgagacgggattaaaatattttttgatttcgttttctttttaggaaggatattggg

SEQ ID NO: 105310 - DNA, 649 bp, Mimulus guttatus
  Intron number 1 from transcript mgv1a012375m (locus mgv1a0 12317m.g) derived from phytozome v7.0 (chr-ID scaffold_2; pos 3042416 to 3043064)
ggctaggcttgcagagcaggctgagagatacggtaatcttcatcttaatccttttcaatttctgtattttcgtgacgtatatacacttcattttgtcaatttctagagaaatgatggatttatatctttgttctggatcaatttgggggttttacttgtgggttttgttgcggatttgaaaatagttctaggtattgagtaccttaaattcaaataattgttggatctgtttatatttctgctgttcgaatatgagaacgatggatgtttttgtttctcagctatagtaagaagattccaattgcattttcatttggtttgcgtggtgtgctgggttaatttgttcttgattggattaggggtttttttttagggtacaattagggcttttattctttgattggactactttttgattttatggattggatagagtttatgatgctagaatcagttagatctgtacacgagtttcttttattacatatatacatgatttcgagcttcattttataccgaaatatatgaatagacctggatatatatcgaaatacaaggttgcatttcgattaaagaattctgatttttgaaaccgactcggaaaataaatctagtattaagataacgagattgcatttggattacagaa

SEQ ID NO: 105311 - DNA, 801 bp, Mimulus guttatus
  Intron number 1 from transcript mgv1a024145m (locus mgv1a0 24145m.g) derived from phytozome v7.0 (chr-ID scaffold_129 ; pos 370320 to 371120)
gccccgggaagcaatttcgccggtgagaggtttgtagaggcgggattttgaatctgggagaagaagagagagaccgtgagtggctagggttaaaactgattttagaagggtattataggaacttcagggtagcccaggggggtatgtcaaaatattttcgaaatgaggggggtttcacctagagtgtaatccacttggtagttagctatataatttggaaatgagggggggtttacaaaataatcccttttatttattgtgtttgtcgaactctcttttgaattttcttgcattttcatgcaatttttttaaacaaatggaacaaaatattgtgaaaatttccattatatcttaatttggaacaaaatattataaactacgtaatttctgaaatttccgaaattccgccgcattccgaaatcggaatgaatttttgcattccgattttttttggaacaaattggaagcatgtttttacttcagaaaaaaattggaaattttccgaaaaaatcatttccgatcctttccgtccgatttccacccctcctactacccttttggaatttgtgtaaaatttacagattcttttgttaaatgttctgtttgcacaagtttagtttagttacttcaaccacacacatatatatatatatatatatatatatatatatatatatatatatatatatatatataaacatattactctcatgttcctgttagaattaattcttttgttttttcattgaacatttgctagtgacagggatcaaaaaacattcaaactaaagtacgaggact

SEQ ID NO: 105312 - DNA, 645 bp, Mimulus guttatus
  Intron number 1 from transcript mgv1a014477m (locus mgv1a0 14477m.g) derived from phytozome v7.0 (chr-ID scaffold_55; pos 919235 to 919879)
gcacccaagaagaaggtatatgctaaattatgctaataactagaagaatattccattttgtttcttctttccttttttttttagttaatttaacttgatttttgaatattttcatttcagcttggtgttacatacgtgtactactaataagggaattaatcaatattaatttaaaataggaaattttgtgtcagtattttgaaaggtttagtgaattctatgatacggtagaacctcgataaattaataatgtcgtttaaataatagctttttttctggtccgaactcgctaaaaatctactaaattattagttcgataatttaatatttcgctaaattaatagaattttgctagtcagaactatattgattgtaccgttttattatattcaatttttttcaattagttagggagtgttgtatttatgtttttttttttatagttaaagttattttttattgattactacgaaaagaataacttgtgttgaattgaaacaaaaaaaaatgttacattaacccaattaatcaataaataaataatttaattgcattcatatattcttgaattcgagttgcttcgtctgatattttgttgtttgcgtttaaggtgaacaagtacgacgcgggctggaaaaaggagtg

SEQ ID NO: 105313 - DNA, 818 bp, Mimulus guttatus
  Intron number 1 from transcript mgv1a000436m (locus mgv1a0 00436m.g) derived from phytozome v7.0 (chr-ID scaffold_17; pos 1631670 to 1632487 reverse strand)
acgggtacgtttttccttccatgcttcgattctttaccttgtgcatggttcaatcaaaattaatttgatttaattaattttttccctttcttttttgacgtgcaagaaagtctttaaattaggtatttattgttatattgggtttaaccaatcactttaaactgtctactatgaacttaaaagttggcccattttctatattcaattgacaagttctcatttattagttattactatatgaagaaaattagcacccgcaagtttagaacaactttttaaagtcgattgtatgcataaaataaaagtatatttacaattattttattaaaaattataaattttgttaatactattttatattgtaataataaatcgaaaacatatgtataaatttagataaaagaatagagaagaaaataaaagtgggaggagcaaaaacacatatttataaattgattgatttttctttttttttttttgcaggtagtattttgatttatgtgtaacaattaaattgaacttataaaagtaactgctgaatattaatttttccccttgagcgagtcataatgtggaccggccaactgaaccgaaaggcgaaagaaaagcaaaaagtaaactcacggatcacgacatcgttttacatgtattcttcttacagacagttaacaaaacacacaggaaatcattcgggagaaactcattaaaaatttcgagaaccaaaccctaattcgtcgtccgccgtgtggactcttcgttcgaatcggcggagaattatgcaagatcctcgtaaacaccaggtaggtcatttttcctct

SEQ ID NO: 105314 - DNA, 619 bp, Mimulus guttatus
  Intron number 2 from transcript mgv1a007431m (locus mgv1a0 07431m.g) derived from phytozome v7.0 (chr-ID scaffold_233 ; pos 36915 to 37533)
tcattcacctggtaatgcttttttctctttatgcggagctaatcttagcattgagttccatgttattttgtatttgtttacataaccaacatgtcttttatccgaacgattttcccagctttattttctcggtcacacctgatgaaaactattatttatctattattatgtggtgcaagtttgctgtgttttaatctagaatgtttggtgttccatgcttgtgcaaaggcactgaacttctggtcatagcctatgcctgagaaagtttaaatgttgatgccagttagtttttattttcctaaaaagtagcgcttctctatatactgtcaatttgatgggacaaaattaaatcacagatggtccttttttagagtcttttgttggagacagtctggatatattgtcatgtgactgctttataaggtctatcttctcgcagttgacaggtgttctcctgcacttttaccttgtagctattccctttctcgtttcatgttcattgaaattttttgtattgcttccttctttttttgttttttagtttcattgctctgtaatatgctcaaattggagtttatgtataggtcttctcagctttcggttttgtgcacaagattgc

SEQ ID NO: 105315 - DNA, 537 bp, Mimulus guttatus
  Intron number 1 from transcript mgv1a007905m (locus mgv1a0 07905m.g) derived from phytozome v7.0 (chr-ID scaffold_100 ; pos 947318 to 947854)
tccaccccctgttgcatctccggcacaatattcgtgtctcaacaaaaaaaaaaggagaatagctatatagagatcggagagagagagagagagagagagagagagagagatatcgacagaggaggggcagagaaacgaaagagaaaaagaaaaagagaagaagaaaaagaaataaatctgctacaagaaaagaaacgtaatatgtaggtcaaaatatttaaggtataagggcaatatagggataaaaaaataattagggatgtatatcctatattgtttcaaattaaggatttaattaaaagattggattttgacttgttatttagtccaaattaggtttgctttgagggacttatagcatattacccctttctcataagccatgacgtgatttttacattcatacgtcacggaaatcgtcataaaaagcttagctcttggcaataaatacccactttttcctctcccttgttttcataatcattcgatccaaacaacaaagaacaaattcaatttaaatttctctctgcatttctt
